United States Patent Application Publication US 2015/0240253 A1 - sequence listing, part 26

SEQ ID NO: 122138 - DNA, 580 bp, Zea Mays
aaattttatagtgaagaagctatatatgggtacagaaatgttgtatttgtgttatgactatggctggtataatgcatgcagtttctgattcgaaatatgttgttataacttaaaataccttaagctctttgttgtgaattggatccctaggcccctagggccacgagtcagagaaaatatagcgaagagcttacccaggtaaatccactcccagatgacccttgcgcaccgagccagggggtcaggcgagacagaggcaggtggacgggtcggacgaatcgctagggaaccactcgagtgggttccacgcatcctcttgccatatgtaccacgcacgttgcattaacgacgtatgatagcaaaacgcgacacgggtaaaagctagtctggtcccactcatgacccatgggccctagtcctaagccccactcatgatctagaggtcctagacctgagtcctctgcctatgaagccccacaagacgacgaaaggagatcaatggttaggctacaaagactgaaagttagcatgagaagaagcggataggaagagtaatgatgatgctcggacttccgtcgct

SEQ ID NO: 122139 - DNA, 937 bp, Zea Mays
cttggaacctgaataggaagccctgtccaaggtcttctagaatcagttttctgaagccacagtcatctcatccgaagggcccatccaagctctgggaggcttgatattcccagacctccaagctgaagaggacgacataccttgccccaagccaccaaacagtgcccccctctagcttccttttttcctctccaaagaaagccctttcttattttatcaatagcatctagggcccaatggggtatatcaattgccattgcaagatacacagtcatacctgtaagaacatgttgcactagaattctcctacctgctctggtcatcaaatcagctttccaattagggagttggtcagcaaatctttcaacatatggctgaaactgctgcttggacagcttgtgcaaggatagaggaagacccaagtacttgcaaggaaaagctgcagtttcacaaggtagcaaactttggacttccaatagagtttcctttgagcactgtatggggtagacattagatttttgcgcattattttttagaccagaagcactgccaaagagctgcaatatatctaaagtaatggagatttcatcagtcgtagggtgtaagaaaagggctacatcgtctgcataaatggagaccctatgtagctctcttctgctagctgttgtagtaaacctgcctcctctgccttcgaaaaaagatagccaaggacatccatgaccaatatgaataacatcggggaaaggggatccccatgtctaagccctcttctatgctgaatttgttctccaggaaacccatttagcataccttgtgtagtggaggaagcaaggagaccacaaaccatgtctctccagatctgtccaaacccaagttgttgcatgacttcaattaaaaagggccaggagactgagtcaaaggccttggtgatatcaag

SEQ ID NO: 122140 - DNA, 1225 bp, Zea Mays
gaaaatttagaaaatttgtccaccactacgaggatgcaattgaatttaccagagcgaggcaacccttcaataaaatcaagggagagcacctgccacgcatgagagggaaccggtaggggttgtaaaagtccaggatagcgaacccgatccggcttagactgagcacaaactgtacaggaacgtacataatcatggactgctgacttcatggtaggccatgcaaagagctgtttcacacggcgataggtaactgggaaacccgaatgaccgcccactgcgctatcatgcagagaagagataacctgattgtgcaaggcagtattggaaccgagccaaatgcgacccttgtattttataagcccatcctgtaactggtaaggtccatcaggagtagcagtagctgccagttcagtgagtagtttcatagctttagggtcctgggtataaccggtcacaacatcagacaaccattgaggtgtgctcactggtatcgccgcaagagtaagatgatggggacgtctggacagagcgtctaccgcaccattgtctacgcctttcttgtatacaatctggtattgtagccccaaaagtttagtaaaaactttttgttgccacggggtcttcagacgttgttcagtgaggtgggacaagctccgttggtctgagtaaattacaaaaggtcgatgcggaagataggggcgccaatgatcgacggccaacagtatcgctaggtactccttttcataagcggataatcccatgttcttaatgctgagaggtttgcttatataggccaatgggtggtgatcttgaatgagcacaactccaatgccaccactagaggcatccgtctcaatggcgaaatgcttggagaagttgggtattgccaagacaagagccgtggataacgctgtcttcagcagagcaaacactatttgttgctcatctgtccaaacaaacactgcacctttcttaagcaactgagtgagtggcttggcgataaccccaaaattcttaacaaattttcgataatagctcgccaatccgaggaacccacgcagatccttgatgttgtggggcgggggccaggaagagatagctacaatttttgcggggtcagtagcgacccccgccttgctgatgacgtgacccaggtaagcgatctcttgctgagcaaaggaacatttagttaccttcacttgccattggtccttacgaagcaact

SEQ ID NO: 122141 - DNA, 533 bp, Zea Mays
ttagctacacaaaaaatctagtcttccttcaaaattttctcagcagcttcgttcagaagtttgttgacagcttcgtcaacagcttcttcaacaattcttatagtttctagcgccgccttcatgtcttgatcagcttcgggatcatatggctcaggtggcggtgaaagttcagctacaacaaaagtaataagttgttaatccaaagctaggaaaaaatactgacgctatgaaataattaaagtacctatgcgccttgcgcgctcgacagcctctttggcccgcttggcttcctcttgggcttcatgagtttctttctcattcttctttatagcttcgtcagccagttcttggccgcatttcatccaaacgttggagtaaaatttcccgcccatcagagtcgcctcagccgaaggatccttcgtgttctccacagtgaaaatagtctctgtctgggttgcagctttaacatgttcacaactagatttttccaaaattgctgcaacccctctggcactggcaaaggcgcaaaaatc

SEQ ID NO: 122142 - DNA, 518 bp, Zea Mays
gcccaaacccgacctgatataacgggtcgtgccggcccggcactaaattatttcgggtcgtgccgtatctgcgtcgtgctttttttccgtgcttcgggctgggccatcagacccagcccaaatatacacctatagttcataccaattaactaccgttgacatcaacaatgcaagggaggccgtagcggtagtgtcttcacgtgtcttcaggttctttcttccttcctaacgaggcttgcactagacgggagttccgagacaccgtttcattgagagcaggcagtgcttcaattgtttggtacgtcatttccaatttactgtaatgtggctgtagtttagtggtgagaattccacgttgtggccgtggagacctgggctcgaatcccagcagccacatagttttttgtttgtctttatttataacttcaccatgtcatctcacacattttttttattgtttgtctatatttataacttccccatgccatctctatcgatatatgctggatggataattt

SEQ ID NO: 122143 - DNA, 535 bp, Zea Mays
gcaagatatgttactttgattgccatagatgttttctacccttcaatcaccccttcagaaggcagagaaagaaatttagtaagggcaccatcatcataaagggaccgcccaagcgacatagtgggataaaaatacagaagagcataggaaacttgtcctagaggagagtgggaaaaggtatcaagattttggtgaggagcataactggactcacatatgtggcttgtgggagcttccttatgctaagtcattgattttgatgcacaacatcaacatcatgcatcaagagagtaacttttgccaagccctcataaatacatgcatggatttccctgataaaatgaaagacaatgacaaggcacacatggacttaacagtgatatgtgatcgtccaacccatgtgcttagagaaaacggaggcaaaccaaaagctgactattgtctgaaacctaagcaacgaaaagaagttatgaagtggatgaaggatattaaattccccgatggttatgctgctagttttagatgatctgtgaac

SEQ ID NO: 122144 - DNA, 764 bp, Zea Mays
cttaacgcaactaactcttacttaacaagagttggccaacacagtataaaacttagcaaactatttttgacatcgcaactcaaaaacataggttggaacatattaatcagtgtttcttaaccattgctcaacttgaattagttaacacacaagtcacctaaaataacacattttagggggtctaacatagaggtattaacacatggcataaaactccataagactacatttgctactgaaggacctaaagctctcgtgtgcatatcttgtcggtttgttcctcaattttaacaaggaccgacttatgaacgctactcacctctaataattattgggctgcgatcactctcatataagacctctaatcaatcaacaagatatttatttatccaatggaaatggaattgaatacttgaccaagcaaggcatcgatccgccatacaacagaaagcatgacgacaccgatagatgctatcaactaatcatttaaaaaaatactaaacttacttctctctttgccactacaccaccctttagtcacatgaccatcatgcacatccttcacacgattatataatagcaacctaaacgtcgtgttacacaatacatacatctttcctcgtcgcgagtataaccatattacgacatatacccgcacacctcaatcaaatatcttacgccaccaccactataatacaccatggcacacacgcacatacgtgtccccatattacgcacaagacatcaaccgcacaagtgactcc

SEQ ID NO: 122145 - DNA, 288 bp, Zea Mays
ctcatcatcactatcaaccatttcatagtcaacaccatctgaaggtgcaagttcgtcattaatgtcattgccttcaaggattactaagtcgttatcattttgcacctcatcctcctcctcatcaacaaccatttcaatatctacttccattccgatagcttcggttaagtctatcgcaaatagaccttctagcccatcttcttggaagaactctccatcatatgtgtccgggtctaagttataatcttcatcattaggaacaggtaatctaccatgcggcgatacctt

SEQ ID NO: 122146 - DNA, 365 bp, Zea Mays
caaaaactcgtcaatttaggctgctgacatcgcggtacacttgtcttgacagcgatcattacgtgcgtagacttaactgtgagtgacttctgccacatgagtagagctagactgttcttggtgtttgccttgaccatttcccttcttggtgattgattataccagccaattcaaacacagtatgtcaccgacaccgagccggcatggactaaaaccgaacgccgagttgatgatggcggcgggaattcggttctgatgacatcgtcctttgatcgttctcgccttcatgctgactttgcataattgtgctgtcgtttcctcagcagggattatcaccgctgctcaggcaattccattggtcccac

SEQ ID NO: 122147 - DNA, 870 bp, Zea Mays
cttcaattttcgagggtttttcctcagtaggctctaaaggcccagcttcggcactagcctggctcgctgtagcttcaacttcggccggttttgtttcagcttcgctttgcaatttcgaagtctcggcgattttccctgaaggagtagaccttaaagtcgtcactgtttctaacacatctagtacatttaccatcctttttcttttcggggttaccacaagactttcttgtgcctttggcactatcacttccgccgaagggcttaaaatttctagtttttttgtttcttcgatttttggctcttcagttttacctttattagcctgcgactcaactagctccgttgagggcgcctttggcatggtagccggctcttcaatcttctgcatgggaggagcaggttctttcgcttcagtaactgaaaaagtttccccgccaaactcaggcactatggctggtgcaatgtagcgcggtcggtgggtaaggaccttcaactttttcctcttcggcgcaggctcgcttggagcagccaaagcagtagcctttctagaagttgcaccctttcttttctgcccccgtggtgggtagcgatagtcagggtacacaaatccaatagcatcaaaaaccctattcaatcttttctttttttggctctcgaaggccgcagatagttcattatcttcagacttcgaatatgctccaagtaactcatcactagtattttcaacacacttcagccagtcatcatctggttcgacaaactgatctccaaacctaaaggtgtatttcaatcgaaccagaccaccttcgctagggttagtgatggtttcttttggcatttccaagctgtctatcagtggccatatcctgt

SEQ ID NO: 122148 - DNA, 470 bp, Zea Mays
cggagctcatggcgtgctcaatttatagagtccgtgagcggtgttgcttaatttggacgaattgcgctggcggccgagagaggaatgagtcacggcggcgatctaccgtggcaaccgcatagcgactgaactacgacggtcattggatggtcacttcgactcatactgacgcgataaacctcctaaggcgtggcgtccacccggtgaacggcgaacatggcgatgattgctgctcggccacgtcgtcggtgtgcactgatgaaccatcaagcacatagtatattccagcccatccgcggcgagatctttcaccccgtgatcgttatccgcgtttaattcagcgtgaatcacgacgatagcacgaatccgcgcgtgtggtcaccgtcggcgaggtctctgagctggcgatccaatccggttactgtaccatcgtgaagcttcatcagtcagtctgacagaccatgtttggg

SEQ ID NO: 122149 - DNA, 403 bp, Zea Mays
gaagaacaagttcgtatgatccgggagaacttgagggtagcataaacttggcagaagagctatgttgataatcgaagaagaccactggaattcgaagagggtgaccacgtgtacctcaaggtatcaccaattcgtgggatgagaagattcagagttaaaggcaagttatcccctcgctttattggacccttcagaatctttaggcgagttggggagatggcctaccagcttgaactaccaaatcatctgtctgatgtacatgatgtattccatgtgtctcaactcaagaagtgtctctatgtccccgaggaacaattaccaatggaagaactcagtgtgcaaggtaatctaacttacacggagtatcctatcaagatcattgacactttgacttgggttacaa

SEQ ID NO: 122150 - DNA, 949 bp, Zea Mays
cgctggcatggcatgtcctgtgtgatttgaacaaggttcggtgctacctaatagctgacaactttttagaatgactactaacaggacaatgcaataatgtcatgtctagtgtgaccaaattctaagaagaattggtagtggacttcaaacaactatataagctttgggagcctataagtatgacaccaactagttgatacatgatccatgagctaagtaacaaagcctacaggctagagaaacacctccaagtgatccaagtgccccaagtggctcaaatgtagtagtgagcttagtgatagccatgctttatgagaaaagtggttgagcacttgtgttaagctaaagcgtggagtgtgttgtgatcattgtgatttggagttaaatgtccattgagagtatgaagcggccaagagcctccaagttgtgtacaaccttgcagagactccatctcaccattgagcaacgagaaatgaactcaagtttgatctttgtgaccacttgagtgaggaaacgattgaaagtgacttggtccttagtggactccacaatagagacatatgtttctttgtaaaactcaacttcactaaaacaaatcgttgtgtctctttgtgattttattctttgatttgctttgccctttcctctctaagttctacttgcactaatcttcgtttacatcctacattgtcactaaagttcatcccgcacttatatttgttagcaacatatcacaagtattgaaattatacttactcctatctaatcccccgtgttctaacatttaaagttataattctcggattatattttgttgtttgagttaaaattttaggtttcacctattcaccccctgtaggagactttcaattagtatcagtgcctgacactttattttgggtataacaacctgaagtggtgtcaagggaacaatccgagaagaataaga

SEQ ID NO: 122151 - DNA, 432 bp, Zea Mays
caaaagctgcccattagggggttgcactttcaaccatataaaccatgcttgctcttccacaatacacaatgttggactattcccaacaaggtgctcatctctagagtgctgttgttgttgaaagataggcgacaaaggggggggggagagcagagatcgaagaagagtgaagagaatggaaatggagttggagctgccgtccaagcctctgagaagcagaagatgcgacctagacagggaacttgaacagactgctaattaagtcactgggctactaattaatattggctctagggcctaaaacaattattgaactaccctgagcgtatttaagtctatcgtctgatcgctagctaggacgatgaatcgctctatatcgcgattaggcggacgataaggacgatcaggtccactgatcgaatcgacacctct

SEQ ID NO: 122152 - DNA, 523 bp, Zea Mays
gcttggcaagatgaagaggaatgccatcacccagggccaggggagcagcaacattcgtccttgctatgctccaccccaaggtacacctgctcgtcctggaggagggcagtagtctcaccagcgccctattcagcagacacctcaggccacaccttagactccccatcctcgtcaggctgccccagctggcaccccggtgagacctcctagccagaacactgctactggcactacctacttcaagtgcggtgaggttgggcactacaccaatgtctgtcctaagaggaaccccaacactccagctcgaggcagtaatcagggcaagcacactaagactccatcgagcaaccatggatataatattgctagggttaatcaaatcagtgttgaagctactgctgatggttctaacatcgtcattggtatgttcttcattaattccatgccagcgtctatacttttttattctaaagcttcacattcattcatatctgctcgctatgttaatgcaaatagtctacct

SEQ ID NO: 122153 - DNA, 372 bp, Zea Mays
gaatgatgagaacataacctgctcagatatgtccatgttaatggctcctgctgcgaaggtgaaactcttccatattgtgactaccttcgatatattcaaagaattgatattgcgccataaagtgtgtatacttttatttgtataacttcttacatggatcaagcgatgtgttaagtgtacaaggaaggcattgaggaacaaagaagttgattggggaccaagtaatgatatttctaacatccccaatcaggcaaccacatcatcagatttgaccacatacttgggtgaggagtacacgctaaagtcgaggacgactctattgcaagaaggggggatgatggacatccctgccattgatacaaccacaccaat

SEQ ID NO: 122154 - DNA, 632 bp, Zea Mays
aaacaccacacgtgaccctcatcccctacccgagcaaggaccgcttgcatctaaggtcgagctccataaaaattgcatgcattcttgtgcttccatacttcctaggtgatgagtatgactagagaattgaacccttttcgtagttcaatgggggagggaggcgatggccttgcaccaccaggcaccaacccgtcgcaaagaattacccactgggaccatatcaagcctgagcttcctcaagatcaatgcccacactctcatggtgagaacacaagaggagacgatatggtggatagactcttcctggtcgcagaaggggcaagccaattggtgaggcagaccacgcttagccaaacgatctaaggtccaacaccggttgttaatggccaaccacataaagaacttgcagttagaaggagcccaagtcttctagacccattttcagtgggtgaacatgatccctatgaacatagagctatacgtcgacttgcagctatataggaacctgatgatgaaaacttccagagatgctgattcggaatgtcaggttgcagaatcacactatcaactaagtcctagataagcaaatattccgatatgacatgtactgttaatgcccctttgatgtccgc

SEQ ID NO: 122155 - DNA, 385 bp, Zea Mays
tccaccccaatagtagctcccccgagggaatggttcatcctgatgggccaatcccgaaatatctatttgaaggggacgaaaactgccctcgatcatctggtgattcaccttgtgagggcccgctggatgtgaccgttgtgaaaatctatggtggtactatttgttatggggtttggctataaatcctggattttgcggtccttgtgttggactgctaccgtgtcactttccataacacggtagatcacacttttcgtctactactacttcactttcattgtcgctgctgcgttactggtcgtgacaacgacaccgaactcctccatgctagcacgcttgaagcctgtcggtcgccaccgtccatagtacgttgtcatgcctcctc

SEQ ID NO: 122156 - DNA, 272 bp, Zea Mays
gttccagctgatgtctcatcctggcttaaagagcgctctctcatgcaggctgtggcccgacaacacttgctccgcgcccaacaacgcatgaagaagcaggccgacaaatcacgctctgaacgccaattcgctgtgggcgacctcgtttatctcaagctccaaccatacattcaatcctcactgtccaaccgttcatctcagaagctgtccttcaagttcttcggaccatttaccatcacagaccgcatcggttctgttgcttacagattggc

SEQ ID NO: 122157 - DNA, 722 bp, Zea Mays
gcaatttataagatacgtcccccactagctgtgtaaccttgtagggcccaaagaaacgaggtcccaacttggatgtagatgctggtgtcacgcccacgactgacctttgctgtaaccggagccacacccaatccccaacctggaatttcacctcccgccgagtctggtcttggtactgcttcattgtgacttgggcctggaccagcctctccttgatttctgctaagaactcatcccggtcgcgaagctggtcatccaccgcagctactcgcgctttacccggctggtaaggtagtaatggcggggggtcacgcccatagactacctggaagggtgaacacttgatggcagtttgatatgaagaattatagctgtactccgcccatggcagccactggagccaagtcttcggcctatcacctgctaagcaacgcaggtacattaatatcactccgtttgtgacctccgattgaccatctgtttgtgggtgaaatgcggaactcatctgcagctttactcctgccatccgaaacaattctgtccaaaagttgctggtaaataccacatctcggtcactcactatcgaacagggcaggccatgtaacctgacaatatcgtcaaaaaatgctcgtgctactgaagctgctgaataagggtgacccaggggaatgaagtgagcaaatttggagaaacgatcaaccactgtgaggataaccgattta

SEQ ID NO: 122158 - DNA, 737 bp, Zea Mays
cgatgaataaaataagatttggatggtatgctggagttactctttgtgcatttaaactacaagttcaaattccaactcagtttggaaaatgatttgagatttgaaattgagaatttaaaatataaaagaaatttaaaaaagaagaaggtagcttaccgaatgggcttgggcgcggcacttgtcttctcttctctctctgtggctatgcgttggtgacgttgcgggatgtttccaggcagattgccctgcccctaatttgtcaatgacttgattcccatcatctcggccgacctgcaacagctattagttaggctaacaacaaggataataccactacaacaaataatactgacaaaactaatgggaccaaaatttctgaaacatggtagcggtagcgggagaaatagaaactatataatttacaaaaccagaacgaactgtatctgtatatctatctagaaattaggaaggcaccaagtttattcaagtttctacaggtaagaactaatggagtagcagttacattagcatatgatgcaagcacaatgacttggtaaataaataaactaaccaaacaaaaatcgaaacacaagcccgtcggcctagtagaggagtatctaaagcatggcactggtactatactgaaggactactccagtttataacgaagaaatgtgtggatgagagatggtggacggaagcaacaaatcaggacaaggaccctaggtgctccgggc

SEQ ID NO: 122159 - DNA, 425 bp, Zea Mays
ggaagtttgtgagataaagtagaccaaactgggagctgtgcaatgggacactgatgtcagggaagttgattcagtgtttgggataggaaattgaggaagatttttctccctttcctgtgctccactggtgtgctcgagttgggatacgggtggggtgcaaaaccaaggatctagtgacttcagctctgcttcaaaatatctagttttggattgtttgggagatgtggacaaaagagatcatatctgttttgtctactatctgcagatatctactacctgcagatttggaccaagtgatatttgtgtgttgggggcattaaagtttctttgctggttatttgaggtaataaaaaggggagctgaacttgaggtttcagtcgagtagaacagcaggagcagttttagaataatctgatgaaagtatc

SEQ ID NO: 122160 - DNA, 498 bp, Zea Mays
taattgtagcagattacaagacacattcgacagaacaaaatcgctgtggatcttttggctaaactgctgactacctaaagaggaaaactaggagctcaaaaaaatgctagccaaagagatgctgaactaaccagccctatgcctctatttatagaggttatttccattcctatactaccctatttacatagagtctatccactctgccatggaaaaatagactaactcctaggttttcgatctgacggccatgcgctccacacgaacttgataagccttgatgcaccctttgttgtgatgccacgtgctgccaccgattccctctggaaccgtcgtcgccgagttttgaggtccaaactcggcaaaactcgccattcgtagcacatggtgatttttcaaggctcaacaaccaaaccgccgtgagtatcgcaccgcgtgtgcatcccccacgtcctggacacatgtcccgctagtcctcgaccaacccgtcaacacggc

SEQ ID NO: 122161 - DNA, 580 bp, Zea Mays
caaaattgggcgccaccgctgatgaactctataaattgatgccctagtgagctctgctaggttattacgcatccaaagcaccagctcttgcctcttatcgttcaccagagcctcccaaattcttacttgccccaaatcggtcggaacgccaccgtgagacatctcgccgtggccagtcatctacgggttagttcatgcccttctctgtgatgttctagcctcccttaggtctcctgttgctcgaagacccttttgattgaactagaccgcattaaatcgcctagaacaccatgatttgtcttcgatatttgttgccgccgtggacagacgaactccgagctggactagtggaattagttgagggattagtgtcgctaagggtggaattaggtgttggccaagttagggcgttggtcattgagtgtctcggccggtacaggttcaccggaaggcgtgctcaccggcgatcaccatcggggacctgacgtttcaaagaaatagaactccgagggcctaactttgaatgtcagagacacaagtaaatagtgaaaagggttcttaaccagtgattcaaacagcc

SEQ ID NO: 122162 - DNA, 342 bp, Zea Mays
aattgagaccgtgactagctccgtgaggtcgtcagctaactagccaccgctaatcagccacaatcatccaccagtgagctcgaattcgcgttttcccccaaatctctttccgccaccgtgaaacaagcttcaccgtcgtcagccctttttccggtcagtccaaccctccctttgcttcgtttaagcttctccccgtgtctgtgatgcttaccgaaccgtccaattgagctagaagtcccctgaccgtcgggaacacatggatctttggtccatccacgcgctctccgtggccagaccaaattaatccaccaattatgcaattaacttaggggaatcgttgac

SEQ ID NO: 122163 - DNA, 531 bp, Zea Mays
agcttctttaacttcttatcgtaatctatcttcagggttcggtaggcttcacgagtgttggcctcttcaccttctgctattttgagactttcttggagggacgccttctcctttttaagttccttgacctgttgctctaagctttccacccaggagtttaggtgggtgcagtgggagaaaaggtcatcatagtggttatcaagtgtgtggagatatccggtcatgtagactatggtggggtcatcttcagtaggatctcttcctgacagggcttggagtcttttcctctaggtaggagtgtttttgtagctaggtggaaagtaacgaaggggtgtctcaaagacttccctgctgtagttttggcatagctgtcagagggcttttcgggcaacattttggcaagtgtctaggaagcggtgtccagtgaaggtgacttggaaaggagggtggtttgggtagtttcggctttctcccaggtagactgccatagagcatctttcagttccattctcgcggtattctttccagata

SEQ ID NO: 122164 - DNA, 429 bp, Zea Mays
aaagcactagggccataccccaaggttttgcctttttgccctagcttcaaaacttcttcttcattcacctctttgccactaatatgtcttgtgaagaagcctaactcctcatcctccctggtggtttgcgtagcttcgaccacctatgcttggaggcatagtttcttggtcctttgttccaccttctcccgccctgaagaaccgccacctttggcaccattcttaccaaaagaggatgaaccgccgaaggcgacactgctaggccccacaatatgtgggctctccacttcttcatcagagccctttgaggtcggcataaaccgagtcaatgaatgtactaagggactcaatggggaaaatggtagaggttgagtcattacctcaagaatccgggtgcagttcaatgacgaagttatcgttgttctcccc

SEQ ID NO: 122165 - DNA, 432 bp, Zea Mays
ccgcgccaaggctcttcctcatctccgcccgcccacgctgtccgctcaaattaagagccaccgccccgaggatctataaattgaccctgcagagagcttcacaacaccatcacccacctagccaccacgtattgctcgcaactgttcgcccaagcccgcgaattttgaattcgccccaaacccattctccgccacccgaaacccaatctcaccgcggccagctctttctaggttaattcattgctccctctcccttgtttgagcactctggttactctgtgatgctcgccgagcctccaatttaaactaggagaccaccagtcgctgggaacacgacgatctagccaccatgctctcggtcaccgtggccagagctccgtagttggtcttagatgcaattaggttgggggaaatgatcaaggtagccccaat

SEQ ID NO: 122166 - DNA, 423 bp, Zea Mays
ctttactgtatcctcttgtcacagctgacagtggtttggtttctgtgccaccaattcatccctaggatgacatctaacccttgagtacccattactactaggttagcgggaaaatctatcccccttatttcaatccttagactagagcacatcttatcggactgaacttttcccccaactgaattaactcttaaaggtgggatcattggttctatggggatgttatgtgcttctacccatgatgtagaaacaaaagaatacgtggcaccagtatcaaatagtacttttgctggatgggattcaactggaaacgtacctacttccacatctggtgcatcctagattgcttcagcctccaagtggttcacctttccacagttgtaggcctggccacggcctcctggtgcttgttgtggtgctcct

SEQ ID NO: 122167 - DNA, 469 bp, Zea Mays
tcggtaagggatcgtatggcacagtttacagggcgaagcttcgtcatacagtagcagctgtcaaagtactgaactcccctgaaggctgtggaactcagcaactacagcaggaggtattccattttgtttaacaaagtgagaatccgatgtttctatcgcacaatttatgaacattcttttaatgcaacaagtttatgaacaaatttactttcttgaagcagtcactgttttgtatgttaattagtgtccgcatcgtttacgctgtgctcatcaccattcatgttgtttcagctcgaggtcctcggcaaaatccggcaccctcacctgctgatgatgctgggagcatgccctgaacacggctgcctggtctacgagtacatggaaaacggcagcctagacgacatgctgcaacgaaggaagcagaactcgtcgccgctggcctggttcgaccggttcagggtggcctggg

SEQ ID NO: 122168 - DNA, 407 bp, Zea Mays
aaaagacttctcgacgataaaaagggcaaatgggtcgaccaactaccggaagtggtatgggccctaaacactacagaatgccgggcaaccgggttcacacctttccacctattgtatggatccgaggccatgacgccgcaggagataaagcatggatcgcccaggacaaacacatcagcaatccccgatgtcgacgaaccaacttccaaagatctcatcgacggagaccgcgtcctcgccctgcaggctctcgacagatatcatgcccaaaccaaggcctggcgtgacaacgcaatcgtcccaagggaattcaataaaggagaccttgtactcatccggaccacccagacagaatcatggggcaagctggagccgaaatgggaaggtccattcattgtcaagacgaa

SEQ ID NO: 122169 - DNA, 495 bp, Zea Mays
caaggatgagggtaggtgatgcatggtgcaagagatgcatgatgcttatgggtgcatgcagtttgcaacattttttacgatttactttttagtggttagccacaaactggttctacaagatagtctacatcgtccaagaacatgtagcttgtcttttcttggtcggtccagattatcattttaagaaatcatacaacccatcaccatctccacatcaaggtagtcctacctagcagggtatctaccctcaagcaagtccttacttactaaacatggtatacttttattcctttacataactacttactttcctatacttgttggagggtatatatatattactcctaggcattctacacaaacatcacacacagtcaatacatcatacacactgaagaatttatcactacttaggaagacagacttattacacacctaataatattcacttatggctatcaaccttatattaaccacaacaaagctagaatcact

SEQ ID NO: 122170 - DNA, 327 bp, Zea Mays
ccaaccaagagatcctggagcgactccgagccatagaacgctgcagtgatgagagggccacaatgcgaccatcaagctggtccaccaaccaattttctaacaccgacaaggatctgaaatcttgagcagactgcaacttatgcataatctcccttgccatcccaagttgagaggtaatatgtcccgtccttttttgagaccagctctgaagatgtttgaccgtggctctgaattttttggagagggtgacaaaaggacaaggggaggaggaaacagagttccaagcggcctccaccgtcgatagaaaatcaggtgcctttgtccaat

SEQ ID NO: 122171 - DNA, 403 bp, Zea Mays
ggtgggaggtgcccgagagcccgatgcacgagatgccctaggtgtcaagacacaggtgccctaggtattaatgcataagatgccctagggaccaatgtgtgaggtgccctaggagttgggatagtaggtgccctgagggataatacatgaggtgtcctagggttcaaggtaccagaagatgccctagagtgcaaaagtgcatgtaggttatatcattgacagggatgtcctcacatcctcccattcttgcatgtgagtcgtccttgactcaagcccgtcctcattctcgataaatatcacaatctaaaatattaaacatggggatgctccaaaatccgtaggcaactcaagtttatatgcattatcattaatcctctctaagactttgaaaggcccattagcc

SEQ ID NO: 122172 - DNA, 740 bp, Zea Mays
ctccatcatacttggtcaagtagtctattccgagtatcacatcgattccacttgattccaaaattatcaactctactagaaagcttaggcctctaatttcaatcttagtctcaggacatgagtgagtggctctaagttcacctcctggtgatcaaattaatagtttcttcttcatgggatagtttggtatattatgtttttccacgaatgactttgttacgaaggagtgagatgctccagaatcaaataaaactgatgcaggtatgtagttaataagaaatataccatacaccacgtcggcgtcctcaggaactgattccgctgtcacatgattgactcttcctctactctggttctacggagtcttgttctgtgcagatccatgagtaggtgtgttctggtcagtcctctagttgctgttcttttggggtgtctgttggttatgccttgggcagttgttagcatagtggccaagttcgccacacttgaaacagcgattaggttgaactggggtagttgtgttgttgttcttggccggtgtgttcacggtgcttccatgatgattctgttgttggacactagacctttgaccggtctgagtgctgcttcgctattggttctggtattggttgctcctctgaccttgttgtccagagcgctatgcttgatagttgttgttcccactatgttttctagagcggaactgagaacctttggagttgttttgatgggtgttcctg

SEQ ID NO: 122173 - DNA, 961 bp, Zea Mays
tgaggctactgagacaactccaatttcagaagttatgaagcgctatgggttggttgtccaaaaggaagaaggaccttttcttaagaaggatagtgctaatgccgaagctgaaaacattattgccgaagctggaagtgatgacgaagaagacgatggcatcttgagtccaagcaagcccagtcatgttgaatttgggaaatccactgtgaaagtagaagacttagttctaatgaagaagtttgagtattttggtaaaatgacaatgaactgataatatttgctggagacgaagtgattctagagccgaaggatgatgaagtaatagttttcaaaagcttcttctgggtaaggcttcggttccctttatacgaaatgattggcaaagttttaaaaaagtttgaaatttatcttcatcagctgactccaaatgccatagtcagacttagtgtgtacatctgggctttgcggagtcaaggaaaaagtgtcaatgccgaagaattctgtagagtccatgaactgcactaccagaccaaggcaagagcagatggtctgcacaaaaactttggatgctacaactttacataccgaaatgacatgaaggctcctgtgattgggtaccacaccaagtggcctactggctggaccaacgattagttttatgtaaaggctgacaggaagaaaagggagaaactcatgagtacggtaatgtgtcccttgaagttaagcttcggcatgacaaggccattgtgcaacatgcaactcggctccccatgccagttagctgaagcagaatccagagttgtggccaagcacatcagtactcgggacttagtgcaagaatacctagccaacaaaacttttcccacatcaggtgggtggggaatgccgaagagaaaagatgaagggaaaaaatttgaacttgtaaaactgccataccgttttaaattacaaaaagccttca

SEQ ID NO: 122174 - DNA, 799 bp, Zea Mays
actaccaccctttgtgtgagtcatgaaaaataaggcatccaaacttggaggtttgttatccttaccgccctagtatatgcatggaacaaatgtaatcaaaactaacaagtaatacaagaaaactaatcaacatgttgagataaaatgacaaatacttacattgtcataagttacttttctaaatggtttgctgccactgtgatggaggattgtcaagttagatctattttttgaatttctcttgctccttgcctagaatgcaatgaataattagattactatacatgttaacaacatcatctgagcagtaaaaattaagaactgtaatgggcagcatcatagcacttacaatgaactccttactatagaaatgttctttaaccaaccactcccacttagcttctagaaaatcttcagggcagttcttaatagcttgttgcatattctttgctggcttgacatagtgctgacaaaagtcaccacgccaattgttccatagatccctagcatgctccatgatatcattatcatagacaacaattttaatgttttcatctatgttttcaaacttgtcctaaaaaattgttaaacagatgccccatataaatgtaccatcttcaaggatacatatacatatataaaagataacacaacaatataatgaaagtataccatatataaaagataatacaacaatataatgaaagtataccttgattgcagcaaaaatatgcatcatagatgtctcggtaatgtctgtccatttcttcaccctcaccggggtaatagtaggatcaca

SEQ ID NO: 122175 - DNA, 696 bp, Zea Mays
tacacccttgtgacagacaaacagggacgtatctgttttggcctcaatgaaatcgagttgcagaaggtgagaagtgaatctgttgtaccatgcacggggggcttgcttgagtccataaagagagcggttgaggcggcatacataatctggatgagtggagtcttcgaaactagtggagtgagcacagatgacaatttcagacaatgtgtcgtgaagaaaagcattattgacatccaactgatgaataggtcatccgcgtgaaagagccaatgagagcattgtccaactgtagcaggtttgaccatgggactaaaagtctcaaagaagtcgatgccagggcattgagtgaacccgcgaaggacccatcgtgccttataccgctcaagagagccatcggtgttgaacttatgcttgaatatccatttgcctgtcacaacattggagtgaggtggccgaggaacgagatcccaagtgttgtttccaactagagctgcatactcctgttccatagcagcgcaccaatggggatcggccagggcagcacgatagctgcgaggaattggagacaatgctgaagtttcaaacagagctaggaaccaaaggccacgcttgccccgggtggtcatacggtggtggttgaccacagggggcacaacaacagcgccggtagggacagttggagtagctcctggagca

SEQ ID NO: 122176 - DNA, 2619 bp, Zea Mays
gtccgccgcaggaacccgtgtgtagcgagggacgtccaaaggccggcgcaagctcaaccacacacgagtaccacttcagcgcgacggcaacagcaaaggcgcaggtaaaaaaatcaatattttagctcatgaggtctgctcgggccttcggtttctgaagccttttctgcttaaggccctctcagatcgttcttgctacgcgcgaggtcggctttagctctactgtcgctgtcctaggaccttgttatctccaacctccttgttttgcgcactccggatgctgttactgcgcctgcatggaagccgtgaccgcctatatttcatgtcgcgaaaaatgcgggctttacctggatccttgcagaaacgagtgggcaacgctgtcacagttaacacagcagccttgctggcatatacacatgcatggaagtttagtcgtagtctgccttatttggtaattgacgttgcgttgttatttttacacatgtagtctgggaatggtttcgttagaggtacaggttgtattcattcattcctcccctttgttgcggtgccggccgtatggctcgtttatatatgctgtcttctattccatcaaacgaaataaggtctatattcaatcaagcatgctagttccttattcctgtgtgcgttctctatcagcgtactagctatctctttctgcagtctcgacgaaacaagatgagtcatgtaatgcttgctgtttttttttcaggtctgttcaaggtgtgtttggttcggttccaagatcactagactgaagtgacaaagttgtgttgcacgctgtgcttctaacaaatggaagcagctgctcttgctcgtagaactagagcagtggaagaactacggcgtttatctacagttgctgaatctgatgacacaccagaacagcgcctatctacagttgctaaatctgatggcatgccagcagaagagcaggaatgcgatcacttctccctgaggtaaccattttctatattcagtagatgcctgtattttttcattgactgtcattcaaacgatgcatttctatctaccagtgtagctagcactgtttagtgggtactgtttgagcatggttaattaaccatacttattatacagtcatttgttgtatgcaagcgtgatacattggcactattgtgacaacaattgatcaacgtccaggtgagcttggtttatcatcttgctgtcctatacagccatatgttgtctgcaagcatgatacatgcatgttgcatgtaagaagtgagatagtcaactagatcaggatggcatgttcaatttttgtattgttttttagattttttgaataatttgataaagtgtccagacagtccagatttaatattatatattccctctgttagcctttccatttggtaataattacaataaatcctttattctccttatttatggttaatatgccatctagctgttgtctcactaatatatttctcccactaaagtgcaagtcacttttttcacagaaagtttcaatcacaagcaactggatttgcatatattgtttcttcctttgatggatagtatagatctggcatgatggtctagtatatttatgctccacacaactactttttgtagttgacattagtattgtcctcaaaggagcccatacttcaaataatgttacatatataactttgtatttattgaaatggttcagtttggtctctatactttaaacttggtcattgaacccatggtttcaaacgcgaggcgacgagtgctgggtccacctggatgcctaggtggcaaggccgccactgttcaccatggcgatatgggtatgcctgaatgaccaggcaacacctatgaatcgtgggttgaacccataaccttccgataactatctttatctctcaatttgaaaatttctgaggttatagttgatgattttagccatatatagttcttcctttctgtttaataccagttaagtagaaatgaacgaatggtgtaaatgtttctttctttgtttgtttgtttattacacattcataaagtgagaggacaaaatgagatccatgagtgaaacttcctatgcacaacctatggttgaaaattgcttttggatattggtcctttctttttatatagaggaaacatttgatgatttgtctatgcatatatcataaatcttattgatgattgatgcttttgtcaggggttatgttgctatgcttcagaagaaggatccaaaactttgctctcctcatattttccatagccagccacaatatgatgagcaccatggttcgtccccacttttggtgtcaaagtatcgtcgatgggattgctcaaaatgtcttgaaagagtgaaagtttcaggccatcgacctacatctggaaatgtttctatcgagcaggatggaatgaatgatggctgctctatttcaattgttcggattttgcctaatagggttgatcccagaagaatgttttattgcaaacaacaatcatctcaagggaatgatcaattgaccctttcaaagaccgcccaagaatgcaattcaaaatgcagttctcctggcaacaaagcaattactgcgatgaatattccagtagctgaagaaa

SEQ ID NO: 122177 - DNA, 624 bp, Zea Mays
atggtgatctatatgaggaagtctatatgcatccacctcctgggatagaggttccctcagggcatgtatgtcgtctccgtcgagccttgtatggtctcaaacaagctcctcgtgcttggtttgagagatttgtttctgtcatcggcttgtggtttctattctagtgatcatgatccaacattgttcattcatgtttcttcacgaggacgcacgttgctattactatatgttgatgacatgttgattacaggcgatgatccagaccatattgctcatgtgaaggcgtatctgagtaaggaatttcaaatgtctgacttggggacactcagttattttttgggcattgaggttttgcagactcaaaatggtatttatctttctcaggccaagtacatacaataccttcttgatcgttctggtcttagtgatactcgcagtgttgccacgcctatggatcttcacttatctcttcgtccgactgatgggacacctttggaggatccatctcgatatagacatcttgttggtagcttagtttaccttactgtcaccaggccagatattgctcatgtggttcagatcttgagtcagtttgtctctgctcctacatcagttcattatggg

SEQ ID NO: 122178 - DNA, 618 bp, Zea Mays
cgcggaggggtaaaagatttgaaaaggggatggatcaagccgcccagtcgccgtacccacttggtctgcgaccggccgatatgatcctcacggcgttggccgcttactgtccgtgcgccacgtgcctagtagctttaacacgtcgcagtgaaccatagcagtaggtccgtccatcgccggaggctttgccacggtgaaagccacaataacatgctccggtgactcaccccctctcttcggtcgccagccttccctttcaaaattcggaggcaccgctctcggacactataaattgagtgtgtcgttagctccgttaggttgtcacgaagccagagcacccgccctcgcctccgatcgtccaccatagcgctttaattcgggttttcccccaaattggttctccgcgtcgccgtggatagctcttccgtggctagcgtcacctaaggtagttccagcccaattactgtttgttctagcttccttcgggtgtagtgatgctccccgtacttagaaattgaacgctaccgtacctagtcaccgggaacagctcgatcttccctcggtacttgccgtcatcgtgagcagaggggattctgggtcggactagctcaattaggg

SEQ ID NO: 122179 - DNA, 599 bp, Zea Mays
cggaagaggatgaagttgccacttttcttttcgacccttgttttcggacaggaaagcagtaatcaggataaaaaaccgatcacatcaaaaactctatttagtctcctcttgccgtgagcgccgaaggcaattgtgatggcttcgtcctctacattcgtataagcttccaacagctcgtcgctggtagcctcaacaccctcaagccattcatcattcgacttgtaagtgtatcttagataaaccagaccgccttagctggagacagtagcagtctccttcggcatttcccagtcatttacaagcggccacaccttgtaagcaatatgctctcgaaccaaatccctggtgccaatgtaagtacacaccatgttgaaggccatcaaacatgcttgcacttcattcccacttgcaatcgatggcctcctgatgccgaagcgtgaccgtatggtacgttgcattatacccctcacatcttccctctcactgagatcattcttgacatagaaccactgcttcatctaagagcccaaccatttctttcggaatgttggcacatgatacctcacatcagaacggtgcacaaaactataacatccaaa

SEQ ID NO: 122180 - DNA, 361 bp, Zea Mays
tttttttatttttctttttctttgttgttccatgctctttcagaacaacatttcatatctgttaaacacataccttctatagcgaggagggtgggcttcttcagcgagcgatctgcttagagttggcaaacaggagcagaaaatagggtttcttcataggctccgttgctgcactaaaataaacaaacaacagtagaaagcaatggcaaggagttggcaaaatgaagaaaatcatatgtctagcgctaggaggtagaaaattcacataacttccaacacagagcaggacgaccaatccgttctaggccctgccatcgcctccgccacatcgtcgcaccagaaaagtagcaaaaatatgaac

SEQ ID NO: 122181 - DNA, 575 bp, Zea Mays
gttgtaagcgggcgagagagggaggagctcccaagtctcttatacttggttagacctaatgactatgaatgtggtgctctctaccaagccttggctgtcgtggtggttcgctccttgatttcggtctctatggtcctctgggtctggtcgttcggacgtctgttggccgacctccccctttatataggctaaggtgggggtcggctaccagtagcttctcaaggaaggagctatggtgcgatggtaaaatagggcgttctaccttagtaaagtcgtgcttgtttgtatgtgtctcggtcgtataggcttccctagtcacgctctttatggctggtggtgtgggcgacgaagagctctagcatcatcattgtcgtttctgtgccataccgacccctggcctccatagcctaggtctcgacgcagctcgtcgtgttgcgggccctgtagacggccagtgcactcaggcctagggttgataggtcatgagtgggtcgtaggcctagggctcgtaggttgagtggaaggaagaccaactcccccattgtggcttgatgctagatgaagttaatgtggcc

SEQ ID NO: 122182 - DNA, 390 bp, Zea Mays
tgcgttttggatagttgtttgcatagtgaccaatttctccacacttgaaacatccactaggctgaactggggtagttgggttgttatttttggccggtgcgttcacaacgcttccttgacggttctacaaattaccactagatctttgacctttataagaactgttcttctgctggttctggtattggttgcttctctgtccttgctgtccagagcgttgcatttgataagtattatttccagtctggtttctagagcgaaactgagaaccttgagagttgttgtattgccgggtgttcctgctgcactgtccctatgactggaacttccttttatgatccgtcaactcccttcttttgctttccaagccaatcgctttattgagcagag

SEQ ID NO: 122183 - DNA, 1434 bp, Zea Mays
ctgggggcagtggcgcctggtactgcagagatgccgggagcagttgcatgtcctggagaaaacaaaagcggtgggcctataggtggcggtaccaggttagtgggaatgttgtccagaaaatcgaactcgtgggaggtgacagtgggtgactgttgggcaaaggggaaggtggactcattgaaaacaacgtgacgggaaagatgacatggttcgagagaagatcaagacaccggtatcgtttgtggtgaggtgagtagccaagaaagacacacttagcagagcggtgatcaagtttgtggctagtggtggcgaataggttggtataacaagtgcaaccgaagacgcgaaggtgttcgtaggatggcactgttttgaagagggcgaagtgcggggtggagaaatgaagagtcttggtgggtagaatgttaagaagtgttgctgtgtggagagcttcaacccagaaggttggtggaatgttggcctgaaatagaagtgagcgaatggtgttattggtagtacgaatgatgcgctcagctttaccgttctgaggtgaggtgtaggggcaggacatacggaggacaccatgggtgaggaagaacgtgcaggagctggagttgtcgaactcaagtccgttgtcacattgcacaactttaatggtgacaccaacctatgttttcacataggcgaaaaactgagtgagtcgggaaagcataagatttcaggtttaaaggaaaagtccataagtagtgggagcaatcatcaagaacaactaagtaatatttgtagcctgagacacttaaaatgggggacatccacagatcacaatgaatgagatcgaaattgttaaccgcacgagaagtagacgtacggaatggaagacgaacatgacgactcaactgacagacatgacataaagtggagctagcatccttattacacatgcgaatggctgatgtgagcttggatagggtctcgtgaccagggtgaccaagacggcgatgccaaagtgatggagtggagcttgcgacgaagctgtgtgtagcagggaggcacagggggtatagtggtctggaactattgcacctgacgatcacgttccgagacagcagatccttcacagaccaaccatagggatcaaattcaatggaacatttattatctgtggtagactggcgaacagagaccaggttcttaataagtttaggtgaaacaagaacattgttgagatgtaaaaaaccatgtaaagtggtggagccaatggaaagattggaagaagggagctgtcaccgacaataatggaggaaggtgcagtaagagagggatttgaagtgtttgatagggtaccggcgttggaggtcatgtgggaggttgcacctgtgtcgaagtactagtcggtttgctggggcggagtcagggacacagtgttgaaggctg

SEQ ID NO: 122184 - DNA, 452 bp, Zea Mays
gtgtgcgacgatgtgtccatctcgaaacaactgacgtccgcctcgccgtccccctcatcagtcatcaccatcaccgcccctgcagtacctgaggtttggacgcatgcacgcatgcacggacactgccgccatgccctgcagcctctgccatgaactgtcagctcatcgccgggacgcaatacaatgcccacagcatggacaaacttggtttatggctgacgctttggatcatttggcaccacaacagccaagaacgaacacggttagattgatctcatccgaatcaccaaactgaacttctcgtgtcttaatcaagaatgcaacaatcatcttggttgtggctcttatttttttgcaccgtgtaaaacaaaaaaggaaataagaccaatacgcgtcactaccggaaatccggctctttactgagtgctcgacgttttgccgagtgcattttg

SEQ ID NO: 122185 - DNA, 704 bp, Zea Mays
cggaggaggaaccccaaaatcatcatcatcatcatcaactgctgtaacctgagtgtcgaactgacgaagagctgcatcctcggcctgagagtcaaaaacaggagcagaagctggcacatgaatctcaggcgcaggacggtagaatccaaaaacgaggcgtgaggcctcaagagtgccctgaaaccgaggaggctgaatcagctgcgcaaagatgtggcacaagtagtgagcatagggcaactgccgacaagcacgaatcccatccaaaacggtgtcctcgatctcacaaataaggaagtccacgacgtcgaatcagagtgagagaccagggcaccaaggagccaaagctgaatatgtgtggtagcctccctgtatcccatcctcggcagaagagttcgtctgataagctcatataaatacttggctgctgtagtaaaatctgccggtgaacgtcgcgacccatctgaaaagggcgggcggaacagagccgcgacgtgagctgtacccggagccacaccgccgtgagggcgacgaggagggtcagaagtgtcgtagcagaggctgtgaagacgagtcgtcgactcgggaaatccaaaaagctggcgaatctgactggcagtaatggtgacatcctcgcgctcaaaacgaaacctcatccagtgatgatccgggtctatccatacagaggcgtagaagactcggac

SEQ ID NO: 122186 - DNA, 539 bp, Zea Mays
cgacgcgttcattctcttcgacgcgtaggtatccagtactaatctatcttttgcttttcactgcatctagtttgtctcgtttgatcccttgcctgttggttcacactcatgctgtcgatggcagcaatgaggcttcccctgaatacgttttaacaattgaataagtaaaaaaactaatgtatgtaacaattaacgatgacaagaaccattgtttttatttcttttaatatgcatttctatgatgtagtttttgtcctattcaggtttaggagctacattagggctggtaaggcatcttatttgtttgcaattggacatattcaggattaggagcaactagacatattcaacaactactatcattagcaattgacactaattgaaataattctcatgcactatatagattatatatcaataacaaattatgttcaagcaaatgtatctcttttatgacagatatgaacctgcaccttttcaagtgctcactgtctatgccaatgcactacaggcaatgggctgagaggctacaagatcta

SEQ ID NO: 122187 - DNA, 1045 bp, Zea Mays
cgcattgcgaggcaatcagctcattatactctcattggggaaacgctatacagaaggggcgcatcaggagtcctcatggaatgcattctctcgactactggaaaacaacttctggatgaggtccatactgggcaatgcgggatacacgcagcatccacgaccctggttgggaaggtcttcaggtcgggtttctactggccaacagcaaagagtgatgcagccgagttagtccagaggtgcgaagcctgccagtacttatcaaaacagcagcatttacctgcacagcaactgcaaaccatacatgtaacctggtcgttcgcatgctggggactggatatgattggacccttcaagaaagctcaaggaggatacactcatgtactggttgctatcgacaaattcactaaatggatagagttcaaacccattgcctctctaacttcagctaaggcagtggaattcatacaagacataatattcaggtttggaataccaaatagcactataaccgacctgggatccaatttcacaagctcagagttttttgatttctgcgaacaaaaaagcattcagatcaaatatgcctcggtggcgcacccaagagccaacgggcaggtagaaagagccaacgggatgatattagaagcactcagaaaaaaagttttcgacaagaatgaaaagttcgcaggaaagtggattagagagttgtcgtacgtcgtttggagcctgagaactcaacctagccgagctctacatggaaacactcctttcttcatggtctatggttcggaggcagtgctacccgcagatctcaagtttggggcaccgaggttaatctttgaaaacatagcagaagctgaggctactagactggaagatgttgatatactagaagaagaacgattgaatacggtgattcagtcagcccggtatcagcaaactctgaggcgctatcatgacaaggccatacggcatcgatccttcgcagtaggagacctcgtcctccgccgaattctaacgggggagggacgacacaaactgtcac

SEQ ID NO: 122188 - DNA, 435 bp, Zea Mays
gtgggccatgttctggcatgggttttaagatgcaattggcagtagtgggctagtcttgtgaggaaagttatatgttgtaactgaactaagtttgaggttgtcgaataacagaaatcagattacataacttatgtctcacgtgcgtgcgtcttcttctctagaggcgatgtccatcgcaacattcgttgagctcacgtcctagtgatcatgctggggctaggggaattaaagtggtatcggaggctccgatcttcggtggcaacgctgcgctacttcgggtacttctccgacgaggtggagcttctacaactacggcgcgacaatgcttctctacgtggaacaccttctctcgctcgttcaggatcaggataagaccgagccggtgaggatgagccgatggcaagactgcagcgtggcgccagaatcggagacgtg

SEQ ID NO: 122189 - DNA, 353 bp, Zea Mays
atgctgaaggttgtgatgatgctcaggctactggcggtgtgtttgatgaggatgaagaggaagaagaggaagaaattccatggatccacaagaacagccgtcactacagaggcagcgacgggggcagtgatattccctcccaagccttgtcggcactcatcagccttcaagggctttcaatattagactttgatcaggcactggaagcggttgttcccaaagatattttatcagagcctcctgaggctgacattccgaccatatattcagaggtcccagatggtggtctttcactgcatgattctgctgggcaagaggtaacccgggtggtgtctcgtgcatcatcgaccttt

SEQ ID NO: 122190 - DNA, 494 bp, Zea Mays
ctgtgatagaaaacgtaaataagttcggagtcgtaaaaaaagaaaacataaagttagaagttattaagcaatacctatcctcctttctagttccgcagttttttcagctgccttcatcgcttcttttgtatcatgagaatctttttcactcttttttattatctcgtgcgccatctttcggccaccattctcccagatgtcagtaaagaattttccgcccgctaagctggcttcggccgaagggtcttttgtatcttcaatacttaaagtagcttcggcttgagccaaagttttcacatggtcgcagcctgatttctccaaaatagccacgattcctcgggcacctaagaaagcgcagatatccccgcgaccactcaaaacttcctcaaaagcttcaacttcgttgctgatccaatcaattgggtcttcaggatcacctcttacgaagttgtctttgttagagagtgcgccaacattggcgaagctagttttta

SEQ ID NO: 122191 - DNA, 561 bp, Zea Mays
cgagggagcaggaaagcttctagggaaaggaggagacagacacttgggtgcaaaaaggtgtggtaagcgaaactgaccccaagcaccctccctttctatttatacgcaggagcagggaagccaagcggtgtctgaagaagtgcgcccccacaaacaacacaggaggatctatcgccccaatccataattgctttaggtgccatgctagagactacacattctgtcgggttcacaccacctcgaacggagcgccaatggagcatgcagaaggggaagcgtcaataaagggcataacggttaaccaccctatcacgcaatctatgtgcgatacgacgaacgagtcatttcacgtcccatcaagatgcccacgatgagcggtgtcatgatgatcccttttttaccatgtcgccacgataactatctcaagacgaccaaggtaaaaatcgaaactcaccccgactcctcacgtagagcgagggatggaccaacaaagctcccaatgagccgcaagcttggtgaccgggccataggtcatttgctcgtcttcacgtccaaggtcgt

SEQ ID NO: 122192 - DNA, 473 bp, Zea Mays
tacgaacggagcaatcagcttgagtcggcaacgacttaaggctgtgtgacatgctcacgcttatttaactcggggtgaccactataccctacaaacggagcaatcggcttaagtcggcaacgacttaaggcggtgtgacatgctcacgtttacttaacccagggtgaccattataccctacgaacggagcaatcggcttaagtcggcaatgacttaaggcggtgtgacatgctcacgtttactcaactcagggtgaccactagaccctaccaacggagcagtcggtttaagtcggtagtaacttaaatcggcatgacatgctcgcgactattcgattcagcataaacacgtttgcaaatttcttagggcgatctctatgccccacgaaaataggaagaagtttcaaaaccatcacactgcacttacttctgcaatcataacgactgttgaattcgaacaacagaaaaacaata

SEQ ID NO: 122193 - DNA, 317 bp, Zea Mays
tcagaaggaaaaggagccttcgacaacagaaagtcctgctaagctaaaaaaacggagaattatccaagtggccgatgttattcatcagacaccaccaccggcatcagcgtcaaaaataccaattgctgaagacgctggtgctgccaaagctgaagccgccgaagccgaaaccaccgaagcttctgatctagaaaccactcttggtgatattgataacatgcttctaaaaatggctgaggaagaagctgctgcggccgcggtggacacaacaattgagaaaggaaaagagcaaattgaagatacttcggaagaggaat

SEQ ID NO: 122194 - DNA, 521 bp, Zea Mays
cttggggccacgtgccagtcgccctgcaaggtagccgcgtcgtgggccgggcaaagatagtggtgtaaatgggccaacccaggaaggcgatgggctcacgtccggattatttgtggcttgggcgtgatcctgttgaagctgctcgcttttcccgcgcccgacgtccttaaacgccggggatagctcggaacgaaggtgctgggttttcctcgagataagcaaagtctgttcgctattagctaggagataagatggaagagtgtgatcaccatgtgtgtagggagtgcctacggtcgtgtatataaggcctagggggatcccatcatttccatctcattagcacctctccacttgggagacaccactagtaaacaccccacacatacaaagccaccccaggaagtagggtattacgctcctcaagcggcccaaacctgtagaaaattgccagactctctctgcctcgtgcccccggcacaaaccatctagtaacgatctacggcaccgtcccacctaaaagc

SEQ ID NO: 122195 - DNA, 472 bp, Zea Mays
aagagatatgaaattattgctgggaagattctcaccaaatcaatgtaaactgaaattttcagcaacacactgcaacacaatccctttcacaattttttcactttttttacttctttctcttcttctttttttatcacactgatggggtgctgatatcaaatgcaatgacacaatttgaatatgatggtggtacctagcaacttgaggaattttgaacaacacaaggtaacagtactgccaaagggttataggtttttttgtggctttggacaataggaaaaaaataagatggatgaaggctgtgataaataaatggatgacagtaagacctaccctgacaatgaaagctttgataccagatgatatgcactgagttatattcggtactgggggtggcccgatcttcacgatcgtaggttgataaataggatggttgggtataaaagtaactgaataacaaggtaaaattgct

SEQ ID NO: 122196 - DNA, 1088 bp, Zea Mays
ccgcccccgaaacctgacccaaacccgaaatataatacgggtgaaaacagagacccacacccgaacccgcggggacctgtaacccgatgggggacccgtggacccgaaatacagagcatcaaacgcaatacacaattcacagcaacaggcagcatgtactgtacagtctgcacaacacaaattggcgcataggcgcacaacaataccagcatgatagcaagcactagtgctgtagtgcacagcaatcagcaactcaatatttaacaaactagcagtttgaactaactcagcaagtcactaagtcagcaagcacatactgacaaacatagcaaaatagcagtttcaacttccaagttccactaagtcaacaagaagcaatgtattatattattacaagtttttgcagctaagtaaaatagtaagcagcagcaagcagtttgtaggcgtccacatccaacaagaaaccaagcagctccaggcaccaggctccatcgctccagctcaaatgctcaatcaacaacggtcgattcatgttcgtcctacaaaataataaaacaatgatcgagtcatgttcttcaatgctatcttgattaaggattattgaataagtcacaaattcacaaagcaacaaataaacagtaccgcgtcttcatcttggtcatcaagacaagtcatcaaagcacccacaatagttggaggagaccctgcattgcaaaaaaaactcagaaattggttgtttcatgtactatgcaagaaatcaaagaacatataaaaattagatcacatacctaacatgtcagcacgggaccaagcctgcatacacatgagtgcttccaccattgatggtgcaagcctactacggtgtggactaattattcggcctcctgtgctaaacacggactcagatgccactattgaaacaggtattgcaagcacatcacgtgcaatctttctcaaagtaggatatttgagcccaacatgctgccaccacaggatgatatccaaaccctgtgtcctaggaagcagtggttcctctaagtacaaatccagctctgtgcgcacataagtggaggtcacatctggttgct

SEQ ID NO: 122197 - DNA, 340 bp, Zea Mays
atatggtaggctcaaatgttaacctataatgacatttaaaagaaaattgttcgtaaagcaattaaaaagatttgactcacaattaaagctcattttcagaggtattcttcgagcacccaagccataaagggaccaaaagacatgcgtcaatgaacactattaagggtgccctcgctcaagaggaattttattaccggcaactcgcattgataataaaaaaacaaatcctttaagtctaaagcaagttgggtggggttaagtgtaggaacaaccacaatacatcgatctcaacagttcaactaatgccatgataaaggtctaacatattaccttaatgggt

SEQ ID NO: 122198 - DNA, 465 bp, Zea Mays
gtcaagagtccgagacgagccaaatgaactaagaacaaactgctcatgtcagctttttcacacgattgctattctttcactctcattagttttgatttatctaccattctttcttcctgagctgctcgtacgtgtcttggagacgcttctctagtacccggtcgtgaaagaaaaaaatgttggtttggtatggatcagtttctctagaagaagtagctagtaatagcagcacgatgatcagatcacgtgtatattgagtggtggagttaggcagcaagcgaccttcagctttatgaattagtacacatgtccttcagcttgcattcagtgtgcattcagattcattcaattttatcttatgtattcagtttcatgtccttctgcattcagttttagcttctgcattcagtttggtatggatcggtttgcattcagtttcatgtccttcagtttttgaattaaaat

SEQ ID NO: 122199 - DNA, 366 bp, Zea Mays
acaacatacatggacagtacacttaagcagattcataaaaacaaagaacttaagcgaaaaaggatttagaacctcagttagttgaagtggacgtcaaataatgaaattaaatatttgaagttgcataataagtaaaggtatggtcagttccatgcaatgcttagtcatgcaagcaaaattgtatgagacctgactacaaaccatacacagaggtactaagtcgaattacaagaaagtgatatgcaacaaaaaggggatgtgttggggaagtctacggtaaatggtacttagatgttcgcataggaacaagaacattagtttcagtacgagcaacattcaccaatcaacatacaaacaacatgacag

SEQ ID NO: 122200 - DNA, 370 bp, Zea Mays
actccgtgtaagtcaaatcaccctgaacactgagctcttccattggtaactgttcctcagggacacagagacacttcttaagttgagacacgtgaaatacattgtgcacatcagatagattagcaggtagcttgagttggtatgccatctccccaactcgcctaaagatcatgaatggtccaataaagcgaggggacaatttgcccttgactttgaatctcctcattccacgtagtggtgacaccttgagatacacatgatctccttcctcaaattccagtggtcttcttctattatcagcatagctcttttgcctggtttgagctaccctcaaattctcctgaattatacgaacttgttcttctgcctc

SEQ ID NO: 122201 - DNA, 287 bp, Zea Mays
ctcaaagatagacaaattgaatcatggaagaaaagcccaatttggacttaactctagtgggtctgcgacgcaccaaaccagtccggtggtgcaccggaccaagtacacggtgaatgtatttctaggtttatgtggcttggtgcatcgaaccacttacacaaagaggacctctatagggcttcggtggcctagtgcaccagaccacttacgcagaacgattgtctattaaagagctgaagcacatgatgcactagactagttcagtgtgcatcggacctgtcaagttc

SEQ ID NO: 122202 - DNA, 500 bp, Zea Mays
ggtagaataacatattattatgatatgttagaatcttttgagataggatggattatatggcgtaggcaagtcagaatctctgttaggttactacagaggggttatgcaactatcgggtggttaaggtagttgcatatggccaggttggattaagactccaagttatgttaaaacatatttacaagagtaggatccaatcttattttaccagtattatctaacatgtttgtccattagattagatctgactagattagatgggatcagaattaaattggtgcaatcagattagactagataagatctacttaatttattttggaatagatcaagtttattatactattaggagataagcaaagtggtggggataagtatgcttgttaggtcaagatgagtctctaagattatggtagaatcttttgtgattagttacatctattaggataagatgaaaatcctttcgagatgagatgagtctattaaggtaagagagtatc

SEQ ID NO: 122203 - DNA, 954 bp, Zea Mays
ttctcttatagtgcactcaggagcacgatgaataccttcaggcttatgtctgaagtttcttcacctaagggctcaagcaccaactgtgcaagatgacattgccatataggcaatgatcaaggggcttcgtctaggcctagcagctcagtactttctaggaaaccacttcactccttagagaagctgttacagaagatggatgtatacataagggcagataatgatttccaccagagaagaggtccaaaggtatgcaaataccactaggggcttggggggaagaatccacccgagatttgtttgaagcatacataacccaactcaaagtgacgagaaggtagctcaatcttagggcaatcaagccagcatcaacaaccaagtactcaacaacactcttcctaaagcaccttctgcccaccagcttcgagagtaggaagaggaggtcgaagcttcggtggaaggttcaacacataagcaagaaagttgtattgtgcgttttgtggtgaagataaatgccacacatcaaggacttgccagataaccatccacaagcaaaaagatctcgctgctgtgactgctcaaccatctcagtcgaaggaggtatttagtacatctttgtactactcaccctacatcccacaatatatccaaccctaggaccccaagccacaacaacctttggcttcgaattcttcaaataacccaatgatgggcgaatggttgccatctacttcgtccatcccaaggccacctcttatgatcaagtccctactagccatcccaagttcctaatgcaggacatgcattaatgggacagaagggaggcctctaatgcccgcagcgttaacggtatggtcccagaaacaaagcatatatattgaggcctaagaggttaggtaagcaaagccaaagctaccaaacatctttgtttacctacgtttacttgcagtttcc

SEQ ID NO: 122204 - DNA, 587 bp, Zea Mays
aaccaggtaggtgcgaagcccccatttgatgttgacttgaaagttaggtcgggcaaagacttcatcaatgagattgaaggcgaagccaccaagcttgttggcctagtgacggaccatgaagctgctaagagtttggagatctaaaaaggttgcattcaggtgaatcgagtttttaggttgatgggtctatcttatgtatcacatgtggtctatgttaaggtggaagtgggacaatcactacaacaaagtagaaagcagggaaagcagattcgaaggccaagacgccacacatccagttttagctgcccacgatgacctcattcgagagcatggggcgatgctgatgcacaaaccgtgtttgatgccttcgcctaagcctgagcatgggctacccgaccaacccgacccgacccgctcggaaaaaacttgatccaaccaatgtgacggtgggtacgggccacagtttttgacccacaacaatccatgggctaggtatgggctatgatttttgacccaaaacccgacccaacccaaaaaaacacgtcccgacacatctgatagggaggcatgggccaacccgacccgac

SEQ ID NO: 122205 - DNA, 949 bp, Zea Mays
caagcgctggagtctacaacaggagaaccaaaatacctggagcttgagtctcagatttgggaaggttgcagatgagagctggacggatggtgaagagccgaagagaagtgacggaggacagctagactgcacagctcactaaggagtgaggacctaggtcacacatgagcagctgagttgacatgcaatggagaacaaaccggctgctggacaatgagtggttgcgggagagaggaaccctaaggttgtgcttcgttgctttcattagggcctatccagacttgtacagtgcaagctcgtaacgtttggttactcaaattgggccttaagcaggcttagagggtgcagaagcaggctccaaaccagcattatggagcatgccaaaattgattgtgctagcttatgtactcttgcacaagccatgggtccacaagattgaagtgccctcgcgtcccaggccccttaccatggctaacctccacctgtaccccgtcccttcaccaccccctcctggcacccaccatgacaccttgacacttcccaacacatagcagccaccgcagatctggcaaccaaagatagcgagcccccatggcccttgacaaggttgagatccaggtgtaaagcgagggatcccttttttctgacgataaggcgaccaatcccttttttaccttttaagcggtaaagtgtaaagcgaggtgatgccttaactatattgaaaaacagaaaaaatattgatcgttgagaaagtgcttaggacaaaaaaatatcaataaaaaaagagaaaaaaaaggttgccagcccacaaatcagcccagctagcccgtcaaaattaggataaacactccctaggtagttctcctctccagtctccacgcaaccctctctcaaccagtcagtcaccaccctctctctcccagtcctctccctctattcaagcttctcc

SEQ ID NO: 122206 - DNA, 355 bp, Zea Mays
gtggtgaccaagcgcaggcgcagcgtacgccgacgagcactagcaaggggattcaacgaactataatgacgtgtcacgagagattggaatcaacaacggaaatggtgcggtggtgtagtgtgtgcaagaagctcaagcaagaggggagcaggcgagtagagacccgaaggactgataagagagtgtggcgtggtgagaagcgcggacgggtctgctcttatagttgagcagaggaaggggagagggcgtctggtgccagcttaaaggtgccttgaaggctatttgctgtggtgttgaatgtcgtgattgaaatctccattaatggaggaggtaaggctgggaaagaaaccatcgt

SEQ ID NO: 122207 - DNA, 449 bp, Zea Mays
gggatatacacacatactggttaccattgataaattcacaaagtggatagaatacaaacccatcgcctctttgacctcagcaaaggcagtggaattcattcaaggaataatgttcaggtttggaatacctaacagcatcattacagacctaggatctaacttcactagctcaaagttcattgacttctatgagcagaggagcatctagaccaagtatgcatcagtggcacacccaagagctaatgggcaggtggaaagagccaacgggatgatactcgatgcactcaggaaaaaggtgtttgacaagagcgagaagctcgcaggaaaatggatcagggaactaccatatgtggtctggagcctacgaaccgagccgagctttacacggaaacaccccattcatcatggtgtatgggtcggaggcagtgttaccatcagatatgatcttt

SEQ ID NO: 122208 - DNA, 2936 bp, Zea Mays
atggaaatggttttaagactagcacaatgcggcttggggcagatgttattgttttcagtcgctgcactaagagcaggtaccatatacctcacttaaatttctttcctttgtgaaccacttttcttttatcaattgaaataatgccaagttattacttgttttcagtgggcctacacaatccattggtctcctctcttacactttcttggtggaaactggacatacagatgttgtagttcctgtggtacgctgtgtgattttattttttaaactgcacttccataatttctggtgatatattttctcttcctaggtggattataaatgcaatctaatgaaaggacaaactcaacgactggagcgtcatggttcggaacaattcttctcaaatttgtcagcattgttgaaatggtccccttttgcaacagaagaagagctgatgcagaatgtatgttaaacctgccatccgtttgaagtatagagatacaatattttatttactctaacaaaacattacattattaaaccgacaaacttagacttaagttataaactagataaattgttttttctatatatatacatgacacccatgtatagaaaaaatatactccctccatcccagaaaacagggctcataaatatttaggttttatcccaaaaaacaaggcgtattagttttttatctcattctagacgcatgattctttgcacccatgtgcatgccagttttcttgtgtggctgcgtgattaatttcctaccctgctcatgcatgttttccttttgtgctgagtgacaacgtcatgcacgattccttcccacccatgcatgctttgtttcctggtttgcctacagttttttctgccagccgatttatttgggaaccgagaatctctccttgcatgtcgtattgcctgcaacgtgattaaggccaccaatgacgattgccttccattccatacagcttgcgtgctgatctgctaaccaaaaccatgggtaccagaggaaataaatatagcgtcaacacctgcgctaatattcgtgaaaaaatttatacgccctgttttttgggatggagggagtatatataatagtaaaattcaacaatttgatgtagctactacaacctcatctagtatttgttagtaatatataggttatatgatatgaaatgctaatggttattccaatctatggttgatgaacagttctgtgacattggtccacatggcaccaagattatagtgttcaatctgtggtccaacgacgatggtaatttggagctcgactttgacacagatccggaggtaaccatcaaatacatcacttgaattatttaacataattattgtttttattgttaaagtagcattcttaagtccgatgattgtgtctattggaatactgttgcaacaatctaaaaccattcttataaaatttgctgtgttttgttgattgtttttcaataaataggaatttattttcttgaagttatttgttgtatactgttagagtgcgctttgtcagttttttggtgttccctgctgggttgctcatgaaagtccttgttgtttgtttgtatttcaggatattatgattagtggagcgccaaatccagaagaaattagaaattctgtaaaaagggctaatgagaaccatttggcaaatcgactacgctattctcttagggtgagtatcatatagtttaacattcctgcacaataccagtgagctggttgctgacatagcattgtgcaggtctatgcttctgtgttgtatctgcagctaccagattactttaggatcatacttcgagggcaagaagttaagcgtcatcgcattgccgctgacctaatatatcctgaatgcatcagttataaaccacatagttgtggaataaaagaggtttgccttggtttatctcttcttagcctcaccacataacttatcggttttttctttactgtatgaattaagaatttcatactcttgttcttgtttctccttttgcatgcactctctttggttgacttaggctacggttcttacaaccattggattcttaaagggtgccccaactattagcgtgcacggatttaatatctatcataaaaatcgccttattttggtgagcttcctgaccccttgcattggttcactttgtttaaggatgcataaacacaaaagataagatttacacgattatctctgtctgaaatcttactgcagccatttcatagagttctgaatacttcaagcagcaaaggtagaagcgtctctggggtgttggaggtagacttcatcaagcccactcatgacaaacaggactttgagaagtcacagctgttccagaagctgatcaaccgcctgaaggagatgactaacgagtactggtaagttccaggttcttgatatctgttcctcccaatttccaaaacctattagcaccagttcttacttcgcctcaaacatcaccatgtaaatgtctcgattcttcctcagggaactttacagtgacaagattggatacatgaaaaagccacgcgtgagtgcagctcctcttcctcctccagtaatgctgccgatagcaaatggcactgctgaaccatcagataggagcgcacctgctccgacgcaacccttgaggtcgcacagcaactacttgaatgcagttccaatcgcctcagcgccccctggttttcactcagcacctgtcaaagcagagagcgttgcaccaggagcgcatatgggctactccccgtcctcgctaaacgcgcagaccatgcaagtcaacgggataaaatcgccttccatggtgcctgccaccgattcggtagacacaagaaaaaggaggaacgacgacactactactatgacggtcgcgtttaaaaggaaggctacgcaggatttggctggcagcagctgtgctactgat

SEQ ID NO: 122209 - DNA, 634 bp, Zea Mays
gcctgatggagagtgcatgccgaagaattcaacaagaggcaagagcttgactctgcctatgcatggctacggcgctcgctctacacgactacactgcactagccagttgcaggcttgcagcagtgggcctgccctgacccgaccagctgcctgcttcttcgctcataagtcataaacaacacctgccctctgagcctctctctctatctctctctctctgtcgttgcattgcaggttcgcagtttttcagaggcacaggcactgggagtagacgacgatgagacccatcaaggaggatccgttatcgtaggacgttgtagtaggccatggcgctgccgctgcaggtcgatctcttgcattggctgtgttgtgggagtagtgagacatgggagttatggcccttgtagagggtacactacgtactacagtgcaggaactttgagagcagcccagacgacagccggccggccagggagtagtgaagcaacagcacaagcacaggaccagggggggactgatgactggctgtggggactggggagtaatgactgtggaggttgctgctagtgctagctatgatgccatccattacgtgccataaaatggcttttgctgcatctgctttcgcctttgc

SEQ ID NO: 122210 - DNA, 465 bp, Zea Mays
gtttcttcatggaaattctggcactggtgctatggtgcatttggaagcagaggaacaactacatctttaggaatgaggccccttcgttttctttttggcgacgctgtttcaacgacatgttgaagttacagatgctgagatttaacccctcttctagagctaggcttaaactctcgatagcttcttgctcgtcttctttatttccccttctaatcactatttcattccaaaaatagttccaataaaatcgtgctataggggcttcccctatagcctttttcccctcaaaaaagatagatggcaggagaagtcctgtgcttttgccacctcaatctcctccagaactagagattgtttttttatcgaacacgcaagagagctacgtatcatttatattaagaagataaaaagggtacatcgaaaacccaacactcgagcacacactccctaactgcctagcacaaa

SEQ ID NO: 122211 - DNA, 311 bp, Zea Mays
caggtaccgattcaaggtggggcgtttatgcatacgtaatttgaatgaaaaagcttcataaatggtagcgtggggccggggctcgggtgggcagacgtgagccgcgcgttatgcttgcgtattttgccgttattggctgcgtaaattcggcgcgggtcgacgtggcagttggtgggactacccacgcatgcatcgattctaggtggggcgattatgcatacggaatttgaatgaaaaagatgcataaatggtaacgagggtacgggggtcgggtgtgtagacgtgggacgcgcgttatggttgcgtatttt

SEQ ID NO: 122212 - DNA, 561 bp, Zea Mays
ggcggctccattaacacagactgctcatgttgagatagtctgcaatgcaatttcactaatatattcttaattagcgcaaccatgagtccatgactctgatctggatctagatcaagctcctgatgacacatcgctattgcgcgttccaacgggccggagacaaaactgatcaatgcgccactattctattgaacatttgcccaagatctaagagacattgagcactaaataaaaaggtggtggccactgagtcggccatcgatcgggcacaaccctatgcacagctcttgcatcgaagtgtggctggctgtgcttccacctgtctgtgtccttccctgtcttcgtctcacttcagccattggatttagatcgaacgtatcgcctgtcttcgtcttcctcactccgatcccggcccccgcctactaccgccctccttcatcgtccaccgccagacttcttcatatatataaccttatgaaggatctcgttattttttttgttagatctagctagctaggcatgtaaacgtattgtgaacttcaacaataaccttaatcaaat

SEQ ID NO: 122213 - DNA, 341 bp, Zea Mays
attgaatttatgggatggcagcagatgcaaaggatcaaaaaactaaaccaagacaaatctaaaccaacaccgaaacagaatctggatgctgacttattttgttgatttccgttgactctaaagaaattttgtgtcgttctagttaggttggaaagcttatctctttacctttccatccatataaagcatgacctaaatggacttcggatgcaccattttgagtgcagattggtcctgaactccaaggtggagagcaagttgagttggacttggcttcctcttgttgtaaacatcctagcttctccttgacactgtgtcccttcccaagtccttgcttgtcc

SEQ ID NO: 122214 - DNA, 587 bp, Zea Mays
acactcgcttatctctctggttcttgtgcagcgtattagtgatcagtcaggatggtgaggaccaagaatgtcaccccagtagggggagacgatgattaggaccctcctcgcccattcagatagcataagggcaaggatgtataccttgagcagcaggcaggaaagatgaaaaggaagttggatagagctactcgagcagcagtagcagcaccagctgagagagcagagcaaggtgggcgttgaggattggctcagatcagatcgcctttcgtgtcagtcacctctcgtatcgaactctcttcactctagctcggttcgacccctctactcccgccaccactaccagtctaccactccaccttcctccaccacaccagcttctgccgctccaatgccttccaccacactcgctacgcctacagcctccaccacacctgcttccactgctcctgctacctctgtcactccaccagtacctccaccccatttccgagagcatgacgagacagaggttcgagcacttgctgcagatcccagactgtttgacctcaagagggctagtaccaccagggtttgtaatttcagac

SEQ ID NO: 122215 - DNA, 314 bp, Zea Mays
agtaattgattgcaagaagctccatcggtactccaattgttcagcgacgttcgtcacctcggcgggtccatcttgcaccatggaccggctccaccaggacacctatgccagtaagttccgtacccccgtaatcgttaggacccaagcatccttttgcaccatccgtttgagagttcgaagccttgggcgtggtgttggcttgcgcttgccatggcgccgccgaggaaatatagttaggcggcacggccttgatgtcggagtagggaagatgacaggctgaccttagatctgttgatgaacggctcggatttgat

SEQ ID NO: 122216 - DNA, 453 bp, Zea Mays
cgttgattgcgactcgatggttcgtgtgatgacacgatagaaagacacgcagacttatacaggttcgggctaggaactgcgttataccctactccctgtggtgatcctagtactggaatgaggttacaagttgggaactatgagtccggtggattgagatgagataaaaatggtaggggtacttcctggccttatatacacaaccaaggagagctatccccacacaagtgataaacataacccactcgcttatctccctgtttgtagcaaaccgtcttcctacatatctggaatcttcctcattcattcgcctgagttaccaacggggttttagcctgccgggtgatcacaattgttctgcccgatatgcttgtgctcccgtagcgcttaactcgggcgttggccttcgccggctcagattgggcttaccttgcttggttgcacttggtcagc

SEQ ID NO: 122217 - DNA, 452 bp, Zea Mays
aaccacgcctatcgccttcgggattggagcagggtttcccctaggagctgaaggagaagccagtggagaagggagtgagacccacctccccgcaccttcggagctggccttagatttagcccaagttctagccaaccaaacccgactcattgaggtcctcactagaagactggagactcaacgctcgaatggtggaagaccacaagacaggatgggagatttcctgaggctcaagcctcccacattcgctggatccagtaatcccctcgatgctgatgactggctacgcacgattaaaaggaagttagaagccatcggatgcccagggaatcagcctgttcaattggctgctcatcaactttccaggatgtccctagcttggtgggataccttcaacgctgccgtcagagatgctacctggacagagtttgaaacttctttccgagagcacc

SEQ ID NO: 122218 - DNA, 1201 bp, Zea Mays
gcggccgcggccaagtggaaggtgggcgacctcgtgctcgccaagatgaagggcttcccggcctggccggctatggtgagtgcgtcgtctcggcagctccttctgctctgttcgctgatctgtggcctgggcagcctgggttccgaggattcttggtctgggcgggggtttctcgcttagggtttggcggcggccgtggaagccggtgtctggggcctgcccagcggtcggtttggtgaaatcttaggtttttcacatgttcttctacctcgatttggccattttagctatgaatctgcgccagttttgtcctcctgatgctgcatatagcaggaacgttgtgcgagtagggattcggctatcacacgcttaaaaaagatagtatctttagtaaaagaaatccctttccattgctttctgctgagctttagggagtaggggcttacttggcctagcttgtttcatttcttggtgatttgtttgtttagatgttgggttcttgtagagatccggtgctacttctgatttatggcatgggggctgggtaggatttgggtgattactgattaggggccatcttccttgtgtttggatgtgcagtaagatttcacccaatttgacctatggatttcatagcttagtagtggttatggatatggacattgttttaaggatctggctctttgtgacaagtacaaatgccaggatatctgatgtttcctagcttccacaaggcggtactttgtcttctcatttttatcacttctaaagtagcataagatttgttgttttttgtttatggtgttcatattatgcggaatattatgataattgtctgcaactaagtgcctgttaaatgttctctaatgttttgttttatattcggttcaggggctaaataagctaaatgttgtcctcgttttgtatcggtatacaccacaagtattagtggcttcatgtagattcttcaaagtttatagagctcttctgactttgcatatgcctgtttggtgatacaaaagatctaattttattttctagtcgtccatatatgcctttttggtgaaacaaaatatctagtttaattttctagtcctccatataggttctagtttttgctggggttccttttctttataattttctcctccactttaaaacacttctcattatcatcacatttgttaaaccactttgtaaa

SEQ ID NO: 122219 - DNA, 440 bp, Zea Mays
caacacgtgagtatagcctccttgagctttcttgaagggcccgatcatgtccaacccccagcatgcaaatgaccatgttatagggatggtctgcagctgctgtgcgggtaagtgttgttgctttgacaagaattgtgaaggttcacacctctgaactaactcgacgacatcattctttgctgtgggccaatagaaaccagatctgaaaactttctcgaccagtgttctggatgctgcgtgtactccgcactatccgacatggatttcatccagtagctgctttctagtagttgaggaaatgcacttcatgaggactccagtcacaccccttctatacagtgcaccccctatgagggtgtagtgggccgactgtcttgcgatgcgttctgccacagccttatcatctggttcttcttcattctttatgtacccgatgatag

SEQ ID NO: 122220 - DNA, 314 bp, Zea Mays
acgaagaagaaagacgacctggtcagccggccagagaatgaatgcggtgtggtgtataccagtacgaccatgcggcgattcgtcagctgctgccatggacgccactgctaccggcagagcacgaggtgcctatccaatgcaagtacgcccgccccggccacattccgcgaaactgccatcaaattaaatggtatcgtactactagacagcactattattgttttttaggcacttctttttcaggcatggcctttcgatgttttcaagctctgctcagcaacaggtacatgaaaaagaccaaagttgaagaccat

SEQ ID NO: 122221 - DNA, 1499 bp, Zea Mays
ggtccatggatgcacgattcatggcgtacttggagccaattgtcggcggagactttgtgtaggtcatcacttgttggtggagcaacagtgcttttgctttttcgccctagttgccgtcagttattggcatcattaaagctgtaatcttttagttgcttagggttccctcgatagtgttggacaatatcggtaggtatgtctgtcagaatggctgaactgttagacaggcgtatgcattaagtcatgatgtatagcaaccatgaaaactttgtctatgtatataatgcagctaggttatgtctttttatttgtctgatgaggtgggggggggggatcccataacatctgttactaacctgattatatgcattttaactggaatttcacttgtttatgcttacaactttggttcagttggtcagctttcatctttttggacatcctgagtcctaaaagtgatgttttctcttgtacgattttcccgtgataagcttttatctgtagaaagcataatttaggaattcatatctcaatctgttggtgcacattaggtcatcaaaaagattttcacaaagtagtcaattcaagatatgttgtcaagtcccccctgttcagccaatgcttttgtagaaaacagtttatgatgacgagttggagacactagagccctatctagaattttgtgcatatagaaaaatgattttctatgtgtttgagcaatagttcaggttaaggaccaggcactgctatgttcttacgttttcgatccccctgaccccgaccgttcatttgctttgtaccggaactagagtcaactctggagcttgttccctttggccaaaagaaagaaaatttccactttaaaagtatatatcattgtttatccagtaatttatagccttgaacgtctttattctggaaatataatttaaacatatgcactaaaaatgtaaggtttcacaagatattatttttctctcagttggtaagtgtttgaatcttgtgctttcttttcttcctgttttgactattgtaaaatactccctctgagatggtctgataatctgattgtattcagtggaacgtaaataaaacagcgcataccttatattctgtatctaaaacggttaatgggggcaagcacctccattgcaaatttgattctgaactgtgcaacacgcaaggtgtatgaagatgcaaaagaccaaacctcttgagaaaatttttcggcatttttgtacaatcagtagatccattaggtatagtctttcacactgacaataatttgtagttctttctgaacccctacttttattcaactaggtggactataatggtcttccgttatgtcttaagatctttgaaataacctgctaaacatggttctttgaaataacaatggttaaattatcaatcttgatgttctttcttgtccttaggattatttcatgataagaaaatggaatgaaggagatctcctgccatattttcattagttt

SEQ ID NO: 122222 - DNA, 475 bp, Zea Mays
gcttggatgaaaaactcacagctcgatataactcgctcggcttgactcattagtagcttgatttgactcggctcaattgaaatgggtcacgagctaagccaacattttagtttggttcttaacgagccgaacgagctgcacacagcacaaccgcacgtttagagaagcccagcctaggtgccaagtggcccagctcacaggtcaacactcaataacaatgcactgaggccatcctccacatccatgccataggacatggcagaccactaatgaacgacatggcatgaaacactaaaaccctagtgactgggtcccatctgccatatcccagacccaccgttgggcgaccaactaccatcctccatcttactgctccatctaatcaaaacacaggcgcagaccttggtgtaggttgcggcatagtctaatacactgtcgtgcataaggttgtgtggacggtatcgtcctgtctcct

SEQ ID NO: 122223 - DNA, 577 bp, Zea Mays
cactcatccgcttccaaatgttcttctgctttgacaaaaagaggtggacgagtttcagaaaattccaagtatgtggtgtctcatggcccttagggttgacctctgcctccatgttgctgaaactgattccccgccaattcacgcaagaaacgtgtgttgtcatcggtagcattaactaaggcagcgatagcctcaaccaatgtaggaggtacaggtggcgggtttggagtttcctccccgccgtgggaagttcccgccccgtcttgagcacgagttcttgatggcatctgaggaagaaaaatatactgaattattacatgccaaaagtacaccacctttattacattatgccaaactagtactaattatacatactcattagtacaactcaacttccttatttaatttacataaggacactacttatactacactactctaattatcttcgtccttggccgctctcgctccactgccagcttcgggagaacgttcatctgcgaggttcatggaaggaggggctccaaaaagatccaactccccatcagtttctccactagctactctagatgtttcg

SEQ ID NO: 122224 - DNA, 537 bp, Zea Mays
ggaagacttcgatttttcgcacttattgtgctagtccggctgcacccttaggcgacttctgcacggtaagtcttcgcggtagacttcgatttttcgcacttattgggctagtccggctgcacccttaggcgacttctgcgcggagttgtcgcacgcgagggtggccagcgctgagcctcgcggtgactttgtattggtcgaatgtcgaagaccgttgtagcggtcttttttcgacgcatgcttttgcgggggatttttcacttgtatattacatggctctgcctcgttaaaaacctcaccccccgggaggaaaagagtgcgggccagaataaaattgttttttgggaattacaagggcgaatcagccctgatgagtcaaacaaaaaatttgcggagattgtcgatgttccaggagtgctccaggtcttcgccgtttggcgttgtgagcctgtaagcgctgggggaagccttcgccttgacaatgaaagggccctcccacttaggctccagcttgcccctggactctgtccgacctgt

SEQ ID NO: 122225 - DNA, 521 bp, Zea Mays
gttgcttttgtagttctagcctggttggatgcgccgggatgtgtggagcattgcgagtggtggcgattggcaattgaagacgcatcgctgctgggatttgtttctttcggcattatactaaggttcaagcttagtaagaacttacccgtgtgatgccgtcggaatctcgaccccttcttcctcggaggcatcttgatgtggtgacaaacaagctcaggtgatatcttgccacgccaccggtcggaggaggttgcgtggaagttgaggatgtggcgtagtttccgtgggaggaagactagagaggaaaggaaggtgggcgttgattgcggggaagctgggccactacttttttatttcggcgtggagatgtggagtaattttattttcaatgaatatggtgccggccgaatgccccaaccattctaatatattctcgtttcctcttttcaatgaatatggcaacgaatgccccaaccattccctttgttttgaaaatattttcaatgaatatggaaatattc

SEQ ID NO: 122226 - DNA, 644 bp, Zea Mays
gaaacataggatttccgaagctcgaagttggcctctctgctatgtcgaaggatgacctcgtagacaacctcgcttacaatagtctgaaggtacagaagttgttgacttatgagcagattatttttgtatcttttactcttgtgctgatccttttccttcccccctttttttgtagggcttaattctaagcaacgctttaagggcatagaagaatgctgaagatgaaagctaccaaatatcccttggtaaccttcggtcggaggttatcaaactgaggaatgaagccacagagaaggataaaattctgctttccttggtagacagagttaaggctagcgaagccaatcttgctgcgtagtccgaagctcatagagccgaaattgaaagcttaaagaaaaagcttaccgagaagaatgaagattttgaagtggctaaagcaaaataggaaataagcgaatggagtagtgcaagattgcaaaagaatgtagatgagcttcgggaatcaaaggaaaggtattatgagaaatccttggattgcgctaagaatttgaaagatagttttgcgaaggtgggtgcatactcatctgagcaaaaatttattagaggcgatcccaaaggaatcatcgaatgtatcggcgaagaag

SEQ ID NO: 122227 - DNA, 533 bp, Zea Mays
gcagagcgcgcgccggaggagcagaggagatggacgcgcgcgcaggagctggagcagaagcaccgcgcaaggaagaagcttggctgccggtaaaaataaagagcttcaacgtgcgagagaaatatcagagaaagggatagcgacgagagacgatggagatgagcaggaagggcggcaggatttttctggcggctaaaagatttcttctcaggcacaggcgacacaaggataacgatggcgttttttttccaagtaccgagcgcgcgtgtgggaagatgaggccaagaaagatatttcttttttctaaataattaaatgcaaatatctaatgtctaggatttgcgagagtttaaatgacttggttccaattatatttcagactacgcattttattttctgtattacgaaataggacaccgaatctgctaacaattgctctggttttggttagttcagattcattttgtttaaacagcccgctttagtaatgtctaatgaattcgtagagaccgctcgaacaagagcaaagtaat

SEQ ID NO: 122228 - DNA, 457 bp, Zea Mays
cgggcgtagtgtttggcttccgcgatttcttcttcagataacctttttctcgaagcatgtcgaataataaagtcaagatctttggagggtgcttcgggggtaggagatttaacttttttgggcatgtcctttttcttcagagccaaaccaacgtctgaaggtccttcagttctttgcccagttccagcaggctctgcctcagtgggcattgagggaccagctttggtttgaacgcgagctgtagcagcttcggcaatcttctttgcaggggcaggagttaatgcccttgtcgactccatgacagcgtccaacacgcttgccatcctcctcctcttgggggttattgtaggagcttttgatatcttcggcaattttggctccgctagctctggctctatggccgcttttcctttggcttcggcaccatgttttggtgtttcgattgacccggctacag

SEQ ID NO: 122229 - DNA, 434 bp, Zea Mays
agaccctactcctgtaaacacgattaacctaaaccgattccctataccagcttagccatatacaagtacttgacttatgccctgggttgcaaaaatctgtatagaccgacataaaattataagcacccaatattttcaactatcataacttatccaacccatctagaagcaaacaaccaaactatattctgactaatctcgttcaacttatagctacctactgaactagctacccaacctactaatgtgttacctatagatctatcttaacctcttgtccctaatccggatgaagacatcaagacccgagaggaaggagatcaaactcgttgaggaataataagagtcaaggcatacctccaaaggaatcaagatccagagttcaggatgaagtctttacttattatacccttgccacaacctctacttgccat

SEQ ID NO: 122230 - DNA, 2338 bp, Zea Mays
tggactttaaaattttgaaactttttattcggagatgatgtaacatgacattcgtattatcagagtaatgcttcagtccattaggtgtttagattgtgacatttagccacacttttctgaggctaaatgatagaccagtttctatagcagatttatgtcttactttcacaaaattattttagattaggtgaactcggttatccagtcgttgatcacatttctgtggcttcctacttgggcgtttcagcatttccaattttttgatgcttatgtgcagttagatgctgggtggtaccctctgatctaggtttcctgcctgctgcccagcctgtttagagcttaccaatttttactaggatctagattctttggaattgatatttgacatatcagtctctaaaagaggcactagcctctacctatgtacagagatatatccttactggttggctaattcttatgggctgtttttttccagtgatctaggtacttgctgtttggggggaattttgtcgcagcttggaggagaccgctcgccattttgcgttttcgatcgtcggtgagtttgtgtgcctatacgcctgatctgttttataatgtgttgtttgttacgagccgatttattcactagtgttatgtgacgttcttccatactatgcgatatatagagctatgcctgattctccatgtgtgcgtgttgcgagatgccacgaagcgaagcgcccgaggcacaatgcaattgcacagggttagtcctcacaagttcgctgctttgtttatgcatgcgatggccggtacccatcctaatttgcgatacttctcttgcgggccaaaaaatacgcagcctctttagattgcccaatctttgagacaactgatgccatcgcatttttcatggtgaagacgaagtagacccatctaacctttcggggacctctaaccagccaatacctgcgctacaggaaacacgtgcgtacacccatgttttttcagccattacttcaacaaaaaacaatatggtgttagtgatgcttatgtcggcacaggtagtagatctgtaatgtcattcccttcaacgcttgccgcatccaataggcgatgccggcgcagtagagtacatcacatggtacctgacgagccattgtcaaccacgcttcctttggacaggtcatacgtagatgctctaaaaggtgtgtattatgcccaacattcctggtaacattcttcctgctttgctttggtgctaccctttctcttcttcctgtgtagtgcctaccctgagaggtcatactatggtggacctgaacatgtatacccatacagccatgctgttttctggttccaagagcgtgttaaaaatgattcctgctacacccagaggaaaattgtgtacaacctttgctgcagaggagggaaagtgaacctaaaaccgtttgagcgtccgccgcctttgcttgctaatcttttgagatttgatggaggtactcgctcaaggcgtttattgaggcttatccggtcctacaattcattgtttgcattcacctctttcagtgcagctatcgatagaacgataaataacggcactgcaccctacgtttatggggtggtgcaccataagattggcaccctacttccacagcgtgggacacaaccataatttgcccagttgtacacatatgacacggaacatgagacctagaataggctagggatgtttgagaccgatgatggcgctggtggccagccagaccctgaaatagcgtcggcgctgctcgatatgctgaatgaaaacaactcgcttgtcaaagcgttctgatacgcgagagagcgccttgagcgtgagggtgatcaaaagataacactcagattgctaggctgcaacacacgccatgatgtacaatacaacctaccctcaaatggcgagatcgctgtcattatagttggcgactacacggctggggaatacacatacgatgttcttgtgcatgatagagagtgtggcctaaaacgtgtttcatgcttgcatccagcatacatgcctttgcaatacccgttgttgtttccttacggtgaacatggcttccatcttggtattaggtactttggtgctggcgatgttggttcatcaaagcgaaaatatgttacgatgcttgagtttgtaaggagacacctgcactacaggttggacgagctgaacccatatacctgttacggtagattaagtgatcaaatagatgtcgatgcgtattcaactatcgaggacaacaggctacagttcatagcaagccatcaaagcgatctacggtcagaaactttgcagggcatagttgacgccatt

SEQ ID NO: 122231 - DNA, 773 bp, Zea Mays
agctggtaaaatgttcgtcttcctctacgttgtttcggcgatgaggatggattcatagcggcaacaaggagggcgcgagcaggggagtcgacgacgtagtcaagtcacagcgtaagcagcagcacgaaggacgtggttgttgggtggtgacgaaatccgatgaacgacgaatgacgatgacgtttggcgcgatgagctggacagcctgggcgagctccaataaggtcctcgacgacgaactcgtttcacaagcctagacgtgacatggtggaatggttacggcgttggtgtggcagcagtcagcgtacaacgcgtgcaaggattccaacgacgacaaactgttaaactatgtctagattcatattctgttagcaagctcctattctcacgtatgtaccgagtcatccggctctatcccttgtatagcgtgtgtgctccgagtcttgtggctctatctcttgtaattaggcctatatatactttgtacaccgaatggcaatatacatagaacaattcttcttctattctatttttacatggtatcagaacagtgtatcagcatcagaatgcatttctagttttcaatattatttaattatcctcgatgactatactcattatgtcgggacttttcccatccgtcacaaatctaaggtacccacgattttgcgtcatttttataattatgtgcgcaaccaatttcatctttccattcaatccattcagtgcggcaacggtagagaatttgacaaccatgctctccgtagttttct

SEQ ID NO: 122232 - DNA, 528 bp, Zea Mays
ctaccttcggcatctctcagtcactcacaagaggccatactctataagcaatgtgctcttggactaagtctcttgtgccaataaaggtgcacacagtattaaaggtcctctggcatgtttcaatttcattcccaagagcagtggctggccttctaataccaaagtgagaccaaatagggcgttggatgatcccctttatatcttctctttcaatcaagttgttctttacataaaaccattcttccatccaggctcctggtcacctctttcaaaacgttggaactggatagcttacttcagagcgaggcacaaagtcgtaacaaccaaaattattttgatactgctccttaccagtagcctttgtctcataggacagctcgtgcatgttgcagaagcattttgcactcggctctagtccctggctccgggtgtattctgatgaagaaaaatctcaaaggtctttagcacttcaactagaaatttactcaatagaaaccgaagccctgccttcatgaagctcctataaac

SEQ ID NO: 122233 - DNA, 490 bp, Zea Mays
actatcgctacccgccacgggggcagaaaagaaagggtgcaacttctggaaaggttgttgcttcggctgctccaagcgagcctgcgccgaagagtaaaaagttgaaggtccttacccaccgaccacgctatattgaactggccatagttcctgagtttggcggggaaacttcttcagctagtgaagcgaaagaacctactcctcccacgcagaagattgaagagccggctgtaatgccgaaggcgccttcgactgagctaattgaaacgaaggttgacgaagataaggctgaaagatcaaaaactgaagaagcaacaaagatgcccgagattctaagtccttcagcagaagcaacagtgctgaaggcagaaaaaagttctgcaataacccctaaaaggaaaaggatggtaaatgtattagatattttggaaacaacagattccaaatgcccctcttccataaagaaggttgccgaaactgccaaagcgca

SEQ ID NO: 122234 - DNA, 1082 bp, Zea Mays
atccgatagggcctcttggaaataggtgtcgttcccagttgcaactcgatagcaaattcccttagcagcgggaaatgagtctatctatctgcctagctttggtagatttccccaacgcaattcaaaaacagaaattccatgaatccctgaggtggataagcccgacgactcagcagcagtgcggaattgagtttctggtccggtggatctgatctattctattctggggcaatacataccaaaaggtttgaaagaaggaaggcatagtatataaccaacccgcccatagccggtctaactgctgagagagaaaagttcttttctttccctaagagtcctcgagtacacacagctattgctgatcctttgcgagatcaggatgagacccttcagaatttctaatcaatccatgttagctcaacatcgagacagagcatctcagttggctctatcaaggaagtgaaacatgcattcctaggttgaggttaccataggattgaccctcagtcaggccttcgattccaaggagttgattcagcaagttccccgtgctaccccgcgggaagtctaatcagatcaatcggtggttccgtaatgagtagtcaaatacacattgagggggccttgcctcctccttcccgaccacaccttcattcttttcctcctctgatcttagaaagccaagagacttgaatttaaggcttcaacagttataattatacgaattatacatactaattcgaattagccaataaattagctatcatcttttcaatataaattattgcaatatcaatgaattgcaaaaatgcaatattcaataagtaaaaaacaatactatgaaataacctactcaaaaaaaaggatattattaaacactaataagaaaataagattttatttctattcatcttaatgtttcttattattatatatacctctttgtttaggggattctatgtctaattattccaaaaattggattgattgatacgagttgatttcctattacgatggatggaagaaagaatggatagtccaatagctgcttcagcagccgcaagggctataacaaaaatggc

SEQ ID NO: 122235 - DNA, 273 bp, Zea Mays
gaaacctatgcgagcttagttaatgtcagattttggactaggcttaagggtaccttttcccctaatgtaaccctgtgaacttttgaaatctgtgggatgttgtcaccatgttatcttcatttcgaacctaatattatgattatggcatttttccttccatatgagataataccttgtcgtccggaattgtgaatttggataacaatggcgccaatctctgttttcagatggcagctaggcagcgtcgcgggcataacgagcaggttcccccgc

SEQ ID NO: 122236 - DNA, 466 bp, Zea Mays
gaggaattggcctgccactcaaatcgttcgctgccggtgtgtcttcggcctcgaggtacggacccactgtagttctccatctgttgtggttgctcatgtgatcgacggggtggggtttcgccggagctgtaccatacgcgcatcaggccgccatggggggaaagacattcctgcatggttgttctggtgtcagcactcagcaggggaccttggggcatcgctgatcctcggggcaggtgctcacgggagtagctagtcgtgggagtccttggcgccgtcacaattcctcactggggccggattgcactactccggcaacttctgccatggggaactgtggcgccaccgccgtggtgggcgcatgccttcgcgatggtgactggggaagggataaagtgtgatggctgttcatcacggaaccatcagctcagaataagtgacagataccctttcgcacgttaagtaa

SEQ ID NO: 122237 - DNA, 467 bp, Zea Mays
caatgcgtaagggttcatatatctctcggttgggtagagtacgatggctggtgggtaggtttaggttctattgttgatgtggcgttgagcttgtttgtacccgtttagcaacttcattttgcgaatttatggaactagtgctgtaaatctcaatctcaaatttaagcgtccgaataagactgtctgctgtctgggcctatagattagacacaattttactactgatgaaatttgtgacatgggggataagatttatacattttgttcaagtttgatgtctactagttggctagtttctttcccaagcgtttcttttcaagcttgacgaatgtcgtattggatggcatgtgttacaagatgttccaactctagctatataacgtaaagagggcagacctagtgctagaggttcctacacttgtggagtctagaaaaaggatgaaccaaggcaccccgcaaatacggtg

SEQ ID NO: 122238 - DNA, 975 bp, Zea Mays
gtctatcgatctctagttcacctatacctactcttagatgttgcactctcttagatcatatgaagtgatgtggcctttatcatagtcttttaggttaaaagttaaagagagattgtgcgttcgtgagagactgacaaagtccccataaacgttactctgttcccctttataggccaaaggaagagcagtcgtaccacgaatttggtcaactaagacccaataatcataaatcttatcctagtcgtgtggtcttacgtagaaccatgccttcggtcgtggcataggttgtgtcctactttagtggtagtcatactgttgtaggtgtagatatgttatgttcttttatcgaatagtagagtccacgccatcaaatacgacgtagttggtaaccaatgaaacaatctatacttgataagagcaagtataataaggtgacgtggacgggctgcaagagatggcacatggaatttatggtgacatagaagaaagagaaatagagagagaagagaagtcgactgcttgctagtagccatcagaaagtggggttgctcatgaacttcattcaaatcattttgtgagaggaagaggtgaaagaagtgttaaatgtataacttatattatgagagatttattatatgactagacttttatttggttatatgtgacatcataaaacccattatgagccatattattaaccttgctctaatgcttccgcccgtgtctacatgattgatgcatgtatgatatagtggtctcgagcagtgtgatgtttgagttatggcgacagtgtgtctgttagactctaattacgcatatcatatttaatgtatgaaaaccttatctgaagcaccagcgttatgagaccgttaggagtagatttttgacgtggcatcctatctttggggttgtcatgcctttggtgggggacaactatatttctttgacttgcaattgccttttatattttatccg

SEQ ID NO: 122239 - DNA, 613 bp, Zea Mays
gtagggggctttatataacactccaaccgggcacatctccatccatgagctaagaaacatcaatcataagtgaagggaccatctcctagccatccaagtcatccaaatgctccaaattgagtgtgtgcttataatatacatcttttgacagctagaatagcaaagagttgctagaacacttgtattgaactgagcttagtgcaaaaagaggagaaatcttgtgatcaagttatgtggagttattgctcccaagttgtaagcgatcaagagcctccgacttagtgtggagtgccttgtcaaatattgatctcacccatttgagaaagggaagacccaaaattgatcttggtgatcgcttgagtgaggaaagggttgatcttatggaaggatgggaataggaccaagcgagtgacccaagtgtgaaggtgatcgtagcgctcattgaggccgcaaaggaggttgaggatgagcgtgtgattagttacgtgctccatgaggtcatagagggaggccaccatgtgtggctgtcatgcccttcatctggcggcagtactccatgatggagaggtctccctagatgaagcttcaaaaggcagtaccaaggagaagagcg

SEQ ID NO: 122240 - DNA, 562 bp, Zea Mays
ccaaaaatttaaccatagctgaagcttgatttttgcattcaaacgaagctccagtttggattctgctttgtcatgagaagaacttcggaaaaaaggttactaacttctaaggaatttttcaagaaaatttaaaatcaaatggccagagtacgctccactgctagggtcgagcgtgatggagatgagaccgaagccgttgaaactgttccgatttctaaagcaatgaggcgttctaggctggtttcatcagaggacacgcctgctgccgaagcaacagaagctaaagctgaagaagctagttccgaagatgagtacagctgtggggcgccaagtaaacctagtcatctggactttggaaagtccaccatctctgaagctgatctttccaaaatggtgaagctgggctatttcagcgaagcaaaaaaggagctggttcgttttggcggggaggagattactccgaagccggaaaagaatgaggtggttgtgttcaaaagcttctttaaagtaggattaagattttctttgaatgagatgattgctgatgtgttgaagaagtttg

SEQ ID NO: 122241 - DNA, 895 bp, Zea Mays
tggtccttgaggaggagctcttcctccgtgctattgaaattggttggccgctatctcgcgtagaaagcgtgtattttccacggtggtgttggccaaggcagtgatagcctcggccaaagtaggtggtataggtggcgggttgggagtgtcctccccaccgcgggatgtccccgcaccatcatgtgcacgagtccaggatggcatctgaggcaaagaaacatttgaaaaaatataacatgccaacatacaccatcatattacattgctgaaatgtaataattatatagactccattatacaactcaacttttcttacttattttacataagtacaatacttagactatactactctagtcttcttcatccttcgttgctccattgtctgctgtaggagatcgttcgtcagcaaggttcatggaagaagggggcctaaaaaggtccagctccccatcaggtccttcattagctattcccgatggtccggctcccattgcagcaacgtctggtggcacgtctgggtgcagccgatcataaaatacatgcacttcttcgtgcaaagtgttgtagtatgcctgcaggttttcgaaggatgtgctaagttttgccacgcgagctagagcttttgcttcacagccccaagcgaaagagcgcgagttaacggcccaatcaatggttgtatcgcattccgaaagtttgtactgcagacgactcactttggctgacagctccgcaatacggtggctatcccactcacgtgccctattcctgtggcgtagttctgaccggagttgctccaccctggcttccaggtctccaattgggtcattactgccactactacttccttcatgcctggaggctagctgatgtcgtggcacaccatgaggtccag

SEQ ID NO: 122242 - DNA, 546 bp, Zea Mays
gattcttgcaattgctcccagaaatgtgctacaaatggtgctcctctgtcggacacaatagtccttggtactccatgcaaacgaactatctgatcaataaaaattgttgcatacttttctgccatgtgggtggtatgtacttgcaagaaatgcgctgttttggtcaacctatccacaatgacccaaatagaatcgtggtgccgggaggtattgggcaatcccacaatgaaatccatgcaaatatcctcccatttccaagattgtatgggtagggactgtaaggtgcctgctaccttaaaatgattggccttgactctctggcaagtgtcgcattcagatatatacttagcaatttcccttttcattctggtccaccagtacaaggatctgagatcatggtacatcttgttactgtcggggtgcatggaaaatttggaaaggtgagcctcatccattattttctttctgagctcggggttcttgggaacaaccaatcggtctccaaaccatagaatccctttgctatcctgatggaaacatttgtat

SEQ ID NO: 122243 - DNA, 528 bp, Zea Mays
tctcctttgatagagaccgggtgaccttcaagaatctggggatctttagctctcatgggttgttgaactgggttggatgaagtgggctcttggatccgcagggcactacattggttatgggttaccaagtaggcctccatcaacttctggacgtgctcatccttggcttgcttcagggcttcaacagcaatgacttcatgacttccaaggcagttgcacgggcttgagctgtggtgagatccacatggagcttacggttgtgcttctctgtatcttctactcgggcaatcatctgacggtggtgccgagccaagaaatcatactgtgcatccagggtgagcaggtatgcagtgaggtacacgactgtggggtcatcctcaagcagttgttgcccttccaatgcacacatcctggccatctaaacgggacgatctctctgaaagggaggaaagaatctgagcggggtgtcggccacttcttcatagatttgacacagggccctcaatgccttgcgagcgatgacttaac

SEQ ID NO: 122244 - DNA, 644 bp, Zea Mays
aggactttgcaacaagaaagcagtactgtcagcataaataatagagtaactcgatgattagcaatggaaaatcaagtgatcaaaacttacaaaaggaggaagattccatgcagaataggatcgaggagcaccatcattaacaatagcgcccctcagcatcaactcaacttagctcaagacatcctcctccgagattcgcctatctgttacccaagaacgatctctaacccagtatacagctatgtagggtatactctctcttttagaggctgaatgttttttaacacagaatcgatcaccaaggcttcgacagtcagaactctatccttcaaattagcaatctcgactaacaaaatcctcggctcagtcacttcagaatcagttgggccctctatccaactgggcactcgcacatctggctacctcctagagctgggaggtaggtaattgttgtggttttcaagggtaaaccattcgtatcgccaccccttaatactatccttcaggggcatatccaaacatttagctttcttgcctcaacgaagttctaggctagcccttccaaccacttgttgttgtccacccaccatacctggcttacagtggtagagatacctccacaatctaaaatgtgggctaatccc

SEQ ID NO: 122245 - DNA, 543 bp, Zea Mays
tgtgaccctgccagagctgatcccaatgggtgtgaccctgtgccgtttattgtctgtactattgacgaggacgaagaagaagaagaagtcccactaatttggaagaacagtcgacgttacagagtaagtggggggagtagtgatattccttctccagccatgtctgctcttgttggtctgcaagaattatccatagaaaattttgatcaggctctcgaggatgttgttcctgaagatatgttgtccgagccaactgatggtgagatgatggacgtctgctatgacattccggatgtgggattagaggtatcccgggcagcgtctcgtgcctcgtcgaccttggaaggcggtcttcggagccaagaggttggtcaaggttgttcaattcccatggaggtgactgagagtccttcagccttagaggtggctgttgcggagaacccagtcctcaagaatggtgccagcggttgcccagccctcgagggtgttgctggtaatgatccggcttgggtgggtagcgcaggctgcaacccagcccccgag

SEQ ID NO: 122246 - DNA, 373 bp, Zea Mays
ggttaggaaaacatgggtgtatatatgtatgtccactttattatgtaggatagaagatgcctttaaagcattgataggtttgggcaagaaaggatagggtaaggaaatactccatcccaagattgtggatcttgattcctttgaagatctggcttgaatcttatccttccttgatttgatgaggtcgatcaccttcaatcttcgttctcgaagttgttatccgaatttgggacatgtagtgtaggcagattcttaggtaaaccaaataggttaataggtggttatgagtttaaataagtttaaacaaagtctgtttcgttgttttgcttttaaattggtcggataagttatgtaacctgttatatcggtcaag

SEQ ID NO: 122247 - DNA, 369 bp, Zea Mays
gcgctacggtggctaatcggaggcgggagtgggtgctctgggttcgtgataagctaacgaagctgtctgtgcaatcaatttatagcagctggccacggttgtctcgaatttgaaggagatttggatcacggtggtgaccggatgttgcactggtgagcttgtcgtggcattcaacgacactatgactcaagggcggtaactcttagcttgccacggcttcgagtacgtggtgaaaagactacggcatggcgcaatcgcggtgaatgacgatctccacggcgacgaccgtctggccatgtcgctgcgcaagtgggtacggcaactatgcagtaacagtgccccaactttatcccctgcacgagatctttc

SEQ ID NO: 122248 - DNA, 721 bp, Zea Mays
ggtagtactgcctccgaaccatagaccatgaagaagggagtatttccatgcaaagctcagctaggttgagttcttaagctccaaaccacatacgacaactctctgatccacttccctgcgaacttttcattcttgtcgaagactttcttcctgagtgcttccaatatcattctattagccctttctacctgaccgttggctcttaggtgtgctactgatgcatatttgatctggatgcttctttgttcacagaaatcaaagaattccgagctagtgaaattggatcccaggtcagttataatgctattcagtattccaaacctgaatattatatcttgtatgaattccactgccttagctgaagtcagagaagcgatgggtttgtactctatccatttagtgaatttgtcaatagcaactagcacgtgagtgtatcctccttgagctttcttgaatggtccaatcatgtccagtccccagcacgcaaatggccatgttacgggtatggtctgcagttgctgtgctggtaaatgttgctgctttgataagtattagcaaacttcacacctctggactagctcgactgcatcactctttgatgttggctagtagaaaccagacctgaagaccttcccaactagagtcctggatgctgcgtgtatcccgcattgcccagcgtggatctcatctagtagttgcttcccggtagccgaaagaatgc

SEQ ID NO: 122249 - DNA, 376 bp, Zea Mays
gtgatgtagaggtccgcttcccagaatagctgtttggaggtagtcggcgccttttgcagtatggctcggacgaaggccgagtcattagatccccggtagaagtcctcgattactgctgcttccgcaacctcggggatacgatttctcatggtctgaaatcttttaaggtacgaccggagagtctcatcccctcggtgcttgatggatttgaggtcccatggctgcgccggtttgtcggagagagattggaagttggcgatgaagtgccgaatgaagtcgctccagtcgtcgatgcagtgtcggggtagttgtcgtagccattgcaacacatcctgcctgaggacgatgggcaagtacgcagtcatcacatcttctg

SEQ ID NO: 122250 - DNA, 327 bp, Zea Mays
tgcaccgttctcaatgtgttctttcatcaggggtctcccccatctctgaggctttgtcccgagagacgggttgagccgggtcctattctctggcttcatggtgtcatcgcacgttttggcgtctgtttctccgtcgtcctacgtcgcgctggggaggttcttcccctagcacgttgggttcgtcgtcagagatgggcaatgactccagtctcccctaaatgaagaggatgtcggggaagaaaggagtaggtgcagcggtgtgcttcttcccatcctcctttgagggcggaggtatcgggtgatcgtctgttgcgcttttccgccctg

SEQ ID NO: 122251 - DNA, 491 bp, Zea Mays
tcaaagttgtgctgtcagtcacactaataactgaatcaaggtcaccagtgacattggcaagacttttgggtcaaattggagtaggatctagtgctcgattgaggatagttactatagtcgatttgtagctggttggttgagctacaactttgttaaagacggattagtaagtattcacatgaaaatctgagatctgggccctgcaaagtggtctgtcagggtgactgaatgagaagctgatgatacagtgcactggaaatatccccaatccactgaatatcgccgcctgtgatcttacgccgcgattgtcgctggcaatgtgattcatgctcaatggagtactggtagttgctcggggaagtaaatatcgccttgtggatgaacttgagccactgtttcactccggccgtcgtgtccacctgactcacggccgattcgaatgaactcaccggaattagccacctatcagccatgcgccacgtgccttgatg

SEQ ID NO: 122252 - DNA, 531 bp, Zea Mays
taaaaatacaaagaatttgcctagggtcaatacatcaaaagtctagagctacaataggagaacaactttactcaagtaactaagccttgatcccatacaaagtttggagaaaaataagctcaaagttgtgttgtcagacactctactgactgaatttagggcaccagtggcattggtcagaattttgggacgaattagagtgagatctattgctcgattgagggtagttgctatagcagaattgtagctggtatgaagggctacaagtttgctacagatgtataggcaagttgttgcacaaaaattcgagatttgggcactgcaattcggcctgtcagtcactctgaaccagatcaaagcgccagctcaattaactcaccgccggcgaccgtgcgcccggattcgcgctcgccacggtgattcatgttcgacgctgttggataacatagagggagtaagaaatatcacctagtggatgaactccggccactgttcactccggccgccgtgtccgcttagctcacggccgct

SEQ ID NO: 122253 - DNA, 340 bp, Zea Mays
gttgtaagagcggggtaagacgcttcataatttgtattccaccaccaccaccctgagagatagttgtagggttcacattgtttgttgcctttttgtctctgttttgtgctaacaatgacatgacctaagaatcaaatggacaaggacaaggggcttaagcttaacgacgatgagtgtgtctctcagctagaattgaaggagatgatgcgcgcgatgactgaagcttttaaaaaataccaggactctgcggcgacatcctatgagcagcttgatcgacgggttgctgaacttgttacatgcatggacgtactggaggatcgtcccccaccaccaactccag

SEQ ID NO: 122254 - DNA, 1189 bp, Zea Mays
acagactccaaggtcgttgccagctagatcgaaaaggaatactccgcaaaggagcctatgctcatgcaatatctcgccgccgtccgtagcctcgagaaatagttcaagggtttcaccctgtagcatgtcgaccgcaacaagaacgaagaggccgacgcgttggccaaagcagcggccaagggcgaggccctgccctctgacgtgttttaccacgtcatcggcacgctagccgtccgcaaccctgaaggtttgcaaataactcaggatgccgaaggccaccgaattgtcaacctcatcatggccgaagactagcgagccccaataacactatacctgcaaggccactaccatccaaccgaccgcaatgaggccaaacaactgaagcacaggagcaggactttgcattgatcgaaggccagttgtacaagaagggaatcaaccagcctatgttgaaatgcataaccgaaaccgaaggcataaaaatcctccatgaagtccatagtggaacctacggatcacactcaggaccaagggccctcgcagccagggtgattcgtcagggattttactggcctgtgataatctgcacagccaaccgagtcaccaggtcaagcgaagcattctagaagttctctcctcgctcaggcaacccttcgcaattcaccaagctcatcgcacacacatggccacttcaacactgggggttggacatcgttggaccactgcccatagcccaagggaacctcaagttcaccttcgtcaccgttgaatatttcacaaagtggattgaggccagggcagtctccaccataacatcgaagaccacccaaaaattcttctggcaaaacatcgtctgtcgcttcggagtcccatccgaactcactgtcgacaacggcaaatagttcgacagcgaagacttcagggaattctgtagttccatcggcaccaagcctgtcttcgcctctatataccacccacaatccaacggtgtcatcaaacgcgccaatggcaagatctttagcgccatcaagaaaaggctccttgacgacaaaaagggcaaatgggccgaccaattacttgaagtcgtatgggccctgaatacgacagagtgccgagcaaccaggttcacacccttccgcttgatgtatggatctaaagcaatgacgccgcaagaattaaatcacgggtc

SEQ ID NO: 122255 - DNA, 516 bp, Zea Mays
aacatagtgctcagtaaatcttgcacggaacatgttgagtgcgcaacggttgaaccatggaattaaattcagaaatgactcccctcattctgacaacgatttgctcacgtagttgcgtgtcctgttcttctgaccagccatgcgtttccacaggttctaccgtaatagatgtcaggtttgatggcctacacatgcctgatccaagattggtattactatataaccatgtcattggacttacctggatccggcacatgcatatgttcttcccgatgaggcacacgtgcctcctgataatgctttcactgcaataagcactgacctgtcccgaactgcattcttgtatagtgatcgtgccccaccaatcttctccgtaattccgtatgtatcagttaacgctacacaagtacacaagttagttctgattttccactagcccgtttggcatatttttgccgctgatcgatgcaaaagtctgtctttggtgttccttggaaatgtcaggttgtttgtgac

SEQ ID NO: 122256 - DNA, 349 bp, Zea Mays
tcttcatctatcttgaggtctgggagttgttccctgcaagctctttctgcaagacttgctgtctcggtgtccaggcactgagccttgcgtatgaggtcttctagcgttggcctaatttctaggctaccactatctcccaaacaagcattcagttgagttgattctctcttccagtcttccaagaaatcggttgctttctccccaaaaggtttccggctgagggcgtctgctactacattggcctttctggggtggtagtggatctcaatgtcataatccttaatcaattccagccatcttcgctgacggagattgaggtctagctgagtgaaaatgtactttaggctct

SEQ ID NO: 122257 - DNA, 452 bp, Zea Mays
aatttaggatgttacatgtctggtcgttaactttaataccgatatgaccgccggaaataattgatttgatccacgcaatccaaacactagaaaagcccttcaacctaaaagtgtgttccacaaaagtccacttaactttatcgtacaccttttcaaaatctattttaaaaatcactccactatatttcttcctatgtaactcatggatggtctcgtgtaaaacaacgaccctagtgactctcgatcaagattcaagacaccaagcaatagcctccattagcttattttcttccctttgtagcctagcatgggaggtccagagccatgacatgatagataattgtcgccgtgagcacgaactgaacctaaacaacctaaccaaccctagtggtaagatcaaccttccagccatgaaggaggtctactagccgattaattaggggaagtagctg

SEQ ID NO: 122258 - DNA, 313 bp, Zea Mays
tggtgggattcttacaccacttcccatgatgttgttgatactatcacatgggtagaatttgctacttagtttagaaactatcacattcctgctggactggtgaagataaagaagaaggaatttctgtcgctgaagcagggtagtatgtcagtcagcgagtatcgcgacaattttattcaactatcaagatgaagtggctgatgatgaaaggaagtaggaacactttatagagggacttaatgaaccactgcattatgcactggtggctcacacctttccgtcattccagaggcttcttgacaaggctctagcc

SEQ ID NO: 122259 - DNA, 506 bp, Zea Mays
gctgtttttatttgacaagctctaattatttagtcaacatgtcacaagttggcttgtattattttgataactgaaagaggtatgtcacaagctctaactacgctgcttgagttcacatgttctgtaatttctcagacaactgaactgaattttggggttcgaagacgcgatgttgcatattgattttcgatattgatgtgtgttgcaggatggtggtaaggttcttcctgatttgaacggtaggatgttgcatgatgttgatgcctgatccaagagctcacacccgtttatttagttcaattcagagcttgcatgctctatgtaagaaaactgctatgtgatgtgtttttaacaaactgctacattctgaatggagtttgcatgctccttgtactgatacatgccgcttgttgttgatcgaaaatttagttttcaaactatatgttgaggacaaatattttgtaaactgctacttgtactgatgtctgcttgcactgtaatttaac

SEQ ID NO: 122260 - DNA, 320 bp, Zea Mays
cacgtccagcatctgatttagtatacatatggtccagggtctcccataaatcatgagccacttcgtggtgcatgtgtatgtcatatagttgatctgacaataatgtcaagatacaaccaacacatgttttgttatctgactcgaagttacgatcctgctcctcagtgagagaaagaattggggaaatcacccgccagatcctcaacgacatgaaccagaatttaaccctagtctgccatctcttaaagttttgaccaccgacaaaccggtcaggtttcaatgcatccaaaggtccagccatgttaattttatcaggtttc

SEQ ID NO: 122261 - DNA, 432 bp, Zea Mays
agaatctccatcagaaggttgagaagtataattgtttccgccaggatgaaaagggtgtgttatggttcagaagcagattggtgattcctaaggaccaggacctcaagaggaaaatcttggatgaggctcatctctccaaattctctatgcatccaggaagcaccaagatgtaccatgatctgaagcctttgtactggtggaccagaatgaagagggagatagcccagtatgtatcagaatgtgacacctgtcagaggataaaggcaagccacctgaaatcagctggagctttgcaacccctgtccataccttcatggaagtgggatgacatcagcatggatttcattgtgggtctgcccaacacctctcgtcatcatgattcgatttgggttattgtggaccgactaacaaaagtggcgcattttcttcctg

SEQ ID NO: 122262 - DNA, 629 bp, Zea Mays
ggatcaggtaaccggttatccttatgatggccttctacactcatatgatcaaaggtggcttccagtatagccccctgaggcataccggtactgcatcccactattgtgtagtatggggtgaacctctctggctccctagatgtccaaaaatattcgaccttcttatgggtggtggcatactatggcttcgatgtgccgcaggtgggagataatagtgtttgttgaggtgggtagaaaaaactatgtattttgtgtagcactctatgggaccgagtagtctgagattatatccgaactatctgatagtgtttggcattgcctgtgggtaacttagcgggcttgacgatgcactgaatggtccggtatatggagccggatggtccgagattatactcagactgtctgaccgtactcaatgccaaactatcatacattgcaggcggtggcagcggttgtcctggatatgagttcatcgacataccataatatgactgggactaagaaggtctgttttgccgatgttttggcgcaactattttagtgcccaatttatgtgatggaaaattaggcatatgaactttttctatttcatcctcgatcttatcgaggaactccaccataagttcaat

SEQ ID NO: 122263 - DNA, 654 bp, Zea Mays
ggatgatgagtctgagttgaccactttagatagattttgtgagctttctgctgcgccgcgtagaaagaaatcgaacaaggctttctcaaatagaaaggttaatcgtccttctataaagccattttcaccctctaaaattagtttaaaatgaaaggaattttttggaattgtagaggtcttggggatttggctaaacacaattacttatctcacctttctagagaacatagactcgactttattgctctcatggagacaggtcgtagtgcattctcagagtctactttgagacatttttgtagtggcgtcgatttcctctggcaccttatgccacctagaggaagatcaggagggatgttgttaggggttaacccgggggtgtatgacattggagctattgatgaaggtaatttctattgtaagttccggctccgaaacaaagaggacggattcatttgggccctttttgctgtttatggccctgctcaagatgatttaaagaatgattttttagcggaaattgcaggtgcgtgtagttctgagacacatccgtttatcatagggggagacttcaatatcatgcgaagtgcggaagacaaaagtaatgataacttcagccttcgatggcctaatttgtttaatagtgtcatagcg

SEQ ID NO: 122264 - DNA, 445 bp, Zea Mays
gttaaagaagggaagttgttatcagatggctgttggtagcagtgaagcagatccacctgagattatcaaggttgtgtccgagtttctagatgtgtttccaaaggatctaccaggtatgccaccagagcgaaaagttgagtttgccatagagcttcttcctggcaccgcacccatctttaagagagcttacagagtatctggaccagagttggttgagcttaagaagcagattgatgagctgtcagagaaaggttacatctggccaagaacctcgccttgggccgcccctgtcttattcatggagaagaaagatggcactagaaggatgtgtatcgattatcgagctctgaatgaggtcacgatcaagaacaagtaccccttgcccagaatagaggatctgttcgaccagttgagaggagccagtgtgttttcaaagatagaccta

SEQ ID NO: 122265 - DNA, 591 bp, Zea Mays
actccatggcattccaaggaagatagtgtcagacaggggaacccagttcacctccaaattttggatgagccttcagcaagctatgggcaccaagctagactttagcaccgcctatcacccccagtcagatggtcagccagaaagggtcaacaaggtacttgaagatttattaagagcatgtgtgttaacattcgacagaaactgggagtccagtttgccttatgtagagttctcgtataacaacagccatcaggccagtatcaagatgtcaccgttcgaagcattgtatggacgaaagtgccagaccgctctcatgtggtccaatgtaggggaaaagacactggaaggacctgcctttgttaaagaggctgaagagaaagttgccctcctccgcaaaagattacttgaagctcagagtcagcagaaaagttatgcggacaacaggcggagagaactcagatttgaggaaggagacttcgtctacctcaaggtctccccgatgcgtggtgtcaagaggttccaagtgaaaggaaagctagcacagcgattcgtcggcccctatcccatcattggtagagtgggacccgcagc

SEQ ID NO: 122266 - DNA, 304 bp, Zea Mays
atgtcgtgcaatacgaaacaggttccaggtcaagggaactcgagatccgctggtatagcaggatgctgagggtcaacaccgaggatgagggagcgtggaggatgtgggaaatcaacagagggagattcacgaatgccagggagggcgccaccgcggagatccagatgcggtcgccccttcttgtcgcaaggatgatcccgtccttccgtgactccgatccaaataccgtgccgtcaaccgaacgcacgcaaagccactgaagcgcgaccggatggcggattcaacgtagcgaacaggatttcag

SEQ ID NO: 122267 - DNA, 769 bp, Zea Mays
agccgatagcatttgcttgaatgtaagtgtggaaataagggggatagcgtttcccgctaacctcatagtaatgggtactcagggagtagatgtcatcctagggatgaactggctagataagtatcatgcagttatcagttgtgataagaggataatcaagttgatgtccccattaggagaggaagtggtgaccgagttagtccttcctgagccaaataaaggaagttgttatcagatggctgttgatagcagtgaagcagatccacttgagattatcaaggttgtgtccaagttcccagatgtgttcccaaaggacttaccaggcatgccaccagagcgaaaagttgagtttgctatagagcttcttcctggcaccgcccccatctttaagagagcttacagagtatctggaccagagttggttgagcttaagaagcagatcgatgagctgtcagagaaaggttacatccggccaagcacctcgccttgggccacccctgtcctattcgtgcagaagaaagatggcactagaaggatgtgtatcgactatcgagctctgaatgaggtcacaatcaagaacaagtaccccttgcccagaatagaagatcggttcgaccagttgagaggagccagcgtgttttcaaagatagacctgaggtcaggttatcaccagctcaggattcgaccttcagacattccgaagacgacattcattaccatgtatgggttgtatgagttcactgtgatgtcttttggtctaaaaaatgca

SEQ ID NO: 122268 - DNA, 449 bp, Zea Mays
cggtgttgcatggcagtgtgggcgaagcgtggagcagggaggcccaggtagcgaccccgaggaagagacggtcggataaggcgatgtaggtgcgcctgccacaactgctgcataaggaaaatatgtttcataaaaaataacgtgtcaagacacgagaaccttgcatgtacgcagatctaagcaatagtagcccttatgttcagctgggtacccgaggaaaaggcatggtgcagatcgaggatgtaacttgtgcagcatggttgaggacgtgttgggatagcacaagcatccaaatactcgaaggtgtgagtagtcgggaggctggccaaacagacaatggtagggggtataggaagcaagggaacgacatggacgacgattgatcaggtaggtagctgtgctgagcacttcaacctagaattcaaaagggagggatgcctggaattgaa

SEQ ID NO: 122269 - DNA, 1188 bp, Zea Mays
gtggaggttgcatgctttgccttggggtcctagcctggcaatgtgttgggagagatcttgggcgaaagacttgacgacaatgatgcctgtgggcgccgcttcccatgttgagggtgtcgcattccccagcactatctgtgaaacccgtggccgcgcggcgcgtcgccgtcgacgtgagcgatcacggtgatcaccgaagagaactagaggacgcaaggtaagtggttggatttgtttttgtctattatttctttcgtgaaaagcaagtctgcagtttacctcaccttaaacgatctagtcacgcaggccaacatggccaggccgacacggccaccatcacacaccaacggcccacacggcccaccacacccagcaattcaaaaaatgaaaaatactacttcctcccgcgtccactctcgacgcctgcatccatcacgcgcgcaccacagtgctgtcatcttccccaccttcaagagttgcattaggggtatgcagtgatcaaattgcctcattggtggtagatgtgtaggaacattaaacaattcagcaaactcttgcagcagcaaactgaatatcagcctcattaacttgactgccagaatcagcagtggattccactagcaccatggcccaaatatcatgtccagcaagccatttctgcacttgaagtgctgatacctcctgaatggttgaacccgggtggacatcatccccatataaggtcacctcctgtccaccatcttgaaactgcagaaccttgtgtacccaatcacattccatagggctatgttgcatcaaccaatcataacccaatatagcatcaaaagcttttaaatgcaatactctcatgtcagtatgatagaaatgaccatgagaccaccattcaacatttctaaccatagagttgcaaatcattttgtgtccactggccaccttcacttgtacagttgggcactcttccacctgcaactgtaattgtttagtcatgtgttcactgatgaaagtggaggaactgcctgaatccaccaacattagcatcacttgtttgcccacaatagacctcaccctcatactgtaaatactgtcagaacctgatagggcctgaaaggacagatgacagcatacctctctttgttcatcttcttgttccaacgtctgtaaaacttcatcagccaacacctctggttc

SEQ ID NO: 122270 - DNA, 778 bp, Zea Mays
caaacttggtacgtttcagttaaccttccttctttgcagaatccatgcataagtgctgtaaggctaaaactatttagcacagcacagttgttttctagatcagcaacaaattccttagctttcatggcacctagcgtcaaacaaactacacttatcagtgacctgtaagtgtaattgtcaggtgttaggcctctatctagcatctgatcatataactggaatgccttcctaatattgcctacacggcaatacccttctatcataacattaaaagtcacttcatttggcactagggaactctccatcattttatgaaacaacctagttgcttcatccatatttccatccttgcagaaaccactgataagagctgtaaatgtatatacattccctgaaacagcattcctggtcatctccctgtggagctccattgcactggccagatcccctttcctacataaaccagctataagaggggaatatgatgctggacttggtgtcaatcccttcgcaaccatctcattcaaaagacctcttgcctgatgaaaattgttgtgtttgcagtaaccattaattaaagagttgtatggataaacagtcattctgattcccttctccctcatcctatcaaacatgcaaagtgcatcttccatcatacccctcttgcacaaggaatgtatcagtatagcataggtcacctcatttggatctagacctctgtctgccatccctctgaagagcttttctgcctccctatatcttccatccttgcccaatc

SEQ ID NO: 122271 - DNA, 963 bp, Zea Mays
cccaactcttgtcaaaggtcaacacacaagctctcaataaatcctcgaggactttgttgactctttctgtctgaccatctgactgggggtgataagcggtgctgaagtctagcttggtgcccaaagcttgctgaagactcatacagaattttgaggtgaactgtgttcccctgtctgacactatcttctgtggaataccatggagtctgactatttctttaagatatatccgagcaagggtggctcctctgaaggtagtttttactggaatgaagtgggctaccttggtaagacggtcgattataacccagatagaatcattccctttttgggtccgaggcagtccgattacgaaatccatgcctatttcttcccacttccatttgggcactgggaggggttgtagtagacctgcaggcttctgatgctctgccttagttcgctggcaagtgtcacaccgggccacatactgagctatctcctttttcatccctctccaccagtatctggtcttgaggtctaggtacatcttggtggtccctgggtggatagggtaggctgagttgtgagcttcatcgagcaggattcctcgtgcctctccctttggtatacacaaacggtccctgaaccaaagggttccttcttcatctgtcttgaggtccgggatttgttctttgcgagctctctctgcaagacttgtcgtcttggtgtccaggcgttgagccttgcgtatgaggtcttctagcattggcttaatttctaggctgccactatctcccaaacaagcattcagttgagctgattctctcttccagtcttccaagaagttggttgctttctccccgaaaggttttcggctgagggcgtctgctaccacgttggccttcccggggtggtagtggatctcaatgtcataatccttaatcaattccagccatcttcgctgacggagattgagatctg

SEQ ID NO: 122272 - DNA, 389 bp, Zea Mays
ggctgaaatgtatcgaatctataagtgatgaattgcttgggccatattccaaagcagaagataatgcattatccacatccttcgggagccgagggaaaaagagattgaatagagtttttgatgctattggttttgtttaccccgactacagctacccgctgcggggacggggaaagaagaggaaagttgctgcttcagccaagattgctgcttcagccactccagatgagcctgcaccaaagagcaaaaagttgaaagtccttacccatcggccacgttatattgagccgaccgtggtgcctgagtttggcggggagacttgttcagctgctgaatcaaaggaatccattcctcctacgcagaaggctgaagaaccggccatcatgctg

SEQ ID NO: 122273 - DNA, 405 bp, Zea Mays
caaccgcgtagtccgttcgtgcgaggcatggcagaaattctcacctcgagcatgggcaccttcacagctcacaaacctaatcactcacacttggcctctgcaacactagggctcgacatagtcggtctgctacccatagtgcagggcaacctcaaatttgccttcgtcgcggtagagtacttcaccaagtggatcgaagcaagggttatatacacaatcacagcgaaaacaatgcaaaacttcttctggcagaacattttctatcacttcagagtcccctccgagccgacggtagacaatggaaaacaatttaacaatcaagactttcgtaaattttgtgtttctattggtacacgcatagtcttcacatcagtatatcattcacaatccaacggagtcgtagtg

SEQ ID NO: 122274 - DNA, 282 bp, Zea Mays
cggtgactcatctttgctccggccgccagcttatcttccccaaattcggagccaccacttctggtcactataaattgacgccccgcctgctccgctaacttgttacgaacccagagcaccgctccttgcccccgattagccaccatagccggagaatttaaattttcccctaattcggccgccatcgccgccgaggagaactcttccgtggccagcttcacctaaggtagttctagcccaattactatctgttctagcttcctttaggtgtggtgatgctcc

SEQ ID NO: 122275 - DNA, 440 bp, Zea Mays
ttatgttatttgtgcacttgtctgtttctagagcaaaactcaaactggcagcatacttgtacttggctctgaatggggtggcgattattgctgcaacccttgcccctacatgacaccatgtgccattgaaatggatagtccatactacttctgttggttgttgtgaaggtgttaagggccatgtccaatctacaatgaagtcttcgaggacttggaactttattgtgcttctggactcgaaggtgatgttatatctgatagttccgttgactgcttgcctatccttgtggaggcctttaggttgttgaataggtcgcccagacttcgatctattagaactcttattttatgggattcaaaatagtgacgtagcttgcgggatgccataatgattgcatatgctattttctccatttctatcatcttggacatagatttag

SEQ ID NO: 122276 - DNA, 432 bp, Zea Mays
agagattgtacttgagagtgaaacctttcatcattgctggatatgcgagtttttgcgcgaaagtcaccagagaccgggtttacaaggaccaaccctaccaagctggacaacagatggcaccgagactaggtttacacagacgggccttaccggaccgggacccgagcagcttggcttaagggcaatacttttcctttgttgtctcccaggtgcttttcttttccgtgaggtaatttcaattatttggtggaaacacaagaccagagctggtgctagacacagcatgggatcgaagcttagcaaggtacccatgagatccctatcttgttgtgatcaatcttctggatcatatacctgaaccctgctaagcctattttcaagccagtccttgaatctggaatatgtccagaaccttagttacctagccaacaa

SEQ ID NO: 122277 - DNA, 373 bp, Zea Mays
tcgaagacgggaccgctccatacccattcggcgacgtcttccacttcgtgacgtctcaccgatgctctatttcgacaccactctttgcctatgcgggtcctcagccctcgccccggccgaggtggccagcgtttcgcgtgtatcgggtcacaattgtgggggacagatatccctcaggtccactagaaggctagaaggcctcgcaaaaggcgttgggcctattgtttcgcaagatcgtccttccgtgggccaggggtgaactgctggcagaatgggccgacacagggaatgagcaaacgcgggccaaggcggctcgtggggtttgagcgttatccacagctctgatccgattctcccgcgtgaccaccttgaa

SEQ ID NO: 122278 - DNA, 312 bp, Zea Mays
cttgaagttgcgggttctctgtcagaatagctgggcacctgtgtccttgaccgcgccaccgcccactgtttatcgccgttatccaattccccctcggtaaaacatgcagctgcttgctattactgacccgttgaagtcgtttcatgctccataccacagtcatgccacgtctatgtgccctggtgtcgcagtgaacttctctggaagtcgtccggccacctcaccgtcgaccccgccgctttgcaaaattggccaagcttttagccgtggcttataaattgaccatagcattgtgttcgcaaactctttacg

SEQ ID NO: 122279 - DNA, 311 bp, Zea Mays
ataacaagtttgttcattaatattagggcttcaattttgccacagtgaccctggtcttaactccactgaatcaatcacaaacaatcttcaaagttgatcaaatgtcactgaacttccaatttttagaactgaagttgtctgacagcccgactttagatccatttttctccaatttccatacagttccaaggtttagccacttaatcaaacttagactataatagtagctctacaaatttgttgtagtgacctatggcaaaattttggcagaaccgtctgaattattctagctttaagtgcctgagtcacgc

SEQ ID NO: 122280 - DNA, 556 bp, Zea Mays
tcagctagctgtgggtggtcaactggcacactatacaatcacccaaggtgttattcggtacaaaggaaggatctggctgggaaataatcaagagatgcatcagaaggtgatgtcgacattacatgatagcgcagttggcggtcattctggatttccagttacctatcgaagaattaaatctaattttgcctggccaggaatgaagcaccaaatccgtgaatttgttcaagggtgtcagatctgtcaacaggctaaaccggaaagggttaaatacccaggattactattgccgcttccagtccctaaacaagcatggcaaacggttagccttgattttatttctggacttcctccaacaggcaaaggaaattgtattctggtggttgtggacaagctatccaagtatgcccactttatggttttgaaacaccctttcactgctttaacggtggctaaaacatttttgtccgaagtatacagactgcatgggttgccaacagctattatttcagaccgtgatcctatttttaccagtcgcttgtggcaagaacttttc

SEQ ID NO: 122281 - DNA, 407 bp, Zea Mays
ttcgtgcaaaagtcgcctaagggtgcagccggactagcacaacaagtgcgcaaaaacgaagtcttcctcacaagactatccgtgcaaaagtcgcccaagggtgcagctggactagcacaacaagtgcgcaaaatcgaagtcctctttaaaagactatccgtgcaaaagtcacctaggggtgcagccggaccctccgtgcaaaaaccgactacgggtgcagccggaccaacacaataaacgccctagatcaagtgcacaagtcccctacgggcacggccggatcagcgaaggcacacagcctcatcatacaaattatagttacatacatacagcgagggcatcacaccttacattggttcaaccttcgggatgatacccatctccctgtagttaaacagcattatcct

SEQ ID NO: 122282 - DNA, 342 bp, Zea Mays
gtagggtagttctgctcgtgtggcttgagtaagcgggatgcataagcaatgactttctcattttgcatcaagacacaccctaagccttgcttggaagcatcacagaagatgacaaaatcctggtgtatatctggcagagtcaatactagtgcggttgtaagcttctccttgatgatttggaaactttcctcacatttgggagtccacacaaacttattgtcctttttgagaagttcggtcatgggttttgctatgctggagaatcccttgataaagcggcggtaataccctgccattcccagaaagcttcgtacttcactgacgttggatggttgcttccaa

SEQ ID NO: 122283 - DNA, 473 bp, Zea Mays
aaagtaattatgatagtcctgaactccttactattgccacatttttacaaatcagaccaaaacctgcgtaaggaaatctattctagataccaaaatagttgcgcagattatcaaaattagaccaaaacctttcctgatgactttcatatatactcgttagcggactgaccttggacaagtatgccggcgacgacgggtggaatgggggacggggtccaaagccccagtcagcctcgtgccatcacctcctccgctaccgtggcaggtgggtatggcttcttctctagtgtggccactgtcgatgcgaagagttcggcgctggcgggactctgatgggagactgccacacccctgatatagtcgctgcaaacaatgttacatggtgactgcattctaggaaaggacgacacccgatgcaaacggtgttattaatcttactccatgcattcgagataaaatttgtcataaatatc

SEQ ID NO: 122284 - DNA, 570 bp, Zea Mays
ttcggatttctgaacaactctccaagaccttgatctagagtgactcgtactttatgtgcctcgacataatgtcttagcttacgtgaagacatgacgatggtgtatgttatcttttctaactctgtcatgttgcacttggagcttgtaagtacttcggagacaaaatataccagacattggtgggtcttgccgtctctggtcctttcttggaccaaggctgcgctaactgcactgggtgaagctgcaatgtagagtagtaggggtaagactaggtctgggctggttaatgttgccagatcagatagatattgcttcaaagactcgaaggttgtggcttgttctgggccctaggtgaagtcctttgcaccacgtaatgttttgaggaaaggaagactcgaaggttgtggcttgttctgggccctaggtgaagtccttcagccgatcgcgagatgaatctgttcagtgcagccaatctacctgtcagtcgttgtatatcttttgttgattgtggtggtgccatgtccatgatagcctgaattttgctgcggctggcttcgaatcctctgtgcg

SEQ ID NO: 122285 - DNA, 696 bp, Zea Mays
caccattacaataaataaatattacacaacagattgttgtacaccacagaaaccaccattgcgtaaagctaagactacaggtttatcgaacaaacatttttgagaagttttgtggcattgaaacatcctttccatgatgtcatcttccatgaatggtcaatctgattagatgaaaagggcacaaacagtgcctcccgagccaaataaaattaaacttgaacagctgtgctatcaataatgtgacattgacattgacatgtggggctcacttgattgtattattgttctggctgaagtagaaatgtcagtcataatttcttccagaaacagaatggtattggtattagagttcctgcagttattacaggatgccctagagagaaagttctagcagcaatgcattatgacttgtgccccgtgtctcactcctagcgttttgggggatcaaccacactactgcgccttttcacattagtataggtattaataaagacctcccttggcgcgcactctttgccccccctttaaggaatggtataggattccaagcatgcgcttaaatgtttgatgtaatagtcaaaggcagcagtcttaaagacagtcctaacaaaaggctagcatgatgattaatttcacttggcagtatttataggggctgggcccatgtttgttttcttaaccacaagcacaaacaga

SEQ ID NO: 122286 - DNA, 645 bp, Zea Mays
cgtgtaagcgtgagcatgtcgcaccgacttaaggcatttccaacttaagccgattgctccgttagtagggtatagtggtcaccctaggtcatgtaagcgtgagcatgttgcactgacttaaggtgtttccgacttaagctgattgctccgttagtagggtatagtgatcaccctaggtcgtgtaagcgtgagcatgttgcactgacttaaggcatttccgacttaagccgattgctctgttagtacggtatagtgatcaccataggtcgtgtaagcgtaagcatgtggcaccgacttaaggcgtttctgacttaagccgattgctccgttagtaggatatagtgatcaccctaggtcgtgtaagcgtgagcatggcgcaccgacttaaggcttttttgacttaagccgattactccgttagtagggtatagtggtcaccctaagtcgtgtaggtatggtgcgccgatttaaagttgtgtccatcctaggttagttgttgatcaagaacttgtatgccttggaacatggaagctttattgataatgaaaccctttgcttacaaagtacaactcgcccacaagaggtttgaggtattgctatggatagaatttcctgaggtgctcaatattccacgaattcccactt

SEQ ID NO: 122287 - DNA, 805 bp, Zea Mays
ttcgggagcaggggatttggcttctttggccacacttttctccagagctacgccagtatctggagattcttcttcggccctctgctcggttgcggcgagcttcatctcagcgggcactgagggcccagcttcggtttctgtatgtgttgtagcagcttcgacaaccttcttcacaggagcaagagtcagcgctcttgttgtttccacaacggcgtctagcatgctagccattcttctcctcttgggagtggtggccggagcttttgcaaccttccgcttctactggttggctcagaatttctggcagatctgttgccttttctaattctggctttctggttgtctcatcttcggcttcgactggctcgactataggcaccttcggcactacagtcgattcttcagcactccgagcggcgggagcagccggtttcgcctcggcagcggaagatgtctcctcaccagatttcgacactgtggtcgtttcaatatatctgggcctgtgggtcaaaactttgattttcttgcccttcggcatagcagaaatggccgaagcggcatctttcctcttttccccctgctttcgcaggggatagcaataatcaggatacataaaaccaatcgcatcgaaaactctgtttaatcttttcttgctccgacccccaaaggctgaggacaaagcatcatctacggccctggtatatgtcccaagcaactcatcgctagtagcctcaatgcatttcaaccagtcgtcattcagttcgtcgaacttttctctgtatctgaaggtatatttcaatcgaac

SEQ ID NO: 122288 - DNA, 463 bp, Zea Mays
ttggctccgcccctgcctttgtggtggcctgtccatcatcgggggaagaggctcttccctcaccgcgatctgtgcgacgacgccaccaactctgctctcgtcacgcccttggtgaggttctttccctatcgtaccttggggagtgctccgcattcgttttactagatcgaggggcataaggattgctagtgcaccagggaagcttcctagccatggcgccaccgcgccaggattctagcgccgccgccctgggaacgcttgggtggacgatggttccggaccgtcggatcacggattgggcggtctggatgtagcatgtgggtaccggttcgcctggaccaaaggataatcgttgatcacagatcgtagggttatgtgaggatcacgtttcattaaatccgatccatcagatcgaatccaacggctaaaatcaagagatacctcttcgccgcgcacgttttgc

SEQ ID NO: 122289 - DNA, 866 bp, Zea Mays
tttcgcctttagctgatcttacttgttgcttgttggattgctactattgagcccgaaataagtcttcttctctggcaagtgtctgtgaacggttggtaggattggggctatatattgttggattttttgagttttacataaatttgacttctaaaattctgcaacttataagctgtctcgtagttatgcaattgaattcaatataactactgcaatgagcacttttattacaaaaaggctgcacggcttttgttatgctaataatatgccactatgcatgaatttcatcagctgtaagcagcatgcttctccagtattttcttaatcaaatttggttagtccttgatctttaaaaccatcgaggttattacaaatttcagtattgcagtaagccagtaaattaggatctgtgtcaattttatgtatgagaaaacacttctaatgtgactgctttatagtacaactcaagtacaacaaagcatctgaaccatccattacatttacgacatttccatctaatgatccaaccagttgatactattttctcaaacaaaccattggatcctgacttctactcaaaatttgtaatgaaatggctatgcttagattacttttaaaatgcttaatacttagatctccttaatatactgtttttcaattccttccattctttggattttaaaagtcgactgttaaaacggagattactagttcgattgagtgttccactccttagttacatgtgcatagtttggcataatgtgtttcgtcatctggtaccaaccaacaaccatgtgccctattgttagattcattttctgtggagtattataataagtgtagaggtttatctgtaaataattaat

SEQ ID NO: 122290 - DNA, 569 bp, Zea Mays
cttcgtactagttggggaccagctatacaagaaggggatcagtcaacccatgctaaaatgtgtcaccgaaaccgaaggcattcagatcctacgcgaagtccacaatggaacttgcggctcccactcagggcccagggccctcgctgctaaggtgatccgtcaaggattttactggccagctataatctgtgccgtgaatcgagtcacgaggttgtgcgaagcttgccagaagttttctccccgctcgggcaacccttcgcagttcaccaagctgattgcccacacatggccactttaacgctgggggctggatattgtcgggtcgctacctacggctcaagggaacctcaagttcaccttcgtcgccgtcgaatactttaccaagtggatcgaggccagggcagtatcaacgataacatcgaagactgcccagaagttcttctggcaaaacattgtttgccgatttggagtcccgtccgagctcacagtcgacaacggcaagcagtttgacagccaggacattagggacttctgcctatccatcgacatcaagctcgccttcgcctcgg

SEQ ID NO: 122291 - DNA, 274 bp, Zea Mays
agcacgagcgtacctcctgccaacggaaaggacaggcatgctgcctgcagggtggctgggccgccgtccgtcagtggagtggatagggcacattaaatgctgaggcgacacattgcccgccagtggagtggacatgactcattaaatgcgggggcagcacatcgcctgccaggcggcgcgtcttatccgcaataaatgcagaggacgcgcggcccaggagccttacgttagggtccgcccgttggcttacatcacgggcagtcggccacgcggc

SEQ ID NO: 122292 - DNA, 702 bp, Zea Mays
cttgtcgtgtgacgctgtcacgtgctcgccgtgaaacactaggaaacctcgctccgtcgtagctactcctcgtgccaccgctggccagcgtgggtcggggaaaaaggtcaaatacatctgccttgttgcactgatcacgtccgtggaagccaggtggtgaattggggtaggcctggccggaatcgcccctcggagtcaagcgccgccgggagtcctttatggtcggcgacctccagcgctttaataccggtatgtgataaccctatttggtccatcgcatagtagggctgatagatcacattgaagtaattaagtcaggccaccgtgggggtggaatgcctcgccggacttcacgattccgccatggtccccagggcaccagtggcagggttttcaccgtaacaaattgcatccggatgatctaattccattcgctatctttcctggtacgcgtaggggtggttgaattagaagtccgagcactgatttgaattagggcccactcatcagtctctgctggcgtgtgccctttctcccttgtgttgttgccaggcgggcccggattgtcagacatcttcccctttcttcgctcgcacgactccgctgtggttaatctcggcgcgcttctctggtgccattgcagcgacccgccaaccttgccttgggtacaaaaactagacgcaggccttctattccccaccg

SEQ ID NO: 122293 - DNA, 640 bp, Zea Mays
cccaaatctcacagagccgtggacattattattgagatgtgtcagtactgaccttgaaccagtcatgtgattactggctcctgtgtccagcacccacatcccttctggacacatttttggcaccagtttctcttcaccttcaactgtgctccatgttcagctagttcagctagcaggagtgctccatgttcttcaccttcaacaaccacatttgcttccggttgcttctgttctttcttctccctcttgggtcttttgcagtcttgtgcccagtgtccataaataccacaattgcgacatcttcctttcctccttggtgttccctgtgatgtgaacttccctttgtttgagctgcttgaactcccaccatctgatcgatgttaagcctttgccttccactgacttgaagcattacaactactgtctttatttgtattggcctgaaaacgatgcttatgtttttcaagccaatcctcctcagctaatagtaacctccctgctttgtcagtgacatgatccaaattattctcaaacctgtcttcagctgcacgtaaacgtccaactaaatcctccacagtgagtgtctttgtatcacaaaacatttcaatcgaaactgctacttgattaaaacgaggtggaa

SEQ ID NO: 122294 - DNA, 487 bp, Zea Mays
gagtgtatcatgagttggtgatttttgttacgttatgtgcagcctttttctttttcaagcatgcaatgttttttatgttgtcctcctaactcctaaggcaaattgtgcagcggtcagttttaataaaaacttaaattgttagaagaagatagacaattcacttatatacttcaacatcttgcatctgaaaaattcaacgataatcgtgggtgaagaatgtaggtcaattcaaattcttgcatacataccacaaggcaactgctacaatcaaccgtttcatgatgtcaaccaagaaccaaacgccaaccgatatgaccgtcaggcattttttgatatagaaagttttattaatcttagacaattacatcaagaagatacaatagtactaagattactctcggtctctacacactaaaatgtacacaaccaaacagagatgaaaaaacaataggagaaacaaactcttcccaaaacaaactatcactca

SEQ ID NO: 122295 - DNA, 349 bp, Zea Mays
tggacctggaaacgatggtccacgacacggtggcttacggtggcgcggagaaccgaattgggggaagaaagaaattagggcgctactgtggctaatcggaggcaggggcgggtgctctggcctcgtgacaacctaacggagctagcggcaccctcaatttatagcgtccgagggcggtggctccgaattttgaaggcgaaggctggcgaccggagagaggggtgagtcaccggagtcgcataacgtggcatttactagggcagaggcttaagacgatgactgaccaattcacacgacaccttgcgatgaggtaatagggttagtagcgtggcggattccagtaaacggt

SEQ ID NO: 122296 - DNA, 311 bp, Zea Mays
ccattcttcagcacactcaagtccttttgctcctttaaaattacgtccctaactcggttcctttcttggtttgtgttgaaccttatgcacctgtaattcatgagctctagaacaacatgtgtttgtgttgattatcaaccaccaaaattagttataggaaatggttaacccaatttccctttcagttccgttatcaactgtaatggcctttggctcacctaacctgtaaacaatactctgctagaaaaacttctggaccatggccaaagtgattgtagctagaggtttagcttcattccactttgaaaaat

SEQ ID NO: 122297 - DNA, 746 bp, Zea Mays
tttgcatttagtcgagggactaatcaagctcaggagaagtcttgcaatgtttgtgcgatccttgttgaagaagatgaggagaagaatggacattgattaagttggttttcaatgtgatatacttggagacagtctgatagggtgaagacaaacaaggaaaaggctttaagggactaagcaaacatgaatgtcaagcaaatggcttatggaccgaggtaccatggctagggtgaagaagagaatacttgcaagatgtcgacagactaatcagattttgaagagttatgttgtgttagatatcacaacattagaatacatgattggatgccatcggattaactcatatttattgtgatggttcaagtcataaggattaagggatgcaaactcaagggatcaagcatggtcacaagtccaagcagaaggtatcaaagatagaacctggtagggctcacttgttgtgtagagtttggtaaaaaagccaagaatgataaatcaataaggaattggattttgggtaattacagagtttagatgtgttcttggtgattattttatcatattggaattcaatggaataagataattgatcagatttggagtttgaggttctaagtgccaactagacctaatcattggccacccgacttgatcaatgcaacgggcatgtacgtgtcatagtttttgatccgcaacaatccacgggctaagtacgagccatgatttttgacccaacccgaaaaacc

SEQ ID NO: 122298 - DNA, 279 bp, Zea Mays
cttcggctctggtatatgccccaagtaactcatcgctagtggcctcaatacatttcagccagtcgtcattcggttcgtcaaaccagtctctgtatctgaaggtatatttcaaacgaattaatccaccttcactagacccggcagcagtctccttcggcatctcctagttatccacaagtggccataccctgtaggctatgtgctcttggatcaggtctcttgtaccaataaaagcgcagacattgctaaaagccttttgacatgctttggcatcatttt

SEQ ID NO: 122299 - DNA, 394 bp, Zea Mays
cgaggtgcttggacggatgtatcctttctctgacagctcatcaatttgcttcttgagttcaaccaacttaggtccagatattttgtaagctctcttaaagatgggggcggtgccaggaagaagctctatagcaaattcaactttccgctctggtggcatgcatggtaggtccttcggaaacacatctgggaactcggacacaaccttgatactctcatttgggtctgcttcactgctatcgacagccatctgataacaacttcctttcttcggctcaggcgggactaactcggtcaccacttcctctcctagtggggataccaacttgattgtcctcttatcacaactgatcactgcctgatatttatctagccaattcatccctaggatgaca

SEQ ID NO: 122300 - DNA, 559 bp, Zea Mays
ataaggatttgttacgcgcgatatgccgacgacttactactgggaatcgtgggtgccgtattttttctcatagaaatacaaaaacatatcacccacttcctacaattcggcctgaacctttgggtaggctccgcaggatcaacaaccatagttgcacggagtacggtagaattccccggtacggtcattcgggaagtccccctcgaggacgactcccatacaattcttgcgagagctggagaagcgtctacgggtaaagcaccgtatccatataactgcctgccacctacgctccgccatccattccaagttaagggacctaggttatagtatccctatcaaaacgtactcttctttcatcctccttaccagaacgcttttcctggttcagaagaataagatactgaaattgtgttgtggcttacatatggaaaatgccttcgtcttgaagctaccaatgcacaccacggtgaaatcattgtcaattaattgttagattccccatatcacccatagccacccaaatcttttttttgcctcaaactctgctgccctatca

SEQ ID NO: 122301 - DNA, 455 bp, Zea Mays
aaaaaatttagagaagtctggtattctagttccctgtggatatggcacggtgtcgaatcggtggctataaggcttccgatacgattgccctgtacctgacacactaacaccgagtttgtccctgaacatcccagctacctcgtctctgaccctctctgccatgtctggcgaccatccattgagtttgtgggtagaaatctcaggttgcctgacatcactctgtcggctttcctcccagggatgtttgaggtgtgtgttaggtgtcctattaatgtcaccagctcctgccctatacctctcaggctctcttgtggccgaatagtattcatccctatgtccatgaggtggtgtggcatgattataatgtgttgctggtggggcaccataatgttgctgcgatgaatgtgggaactgtgcgtattgcgcagctctcggttctgcgtatgcatatccgg

SEQ ID NO: 122302 - DNA, 564 bp, Zea Mays
attatgttttgtatcgtgtatatttgtagttttgccatattgaaatcggcccggggcgctattaaatcctagatcggccatagggcttcttacgccgttgttgatgctaaggcgatgctctatggccagtggctaggcgaggcctgttgcatcttgctcgtgtaagcaagctgtttgatgtaatacctcaacgcatcttcctatttgaactgcattcagtttcttgcgtacctgatgccagagttcatcaagggaactttgatgatcttatcttgcttgctagtttcatagcacaaatggattttcaggctttagattcctgccagtttacatgctcaaattattgtactaaaggctgtagccattttgctgtgctcttgtattagcacaattatccttaaaagattgttttctctcctcccccctcaatcctgcattgttttggtaacatggtgctactccgttcacaggtcagactagctaacatcagaatgcctcctcctgacctcctccatctcatccaccttcagctgctctatttctgcattgttgacgtgagagttg

SEQ ID NO: 122303 - DNA, 424 bp, Zea Mays
ttgggcgaggcggagatagaggacctatggcgtgagaacctcagatgaggcagagacatggttccttgctttcggaggacatggtgggacagagaatcttcctaagcatgctttaagggtataatccgggtacccctaattatcatatctgacataggtgatacataaagtttaccatacggaacacagagttgggtgcagtccggtccggtcagcccgacccaaatcagatttgtcaagattcagtataaatgtataatgcaagaccactgtagagtccaatatgctcggcttgttccccaagcaaaatcgtgccaactcgaatccaaccgtcttgaggccccccaacgcgaaaaagtctagcacagcacgacatacacaggtgtacatctgactcatccgacccaaacctaaaaagcccaac

SEQ ID NO: 122304 - DNA, 991 bp, Zea Mays
aaaaatttgtgccaactaagcttgcgtgggttcctatcctcctaatatgtcaacctaacccgtcaaccctacgtggtagaggcaacgctggatgcaagtgaagggggcactctggagggagtcgcattgggactaggagctggctctaattcctcgagatcctcccctccctggcttcctgcctcatttgcctccatatcctggtggtgcatctccaggtggttgttggcttcctcaagttcctcctacacatcatggagctggatctctaggacatcgatggtgttatcccggatttccacctgctgctctagggtagcgatgcgctggctcaactgttccacctataggtccttttccaccaattccgaagacaagtcgagcacgaagtcctctcgactgtcgagggtgatcttagtaatctgagcaaggttagtgaggtttgccatggcgtcgctctgtaagatttgtaggtggtataacatgctcatacactgaacagtgatccttccaacttggtcgggatgcatagcccatacgtccttcacgtggctcactctgttgcaccacatggggtcatccctcttctcggcggggaagagtcccagtgggtgcattaccatctccaagggatgatacccacagaaggttgtcagggtctttagtgttgcggccttggtgctgtcatccgccctgaacccgatagtctcagagtcaagggaacaccaacccggctgcagagggtgagcctctagagtcagccaaacccggcaacgtggcacccgatgctcctcgtacaagatgggggtgtagggtaaccagcggaatagagcacctcccacaaaatggagggaaaaccctcgtgagaaaggtagtcaaaactgaaatgagtgtctcctccattgatgggggtgggtgaagtcatctgtgaaagagggttagatgtaagtgttatggcagtggaaaggaaaaaacaagtgaccgggttgtt

SEQ ID NO: 122305 - DNA, 518 bp, Zea Mays
caaggagtcctcactctcccaggtagcttcctcttctccttctctgctccactgaactttatagagtttcacttctgagttgcgggtcttccagactgctgagtcaagaatatttactagcttctcacggtactgaagatctttctgaatctatattgtctcttctttgatgtgactttctggtacttgcaggcatttgcggagctgggatacgtgaaacacattgtggatatcagacatggattctggtaattcaagacggtacgctacgggtcccactctgccaatgatgggataggggccgacgaatcgtggtgctagcttccctttcacttggaatcttctgacaccacacatcggggagaccttgaggtagacaaagtctccttcctcaaatctgggttctctccgcctgttgtccgcataactcttctgccgactctgagcttcaagtaatcttctgtggatcagggcaactttctcctcaacctctttaacaaaggcaggtccttccagtg

SEQ ID NO: 122306 - DNA, 683 bp, Zea Mays
acttgaagcgatagggcaatcgaacaagttcattcttcttccatgttccttttagcttcggcatactccattcactcaacgttggagataccctgttggccaggtattcttgcactagatccctggtgctgatttgttcagccaccactctgaattctgctatggccagcgggcatgctgaccctagcttcatgttgcacaagggtctagtcttcccgaagcttaaagccagcgggctcatcaccattgtcatcagtttccctcttttcttctcagcagccttaatataaaaccactcactcttccctccattagccacttggtgcgatagctgaggaccggagccttcgtatccttgcgatacgcgaagttataccaaccaaaattttcatgtagcacgtcttttgtggccttcgtttgataatgcaactcatgcacttggcagaaagcttcagcatttgggtccatcccttgacttcgaagggcccagatgaagatgttgagcctaacgatagcattaggagtcagttgatgaagaaaaatttcaaaattatccaaaacttctccaatcatctcgttcaagggaaatcgtaatcctgccctgaaaaagctttggaaaaccactacttcatcattcttcggcgttggagtggtttcttctccggcaaaacgattaagcttct

SEQ ID NO: 122307 - DNA, 648 bp, Zea Mays
gttctctgtttggttggagagccattgagtgtagaaagtaggagagagaggagagcgctcgcatttagttgtttttgtggagccggagcattgcaactatttatggtacattttcatatgaaaactctaggagccattccgcttctcttttgttgtaaaccaaacatccaaaaaatagaaatagagccactctattcttcttcacttctcaatcaaacacatcctttagtgtgtcatgcagattttgtgatgacctgaatgttcatcaatagttccaacttccaagttgcactcatgttttgacaatattgttttttcatgtgccgtgtacttgtggtgtgactggttgcttttgttagtctgaagatgtatgtacctagggatgggtaaatctcctctcgtactgtttatcgcttgtattcggactgcattcgtatttgcgagtaaatttgtgtcactgttggccgagttcatttcccttttttgctattgctattgctattgagggtctacatctatgatgcagttgtggacttgtggtggagggtttattggtcatattctgaagtttggcttgatggaatttgatgcaatgcgcatcctcacctgaatcggtgagtgcatttgtcacagaataaaattatcaga

SEQ ID NO: 122308 - DNA, 459 bp, Zea Mays
ataatcaatatcgaaacgcttttcacccaataatttgcattttaacttagacttcacatgagcactactactttttacccgcgatcataacaatacacatttaggccataacaagcaaatcatcgtgattacgagcttaaccaacccgtgtaacacttcagctaactagagcaacggcatagcccgctaaataacatacacgttggcttgcctattactatcgcaatccgagacacaacatacactaccacatttttataaacacacatactcacaagtattttcgcacatcgaccaatctatacgaatcgtaaaccactaatctctaactcgaaaccatcatgcgcttacttcccaattcatgaacacataacgtgtattgacccgactcaagatatagaggaagcgatgactactttggcatgtcaccacctctctatataagccaaaacaatttct

SEQ ID NO: 122309 - DNA, 911 bp, Zea Mays
gccgatcagtatcggcgcccgtggagaaagttctggaggaagaggggagtggctccgaaggctccaaggagttccttcccactgggagcttggaagcagaggtagaagagaagggtgattcggaagcggttgctgatgcgaccaagcaaactgcaggtgggaatgtgggtgcggaactgggagaggataaacaggcagaagtgggaggtgaagagaatgctgaggctataaagctggtggaggcaagtcctctggatgctctagctgcggaggattccagtgggcatgagcaaggtaatgatgccaatttggcggaaactgaccaagttgggaatcagattgaggctgtctatgaggaaaatgaggatgaccaaactggaggtgataatcatgttcaatcaggtcagggtatggatcttattgcgattgctttagaggaaagttctgatgatgaacatgaatttgaaagatctgacagtatcttgcaagaacaagtggaatctgggagcttaattgataaagtgattgaagatagggtagagcagctggaggccagcaggaaggctgagaacacagagaagaagctgaaggtgtcaatgaaaccgttggagtgggcagaggagcttgagaagaggcaggcctcgtctggtcaacattgggaggaaggagcagctgcgcagcccatgcaactagagggaatcggaaagggcccaccagctatcggttacatgcaaattgagatggacaatccagtaacccgtgtcatgtcctcaccgtcatttaggtcagaccatggctctccccaggtgctggctgttcataggagctatatagcaatgggcacatctaaaggtgctgtcatcgtcattccaagcaaatactccattcatcaagctgatgatacagatgca

SEQ ID NO: 122310 - DNA, 287 bp, Zea Mays
ctatttgttcagctggattgagactaacggtcaggtatgactctatgaactattgttcttgttgcgagcccgatgctcaaaatactggaattttgcttcacgtgttttactgcatgctcattttaccttttgtttctgcaatctctgatgctaccagaccagaagaaagctccagatatatgggtagtcttgtgtaccggtgagaaaagagcaaaggtaggtttgtgaattattatcattgaaaatattgcccgtcgtgtagcatatctggactatgctgttactat

SEQ ID NO: 122311 - DNA, 310 bp, Zea Mays
gtcttttggttatgccttgggcagttattggcataatggccatgttcgccacacttgaaacagccattgggttgaattggggtagttgtgttgttattcttggccggtgtgttcacgacgcttccttgacgattctgttgttggacactagacctttgaacggtctgagtgctgcttctctgctggttctggtattgattgctcctctgaccttgttgtccagagcgttgtgcttaatagttgttgttcccactctggtttccggagcggaactgagaaccttaggagttgttttgccgagtatttctac

SEQ ID NO: 122312 - DNA, 437 bp, Zea Mays
cggggagagatgttatgactggcatcagctataagagacgtcgggatcaggatcaggaggctgaaaggccaatttatcattagaaaaggagatagctattagataggagttagttagataggatatgataagaagctattaaatagggttagttagataagataagatgagaggagggactataaaacaactctatacagtgtacacctatatttataatcaagtagaagcaattactattgcccgcttccccagggagcagggtgacccctagccgccaccccttcttgctcctctcgcttgcagtcctaatccaacatcagtacggtactgtagcgcggtactgtagcgcgggtgctgtagaaccctctgttctcttgctctccttcagtcgagcccagccatggcgccccagcgccgtgatcgttgtcggtccc

SEQ ID NO: 122313 - DNA, 275 bp, Zea Mays
atgcgaaggaggtcgggcttccagggccctgatcacttatccttcaccattaaaggggaacttaagacacccaaaacgactcaccgttctaggaggtcgattatcgtcgtgccttgccatctagagcttggaggatctcgtcgcggaaccgtgccaactgttcgcgtcgcttcggcaagtaaatttattatacaagttctgagatccagagggtgtgcacgtagggcgcaagttttatactgattctgacagaacatccctacttctagtcattg

SEQ ID NO: 122314 - DNA, 409 bp, Zea Mays
ctcccagacaacaaggaaatatccgtctgccgggagatggccaaaaatatgggatttccgaagcttaaagatggcctctctgccatgtcaaaagatgacctcgcagacagccttacgtacaacagtctgaagatacgaaagtgatgaacttaaaaatagattatcttgtcttgtattctcgtgctgattctatctttttgtagggcttaattcttagcaacgctttgagggcgcaaaagaatgctaaagatgaaagctgccagatagctctcagcaaccttcgatcagaagttatcaagctgagaaatgaagccatggaaaaagataaaattctgctttcattggtggacaaagtgaagaaagatgaagcaaaatttaacgctcaatccgaagctcataaagccgaagt

SEQ ID NO: 122315 - DNA, 324 bp, Zea Mays
cgaggtttcatgcggtccttgtggaggaactctcccgccatgctgctggaattgattacccgccatctcacgcaagaagcgggtattatctgcagtagcattgaccaaggcagcgatggcctcggccagtgttggtggtacaggcagtgggttgggtgtatcttcctgaccaaaggaggtccccgcgccgtcgtgcgcatgagttcgtgatggcatctgaggcaaagaaatatttaggaaaaatataacatgccaatacacaccatcattttacattaccaaaatgtaattatacagactcaagcgtacaacatgacttcatta

SEQ ID NO: 122316 - DNA, 488 bp, Zea Mays
gttgtattagttgacttgtaatttctgcaactgaaaagctagtagaattgtggaatcagttcacactgcagaaatcgcaagccccattgtggacactgccacaagaatctaataatttgcaggtccaaattctaacaaccattcaattcatgatgaggaaaacatgcagagtatcatcgttcttcccaaaggaaatgaactttgcatttcacctttacactatcaggtctcaggattcctctatcttgaatttgtttattttgatcactctgaagaacgaaaaagttcgttctctctgctattatgtctttgagacagacaacaagcccaaaactacatcttggaagggcaatacaacactccattgacatgaattcagttaatctaagaaagaaccatattatttactgtggtggtattcaagctcatgactaccttaaatacagagataaagtgttctcatgagcccaaatatttactccagaagt

SEQ ID NO: 122317 - DNA, 341 bp, Zea Mays
gctgattatagtgaaccagcgatggtggtggtggcaactgaggccaggaagctcgagaatgacttgccaaagcgatagaagtcgtaggttgttgatttcctacatattctgggatgtatggagagtaacacgaagccgtgtggaggacttgcttcagctgactctgccgcgccttggattcagcaatttccttttgcttctgaattgtgacctggcatgtccttattgtgtggcccttgtcctcgccacaaaagaggcagtacaactttctgggttgattgccgaaccttcctccactgaagcttcttcctcatctgcctctcggagctggtggtctgaaa

SEQ ID NO: 122318 - DNA, 472 bp, Zea Mays
ggattgtctgagcctaaatattgagaattaacacgagacttagttagtaaagtcatgggatgggatacatcatacaatttaaagctcgtacaattgcgtggtctgtgcggttatgttaaaatacttgagcatagtgtcagcctgtcagccacacttgttgtattgtagacttttagactttgcacacaaagaacaaccaagtttgtggggctgggcgttaagcagctggcagcattgtttgatgaacaactaattgcaagagaactgcgcaatgttacagataatagagaaaacaggccttacagaaaaaacacaccttcctgaagcaattccctctctcagcggttgctgcttgtctgtgtcggctaggtggcagcgtcgacctcgccaaattcgttccctacctcttcttccacaaacacgagctatcttccatgcactcggtctgtcatgcgtttgtcccataatcatg

SEQ ID NO: 122319 - DNA, 459 bp, Zea Mays
gcgacaaatccgtgcagaagtcgcctaagggtgcagccagaatagcacaacaagtgcgaaaaaacacgaagtctatcgtgaatatatccgcgcagaagtcgcctaagggtgcagccggaatagcacaacaagtgcgaaaaaacacgaagtctatcgcgaagaccatccacgcagaagtcgcctaagggtgcagccggaatagcacaacaagtgcgaaaaaacatgaagtctatcgcgaagactatccacgcagaagccgcctaaaaggcgcagccgaactagtacaacaaaagcagaaacgacaacatcaaaccgtccgcgttaagaccgactataaccacaccaggacagcataacaaaacataccagacaaagtacacaacgccttcgcaaacacaggcaagcgagggcacacaacttcatcgtacaagcctttacacatatacaagcgagggcacc

SEQ ID NO: 122320 - DNA, 556 bp, Zea Mays
gtcagtacaatatcgacatctaaatcacacaaaagagtgtttaagctagagttgaataactaggaatataagcaaaagagaaagaatcctaaaatgtatcttgggggtggggtttcgttaggaagtacgactcagtgtagcaaccctttggccagttgcctgtggaaaaaagaatatttggcgcagatgcaccttgatatccggcatgatgctttttaactccatagaccggaaggggtatcacgactgacggccgtcgactagctgctccctgtgtcgtcgccctagctgcctgccggctctgcggtcctcactcctcagcccacaacccgaccgtctgtgtttctgctagtttatgcaaacacagcaacaaacacaggatatggcacgcacaacacaagattaagaatttcacacaagaaagagaaaatcgggattaaggactctgatcgggtaaaatggggatttcgggtaagcctgcagcggccatttccgaggctttagttacttttggttagttttttagggctactcgagctcagttaccatattttct

SEQ ID NO: 122321 - DNA, 359 bp, Zea Mays
cgggtgcataactatcagaaactacaggggctatcttgcaaacgatcataagactcaggattcccccgcactggacggcgggttgattcttatatttctcagggtctcttgtgtaaaacgcctacgacgaaggggtatggttaattatgagccgcgagatcagataacgacggtccagattagatctgagctgtgttatgaagcggtatgcgcaatcaaccgtacatcccaagatcgacggccacgatttaattacgccagagtcaatactgaccacccgatcagatccagcggccagactaagacacgtgaagggacacccagacgcctaatcttaatcgttccagactagatcaacg

SEQ ID NO: 122322 - DNA, 599 bp, Zea Mays
gttcgggcggaggttgtagaattgtgtgctgagtgtgcagcacgccactatctggatggtggttctcctgcccctgtcgggattcagcacccttaccgttcatcgccccgtggtcgcttcgactatggtaccccatactgtaggacccgaatagatttggatccatagatcgatagagtcggagtctataataatgcttagttcagtgtcatagtctagtcagtcttagttagagttagtttgcttatcttatgttggatgcttgttatgatgaacatgtaatgaagttggatctttgtaatgattgtcaccaaggtgtgggtatcccctgcaacttggtgtagttattaataaagtcagttatttagttaggtaatccatttatttccactttcttctttatctgagaagttgttagtgaagatggtcatttgttcagtgctatgaagattttctatacatcttttcttatgctgaaagactgcagagtcagatttgatatatgtgtgtgatttctacagatgtctgagaacaggcgcagaggtgcgaggcgtactcagccagaacagcaggcaccctaagaggaggcagcaccgcag

SEQ ID NO: 122323 - DNA, 348 bp, Zea Mays
ccaaaggccttctggcatgcttcggcggcttcattgatttcaaccttcggccttcagagaccgaagtgggaccaaatggggcgcataataacctccttacatcctccctagctaccaagtcgttcttcacataaaaccattcctccatccaatttcccggccatcttttcctaaatgttggtactgggtagcttgagttgggacgggcgataaatccataacaaccgaagttgttgtggtactgttctttacccatggcttttgtctcatataaaagttcgtgcatactacagaagcactttgcgctcggttctatcccttgactccttactgcccagacaaaaatcc

SEQ ID NO: 122324 - DNA, 477 bp, Zea Mays
taagggagcaccatcattcgaaatcttgcctctcagcatcaaatcaattcggatcaacatgtcttcttcaggaatccgtctgttggtaattcgggtagggtcattgaccccagtatacaggtaggcagggtagactctatctttcagaggttgtatattcttgaagacaaaatcagcaacaacaactttagcagtcaagcctctgtccttcaatgcacatatcttagcaagcagcactctagactcagcaagttctaaatctgtaggggcctctgtccagctgggcgatcagacgtcaggttgcctccctgatcagggagagaaggacttgttgtggttctccattgtaaaccacttgaggcgccatcccttaataactatccttcaaagggatatcaagatactcaactttcctgcctcgacgaagttccaagctagcaccgccaacaagatgatgttgtcctccagccatctcag

SEQ ID NO: 122325 - DNA, 541 bp, Zea Mays
aattaaggcacaaattagtttgggaaaagcccctgatttcacagaagatgatcaaggcacagtatgatttaaaaagagaatctgtgtaccagaaatcgagcacctacgccaacttattttaagggaagcccatgattcagcttattctattcaccctataagtactaagatgtaccaggatctaaaggaaaagtattggtggtatggtttaaaaagagatgtggctactcatgttgcactatgtgacgtgtgtcaatgagttaaagccgaatataaaaaaccagcaggattgctacaacctctcaaagtaccagaatggaaatgggaacaaatcagtatggatttcatagttggactaccccgtacttgggatggctatgattcaatatgggttatagtggaccggttgactaaagtggcacactttatacctatgaagacaacttactcaggagcccagttagcatagttatacatgtcaagaattgtttgtttgcacggagtagcaaagaagattgtatcggatcgaggaacccaattt

SEQ ID NO: 122326 - DNA, 382 bp, Zea Mays
aatttttcgtttttagaaccactccatcgtcctatatggaatcaatccaaacaacaacaaattaggagcgaagcggttccattcaactatactccagaatcaaacgttaccttaggctatctgttgttccagtaccatttcagcttcctggaggttctatttgtagtctacgtttgtgacatcaacaaggttttaaagacgtccgactaaccgcgattagtcggccttatcgtcgaagtaagcacgattaggagcttcgacttgattagggcgactaggaaccgattagtcgtcctagtaactgactaatcgcgattagttgcccgattatgtgttgtgaccaactagtttatgtctggtttgggcctgtaatctatcctct

SEQ ID NO: 122327 - DNA, 292 bp, Zea Mays
ctgttgagttaaaagaaattgtgagaaagtcgttgcgcctgcgccgccggcttcgacgacctaccgaacctccccgagcttggtccctaggtttggagatgatactttctttgtatgctaattttctcaaagatttttcttctcttctgtgtttgcaacaaaggtgtggagaggtatgaacatgaatctgtaacactattttctttccggtgcttaattttttaatgctttgtacaattattgtgtgcattgcaatcttgttaatatatatctttagtcatcatgaattttc

SEQ ID NO: 122328 - DNA, 399 bp, Zea Mays
cgaatatctcctggatgtggcgttgtgcatgacaagggcctccgtcactacggcctcgtcaccgaccacgcgccacaacaagcggttgaaggcggtggtgggacaggttgacctacgagaaggtggcattgtctcagcaacgcctactgtctgctctggctagaagaactcccttggaacagggaacgtgcacgagggactatcctgctagccgcattaagaaaccccctagcagtgtgctttgttttcctaccactcattctattcaatagaaaaacattaaaggtattagctccataaaattaagtgaattaataaaaatcaaataatacatcacataaaattaaattatgcattgcacatcaaaattcatcggaaccacatatgtcttccctaaac

SEQ ID NO: 122329 - DNA, 1195 bp, Zea Mays
cctttctgcatcttgcttcctcgctctcgtggctttggtcgcttccgtcgtcgtttcgttccagtttccgtggcgggtggttcgaatccccgatttgtcctccgcatgtggaagaagagtggtcggtgttgtctcgcggggtggtgacgaagatggatccgaaggggcgaaaccctaactgggaccgatggaatcagaaagatgcgcctcaaggatctcaatcgtggaacaagaatcggaatctcagctggagattgaagccgaatctgggcaaatcggatgtcaaggaagacatcggggcctcgtctgccggcgatggaggtcaatcaggtatcctcaaaacccctcccgcggctttgaaaaaagagattgagaatgtgcgtcgtcctttttgtcaaaagtgtggggttgatggtcaccatgctagagattgttttagatctttgtggtgtgacatttgtcacaaagaaacccacacgactgctcgtcgtgtgttgcctaaacagaacaaaccttgtatgcctattgttggtatggcggctgatggattagtgttttactcttctcattttgcgaaacccttgtccagaaaacccaaaagaagcttcatcggtttggtgactgttatggagggtttgatttctgctgaagatcttgagaaggactttgggttccactttccgtggggcaaaacttggaaagctaccaagtgccatgccgggttccttatgcaatttccttctcaagagaagcttgacgagatgattaatttccctgagctcaaaatgaaaatgtcgggagctaaaatctctgtttctcattggagctctcaggctaaacctaaatctaagctgcatgcagtttggattgttgctgaaaatgttccagtggaactgcaaaactaccaagcaatatgtgaattaggatctacaatcggggctgttgaagaagtggacatcctatctttagattctaaggatatggttagattcaaagttcatgtcaagagtgtcgccatgatcccgcccatcattgaagtgggggttaaacctttcctttatgacattttctttaagattgatgatatcactgatgagggttggaacgatgagtctatcaaccttggcaaaagagcttcagtggatagacatggccttgatgacccttatgaaaaactggcaaaaaagctaggaat

SEQ ID NO: 122330 - DNA, 458 bp, Zea Mays
tatgaggtaggccgaactaaaattcaacttcacatccgtattctcatgaaaacttttccaaaatctgggggtaaactgtgatcctctatccaaaatgatcttccttggtacagtgtgtagagactcaatccgagacatgtataacttagccaattgtgatcccttataagtagtcttaaccggaatgaaatgagccactttggtcaatctatccataatcacccatatagcatcatatcctttctgggtgcgagacaatccagtaatgaagtccataccaatctctttccacttccactcgggtatctttagtgggtgcagtagtccagctggcctctggtgttcaaccttaactctttgacacacctcgcacatagccacatgtgtagccacatctctcttcaatccatatcacaagtacttctgcttcaaatccgtatacatcttagtactatcag

SEQ ID NO: 122331 - DNA, 334 bp, Zea Mays
gtgagctgctttcatatgagctcgcgagattaaggggtgattagttaaattaagggaggcgagttcggtacaaagaaatataagggggttttcaaagtgttgacgcgcgacgatggtggaaccgtgaaaactggtgagttatagtagtagagattaccgtttgccgccagaggattttgatttatagtagtagagattatcgtttgccgccagaggattttggagaggtaaactcaatttagaagttcaaaaattaatgtgttccaatgctgatatgtcttggatacgacttggatggctctaaatgtatggttgcacaagttgacataaatat

SEQ ID NO: 122332 - DNA, 404 bp, Zea Mays
ccgagcacaaattgaaggtctacccccatgcgaggccgatccgacagaagttacgtcgcttcacgcccgacaagagagaagccatccgtgccgagttggctcgcttggtcgcggtaggattcattagagaggtgttgcatcctgagtggctagctaatcatgttcttgtactaaaaaagaataaagtggattggcgcatgtgcgtcgactatacagatctcaacaaacattgtccaaaggatcccttcgggcttcctaggatagaccaggtggtagattccaccgccggatgttctgtgttgtctttcttggattgctactctgggtatcatcagattagtctggcaaaagaagacgaggaaaaaacagcattcatcactccattcagagctttttgctatacc

SEQ ID NO: 122333 - DNA, 453 bp, Zea Mays
ctccaatctccttggggaggtgattaaccgaacaagcactcgggggttttgtcataggaatgggatcctacctaataatataggagttgcaactattagaggaaagcaagaatttaagagttagtctcctcgtggcgctacccaatgcccaccaacacaatgttggctctgatgttgtcacatccttcacctattctacgtgtcaacacttcccatgaaatatgagtcatccatttcccttcagttgtgttttgcacattagcaccttccaagtttggtcatgtattcattttatatgttccaacttgtcatgtagtacaatgtgaacaagaaatatgttaacatgagataatatgtactaccatggtttgcatagataaaaaattgtattatacactagtaaatctaagactgatttggatctgttgtttatccttgtaataataatggtgc

SEQ ID NO: 122334 - DNA, 334 bp, Zea Mays
tataaacctctagcatggttgttgacgaaatctcaaacttgcttcttatttagcaaaagaaaataaaaagatagcgaatgtagttgaatgcactgtggctggttgtgttgcaggaatatttttcaatgtcaaggcactactcatatcatatgtacgatattttaattgtgattttgtgtactcacatgcaaagtggatgttagttgataggtttatgcactagattgttaccttattatgtaagatttcttaatgctgttcgtaattaatgctattcgttggtaggttgaagtcttgtgctcacatgggctgcttcgtgatccatatctacatt

SEQ ID NO: 122335 - DNA, 392 bp, Zea Mays
tacaatgtataaggtaataagcatattttacggtgaatactccatcttcttggaactcttgctattacttatctttcctccgtaggagcctcacatgaacacatacgagaatcacctctcttctcaatcgacttgcatttgagccttcttgcaccgatcttatgtgcactcggagcgttgggaggcaagccttagaattgctatctgtatctacgacatctgctagggtgtgcaggttatcaagtttttgggaagtgttgccacgactgctcgctggtaatctcctttttgtcattgattggaggattgttttctttctcttcctctcgatggacgtctaagggataacactgcgaacaactacctacatcgactatagtatgctacttgcc

SEQ ID NO: 122336 - DNA, 495 bp, Zea Mays
gtgaccgatgattgacagtaaggctggagcttgaggaacacactgtcacctacagcaaactgacgttcagtgcgtccttatctgcttgctttttcatacgctcctgagcacgttgcaggtgcatgcgcacctgttgtaacatgagttgacggtccttcagatactgttgaagatctggaatggtacactgagcagtcgataccaggcccaattgtgatggtgagtgaccatatagtaccagaaaaggagatttgcccaatgaagaatggtagcaggtgttataccaaaactccgcgagaggcaaccacattggccattgtcgtggacacgactgaacaaagcaacagagatacgtttcaagacactgattcactctctccgtctatccatcagactggggatgataggaactgctaaggcataactgagtacctgtcaacttgaatagttcttgccagagccgacaagtgaaaatgggatcacgatcagatataa

SEQ ID NO: 122337 - DNA, 898 bp, Zea Mays
gtgatggagggttgcggccaccactgtgatccgacttcgcaccgccgatgagcaaccagggagcatccggggagaatcacaggggagctctgcacccaggcgaattcacggttggtccatgggtgacaatgtgtcggcctaatttgccgccgaagctactgagcgccatggatagcatcgttgtcgcccagatgttggtgagcttttaccgccctaactagatttattctttgttacacatagaacttgtccgtgtttagttttcgtcatcggggcacttgtgtcgtattcgccgcgtggcaccgccgctgccggtgatgaacacgatcgtctgagtatagacgagagggagagagagagagagtgctaggtaggcatgaggttgaagatgagcatgggtcgtccgaattgagataaacgcctgagattagaatgagataccccttcgcttggactgaacacagactgttgagattggatccgagggatgagagtggatcaggcttcataaaaattcgatcactgatccgaaatcaaacaaccagcgacgcataccgtttcgggatgtgttttgggtcgtccgatgatgatctaagggcttgggatcgcgcgtgtgtaaagagtcggggtaatattgccaaagagcccctagccgttttgaaaaataaactcgccatccctctctggtggaatacgattacggtttgatctctagaatttgcagtttaacccatagactctattttggagtataaaatttatataagtgaatagaaacttgcataactcacaacattctcattttaaatcctttttagtcaattcaaaatgtgttatcttcataataatcttgcctacacttcagtaaccttatgctatcgtataatatgttttcaaa

SEQ ID NO: 122338 - DNA, 964 bp, Zea Mays
tttgaaattttgccagagtagttcaaaacttcaggctttcgttggcactcacatgcaggtccattccttggcaagaacgatcaagagcagttgctgttgtttttggtgggttgagctttggcagtgtcttagggtatgttgtattaagatatatggtcatttttatcgaaattaattaaatattccttaattgaaaaaatatacatggtccccactattttcatgatcctttgagcaacaatttacatacttccatgtatgtgctagcatgtaaaatgctgaattcaactaaattggattttcccccatctttgtatggctctaaacggtagcttacatactttctttagtaattgatggtaatgctgttttgtcctttaagtacaaagctttattcctgctcgaacttgttatgtatttggatgtaaacatagaagaatgcagtggaagttatttagaaggataaaatactaaatctattttttatgaactgcttgagactgttctgctggttttatttgtttcattcttcaaggcacatggatgaagagcaattttggcatccctagtatgatggaaaacttggttgttttctgcatcatcgcaaatcttgataactgcgcaagagtcaaggcctccttaacgatcagatgttaactttttttcttgttatcagaacaacattgctctacatttgtctgtatgactttgcagcttgaagtaatagcagaagctttgctacagttaatgttttatccgttttattacattgcagactcctgtttgcccctcccatcattcagaactttggctgggagtctgtcttttacatatttggccttcttgggattgtttggtaagcaaatatttatcagtaggtaccaaagaatctattgtgggtgaactttattttctgttgtatgcaggtgcttaggatttgaatctcttatagtgcaacggttcg

SEQ ID NO: 122339 - DNA, 382 bp, Zea Mays
aagaggttgacattgtgcttgaggtggccctgctaccggtgaagacgttgcgcacagcgtcacttgtggttttggcggcggtggagagggtgccagtcacatcacgaggaaaacgagcacgtgctagggatcgcagcggcaccagtaggccatctccgcgcgtccacgaaggcgagaagggaggggcgatgttaggggcggcaacatgggggaggaagatggagggtcgaggacaccgcgacattctcggggaggagggggcggcgggcgcgctagagacagacgggggcggaggtcacggaggcagggacatggtgcacaaatgtggacacctataatccacacttatagaatagtagagatatagtaaagttcgcgacac

SEQ ID NO: 122340 - DNA, 481 bp, Zea Mays
gttgttgtcccaagaaccatatgctaccagaacaagaaagatgagagcggttggtggccaaggctcttgaaaaaggacctgtgttcttgaaggttgactggacaaatggtaggatgaggatggtgaagatgttggatgttagtatttcacttttggttgattatgttttttcttatgcgcctgacaaatctagatatgcaaccagacatgctttattcttgttcctgttttgttttccttatgtattaattccttaacttgtaatgcacatgatgttttccttatgtattaattccttaacttgtaatgcacatgatgttttccttatgtattaatttcttaacttttaaagcacatgatgaaggctggttgtcaggtaaattctcttaaactttggtaagcttacgtacttttgctatggatattttgaatcaattacaaggtaattcatttaaaaatcgtagtaacacattgatggttg

SEQ ID NO: 122341 - DNA, 339 bp, Zea Mays
atttgttcaaattgtttcatggtgaggctggaaaacagaaactgtaatttttaaagtggagcccactcaaacagggcccaaacaggacctaaagtgatgaatttgtataaagccataaacgggcgtggctccattggagcaggccaaggatcatccaaggaaaaagttatttttacctttgttcctaagctatattggttggatctaatatttcttgagggcttgatcgattaggagaggatcgaaaaaaattggaaggtattaaatctctttctaatcaaaattaaatagaaagggtttaatatccctcaattgccacgcaactaacacaggtttccc

SEQ ID NO: 122342 - DNA, 594 bp, Zea Mays
tccgtttgagtgaacgagagttttgtcctcaaggatattgctttggtttcaaatttgaatttcaatatgctttccgttttacaactccttgaggatgactatgaagtgtgctttaaaagggcttgtctcgggttttggatgcatatggggattttttgtcggatttccccttttggtcgagttttcagttgattttttatattattctggcccttcttgatatttgctagtaggatcctcttctttgatttggaagtggcataggagactaggacacttaagctttgatcttttgtgtagactgagctcacttggcctgatctaaggattgcctaagttgaaatttgagaaggatcttgtttgtcacccttgtcattacggcaagatggttgttgcttcccattcatcggtcaccaagttgatgacctcacagcccgataaattgcttcatgtggacactgttggtacaacttgggtttgctctttcatggggatatggtatgtgcttgtggttgttaacgatttttctcactattcttggttattcttcatgaaggcgaaggatgagacttttactcatgcttcagatttgat

SEQ ID NO: 122343 - DNA, 649 bp, Zea Mays
ttttttgaataaacatattttcaagatgtcttctcaactcatcaaattcgtatgcattagtaactgtcgtagagagctaatatttccaaatctcatctcataaagctagcgtatgcattagtgattgtcattaatatttctaaatctcatctcatcaaattagagtaggcattagtatatccattggcagaaaaagtgagtgtttgttgcagtgtctacggaagtctatacctccgatacttcccagactcactcaccgaaagaagaatgactcactcacccaaagaagaatggagcctttgcattggtggcttgaaaatataagttttggcaaaagggcatgtttggtagccaggtttatttacagtttccatacgatcctataatatttaagaatactgtagtattctaaaccaaaatgtgtttggttgaacttcataaaacactgttttgaataactccgtatagccccgtatagccaaaattgtgccgtttttagagtatcaactacagtctagaccaaagttttttaaaccatggtattgttgtcacatacaagtgcagaccatgatattctaaaaccatagtattcaaaaacattggtagcaaacagagcctaaataagaatcacatccatacctagtgcaag

SEQ ID NO: 122344 - DNA, 339 bp, Zea Mays
atcagtttggtatggcgacgtcgactattcaaggatcgacgggcgctggatgcccttattgccgcagtcccgtccgagatgcagttttcgcttttccagaagcggattgccaaggaggcctgagatgccatcgctgcgacctgcattggcagcgaccgtgctcgcaagaccacaaagcaggcacttcgcaaggcgtgagagaacctggccttcaagccaggtgaggatgttgatgactttgctctccgcctcaacactgttgtagaagatggtgcagttcggtgatgtcacctacgatggatgagagttgttgagaagctcttccgttgcatccccaag

SEQ ID NO: 122345 - DNA, 538 bp, Zea Mays
gacgtctcctgaatggagaagggctaatgagatgaaaatgatggggttccccctgggccttatatacacgaccgtgggatactccctacgtacatgatgatcacgttcttctagtatatctcctaactaattgcgaatcgacttagcttatcttaaggaaaactcgtcgactgtattccaaactatcccgatattcaagggcgtcgggcgcggggaaaatggacggttccttgagattgtgcgcgatgtgacggacgatccgggcatgaggccattgccctcttcggtcggcccatcttatttgcagtctttgcccggcccacaacgaggcgaccttgtggggcgacttgtatatggccccatgcaagggtatttcgccttctagtggaaccgggggatatctgtcccccacaacaggattttgatctggcagtcagatctcctcgataccccttcgcaaacacacattttcatatgagtcccctggagattggaaaatagaactcgtcgtccaccgcggatgtagactgagtctggg

SEQ ID NO: 122346 - DNA, 661 bp, Zea Mays
cggtgatttgcgctcggatcaattggatagcgccgggggtaagaaatatcgtcgtggaaatactccggccattaatttactccggccaccgtaccgagcggaccatggcggattcggatgagtttgccgaagatagccgcttcacggccttgcgccacgtgccttgacacattcaccgcatcaccgtgactcgcattagccgtctgttcattaccggggagcttgccacggtgaaagccactaagcttgagcgccagtgaccttcttcccctccggccgccagcacatcttcgtggaattagacgccaccgccctagaacctataaattgccgctcttgtccgctccgctatgtagttgtgtaaccagtgaagcaacatgtgcctcaaatcctcccctagaactccccaatttgggatttcccccaaatccctcaagaacactgggcagtttgacctcgccgtggccaacgcgtctcaggtccgctcataccctctgccctcccgttttagcgttcttgtgtgcccctgatactccccgcccaacttgattgaaccaagctatcttagatcgccgggaacgcggttgaatgtccgtcttacccgctgttaccgtggatagaccgtgttaaagccccattgatgaaattagttgaggggaaa

SEQ ID NO: 122347 - DNA, 577 bp, Zea Mays
ttctccatgggtgtttgaccactgaattcattattccagatgtcatgaaccatgtcatgaaaaccatccctaagcaaccaccctaattcaaatttaaaaggacggtggcaggggcaagatgtggcttcccccgagttcaataacagcggtgtatggtcagatatatcacggttgagggcaacaaccgaagataatgggaatttctgatcccattccgttgttactagtacctggtctaacttctcgaaagtgggattcggaaggttatttgcccaagtaaactggcgacccgacatctctatctcttttaagttaagaccatcaattatggcattaaaaaggaaaggccaacgatggtcaactaaaggtttgtttttctcattttgattcctaagaatattaaaatcaccgcctatgactaggggtagagtcacatgactagtaaactgcaccaactcagccaaaaaaaaactcctccttatccatttgtgcaggtccataaaccactgccaacacccatttaaaattatcactcttattacacaaagtaaacttaacataaaactctccctcatca

SEQ ID NO: 122348 - DNA, 411 bp, Zea Mays
ttcattcagagataagaaattcaaggttttattggcattcatatgttcacacatcacaagttcacattcaacttacaagcacaagttcacagtctcataaatactagatcacattagcacttagcagttaagaacttgactcctataggtcatgatatttaggtgcccataattttggtaatggttgtataacactcaccctagcgctctagaaggagacatgatcacaaaagcttcacccacaacttatagagaagtacggtgggtccatcaatcctactgagttgacaccaacatgtattcatgtgcagagatatcttttgtaccaattctagcaaagaactcgtactaaagttcaactctttagaaccaatttgatacactaatcagtacacaagatcctcaagcagg

SEQ ID NO: 122349 - DNA, 448 bp, Zea Mays
gcaagtagcactcaccgtgtttgcaactaccatgtatattagagccgtctccaagaatatggggttccagatcgaactcaacgggaggccctaatatatatagaaatttatatgtgtacaatatagtaaggtatgctttcacttacttatatatattgttctatattaaatactaatgttaagccaagaaaatcaaggcatccctgtattaatccaaagaaactaatttatattaaaccaaatgttatgtattcctattcctagtactcatgaaacatagaattaataaattagtttactagctatcctatttctagtactcatgaaacatagaattaacaaagtagtttactagtactagctatcacagccaacataccgatgaagttagaagcaaaagcctggaaggccaccgtacaacgtcggatgtgctgcgtggcacctagcc

SEQ ID NO: 122350 - DNA, 404 bp, Zea Mays
gtattcctcatacgaaacagtatgagctggatcttatcttggcccttgttcacccgatggacgactcacatatcaccgcccatccctccggtggccacccacggcggcgtagagctcatacggaggcacccccgtcggagattcgtgaggccattcccggggcccccaaaccctgacctattcggtgctacacgaagacgaaagcaaacgtaattggtggcattttaccgttggtcaatcagcagagttccctgcccatggtgaaggatggatctgcggcggcgtcgagtcgaaggtgaaaaattgcgcgagcactggtggcccttccctggtactagagcctcggccaccatcgtcgttccacggggaagctgtctgacccaatgctaaagtcttaacggcgg

SEQ ID NO: 122351 - DNA, 603 bp, Zea Mays
tgtgtttccaactaaaacccatcggcaggagacgtcaggcgacatgaggaaccgagaggctcccaggactattggtgggccccagtcccttggtcaatggcccaaatactggcgtatgactgggctacaaggttcgcctagcgtgccacctgacctatactggatcaggaaggtgttggcgtgctccgaattggttccctgcatgcaaaaacatgtgtgaacgtcattttgagccgtgttcggccccctaggtcgtatcgattataaaagagacgatcagtctcctcgggctcgcatcggatccatgccttggtggcgtagggagccgatggtcctcaaaaccccgctctatccttatcgggcgggtccgacccactaaagttaaagcctcaccacacgaccggaacgtccgacacgtggttaggcctagcgatcgtggagggcgcctgaacactgattaagtacgatccctgcccaaactgacgccagccaaccaacacttcaccggaacatccaaccctcatgcaaggcctagccgcatggatattagacaggacttcgataaaacaaagactaatagtgacgaattggatccacctcgca

SEQ ID NO: 122352 - DNA, 312 bp, Zea Mays
gagattaccaagtcttagggacttagcttgtgtgcattcatgaagggacttacaatgttaagatgttagcaaagccatgtaggtgataggatttacaatgttaagacatcagcagagcgtgtaggtgatactggcgtcctcctagagggattgttgtttaggatcttatagacatggcttttattgacctgataatgggctttcaatgtgcagggaactgtagaaccatataggtgatacttccaccctcctcatagggaccttaagtacacccctttgtgtttaggaaacattttagcggttgatcagtcc

SEQ ID NO: 122353 - DNA, 658 bp, Zea Mays
ctgtatggcgctcggtttggcacggaagcccctaggatgaggtcaatctgatgctcaattcatctgatcggtggcagcctaggtggaacttcttttggaaatacatcagcatagttctgcaaaagattagtgacagtagaaggcaaagtagatggtatgttgtgaagtgagaacaaagcatccttgcaaataaacacataacagattgaagcaacatcctttaattcaagcaaatcagatttggaagaaagaaaacaagaacttttcaattgtatttctgtcttcctcacatgagcagatttagaattgtcactcttttattttaccatgtcctttgcagcacctagatttttattatgaacagatttatttttctctttgcaagctctagcaacttcatatttcaaaatagcatcaggggacatggggtgcaatataagtttcttctcattattcataaaagagtattgatttgttttaccatgatgcacggtgtccttatcaaattgacatggtctaccaaataacatagagcaagcttgcataggtaccacatctcaatcatataattatggtatgaaccaattgtaaattccacacataccatatgtgtaccttaagtgatacgaccacgccattaagcaacacgttacaaccc

SEQ ID NO: 122354 - DNA, 530 bp, Zea Mays
atacctttgtgccttatcgatgatgtgcattggaagaaaatgagccactttcgttaatcggtcaacaataacccagattgaatcatgatgtcaagaggtgttgggtagacccacaatgaaatccatgctgatgtcatcccatttccatgaaggtattgataggggttgcaaggtacccgtcgcttgtaggcgacttgcttttatcctccgacatgtgtcacattccgacacatacttggctatttctcttttcatctttgtccaccaatacaggggttttagatcatggtacatcttggtgctccctgggtgcatggagaatttggagaggtgagcctcatccaaaattttcctcttgagatccccattttttggaactaccagtcgatcttcgaaccataatattcccttactgtcttggcggaagcattatacttcttatctttctggttaagattttccttgatgatttgcactcccttgtcaccgagttgggccataataatttggtctaacaaggttggctcgat

SEQ ID NO: 122355 - DNA, 654 bp, Zea Mays
ttcagattcaagcctgctgaaggaaatagtggaacccagggaggcatccttttgctttgggatagtgacgtcttagacctgtctaatgtaactgttggggagttccacttatctgcaagtgtgacacttaaggatcgccgagcttccttctccctaacagtcgtctatgggccaacctgtagaagccgcaagcctgccttccttagagagatgaacgatcagagacctcctttgtcttccccatggctgatcctcggggatttcaattgcacatacaaagctagtgacaaaaataattctagaataaatcatcaccttatgcagttgttcagacaagctctcgataattgcgacctaaaggaaattcctctgcaaaatagaaaattcacttggagcaatgagaggcgacaccccactttggtcaggcttgataggttcttttgcaacccagagtgggaggagtttttcgacaactatgggttgcacgctctttcatcttcagtctctgaccactgcccgctgcttctatctaataatgctaggccgaggcgtccacgctccttcaaatttgagaaattttggacggttttactgggtttcaagcaggtggtggagcacgcttggtcgaagccgacccaacatcatgaacctttc

SEQ ID NO: 122356 - DNA, 611 bp, Zea Mays
ttggatttgtgtaccctgactatcgctacccaccacgggggcagaaaagaaagggtgtatcctctgaaaaggttgctgcttcggctgctccaagcgagcctgcgccgaagggtaagaaattgaaggtccttacccaccaaccacgctacattgaatcgaccgcagtgccagaatttggcggggagacatcttcagctactgagccgaaggaacctgttcctcccacgcagaagattgaaaagccggctgcagtgccgaaggctccttcgaattggttgattgaaacaaaaactgtcaaagataagactgaaaggtcaaaaattgaaaaaacaacaagtgcgtcagggattctaagtccttcgacagaagcaacaatgctgacagcagagaaaagttttgccataactcccagaaggagaaggatggtgaatgtattggatattttagaaacaccagattccaaatgcccctcttcttcaaagaagactgccgaagctgtcaaaacgcaagacaaagctgatcctaggcaaatagaagccgaagctataacgacccaggatgaaactggggcagggcccaaagtgcctgctgaggcgaagcttgcaacaacc

SEQ ID NO: 122357 - DNA, 465 bp, Zea Mays
cgccccacctcacctcagcgtgaactacttcgacgaactctaagacatgaagacctcaaccaacctccacccctcgtaggattgcacccacgtaaatttaaatgctatgaatctgctagattatttctaaaatatccgagttattggatcaattaggttattcatggatcacttggattatctatattacttctggatcttgaattatttttggatcacccaaatcaactatgtactactcgctttattttggatcattcatattaatttgtggatcattattttttacgacatcattatttctagatcggttatattacctcagatcgctcgggttagttctagatcgctcgaggtttcatattactcattatttctggtcattcgatttgtgcatacatacatcagtaagttgaaatgttctctattctttgcgtactttctcgaattactttttggcacatg

SEQ ID NO: 122358 - DNA, 362 bp, Zea Mays
gctgaaatgtgttgaaaatactagtgatgaactacttggagtgtactccaagtctgaagataatgcattatccgcggccttcgggagccaaaaaaagaaaagactaaatagggtttttgacgctattggatttgtgtaccctgactatcggtacccgccgtgggggcagaaaagaaagggtgcaacttctgggaaggatgttgcttcagctgctccaagcgagcccgcgccgaaaaggaaaaaggtgaaggttcttactcacctaccgcgctacattgaaccggccacagtgcctgaatttggcggtgagacctcttcggctactgaagccaaaggacctgcccttacgcagaggattgaag

SEQ ID NO: 122359 - DNA, 387 bp, Zea Mays
cccttggatcatatctttggagcctgtaccctgcattgtgtttgctcctgtagcctgcctaatgtattggttggatctgaattctgatatgcacaaatgatcagaatgtggtacatatgcccccttcattcattgtgtagaggcaatggtgaagataacacctaatatggaatcttgctagtaacaagtgacatggcctgaagcgaaggtatctgcaaattgttttgtatatagcggtatagcctaagccatgctgttcaagaaaatagcttatctaatgttgattcttgctagtaaaggtaatgttttgggcgtgtttgattatttcctgtttccctaggagttaaatcacttatcttctggtttttgcggtataacttgaagcat

SEQ ID NO: 122360 - DNA, 674 bp, Zea Mays
agatgtcgcatttgcgacaccgaccttttctccgtggtgtcccctcggaggtcagtttgactgaacccgaggtcccaccttctgatcgtggttgcgccttgtgcttgggagcagtggcaccggagccaccacctccctccttgtagttggagtggaagcgatgcttgtttttctcgaaccactcctcggcgagaagaagacaccccatcttgtcagctaagaagattgttgagtgatctactagatgtaaatgtgaagaagttcagtttactgattgataacagatcagctcaagaactctccaaaaatcttgtttatcatgaaagaagcaaacacattgatacccgatataattacatccgagagtgcgtcagcaatgggatggtagatgtggctcatgtgagttctaatggtcagttagccgacgctctgacaaagccacttggccagatgaaattctcagaactcaggaggcaactgggtgtcgtcaagatagaaggttgacaagattaagggggtgaatgttgcatttagccattctgtaatcatgtcaatatgttatcagtgcatttagctgcattagctcgggtagttaaattataaatctatttgtgtaccacgtagaatcgctggtgtactggagactgcccagtatacgcagtgaccgcgtctag

SEQ ID NO: 122361 - DNA, 413 bp, Zea Mays
gggtggtcctcagcaggcacaatgctagaaatttatataggaagcagggtactcaggcaagaatataatacacccacctgcatcatggcaagactggcaacccacactgcatgtacttggaccatccgacaatgaggtgaaaatctaagagcccagtgtccatctgatcatgattattcatctcatcttaggataacctggagttggcccttcaggtgtcaggctattagcaaagtcaattttgatccctcagaggagattggggcgtgcctggcaacacaagatggcccttcggcgcgcttcaaggatgtgcgtggaatgcatgtgctgagatttgactacagctaggatttgcctggatcttgcccttgctgtctgcttcaggacatgatgaacagatatgtatatctctg

SEQ ID NO: 122362 - DNA, 407 bp, Zea Mays
tatagccactagttttgtggaaaggcatggaatcccctctacacccctagaaatccctttggtcacccgaaccccggggtcagaccttctatgccagctcaaatgctcccaagccagaattcttttaagtggggtagtgttcttggcagacttaaccgtcttgccatcccaacggattgatgtaatactaggaatggattggctaactaagcacaagggcatcataagttgcgcaagcaagactgtccttctcactgaccgccaaggaaaagcaatttcttgtcaggcctaaccgcccgccaacgatccaatgatgtttaatctagcagcagaaaatatatccgtaatagaagaattcagggatgtatttccagaagagctgcctggaatgccgcctgaaagaggag

SEQ ID NO: 122363 - DNA, 780 bp, Zea Mays
tttcaatacagttacatagacatgcaacagatagttgggcttcacaaaatgctgttccgtaacaaggaagccacaaaaggttgttccatatcaaacagttgcgattcacaaaaggttgatccagcgacactactagcgtgcaaacttgaatctttgaatttctggaggcaacgggaggcacttgttcttgctatggaaggtgaggtaatatagagctagagatcgtaggtcgccagagttttcctgcataatacacattatcccaaagtgaataggttatatcagaaatgttgaatgtataaatacaaactgcataaccataaagtgacttactcgttgtatatattgcttgatagaaccatccatatagtcatagtactggatgtatctcatgacaaagaagccacaatcattagatccaactatcatggtgggacacataggtggcatgtcaattgggaaatttccaaatttagggatgcatgaattgggtcggacttgttgcaaagatttgttcaatctgttcatgataatcctagcccatggtagtttcctggagcctatgtccttttgggagtaatgaaacatcttccatgtagtaccacccaactccggaccatatggatttgaatctaaaatgtgaatgcatcgaaactggatattgatgacatacaatgtccaatgtcccatatgaagtatagggaccatgatctgtcaaatatcatgagttagagatacaaaatgataacattagtgtgtagctgagcgatgaatataatt

SEQ ID NO: 122364 - DNA, 552 bp, Zea Mays
gagcaatccaacgaggcaccgttctccccatcaaggtaacctagattttctcctattcccacaaaaaattgcatcggttacctacatcgcacatggaaataggagcaacttctttgggtttggtcggctgagagctactggtgtgctcaccttgtgtatgtcgaaatgctctatagtgaaaatattgcttggtgatgtgtaaatgccttatatattgcttggtgatgtgaaaattctccccatcaagatgatcactgaagtgcaagattactgggaattaggtataccgcggtgcactcactgaagtacaatttcccgtgcaagattactgggaattgtgttttatatcctcagttggcctacttgttggttgtgcttgtgcttctgttgggtgcaggacacgtgtggtggagaagaagggctgctggccttggctttgtgggcaacacactggctgaaggtacgagggtcattttgtgatttagtagaaacataaattatatcaggcataactcttggatctagatcatctaacactccatgaaagcccag

SEQ ID NO: 122365 - DNA, 791 bp, Zea Mays
gagacataggtgaaatgacacgatctgattggttagataggtttgttaaaggtggaaaatgtttgtttataaatacatgacctatctgttgtcaacttatcatgattgtaactactattaaattcatgctgcatgagaatctcgcaagtaaaagggtctgtggtggtggttatctattaggagggaagtatcaagcctattttgtgagaaagacctctaacctaccactaacttaccttataatcaaagccttcaatctcgtgttgatgctggtcatctcggtttttgacgatgaatcggaagcacggtgacgaagctctcgccagtgatttgtataggagaggctgtaagcaccattggcatacacagcagatccattgctgtcccggcccatcgatgcggcttccccctgtggataggctgtaaggacaaacgacgtatgcgaccaccatcggcgcccctccgaggacagtacggtgcccttgcatgagcatgacaacggcgtcgtccattttctctcttggcggcagcggggctcgagttattagcacaggagattgctacacgtcctgtctcctatgaatcaggggttacagtaccaactacttatatccagagcaagacagaggtcggtggttcagtagtttgcggtctatgtttttacggagatcgcaataaacaggtagaaggttcagttgaggattcatgtccagctatgagaagatatggcgattgggctcaaggatgtcaattacccagcgtggattgcggccggctgttggatgtcaatg

SEQ ID NO: 122366 - DNA, 331 bp, Zea Mays
acccatatagcatccctgccccgaggagaacgaggtaagccaaccacaaaatccatggtgatatgctcccacttccactccgaaatttccaatggtttcaataaacctacaagcctcttatgctcggccttcacgcgctgacatacttcacaggcgacgacatacttaggaacgtcaaccttcatcctcttccaccagaagttttgcttcaaatctctgtacattttggtttcaccagggtgaacggtgtaaggtgttttacgagcttctctcaagatatccatcttcacctctgatttctaaggcacacaaagacgacccctgaaacgaa

SEQ ID NO: 122367 - DNA, 433 bp, Zea Mays
caggaacctccatcagtattgttgcttcggacccgacatcggatgaagacgtgccctaccctagcctttcgtctgctctagaggaggaggtaatctttgggcggtgactcccgtcgggtggcgagcaagatgcggcgctggtcctgcttccacgtgtattgttctgcgcccgctagattcttgacgagactgaggcggcgatccggcgagagtggggaacacttgaagtagagtgtcggtgcctcagcgactgtcacatctagctataggagcacactaatgtagcatctcatctagttgcctctgaatggtccaaactcgaggaagactgtaaggattacaagagggacctaccttcgaagggtatacaaccaggagttggaggtgtcccagagggaacagaaggttgcctagagggaggaggccatgacct

SEQ ID NO: 122368 - DNA, 339 bp, Zea Mays
ccctgtgggcctgtccttagctttttaaaaggatgccctaagagcacccttttattctgagaggagacattattttcagcatgcatgcattataaaactaaaaggattagaaactaaagaagtaaaaatttgagctaacccgcttccttttaaaccacccaggccctttttattttctttcttccaccataatctttacatctgatacccttccacagatgacctcacctacccccgccaatggaggagacactcgtttcagctctgatttcctttctcacgatggttttccttccatcttgtgggaagtgcttaactccaccggataccctacgcccc

SEQ ID NO: 122369 - DNA, 529 bp, Zea Mays
tgaccattcatttatcttatattatattgtttataactgtcaaattaaaattacaagaaagtaatgttatggtcggaaacccgtataggcacatcaggacagcctgaactagacaagcaagaatctaggagaactgtgctgtaatcttatcatcagtggtgaccaagggataaataagcaataacagccaattcctattctcatcccctttcaatactctctcatctccctgctccaccacaccagcaaccacaagtcaaagttgaggcacgttgatagctgttttccatgtgttagcaaaggtaactgcaggcgcctatggcatgtgcctggcgtacatggccagaggggatctgatcccactgattggggataggatagataggatcctaccaatctggtatagtgatcaatcagggagatctcacgggcactgtttctataaacctgagatctcccccttccctgtgcctatatatatgtatgtctggtcctcttttctatacatgaaacacagcagcagttctgc

SEQ ID NO: 122370 - DNA, 628 bp, Zea Mays
gcgaggcccgacgccactgcccatggttggtggagggcttgtgggtgacgtggcatcgatgccagggaagtgacaaaattttaatgttagattatctccatagactctctatcctactccctgcctcacttcttatttcaaactacattatacaaacagtgtaatataatgtaaaataatattttgtatggttgtttacacggcttgctggagatagtcttagcatgtgggggtggtgggactgtgagagagtggatctagcaatggaacgttgctcttgaggagctgctaaattgagcaaaggaattatcaaggatgtcgtgaaggatgggaggagaagaaaaaaatgatgagtacaatcaagatctaacgatagtccattttccatcatagatcagatcattagcatgcccctttttctccttgtcctggagttagctccaagtgctattttatttttgaattgtatttatgcttgcatgtatcttgtagtggttgtaccttctgaaagtattttttttcttcaacatgagaatcgtataaccttaagcatacacaattcaaagtgtagcacaattattttgtcatgatagcactggtttgttgataatactttcttaaacttttt

SEQ ID NO: 122371 - DNA, 988 bp, Zea Mays
gtggtatttaaacatgaatataccgactgattggatggttgtgtgcgcgtagctaggctcatgcgagtttgtgccgtcaggtacgatcatttaccgtgtatttgtgggtgtaggtaaataagtctatgatgtatcagtgcgtgcgagctcagctttctagatacagtgaaccaaacacacgttggaccatagtccatgcatcgaagcctagctctcctgatacgagcaaccaaacacacaaacaaagtgtggatagaggatttggaagggaatatttatattccacccctctgttgttctgatagagtggcgatctatcttggatgccttgattagattgtctgcaatggttcttcctaaatttgtcctcccctatatcccacttttgcgtcacgtcacccagattctatccctactttctcacgtagtggttcccctaaattctcccataataccccactgcaacaataaaataccatttttcatacctatttgtcggtgttttgaaccgaggatcctaccgactagtgaattagtgttgtgtgcctagccccagatgggtgatgcaaggaaacacaagtctttatcctggttcaggcaagagaatgccctacttccagcagagaggggatgagacttatattacttgcacctaagtgcttgtagtaggggctacaagctagtcgggagagggagaggatcctaagtccctggggatgattgaggcaagtgcaaatatcagtgtggaggtgaaaaccgtgaagtgttctctcctccttgaagccttgggctcctctacttatagcctcaaggagggctaccaggagcgccatggtttatcgtgtatgggagaggagacgtgtccggacccctatagccggtatggtcgtcagtatggccttcatacccgttgttgacttgaactgggaggaggacgttcagtccctatatttgcatctcgatcgagctgagtagagagtcgaggcta

SEQ ID NO: 122372 - DNA, 407 bp, Zea Mays
taatgcattttatgagcttctctcaagatatccatcttcacctctgatttgtgaggcacacaaacacgacccctgaaacagaccaaatcattctcatcaatggtgaactcacggggtttaccatcgccgaccctttttcgagcttccttcaacaaacggtcctgctactgagccatgcgcactctctccagaagggaggattgaatgagcatccgagtctcctctctagcggtgccgacatagcacaaaacgactcccatatggtccagatatacgatcaaagtcaaggccacttttggaaccccggacctggtaagggcatccgccaccacatttgccttccccgggtgataatgaatggatagatcataatcctttatcaattcgagccaccgacgctgcctcaa

SEQ ID NO: 122373 - DNA, 684 bp, Zea Mays
ggagaacccaaggtgatttttgtgttcatccctggttcattcgcgctgcgattcaattgattagatgttgcgtttgcgattagatagagggggggctgtccagaattttacgtggtggatgaacagcggaagttctagcagtgtttagggttttttcgtgaagaattaatggggatcaatttggggatcttgtagaactttgttttacctttccaacgagtatttatgcgctcaatttggagttataaattaaaagttacaatcgtttgaatccgggtatgtggctgtccaaaaaacagatttttcagagtgatgaacagcagcagtattagcagtttctggggatttttcgggagtaattagtgttaatcagtatgagaatcatgtagggctttttcttatctttccaacaagtacttatgcgctcaaatcggaattatattttaaaagttatcgctgtttgaatccgagtatgtcgctgcccaaatcagaaaaaaacagattgcagggtttattttgtggaccgtttagaggtaattagatgttagaatttaatcatgagttgtatacaaaacttgtggggaattttatgtagttgtctctgaagtttttgtttgacaccgctgctgtcctaattttaaagttatggaattgttaagcagcgccgctgcagtttggttagtg

SEQ ID NO: 122374 - DNA, 855 bp, Zea Mays
gtcttccaaaaataggatataattgcgaagatactgagataaccaatccatacccaagataacatcaaatgtccccaaggaaatcaccacaagattagctgaaaagacctcatcatcaagaatgatggaacaaccctgacatactgaacagctactaatggagccattagcagaactaaccacaattgggtgacccatcctctgcaccgaaagaccagcccacgacacaaaattctctgaaacaaacgaatagctagtgctagagtcaaaaagagcatgggccacaaacgaatcaactgagatcgtacgtgtcaccacgtctccctgctctctgccatccgcagagggtagcacatatgctccggagatacccgcagaagaggaagctctcggagtgaagttaacagaagaaccccatggagtcaccgggtgaggcagatgcggagctccaaactaagatggtacaagagtggtcggtgcaggagtaggcgcgaccagatactaaagaaaaccctacataggcatgaactaaggagtaacgggcacataaaactgctgcggagggggtggtactgaaaattgatgctcagcgcttgacatcatgttgacagtgccctgagaggaggaagaagtcactagctcccatttgagcttcccattgggatttctcctacacaccacatccttgtgatcttggctgcaaatagagcacctgccactccactgacactcggcacggcgatgcgcttcaccacaacagaaacacaccagccccagcccgggcttaggaacagcccgatacctttgagtactccctcctgaagtacccaattcagagggtttgccacggtaggg

SEQ ID NO: 122375 - DNA, 1346 bp, Zea Mays
tggaaactgaacaaatcaattgccaaagagttgctgccagcagaacctgcagatttagcaatagaaccatggtggggcgttcggtttgtcaacttcacattggaagaatttaaggttagatccatccatggtgatttttattttttgacagaaaaaaaagaaaataaatacagcactgtcttcctatcatgtaaagtgcacatcgtttgctctcaatggaagaaaataatacattagtagaatcttgcattggtgggaactgatgcgctacattactgtagaagctttcagaagacgagacatcagcgatagacaaaatatgtaaggaggaagtcaattcatatgttctatttgacccggaggtagtacggggcctttataggagagggatggtatacttcgatgtccctgtttatcctgatgatcgttttagaggtaagcagcatcagcaaagctttcagctttgtcactgtttaactctatgatttcatgacttgggcccattttaagatcattgccatgcgggcccatatggccatattcatctgcatagttgcctctctttttttctcctttttttttgcttcagttttgaattcataccaccacttcagtttccaggcttgaaggttttgtttcaaacaaggatcagtcctacgaagatccaattgaagagtgagtagtttccatcagtagtcttctgtgaagctgtaacgaactgcattccctacttaactgtagccaactgctagatttttctgtagctgttaaaaccagtgtccgattttttttacaccgcaggctactgtatgctgtattcgttgtatcaagtgaaaacgctacggttgctgaactggctacaaccttacaagccgacctttaccagctccaggcagctgcatcatttgcttgccgactaggatgggctgtgaagcttctggataccgactctgttcttagggattcgagcactcctgcactgtccaacaacattctcagcgatgaagttgaaagctctcgtacgagtgtcgcctcagaaaagtctggtcatgagttgcttagcagtgattctgatgggcacaagaactccgggatggcttatgtgggcttcattgtcgatgctaatgtaacttcatacttaatgatgggctcactgtctccaggttagatagatttcccttgcatttaattgcctgagatgtatctgaactttctaactgacagtacagttgccactgacctgttgcaggtttgaagtcgcatgctgtgacactatacgaggcaggaaagcttggcgagtcttgtattgctgatctatgcaatgatcttgccagtttagaggggaa

SEQ ID NO: 122376 - DNA, 484 bp, Zea Mays
aaatttatgttttttgtacaaaaaattgaatttttggactccaaacaatcaccctaatacatgtggcagtgacgtggatggcatcgaccaatcagaggtcaccaattcactttcgcctcactactctcgcccgtccacacccattccaacgcatcgccccgctatcgcccgtctctcacttctctaccgctccaatctactatccaatgcgggctagagcgaggcgatatgcacactgtcaccgggctcccaccctctcgcccgtctcccgtccatcacatgttgtgagatgtccactcttgcctctactctagccttcattggcactagccttatgactgtagatgtggcccgtctagagcatctccaaacacataacaaataacaagctaaaaaacaatatctttttatataatatggtggaattagaacagaggacagggcagaggacagggcacacgagtaacctttgttctaataaaac

SEQ ID NO: 122377 - DNA, 518 bp, Zea Mays
gatcgtggtacatcttggtgcttcctgtgtgcatggagaatttggagagatgagcctcatccaagattttcttcttgaggtctctatttttaggaaccaccaatctgtcttcaaaccatagtatccacttgctgtcttggcaaaagcacttatacttctccacattatgattaagattctctttgatgatttgcactcccttgtcactgagttgggccataaaaatctggtccaacaaggttggttcaacggagatgtgagacaaggtaccagaaggaatcatttcgatcctcatcttgctcaactcatcacacatggcattgatgcgagaatccatcaccatacagttgcattgtgactttaaacttaaggcatctgcaaccagattagctttccccagttggtaatgtacttccatgttgtagtccttgatcaattctagccatcttctatgcctcatgttgagatcagcctgagtaaacatgtacatgaggctcttgtgatctgtatagatgttg

SEQ ID NO: 122378 - DNA, 476 bp, Zea Mays
ggaaccctccatgaggttataaaaggaggagtctagggcttcatataggggaggagaacacttcacaggttttcaccctccacgacaatattggcactcgcctcaatcaccagggacttgggatccactccctcttccaggcaacttgtaccccctactacaagcacttaggtgcaagataatataagtctcatccccctctgctagaagtaggaccttcccttgcccgaacaaggataaacgcttatgacttcttgcatcacccatccggatctgggcacacaacacttattcactagttggtaggaccctcaggtcaaaacaccgacagttggtgtgctaggtaaggggctcgctgtttggtgacaccacattcccaccaagactctagatggctaatcctcagcacccttggcacctcggcatggtgatatggttcgggagtctcgagttcatgcccctcgagttcggctatg

SEQ ID NO: 122379 - DNA, 4007 bp, Zea Mays
gtcgtgtactattccagtagacctccaggcaaagcttgccgccgcctgttcaggactcctatcagttcaggagcatcttcgatgctcttcagcacctgactttcactcggtctgacgtcgcctacactgtccaacggatatgtcttcatatgcacaacctcgggactcgagagcctcacctgacggccatgaagcgcatcctgcgctatttacaggcacaccagactttggtcttcttctgcgtcaatcatcctgctccgacctcgtctacatcgagtcaccgacagcgactgggctggttgtccgtacacatatcgctctacgtcaagctacgtgttgttcctaggggacaacctgttgtcttagtcggctaagcatcagactgttgtctcatgttctagtgctgagatagagtaccgcactatcgctaaaggtgtggctgagacgacttggctgcgtcagctgctccacgagctccacaatccaccttctcggtgcattgttgtctactgcgacaacatcagcgttgtgtatctctccaaccccgttcaacatcaacacaccaaacatgtgaagatcaacctccattttgtccgagagaaggtcgccatcgaggttcgcatactctatgtcctcacgacatcctagttcgcagacatcttcacgaagggcctctcctcctcgacgttcaatgagtttaggtttagtctcaacatttgcaatatctagggtttcgactgtagggggtgttagagtatatttggtagtctagatattgtgttttatagactgctatatgtatccgtgagttgccttatctcctacgtcatgtactctatataaaccgtctaagagctcaatgcaagacatcatcttttgttacagcatatacctttgtctaacagtgtaaatagcagaaagggaaacttattttagcatatactgaagatattcaaattatttacagcagtaccttgaacaagtcgcatgcgtgctataaacgaattagcacggctttgaaacacttctctttcttgctgccaccatctctccttttcaacatcagtcccataagactcggctgatttccccatcaaaaggttccaaaccctcgtcgtctcaaaatccaagtcaaccttagcacgaggccgctgctttttgactaactgcaagggcctctcattgggaaccatcaccacaccaccatatgggacaagagcatttgaaggaccacttgttccctcaaaagaaataacagctggtgtggtcagagataaatgcatctcagttctctgcacctgttcagtattcaaatcaagatgcttcaactttgatgcaactccttgaacgtaatccatatagggtcctgttgatgtgttggttgatctcccttctgctacttcacaatgagtatcaacgttgattcttttattgtccagggtctgagatgaaaagtttggagaactctcttctgatattttgcatccattagttgcgccataaaaagtgcttccagctgaaagcctgtccttcagctcatcatttggttgaattacactggaacagtgcggtcttgccttttctgaacgttttttggtcaaaaacttaatgcaagaacttctatgcagcgcatccatgcatggctgtggcagtcttgttgatgcttgtagagtattattcttaagatccatagtataaaagggggaatttctgcggagtcgggcagatcgcttcttttttattgcacccgcttggaaaaatgcgaacatctcagctgcagccctcaagacaacagagtcccgtgtgccaggtagcgaaccattgctatggtgtgtggggttttccacttccgacaccttacccatctgacttcttgtgggatccatttgaggtaaagacctagctgaggaaacaagaccatcagcatcagaatagtttaattccaagtcctttttgttcccttctattgtggggtttaccaccctttcatcagcaaacaaactgcacttacttttgccatcaggtttgcaagttcttcccacattatcttcttcccttgccagttccgtactaaatgatgcagaagttgcagccgaaacttcttgtgtaggttttagcatatctggcaaatgtatgtactcatctaaaaatttgttcagtctgcgactcatgtcgaaagctaattctcctggtgaattctccataccttcttgcatcacacgcccagtctgcacttctgactctgagtagaaagaactttgagcatggccaggtttctcatagttgtgatggtgtatgttggccattgacgaatggccgccctgcaatccttgttctttggattcaaattgcagacttcgtcgaactgatgatgttctgcttctagctgcaactcctgttgctccagagattgattgatcgctaacaggaccagagcaattctccagagagctgaggtttcttttcttccggacataacttctcttgaccttttggttcggagattttccatctggtgttgaatcaggtttctgcactttggctggcttattctctctgattacctttggtctgtgttttttcttccgagccttcattttcagcgctggggtttcctcattcctgaacatttcggttttctcggcacttgctagctgcgtctcaatttgagtcagtgttttctccttgggtacagttggtgctgacaatggtgtgtgttcactcttgttgatttgtgtcttgagccttttttgcatagattggtacatatgaatgttgtcatcagtggtactttctgcaagacaggtggttgattcttgagaatgttgcactcgtgtttcccaggtagctgcaggaaccactgattccaaatcattgtagctgtcacggaaaattgctgttgctaattgtggaagttgggtacttccttttccattttcagtcttggatgcttcatcatgtaaacaattcatccgatgctctgaattgtatttatctgcagtggctagctgtgaagaattcgttgtcatatcacctgcaacgatgctaggtgttcttccatgtgacaagaaattactcccagcaagccgaatggaagctccttcggaatacatagagcaacagaaaacaaagagcgttcagtgcattcataatgtatgataatatggccacacaaaacagaaccagcatgacacctagaaagaacaacaagatgagaggacatgcttaccctctgaaacatcaggtaaggcagtggccgacggcgacaactgcggcctcgaaccccttctagtgagttccctatggaacactatgatattaataggcacctgcgtgcaacccccaggcatattccaggatggctggatgcagggcacatcaccttgttcagttgcacggtttatcggactcaacagagcagattgtggagcaggaacctcctgaatagtattcaggacagacgtggagcatggggagaataagacttgcgaggcgatcgagccgctgttgcctgctgcagctggagctgcaacattgtgacagcctaagttgggcaccccagcactcaggaacagaggcctgttggcaggggtgtttggatcgcctctccccgcagacatggcttcaccgggtcttcgggagttgcgttcagtttcgagcttgagggtgaatccttgcttcttccagggcctgcaggaagaacatcatcagaatacggataaataaccacaacatttcgaattgtgctcaaatatccccaaaacccctgggaaaaatcacaccaaaagcacttgatacaaagtttgtaaactgtttgcatctgataaccaaacttgcggtactcaagctggattcatgttactgaacagaaaaaataataataaagacgaaaaagagatgagcaaattattccagctagttgtctaagggacaaaaggacaaggggcacaaaatcacacgcaagaaaaggctagaagattccttcctgtgcttgttctagcaaaaaa

SEQ ID NO: 122380 - DNA, 958 bp, Zea Mays
agcccctgttgcgggggctggtgaggccttggaaaagacaaggggaggtttcctctgaggacttcgtcatcaacagcaccgtatatacaaacgtgcgcgttggggcaagcgaagcacagacgaaatgctagaccagatttggattacatataagattgatgttgtgcgacctctactgctaaactcgagcgagtaatattttcatgattcatccttgtccatggacttgatttattttttaatgcatgttttgcttgattgatttgtttaggcaagggtgagtactgaggagctggcaatagtgactgcggaagtgcctgctatgacgaaggttacaactggggggcccacaggatgttggcggaccactacccctgagggagacatatgtaaccggcgtcgtctcagcgaaagctgtagttgagatagaggatagaaaggtggtgtgcttgtgatcgagtctcaagattgtctacgtcatggtttgtcgcgaaaagaggtggcgaaccaagaccccggtcgaatggagctggtaactatatgagtcggtgcctaggaatatgaggatggtcacttactgatcccatgcctaggtcccacgaaaggaactagggcctcaaacgtattacctggttgtagctcaccgagcgccattgctggcccatcgaggaaatcgtggtacaacacatctctccccattctcatgaatgggatgtgcgggagatagaaaaccaagaagatgggacaagacccccagacggatccaaatatcaaataggaactcgtggctcatcacatgcatgtgtggtaggttaggcaaaaagccgcatgaaagcgcccctctccaaaaataaaaatccctcaaacgaccaggggttaggggacccgataccaacatgtgtgaaacagatcaaacaacttgaatagcaaaaaaatatgaacttagaggaaagtcatg

SEQ ID NO: 122381 - DNA, 508 bp, Zea Mays
gttataattgtcaaatttggtattctactttctactattttccctttcttgtaaggtcaaaaataaaacatccttatatttaccattcgctttcggttagtttctctaataacatatcatttgtcttagcttttgtacatttcaaatgctatgtcgctgtgtgcatattctttttggataatatatgtttgggacattgagttttttatttgcagttgtatttggtgtaagaaatagatagtttgctttgctgtgtgaataaaatgtatctctgactttggatgcaatcaagtttacattacacaattgtttgtactgcaccatctcacactttctaagctattgtagtagtggtccttcaagaatcaagtatgaactatacttgtacagatgattcatgttgatccctatgttttggatctgattaattaatctgcaacgttgatgcaaatacttatcatgtggtacaaccccctctctccctccctccccaagattctacttggag

SEQ ID NO: 122382 - DNA, 554 bp, Zea Mays
ttcccactattgacgttctttattcatgttattgacttttaatgcctccaagtcagatatattactcccaaattaatcaatcctcgccctctcaaccttcgcatacatgcgcaaatcatttatggggggtgaggccctatgtcgaactcttatgtcgcttcttctcgtttgggcgttgaatggctagaatctattcgagaaggtgtacttctagctctgctctaagccatgcttttgaacatcatataaggtgacatacctctctagcaaatgggagcattagcaggcatctcagatctatgtcactgtcaagccacatgcacgtttggagatgccgataagggagccaacagtcgactagacctggtgggagcattcgctagccttggatggaacatgagagccgatcatgagaaggattgaggaggtcatcgatgtggggttattaatgatgttgctggtgtgtttctcaacaccatgactatcctcactctagaggcacctatggggcatgtgggagtacacccacatcgtggaagacatgcaggtcatgc

SEQ ID NO: 122383 - DNA, 821 bp, Zea Mays
cgggtattgtcggacagtacgaccctggatagtccgacttgttagtccggacattccagaattagattagttcgaaggagagtcctaatttcttgtgagatcttaccaatttcttgcaagatcttgttgggcttcacatgtaaatgggtccaaaccacccctatatatatgaaggagtacatgcgattgaaaagagcacaatccaatcgaacaaatctatttacctttattttctgacgtttcttattatcttccaaccctaagtctatcccaacccctcttctccttctctttgattcaacaaagatttaaggtgttctaggtggcctgtcgatcctagaacaacccaagggttcatcatccctaacaaagtccctcttgggaagttggttctaggtttacccgagagctctctgtgtgtactagacatccgacatgcctccctagacaattcaatacctattggacatcccactgccccaccacagagtctagtgaggagcagagccgaacatgaggtcttgttcatcgtgtgcaggcctagggttcatttgtaattggcttgaaaaggcacccataaggaggatcatcgtctaatcattgcatcgtgttgtttccttctttgtcttgctcgtaatgctcatggagttgtgttgtgacctctagagcaagaaccaggagtagagcaagaatgtggagcatggccccgaatcgacagggagggtgccaagcaccgctggttaggagggagggggtcatgtgctctgtcagacaatgtcctagtgtcgctggttaggaggaaggggtggagcgatgacttc

SEQ ID NO: 122384 - DNA, 790 bp, Zea Mays
gcactatttccatgagtcactaacaattacaccgagaccctcgcacttctattccttcacaacgccaggtccacgacgatgaacgacggagcagtagctccagcgagcttgtaccggccaagatacgtaatgatcggtgttcagaagtggttgacacctaatttgacctctaacaatcctttcccctcaaccaattttaaggttctagcccctaatctctttgcacacggtgatcgtgcgatcaacggataacttgacacgttaccggtgatcctatgagttctagctcaatcggccgggtcgaagcatcaagggcacataagggtactgaaacgaggaaacatagggggtgaatggacctatagagcgttggccacggcgagctcactcacacggtgttctttggccgatttgggggaaatcctaaattggagctctctggtgaacatccgagacacgagtgggtgcgctggatgcttgaatacctagcggagctaatggcatgctcaatttattggattcatgagcggtggcggctaatttgaaggagacacgcggcggccggagaaagggaagagcattggcgcaaagaatttgtggagttcaccggtgcaatggctccacaattgtactcttaagtgcgccatggtcactatcgcacagtaacaagccacagcatggcacaaccgaggtcactggagtttccacggtgacaccggtggtccgaccacgtcgcaatggctaccggcgcggtgataagcctctgctgtgaccaaatccacgcccccgc

SEQ ID NO: 122385 - DNA, 650 bp, Zea Mays
cagcgaggccgtcagggacgctacctgggcagaatttgaaactgctttccgcgagcaccatgtaccctaggggatcattcaactcaaggaagaggaattccggaaactaactcaaggtggaagatctgtcagtgagtacgtgcacaagttcacagagttggctcgttacgcgcctgacgatgtcagcatcgaggccaggaagatggcccattttctaaaagggctaagaccagaactcaagaccatcctcgccagccaagatttcctcagcttctcgcacctctccaacaaagccatccaagtggaaagggcaaaagaggaagaaaaagggcacctcaagaggaaattctaggttctccgagctcaacagcaagaccgtcaccagagagctcgatccttcggacatccacccgagggaccaaacttcaatagaccagttggaccgactccgtcacgttacagccagcagagtcagagttcctttcaggccccctcggttgcaagcaaccaaccgccagcaaatgcctgttggcactgctgagaccctagtcacttcaagaataactgcccccagttgaaggcacccggacctacctactccaactctgtgaatggccccaagattccctcgggacctgcctccaaggcac

SEQ ID NO: 122386 - DNA, 549 bp, Zea Mays
aggcgacctgggccagaagcggcctacccgggggggttcctttttcctttttttctttttctatttcttatttctattttctatttctatttcttttatctcgttttcttttgaacaaataaatagctaaataatctttgggtgctaaaaaaaataataatctatgtgaggtgcttctatcaatcaagtgtatgcatatgaggagatgacctatggggtggaatttagggagagataaaggggggggggtggttaggagattagggttccaaacctcaggttgaaattttgggatgttacaaatctaccccacttaaaggaatctcgccctcgagattcagacggggctcgagaaaaggtaagggtattccctcctcaaagagtcctcactttcccaggtagcttcctcttctccttctctgctccactgaactttatagagtctcacttctgagttgcgggtctttcagaatgctgagtcaagaatctttattggcttttcttggtactgaagatctttctgaatctggattgcctcttcttcgatgt

SEQ ID NO: 122387 - DNA, 767 bp, Zea Mays
ggaggatgaagggcggcgtgctcgagcccaccatggacatgggcacccttgacgatgcgctccctgtcaagtatgcacgtgttgcttcctcttcgacccacaacacatgtgcaccgatccaacatcatccctccatgggtttcgatacggttttggatcgattcgctccgatgatgacacacacggatgcatgtgcgggagggggtctatccaacttcttctctaagggctagtttggcaacttgtttctccgtggggttctcagcctttaacctgtggtggatgcccacgtgaaatctttccacgggcaaattactcaatctgtttagaagcgtcgatcgtaggggtctgagccacatgggagcctaacttccacgcagattcttcctcgacctcaggagaccacctcaggagaccgggcgacattccctgtctctggcctttgcctctcatgagcgagacgacaaatgctattgtgcatccctacaccatctactccgtggcccctcgcttcgctgcccccgtcatcgttgtcccatcttcccccatagcaccgcctcaggcattgctgcctttgcatccaacatcccctcggcatcttgttcgtcatgtgagcgagctgctccatcgatagttgttgcctccaccttggccacatcgacgagcaaaggttcatttgtatgcatccttctcaccatggcaaagatatgtttttccctcgactgaggcagacacctccttctctcagtgactccccctcgtctcgg

SEQ ID NO: 122388 - DNA, 720 bp, Zea Mays
ttcttctccaatcagacccatggccacggcgcgctcgccgtcgatcaccccgcggctcgtactagccatgaccggcggcgactgtccaaattagctacggggtgagcattaccgacccaaggcgactcaagaacagccttcaattttggtttgtacacttagagaacgtcctacccacgcgcacggcggaaaccgtgacgtcgagcccgcgttcccattcaatcacgcccgaattggtcaaatggctgctacgatgagcttcacgggtatacagagctgctaaaacaacacttgagaagtgcagagccataccggagtagtccggccatggagcgcggagaagttgtgctcgctggtgacagaaaagggggaaaatggcgccgcgacggttctgggtggaattgggaggtgagattggggctacacggccgtaaggaactatagtttcactgtgcactaccaattttgggagaggtggagtggattccacgaatttgtacttcaactgagctcacaggtggagatgtgaatacctcgccgtggtccatggcgctatttatagccacggcggtccggctaacgatcaacgaccgcggaaggctttgctcacgcatggcaaccacatatagaagaggtagagtaagggaggagcaaggcatggatgacaccgcggtggaattgaccgagccacggcggccacaggtgaataactccggacat

SEQ ID NO: 122389 - DNA, 932 bp, Zea Mays
acctttgccttgatctattctacaatcaataccaaaatctccaagactttcaatgtagatcatctttcaatggtccaacctacatccatattttctccaagaatccgttagatcataataattgtcattaattaccaaaacactacttaggggcataaatgcttcacaagcacacctccatcgagccacaagtcgttgttgtcaaaacaacaaatgaaaaggaggtgatccttatcaaggtggcgcaagttgaggctaccagccccagcgacgaggagatggcccaagcgcttcaagaacacattaaagggccgcagggactactgcaacaacaggtcaaaggggaagtgtgactgctttgaatgcggtaagactggtcatttatagcaaactgccccaataatgaagataaccaggacaaggacaagaatgggaagagagtagaaaagaagacattctacaagaagaagaagggcgaggctcacattgagaaggagtgggactcagactgtagctcctctaactccgatgacgaaggcctcgccaccattgccttcgaaaaatcatccttgttccttaacgagtgccacacttgtctgatggaaaaagagaagtaggtattttctatagacactcccaaatatacttcttctagtgatgagtcaagtgatgaggaggaggattataacaacctatttaagggccttgatagatttaaaattgacaaaactaatgaattaattaactcaatcaatgagaataatgaacatataaaaaacaagaggatctccttttttatgagcaagataactttgttaaagtagtaaaggctctcgctcttgaggtagaaaagaataaaatgttgagtaaagaattgtctgattgcaagtcttcaatttctagtcttactcttactaatgatgatttaaatg

SEQ ID NO: 122390 - DNA, 329 bp, Zea Mays
tgggaacccaacgcttgtatagaaactaacattgaagtcattttttatctaggttttcatatgacaccaactggcaaacggattactattgcaccctctacattgactagaagaagctcaacgattgttcccgatagcaacaatagctgctttggatcatctaaaaaaatcacgctgtcgtttcttgagggccattccaatagttcactaggtaatgaaatccttataccggacagcctggtactgactgacgaacatgtggcttccaagccgcaccaccctagctatggttttaggggcgaggttagggtagatttcgagaggatttc

SEQ ID NO: 122391 - DNA, 560 bp, Zea Mays
cccatccactagaggttgggaaagttctgtttgctaagtattcctgcaccaagtccctagtgctaatgtgctcagccaccaccctgaattccacttcgaccaattggcaggggggaccctagctgcatattgcacaaaggtcgagtcattccgaagctcagcttaaagggactcattaccatggtcatgagcttctcccttttcttctcatcaactttcacgtaaaaccattcattagtccacccagtcggccatttagtgcggtagccgatcacgggggccttggtatccttccggtatgcaaagttatagcacccgaagttcttgtgcacaccatcagctctgacctttgtctgataatgaagttcatgcatgcgacagaaccctacaacattggcactttttccttggcttcggagagcccatatgtaaacactaagtctaacaatagcattcggggtcagttgatggagatatatctcaaatctcttcaaaacctcccctatcatattgtaaagggggaaccgaagccctgccctgaataagctcttaaacacaac

SEQ ID NO: 122392 - DNA, 387 bp, Zea Mays
cgggtagtgaaaatgtccttctccccaccataccatgcctctgcccgtcgacatagctatagttcgagtgcgtttgtgttcgtgctacactccctgcggcacatctcacctcatgttcttagaccgcctcctcgattgttgtcagatcttgagcctcagccatgccacaaaaacaatgccaccactgatgccagcgttagcatcatcacagcacaatgtcgtgctccaatggctcccactcgaatgatattgacactctcggcgtgtcttgcatgtctatgagatagtctccaagtatccagtaaggaagaaagaatacctaatctaattaggattccccatatatataatcctactagaacttttacattataatcctagtagaac

SEQ ID NO: 122393 - DNA, 595 bp, Zea Mays
cttgtcagatgtggcgacaagaattaaaaatttctgccaattttatacgaagggcgagtctgtggatgattgtgtgtgccaagatgcgttgtaatagtgattgcattaaattaaacggaaatgcttcacatatagtgtatgattgtgtttatgaccttgaatggatgtttttgagtggacaaataggttcctaatgcaagtatgtgtaagatatttatagtgacgctttacctcgaaaagtgttatgtctgcgcataaataagaaataggtgtattttgtgtagtgtggattgattttgagtgcatgtgtcgcaagaaatgaagtagtgcgcatttaggcgatgaatgggtgtattatagtggtggtggtgtaggatatttgattgaggtgtgcgggtatatgccgtaatatggttatactcgtgatgaggaaagatgtatgtattgtgtaacacgtcgcttaggtcgctattatataatcatgtgaaggattctcatgatggtcgtgtaattgaggagtgatgtagtggcaagcgagaagtaagttgagttttcaaacggttagtggatagtatctgtcggtgttgtcttgatt

SEQ ID NO: 122394 - DNA, 495 bp, Zea Mays
gagagagagagagagagagagaggtgttatggccggagagctcagttaatggcggctgcgtgtgcgccattgccctgtacgtggaccgtagaaagatatggtgggagatctatcgatggatcgcgaggtctaccttccatggattgagaggacggagctgcagacgaggaggatcgctcggatctcgatcgatcgcaggctctgatcgcaatgagctgtgcgctgcagtgcaccgcatgcgagtctgtacgtaccatctgctggaacggttgccgccattgatggtcacgaagatgctggagctggaggtaggcgtagtgcactgctgactgctggagctggaccctgcatccgccgcatatattatgctgctggcctggaccctggatgctggtgctagctagcatcacatattgtaacctatatgcaaataccatcagctatggtgacaaataatgtacaagtaggtgaactatatcattggatatttgtttc

SEQ ID NO: 122395 - DNA, 400 bp, Zea Mays
gcatgtcttacgatgagtgttcctggccagcagcttgatcgttggattaagaaggaacactcacgatttaaagtgctcacatgagcacggacgtcgcgtgagcacgagatacgttcccttcagtagtaacaagatatagcagcatcactctaccgaataacaaattgtagaagcgttgtgcatgtttttcatgtgacgatgcctttgatctgcagcgtactgcgttgttgctaccgagtcagctggtcgccagcttccagttggatttattgagagagtcaaagaagatttttccaagaaatatagcggaggtaaagccaaaaatgctagtgccaatggcctcaagcgagaatacgggtactaaaccgtctcctactgatacttctttatatatgtcctg

SEQ ID NO: 122396 - DNA, 449 bp, Zea Mays
gtgatagaatacatcggaaggcaagggttcacccttcgctgctgctttagctaatgtgtctgcttcttcattcttgttgcgctcaatatgttgtagtgtgaagcctttgaattgtttttcgaggcttcgaatagcagcaagatactgaattaatacaagctctttggcagagtaatctttttcaatctggccggtcatgaccttggaatcagtttttataatgcaggtggtcacgacaagggctcgtagtttgtgaagtcctaggatgactgcttcatattcggcaatgttgtttgtgcacttatttgactcgagtgcaaagctgagacgtgcggcgtatctttatttgattccggcaggtgatgtaatgattgacgcagtgtcgatgcctgcgtgacaccatgctccatcatagtggatggtccagactgtttctgtgtgacactgtt

SEQ ID NO: 122397 - DNA, 553 bp, Zea Mays
cgtggatgtagctatagatggcccgctgatgtgtgggtctagccgtggtctgatcccgcctatcagtggccaaacgtaactaccatggcgaacaacgtggaaggccatttggctaagctatgtgaagaaattggcaatcatgatggtggcataacatgtctaggtccacatggctaagcgccataacaggaatgccaacattcatatcgagttgcttgcaaccattggtgtcataggacatgcgcccatgatcgtgctcaaagatgacatgggaccacatgcatgtgccgatgagatatcacacctcgttagcaaggaagaaaaatgagtgaagtgcacttccgatacttaaacttgtttggttgtatcatcctggtccgtaaacatttaaagtatgccacttgaagccttaatccctattagggtccctgtaaggtccaaaacggatcaaaacagacctggtaggaggaattctttccattcttcctcgaaccgacacaggggaggcataggcggcaacaaggagagtgtaccaagtgttccactgacatca

SEQ ID NO: 122398 - DNA, 350 bp, Zea Mays
gtgatgcatcaagcagtggtttaggttgtgtcttgatgcaagagggctgagttatagcatatgcctcaagacagttgcaccggcatgaggaacattatccaactcatgacctggaattagatgttgtggttcatgccctgaaaatatggcatcattatctactagggaatatctgtcatatctatacagatcataaaagcttgaaatacatctttaccgagtcagagctgaatatgaggcagaggagatggcttgagctgattaaggactatgaattggaaattcactatcacccaagcaaggccaatgtggtggaagatgcactaagtcgcaaagctttctgtcattat

SEQ ID NO: 122399 - DNA, 512 bp, Zea Mays
tttaaaggcaagggaagacgtcaaaggaatcattcagcgccccatctggtctcgcttcggcctccgaaggccgaaggtggaaattgatggtgatgttgaagcctgtcagaaggccttcaacactgtgtgtgccttcattggaacgagggatttgattcaagagcacatagccttcagggtatggctacttgtggagaactgggatatgccgaaggagaccaccgccgattccaatgggagtggtctggtccgattgaagtataccttcagatttagggagaaatttgatgagccagacgatgattggctgaagtgtattgatgctaccagtgatgatctactcggatcatactccaaggccgaagataatgctttgtccgcagcttttgggggtcggggcaagaagagattgaacagggtatttgatgcaattggcttcgtataccctgactaccactaccctcttcgagggcaagggaaaaagagaaagactaccgcttcggccacccgag

SEQ ID NO: 122400 - DNA, 780 bp, Zea Mays
tagcttgataggtaaggattcagtcattacctttagaatttcttctacgtcagtagcagcaggtgttgaaggagtctcttcctctatctcagttgttttggcttcggagccgcagcccttcctcttctttggagcaaccaccttcggctcagggctagattttctcttttttataatttcttcatcttctttcaccatcctagcagcttgcctgctcagaacactaacaatcctctttctcttttggccttcggcacccttgttcaatcgctcatagtcaagatattcaaaattcaatgcatccatcacccgattcaaccttcgcttcggtcgggtgccaaaggccgcagtcatcagttgatcttcctttttagtgtaattacccaaaattttgttgcacatggtttctatcatttctaaccattcttggcatgaccctttaaactgtttctcaaatttgaaccgataaggcagtcgcacaagttcattcttctcctttgtcccctttagcttcggcatgttccattcactcagcgtcgggaacaccttataggccagatattcttggactagatctctggtgctaatctgcttggctaccacccggaattctgccacatcttcttggcatggtgaccccgtcgacatgcgacacaggggcctagtcaacccgaagcttaagctcagcgggctcagtactagcgtcttgagcttctccctcttcttctcatcggccttaacataaaaccactcatttttccaaccgattggccacttggt

SEQ ID NO: 122401 - DNA, 360 bp, Zea Mays
tccacatccggtacattaaaaccaagtcccttgagttcattcactatctcatttaactggttgaaaaacatatcagatatactctcatcttctttcataataaattgctcaaacttccctttgcacacatatagtttggcactcttcacaattgtagttccttcatgaatttccattagcttaatccaaatctcatgagcggttgtgagattcttgatgcgattgaactcatttatatcaagagcatcatagaagacattcatggcttgatcatttgtaaggatattctcattgtcactaacggatggttcatcttctttcaacacaacaaatccatccctgacaattggccaaattttt

SEQ ID NO: 122402 - DNA, 731 bp, Zea Mays
gttctatgttccatgagttcccaattttcgtgctgtccatctgagtgaggcgatatgatcccggccgagtgacttctgctactatgaatggtccttcccatagaggtgacaacttgtgtcgtccctcccccgttagaattcggcggaggacgagatctcctactgtgaaggatcgatgtcgcatggtcttatcgtgatagcgccttagagtttgttggtaccgtgctgattgaattaccgtgtccagctgttcttcttcgagtacatcaacatcctccagcctagtagcctcggcttctgctatgttttcaaagatcaaccttggcgccacaaacttgagatcagcaggtagtacaacctctgaaccgtagaccatgaagaaaggagtatttccatgcagagctcgactaggttgagttcttaggctccaaacgacgtagggcaactcccttatccactttcctacgaacttttcatttttatcgaagacttttttctgagtgcctccaatatcatcccgttagcaatttcaacctgcccgttggctcttgggtgtgccaccgaagcatatttgatctgaatgctcttttgttcgcagaaatcgaagaactctgaacttgtgaagttggatcccaggtcagttatgatactatttggtatttcgaatctgaatattatgtcttgtatgaattctacggccttagctgaagttaaagaagcaatgggtttga

SEQ ID NO: 122403 - DNA, 353 bp, Zea Mays
gctgaggcaactgaagatgtgatgactgcatacttgcccatcgtcctcgggcaagatgcactgcaatggctacgacacctgccccgacactgcatcgacgattggagcgatttcagtcggcgttttattgccaacttccaatccctctccgacaagccgacgcagccatgggacctcaaatccattaggcaccgaggggatgagactcttcggtcgtacctcaaaaggtttcagaccatgagaaatcgtattcccgaggttgcagaagcagcagtgatcgaggacttctaccgaggatctaatgacttggccttcgtccgagccatactacaaaagcaccaaccacttccgaa

SEQ ID NO: 122404 - DNA, 386 bp, Zea Mays
ctacatgtgtggcggccggccaaaaccttagagttgacatgtcaaacctaattcgttcgcaggtagctgatctttgaacctgatctcttcatgatttgtcttatcgtctagctggacggttgtcgactattgctgggcgctggttacttgacttggcctctatcacaaccaaagtctagagaaggcaatcagtaggatgagtacttaagagattacttaataacttacattgagaaggagatagcaattgagtttgcaacatatagacttattgaccgcaattctgatgcatagaatacaactaagatggatcatgttagttcttttcaccatcactttttataattatatattccttgttgggtttaaaattacgcacacataat

SEQ ID NO: 122405 - DNA, 542 bp, Zea Mays
attaagttaaaggaagaaaaacaaaaaattctaccatatttcacatgaacagctaggagcatactttaaccaccagactggttacccgcaccattctatcctgaatcatcgcgtgcgttgactttggttgatcgtctgtttgattgcatgtacgtgaggaacggtgactgcatgagtagatgcaaaataagtcattctgaggccatttacctgcatctgcacatacaccagaaatgatcgtacctagtcggtcaggctcgcgtgggactggatgtgtgggcacagtaaactaatcagacgctaagactatgagtcgtagatgcagtacaaatgaactccatcttgccttattgccagcaagaggatcccaaaaatagaattacaagtctccaccaaattaaatatagcccacttgatttacaaaatacggttaaaacatggaaaagctatataataatacacatggggagtaaaacattcattacaacataatttgggatcatgtggcacccatgatgccaatgaaggttagacacttgttc

SEQ ID NO: 122406 - DNA, 544 bp, Zea Mays
cgtctgataatgaagttcatgtactcggcagaatgcatcggcgagcggctctaccccttgacttcggagagcccagatgtacacgttgagcctaacaatggcgttaggggtcagttgatgaaggtaaatcccaaatttttccaagacttctgcaatcattccgtgcagaggaaatctcaaccctgctttgaagaagctcttaaaaactacaacttcatcatcttctagtttcgggatactttcttccccaccaaagcgaaccaaccccttctcggcttctctgaagtagcctagcttcgtcatcatagtcatatcagcttcagacacagttgatttcccaaaatccagatggctgggcttcgatggcataatgatgttataaccaatctctccttcattagcatcaccctcttcaatatctgcctgctcggtttcagcagcgggtgattcttcgtcagcagcgccttcagtcacaaccaatcccgaccgcctcataacttcggagatcggagcagttttagcagcttcggcttcctctccgtcg

SEQ ID NO: 122407 - DNA, 593 bp, Zea Mays
tggacccgtccgggaataaatcttccctagtggtgccaaaaacggctgcagggttgccacgaacagcgccaatgagaattttgcgagtaggccctgaagcgcggaaacctcgactggtttttactccatgaagatggagccaaaatcgggcaggcccaggggtgttgtgacgcctatggctcggccgaccaagtcctcacctctggcatgatgaactctattgtccacattgcccacccgggcatggacccgaatcactcggcgaagagaagcatgtgcttctaggactggcgcgaccccgaaggcaccgccgacgaccatcctgaccactccgccctcaaaggagatggagggagtgtgtagcaccacacccagctccttcttcctggacatcctctttatccagggaagggtagaggacacactcattttcgactacgagcccaccgtacggggaggaaccccccagcacgacgcacaccgcgccggaataggcgttgcaacgtgttgcgtcaccatgaagacggggaacgggatccagcacaacccgtctcccatgatgaggcctctgaaataggggaaacccccgatga

SEQ ID NO: 122408 - DNA, 445 bp, Zea Mays
gcagagcgaatggcagagaggtttgctccaaattttatgtattgacttgatcatatctccacatcaaagttataacctcatagaccagctttaactttgttacattgttcaccatcaaatagtcacaggatcttactcaaaatcgaacacaaagttcatccaacttcactatttctgaaaatttagacctagggttgcctgacagcccgactttggatctatttatcttcaaatttctcatgacaccaaagcttaattcctatagcaaagttgttctcctataatagctctatcatcttgatgtattgatctaggacaaaatcttcatggattgagaaatataaagccccaaagatggtccaaattactggaattcagacttaatcatgtgagggaaatggagtggctttttgcaaataagtccaattcacatcctttgacctgt

SEQ ID NO: 122409 - DNA, 388 bp, Zea Mays
ctaaggagcactggccacgacaaccgtgaaccctacggcaaggcagccgtgttcccggcgattaggggcggtttggttcgattggaagggtcggagagcatcaccaatacgtaagtatgctagaacagggatgaaaaaggaatgagcagacctggggacggctggccgcggtgaggctcgtttcacggtggcggagaacgaagttgggggaaactggaaattcaagctcgctggtagatgattgtggctgattagcggtggctagttagctgacgacctcacggagctagtcacgggctcaatttatagggaggacaggcggtggtgatcaattcggccgagccgtgctggcggccggagatgaggaagaaggcggcgcggtgaattc

SEQ ID NO: 122410 - DNA, 315 bp, Zea Mays
ctgacgctacaaatgccgaagatgccggagccgaagacattaatttagaaagcatggttgctgatatagataaaatactattaaacatggtcgcggaagaagctgtcgcagccaccgaagagattacggcctcagagcccgagagaaagaaagaaataaccgaagacccttcggaagatgaagcttttatgtttcaaaacttagttggtcaagaactgacaaaagctgaaaaaaagagctgaaagaatatgcaatatcttgcggataccggcctggagcacttctcttcggtggcatagatgacgaaaggttagg

SEQ ID NO: 122411 - DNA, 408 bp, Zea Mays
cttaacttttgcgcttcgtgaaacactgaaattttgaagaaatgtctaaggagaagaaggtgtctgaggtgacgaagctggccgaggagaaaaaggttgtggaccttttattgctgggttttatgagtctatggcaaaaacgaatacaaagaagattaccaaggaaataatggaagatttatctgaagattctgatgacagtgatgattttgatgtggagagtggagatgaagattccaaagatcgaccctagcggccaagccatactatctttgggaagtcaaccattaaataaagtcaggttgacgccatgaggggaaggtactttcgtgatatgtctattgtgagagttggaggagatagcaccacccctgctcctaaagaaaatgaagttgttctttaccgaag

SEQ ID NO: 122412 - DNA, 328 bp, Zea Mays
aatcgacccttctctacgaccttcagttaggtcaccaatagacgacatgatgactacgaaggcatgtcaccatttcatcacacccattcatcgcatatatgcgcactaattcatttcttgcgacacatgcactcaaaatcaatccacactacacaaaatacacttatttgcgaagcaaaatttaaggaacgcctaacgcgtatagactcgacttataattatagaggaagtgatgactacttacggcatgtcatcacctctctacataagccaaaacaatttctactatcgactaagagttctaagtattaaacacacggttactttc

SEQ ID NO: 122413 - DNA, 1124 bp, Zea Mays
ctgagcatgagcatgtcgagggaggagattacaggtctgtcaggggaagatcttggagcacgtcgagtgtcatatgcatacaatatccagatatgacaatctcttgggcattaaaaacaatctcactgaggcaatcccataacaaaaagaatccattatgccctgtcggaatagagcctgcagaaattgcagaaacccactggtgttggctagaagtaaaggctcgctggtgctgtcgggataggctaactggagaacagaaactgcagaaacaaaggcaaagtaatacgaggtcggcaaagacctgacagaggctcaccactggtgctggctagaagtgaaggctcactggtgctgtcggaatatgctaattggagaacagaaactgcagaaacgaaggaaaaataatacgaggccgacaaggacctgacagaggctcaccactggtgctggctagaagccgaggctcagaaggggagatcacacagaccggaggcgcgagatggaggaggtggcggtggacgcgggggcaactagagaacagaaactgcagaaatgaaggaaaaataatatgaggtcggcaaggacctgacagaggctcaccactggtgctggctagaagccaaggctcggaaggggagatcacactgaccggaggcgcgagatggaggaggtggcggtggacgcgggggcagctagagcacgatagacgcaaccccactcgaaaccgtccctgtgcacgtcggcatcggtatagcgcatggtgaagaggacgagaaagacgggagatggatgagggcaaggtagaggactcactcgagctgcttcttcgatggcggagcgacgcgacggtcttcggcggagacggggagggcattaaagtgtcgaaccctagcctcctttctggccttttccgatggtgaagggtttgaattgagaggaggtcatatttgctgggtttggaattatgttgaaacggtcaattcaattccacggacagccaaacagaccaattcttggaaaatgattcaattcacgccaattcttgttagccaaacagcctattagctcttttctgttgtgctcttctcaggctatccacaagcgttacccctaaatttttc

SEQ ID NO: 122414 - DNA, 310 bp, Zea Mays
caataactttgatacaggaagatcagtgggctatcacataaaaattggagaaaactgctcctcaacttgggctgtcagaacgactgaaggtggtggccatggtacagtactaaaaaaatcttcagattcatccccctcgccgtcggtgacctccgcgcaaggatttgcgctgatcgcggtgattcgtgcaggactcgggaatgatagtaccggggggtgaaaagatcggaaggggagtggatttggtcgcggggtgaagcttatcaaccgcgccagtagccatgcgacgtggccggaccgtcggtgtcgt

SEQ ID NO: 122415 - DNA, 584 bp, Zea Mays
caacgtttgaacgggtctaactagcagtactgtacaacacatgattcagttctcacaacacagaatacaggtacataacaggcatgctggagtcctaagttcataagttaaaagataagacatgacatgacatgacatgataaagccccactaccatatcctcttcaatagggttccatatggtcatcttcatcaaacttccttcagagtcaaattcttctccttcgtaaagctgtttcactcttgtacttctacgcaactaagttgttcttctgcttccattgctgtcacgacattgtcgtatcacgtggccgccgccgccgaagagcagggcttgagactccgatgaactcaccttgccgctccttcacgaggaagacgactggaaactctgttctcaatatttttctttgattcctcatctcatgtttaggctgtcctttttgtatcaactcttgcatctcgtgttctggctgtcctttcttcgacgagtccgacattcccttctctgtctcccctttgttgcctcctcctctgagtacgacaccctcctcgaggcggactctgtggtcccccttactccc

SEQ ID NO: 122416 - DNA, 664 bp, Zea Mays
cttgtatagtgtagctagtgagtagttctagttgtcattgtgctctgtgcactttgctaacttgtatgtgtaggagtttgcttgtgcttgcttaatagttgcatatgtttgtgcaaccgtactaactagaattatttaggtgagctctcactagcttggtatgttaataacttatgtagaatcttttatggtgcttatgttagaatggtgtggtcttggcactagactaaatagttttaattcaatatttgttttttctagcaggaataattagatttgaaaggactattcaccccctctaggataattagtttttgaaaggactatttacccctctagtctaacatctcaactctaatagtgacaccagtgcctgtttctttcatttggtgggctaaaccagcctaaatgtaaaaggatctcaactagcgtgtgactgacacatttttgtggcacacacttcccacggtggaaacaccatatgcttgatcattttcatgtgattggtcctaagttttggtggatcatggttgttgtctttactcgtgccatggatgcgagcaatctaacccaagcgcaagtgaatctcttgcaactaggtgtacaagctaattattgttttacttgtgctatgagtgatgatacatttacaagggttcgtggc

SEQ ID NO: 122417 - DNA, 472 bp, Zea Mays
ccttacggtctgaaaaacgccttgccaacatttgtacgggcgatgagtaagacctttggtgacctgattagggacaagatagagatatacgtcgatgacatcgtggtcaagactaagagagggttgaccctactggaagacttaaccctggtctttgacaagctgcgggcaacgcgcacgaagctgaacccggaaaagtgcgtctttggtgtctccgcagggaagttgctgggattcctagttttgcattggggcattgaagcaaacccggagaagatcaaagcaattgaggcaatgagtccttcggcccgaatcaaggacgtccagaagcttacggggtcactggccgcccttagccgcttcatctcaagactaaccaagagggcgctacctttcttcaagctattatggaagtccggcccattctcttggacagaggaggcagaacgagcttttcaagagctgaagcagc

SEQ ID NO: 122418 - DNA, 350 bp, Zea Mays
gttgtgtccttgggtgctttaaattatatctcggtggagcccacattacaatagcaaatagtcagggcacagattgaagacaagggtgttcagatcattaaggaaatgatcaagcagaaagcagaaaaatacaaatgcttccgtcaggagagcaaaggaatcctatggtttggagatcgattggttgttcccaagaaccctgagctcagaaagaagatattggatgaagctcacctttcaaaattctccatacacccggccagcaataagatgtatcatgatctcagatccttatactggtggaccagaatgaaaagggaaatagccaagaatatatccgaatgtgacac

SEQ ID NO: 122419 - DNA, 314 bp, Zea Mays
atgaaagctgcacgatagctcttggcaaccttcgatcagaggtgattcagctgagaaacgaagccctgaagaaggactaaattctatttcattggtgaacaaagtgaaggaagatgaggtgaaatacaacgctcaggtcgaagctcataaaactgaggttgaagaccttcggaaacaacttgccgaagccaatgaaaattgtgcggtcgcaaaggctagccaggaaattagtgagtggtcgcaagctaggctagagaaaatattgaggagcttcgcgagtccaaggaaaggtgcttcaaaaaatccttagtttg

SEQ ID NO: 122420 - DNA, 695 bp, Zea Mays
gtcctgtgcaactcttgattgctagatggatgcagatcacttgctgcttgtgaggataccagcgtccaacaacacatccccggtagattcagacccgttggacattgtggaaacctacatatcgtggcctcccattttgttgtttttttatgaacgcaatagccctccgttatgatgatacacatggtcttaggttcacgaaatgtgtaccatgatctgaactttaaatctggtttgagttctctgaaggcctttgatagtattgctgcagccagtgccctgtttggccttctacagatccacgttgtacacaacattttttttgtatttgttcagttatttttcttcttcccgatatgctgagttagaaccacatggaataatgacgttaacacattctacattgaataatgaatctatcattcgtctgtatcagcatgccataaactgcttcatcccaaccgtggaccgtcctttctttaatcatattgatggccaccttttgttttttaagaagaaattgaagatcatgctccagtctgcagcattgttcctaaacggtataaaagcacatgtactggtcttcaccaagcgagcacctcagacaccaacacctacacgcaatcactgtcacaatggaggacgaagggttagtcagggaggccgactgggccgggtttgacttgctaccccat

SEQ ID NO: 122421 - DNA, 388 bp, Zea Mays
ggagttcgtactgatgtaggtgagttggtccaacttttcgattttatatgggtgttcaactgagcctcttatagccctcgttttatccgcccgccgctctggaatgtaatacactccgaatttgatgtgaacacaaactctgtgaattccgacatgtatttatgatccgctgtgctggggctgccttgtgcaccgaatcagtgatcgggcaacgtaatacaaagagggagcgcttgatcatctgagctggttttgtacagaatgtcaggtatagccaggtgctcgttgtcgttgcttcagttttaacgagtcggtcatgcaatgcagctaacgttctggcatcggccatgctctgttgcagagagtaatgtggatagcatccagatat

SEQ ID NO: 122422 - DNA, 334 bp, Zea Mays
gtttttagccttgtgccctttgcaaaaaggactacaagaatcatgcctttttcagtgtaagctgttgttgacttgctgagtagtttatcctcagggagttcagaccaatgttaatgtggtaatagagtttcggcgcgtcagctctaaatagaaaactgatagtacattgacgtttatgattagttttgtgccacattctatccaaaagatccagttaggagattagctcgtggaatagtttaacttcttgccccttcatttgttttcaagatcaaacacgttttttccacttgggaagttgtttaaattttctgccagtagcagatctgtttag

SEQ ID NO: 122423 - DNA, 1166 bp, Zea Mays
ttccttaacgacacctttatgcttagtttattttttattccacctaacattaattgctaaattgactccgtactaacatacatgatggttcagttagttcttaatttcaagctccgaacccaggtaagcctagaaattcgataaaaggtattcaataaatcaacaccagcaaggtgtatgctatagctagataaactttagcaaatgaactggtaacaacgtcaccaccatttattaaactactgtattgtatatatgcccggagaaatcaacaaatatataccatagtgtatccagttggtcaactaaccaattacctattgtagtgcattagtttatctacaaagagtacaaagggacagcagagcagatcatcataccgtgcatacggtgaaagctgcatatatattccaaaactgcatcatcaccgagagactgttcccatgtttggcattggacgcgtcacacatttgcagaccagttatatatatacagttatacacacacgcgcgcgcatgcatgcattatcattttttccttgaaccgtaacaagtgatgagcatgatccaagcaatgatgaagtccattgcacagcaaatagagaataataatgcagaagatcacgatctagtaaatgtctgcctcacatccactacttgctatgatatataaaaggtcccgtgtgtatgggtccaaccccagcagaaatgtgccggccggccggacagcaagcagtacgcagcacacatgcatgcaggagctagcctcccgtgcatattgtgtgagaaagataatgcagacacaccatttgtaagatggtgtactatagtaccagaggcatgcagagtggtagctgggctgtgcatgtcgcaagcaaagcactagtttattagcgctaacgtagtatgtaaacaccacggaaactaacaaatcactgcctatgcatctatcaacaaaatctcttggcttgaagatatcatcataatcaatgtgctgatcacgcgtgacacccgtgtcgatcgctcggaaacgacaaattcagcatgaaataacgctggtcacgcatgaaacagtcatgcagttagcaaggcagtaatcatggtcatctggaaattaaagagagcgcacaagcacgtaacaaacttttaacacttagcagaacgaga

SEQ ID NO: 122424 - DNA, 285 bp, Zea Mays
cgatgactagctttatcacgcactagcatagctatggctgaccaaacgtgttggaaaaccacatgtgaggcgaaccaagcgggacttgagctatggttggggtaataccaagcaattcaaggatggcaacgtacactggccaacaacatagatgtatagatacatatgcttattacccattctatttaggtataagatttgtgtatattattttgacttcgacttgattattgtaagtgcttccaaacacaagttagaattgtagtccactattttagagtaatt

SEQ ID NO: 122425 - DNA, 659 bp, Zea Mays
gtgtgcgaccatcagggctatgacaacacaacaagcctttgtaataagtacaacaggcaaaattattgctcggtaattggggtacacgataaatccacgcaacatgcgcaacaggcgcaatcgtgggtcgatgatcacgacagacagacagtgcctacagggcatgcgaaaaatacgcgactccgcgatggcggttcgactcaacgggagctatccgattaaacgagagtgctacatagcaatcacatgacgcagccaagttcgtacgacacaaatattgcgtcgtgttgccagggcgcagccaatgccaaaactcagccgtttaataatttagcctgatcggcatgtccgggtacccacgatacaatttaattgctcggcgtgagttcaaaagctcaacgcaacacaaatatttagagtcatttgagtatacacaatataaccttcacatgcattttaataattttctgctaattatttactacgggaaataattattaatacagaaaaataaacaccataattaatatatggatataacacatcaggtgtaaaagacatttctccatatttaagcatgtattttctactaattatttactacgggaaataattaattaaagtagaaactgcaaaaatggtttattctatttaatatt

SEQ ID NO: 122426 - DNA, 369 bp, Zea Mays
gagcctgtcagacaacctgtaggccatcccaaccaggcaagcctgatcaaggaacgatcctctacagcaaccagagcaagcagtacagctgaactcctggccgttaatcacgctctggcccacaggtcatgactcatcaaccaggctaaagtgcttgcctccttattaatcaaggatgcaacggtacgatcctatagaacagatcctgttcaagtaaggtcgtgctaccggactccagagctgaacttttaagctggctactacccaatcgagcgaccgaggtggtactaattggtgggagtgtccggcaaatcgtgtactgggtcgcatcctatgtgtgggctttcaggtcgagcccatcgaggctgc

SEQ ID NO: 122427 - DNA, 587 bp, Zea Mays
taaaccctttttgtatgttttttgaaaaatattttcgcctatagttttattacctcgaccaacatatccgcttgactggaatggataggcttctgcagcgctggaacttggcgtgattcctcgccaatttccctctccatctatctctagtctccatcccatccatccatctatctatctaggaccaaagtctgtggtgcaatgtggggagccagaagaatatcgcagacccctacatgcctacacacatgaggctttgcagggtgagtatcctgctttcagttgagcatttgtccatggctgatggcttcatccaaccttgtcataccaaataggtttacaaccttgtctcgctggactggtggtccgatgaggcggtttaggatataccacggtccaactgaaaccattcacgagataaacttgaggagatagtagctgtgtgcttacatgtgtgtctacgaggtggagataaaccacaattggttaagcaaaattcgatcttttaacataaaaaatcatatctttaacccctatcaggtataggtaggctactaggctaaatatatgatgttatcatattattg

SEQ ID NO: 122428 - DNA, 564 bp, Zea Mays
atggcttaccggtggcacaggaactctagtgaggtgatcagggaggcaaagggggtctcgatggacaagtaggtgtcgatgatcggcagagacggtcagtggtggccggtcatcacgtgtgtgcgggtagagaaagtccagcgagggtaatccctcttcttcgatgtggtagagcttcaacataagcttgggaaaacttcatgggtcctcgaggatggtggcttgaacgtcggactaggaggaggatggccgaggatggctggccttggtagctggctcttggaggcagtggcggggcacggggagctcatcagagacgagtagcgatccgagaaggctgagcgctagtcttagcaagggaggggagcgtgctagcatgtccgacctggctttataagcgtgaggggagtgcagggtggtggttgccgattgctgatgcaggggcacgtgcggcatggccactacgcgagcacgggcaggcacatgacatccaacatgtggtagtgtcgtctactacacttaaaatgcccattggctcactatccatagcaaatttggcaataa

SEQ ID NO: 122429 - DNA, 504 bp, Zea Mays
ttttgatcttctattttgtaagacgacattttcagtagaactctccacttcattttaataccctaaatgctcgctccaccatattacgggttatcaatgcaaatggttaaagtgtcgttgttcaccatttggtgcgggtcccctcctccaatcttgaacatggtacctttgacccttatatggtgccaagtatcggcacaataatatttccctacaattcaaaatgataacatgataataacttagagtcgttctacaactatttaaaagtactataacattaatatataccttcaggaggatatgcaaaattttgagcatcattccttaatgcatggaatagcacatttgtatgtaccattcatgcttgctctttcatgtcatcatcatcttgaagactagcaatgtatgtagcatcactggaattggaagaatacaagttaccaacaataattaagacaattattattatcatcataccaacagaaggagtgcagacaaatg

SEQ ID NO: 122430 - DNA, 318 bp, Zea Mays
catagtagtgcatggcgggtcccgtcggtcagtctcatggggcggtcgcgcatggagcaaccttgcttatcatcataatccttgtgtcaccctccgtcgtgtgtaggcatacacacagtgtggcatatcgtcgtgtccctcccggtacgcgagtcactgtagagaccccggtgctgaggtcccccacgaccgggtttgaccgaccccacccgacagcgaggtacatttgggaccgtaagtgggggcatacaattatgtcaaacagcaacttcccgacgcgccttaggtgtgccacacgtatgtccagacgtagctcag

SEQ ID NO: 122431 - DNA, 446 bp, Zea Mays
tcacaggctataggaagtgtgtgctaggaaactggcttacctccgtgtatcaaaacactacttgctccttgcttgtcaacctattttgtctcccggaaagaggattagaatttttctacaacaaattggataagcataatatgcagccggcaatagaaatatgagggcaaaaaagattaatttctttctgatggatctcaccgacagagaacacaaacagtaaaaccacaaagccgagcaaacaaaggaggaggaaagaggggattaaggaaatggattctggagaaaacaattcaatacatgggcggcgaactggataagcagaatctacgcccgctacgaaaaaatgagacaaaaaagtaacgcactgctgaaaacgaagccgtaggatcacagagagcgaaacgcacggtggaaaacgacaattgaaggagatccaaaatgga

SEQ ID NO: 122432 - DNA, 353 bp, Zea Mays
gagttttcgcagaaatggaatgactgtcttcccttggcagaattttcgtatcataatagttatcaaacaagtattaagatggcaccatttgaagcattgtacggacgacggtgtcggacacccttgaattggtctgaaccaggagaaaggtggtttttcaggcctgacatggttaaagagatggaagaaaaggttcaacgaatcatacataacttgaaagaggcacaagctcgacaaaagagttatgcagacaaacgacgccgacccttgtactttcaagtcaaagattatgtgtacctgaaagtatcgccaatgacgggtgtgaactgtttcggtgtaagatgaaagcttgc

SEQ ID NO: 122433 - DNA, 1183 bp, Zea Mays
aactgtattgagctgttctaaaaagtccaccatagctaatgggccaagccagcacaaagggtccatagaatgccaacacatatagagaggggccaaggggggaggatgcaatgaggatgtcacactcaaggctagtgatagtgggtggaggaggcattagcgtctgattcgtgtgaaggttggcatgcttatgtgctaaaaccaggagcatatggggcctgttgaagctaaggatgcaataattatacctcgatgctaacacatggaggaggtcgatgcatggaagaacctgaccatgcaaacaacatggaggtgatgggcatcgatagtgccaggtcctagggtcatggaaagagggtgggcactagcggtgctgaggcttaacggtgtgccaacgtggaagagcaaagacctgagagggaggagtagagctcattgcttaagtggctagcacacatgtggtgaggaacgaagttatggctagaggatagaaaggatgtggatcggtggattgtgttaggccacggtggacaccaagctatcatcaggcctacctttaaatgtcaggttaggacgcccaacgtgcctgagtagcaaactaggcatggtactatcattgggtcatgcttagcgcatgcaaaaaatgtggccttcaagctaggccatcgggctacaagatacatgcacatctatactaatgcatgtgcccacatgtcagaggcagtgaaaggggacaaattagcgagtagaccctcacgtgtcggtgggagatgggttgggaaaacagtatatgctatgagacatctaaggctctaagcacgaggtgagtggtggaggattacgggagtagtgctactcgttaatataatgcaaaaggtttacaagggtatcgattatggtatggtagtggtggttggtttttgctggccctagtgggatgttcaagtgggaacactatttagttaggtgcaaccatgggagtgttagatggttgtgtgcttaatcaaccttcaaagctcgaggtacgtggccctgacttgggggtcctctagctctaggatcgcccgcgacattactaccgcggtagcgacagtttgactagcacaaggaaaatgccaataccattgctccctcctatactagtgtcgttgtaggaaggacgacggtgactgactgagtcatt

SEQ ID NO: 122434 - DNA, 498 bp, Zea Mays
tcctggtgcatcacatcaatgttatgcattagaatcaaggctttcatataagggagttcccatagaccacatttgtgagtccaattatactcggttccataaccttcaaaacgatttccatgttcgtttagtttcaaatcattaaatctcgcgagatgctaagatgcttgggtggtcccctcgtcacaattgtgtcctttttaaaagtgttcctatcgaacctgaacgggtgatcctctggtaaaaaacatctatggcaatcgaagtaacatatctttccaccaaacttcagtgggaagcataaaatgtcttcaacgcatatcggacatgtcaaaataccatgacaactccatccagcaacgataccataagcataaaatcgtgagttgaccacaaaaacgcagctctcaggttgaacttctatttcttgtaacaatcgtacacctcgactccttcccacaaaattttcaattcttcaatcaggggtctcatcatcac

SEQ ID NO: 122435 - DNA, 425 bp, Zea Mays
cggaccttttctttacggtcatcgtcacgacgtctataaatagggtacgaatccttcccttgcaaggttgtgtcactaaaaggccgagggtaatgattcttgcacgatttatgacccttagtgcatgggcagttagggtttagtgacccacacgggccatgcatcatatgcttgataaccatctttcgtagttcagggtacttgttgcttgggatctcggctgagatcaaaaggtcgtactgctcaggacatgtgagcttgtactttctctgcattatgagtagaaaatgggcatgcggcaaaccccgcttctgaaactccacgacatagacgtaggctcggaccttaccaagaatatcctgtttagtcagccgatgctttaactcttgtagcttcgcatgaaagacacgcactacaagatccgg

SEQ ID NO: 122436 - DNA, 444 bp, Zea Mays
gacatactatcttcagaaaaccgactatcaagcaaagtcatattgatgccatgagggggagatattttcgccacatgtctattgtcagagttggaggagacagtactgcccctgctccggaggaaaacgaagttgttatttaccgaagcttcttgaaggcaggccttcggttcccgctgagtaaatttgtggtcgaagtattaaagatatttcaaatctttctccatcagattacccctatgttgtgaatggccttggaatctgtccaatttccttcagcccttctagcagcctcttggcttccatgcacaataataggatcctggtgagatggtatcttcatacatagatatgctggatgaagtattgcttcgaaagcattcaatgtccctcgtccaatgattgcattataaggataattcatgtctatgatgtcaaatacaa

SEQ ID NO: 122437 - DNA, 404 bp, Zea Mays
ttgtcttgcattgaaacacatcccaatccagtgccagaggcatcacaatacacatcaaacgacttgttgatgtcaggctgcgctaacacaggtgttttggtcagatgttgcctcaaggtgttaaaagcatctttgcatttctgaccccattcaaattttgctcctttcttcaataattatgtcatgggtttcgcaattcgggagaaatctagaatgaatcatcaataataccccgccaatccaagaaaactccgaatctggcgaacagtggtgggtggcttccagttcattacttcttgcaccttatctggatccactgctattcccttttgagagatagtgtgccccaagattttaatctcctttagccagaaatcacacttggacaatttggcataaaggcg

SEQ ID NO: 122438 - DNA, 535 bp, Zea Mays
tgtacatcacttagaagaaacttctttagactatgatatactttttttagctccagcatctggttctaatttttttaagcatggaaatgcagatgattaaaccattcatgaaacttcgatatactgagagcattgaactgcttatgcattctaaaaaggttacctcatttcctcaaatgtattcagctacgccttgaacttcgcaatacaattccaaattagtgaatataagcttagaaatataacagtaataaatagcccctatgaactgaaggtcaggacgttagtagtcttttgactagcatgattttataacacattatctcacaaaaaacaatatgcatgcaccattaaccagctcattctaatgggagagtcgatggatgctggataaatagatacaccttaatctattgctagaagcgagaaccaagaagatcattcaattcaaattgatctcaatgatgaattcattttttccacccatgattaactttcaagtcgtgtttgtgaactcactgctggattttatctc

SEQ ID NO: 122439 - DNA, 428 bp, Zea Mays
aggcctctttggaaggtttctctgtaaagaatattctaaggggagaaaatgaacatgcatacttgttagccaaattagcggcacaggggctctactaccttcgaaagtattttttgaagcaataaaagcaccttcagtcgagctcatggaaagagcggtgctcacaatttcaccagtacatagtgaagattggaggactgagattgtatctttcctctagggcaactgtctttcggatgatgaagtttataataaaagaatggaagcaaggacaaggccatatgtaataatagaaggggcattatacaagcacggagtttgctctccattgctcaagtgcttgtctagaaccgaaggacaagaattaatgaaggagatacatgtggggttatgcggggcccacattgggtctaggcctctgttgggga

SEQ ID NO: 122440 - DNA, 347 bp, Zea Mays
tacggggcgtatcacgcagtgcttttgggaggatggcgatgtcgatcacagtttgatggttcatgcagggcacggcggaacacaatgaattatacaagtttgggccaccatggggcgtaataccatatattttgtgggtttctggaggttgtattgctctgagtttgacggtttacaagggattgctgaaggtaggaaatgaaggtcctcttgtgacctagcgaggtctaacccttttgtaggggtaccactcagccttatatagccagccaaggagatgtcccaatacagatcaaaacattcatgcgagtctatccactacctgctacaattgcgttgaatcttcc

SEQ ID NO: 122441 - DNA, 535 bp, Zea Mays
cttcaccagaccagtagggcaacgctcgaagccgtgccaagtcaggaggagggcgaggtaaagcagaattcttcaccggacttggggtgggccgctctgccgcaccgtgctgtgggtagggctccactcgctgccatacaccgtaagaagacctctgttgagtttgcttttgtctctactatgagtagcgctagggaatcaaagtctgaacgtttgtgcgcaaggatgatgaactccgacgatgtctcctccgtggctagggtcgctccgtcgatagggtgggcgactgattaggtgggggggaaacaattggcatcggacgttgatctcgttacgtgtgggcgagattataagtaggataacgattcacccagttaattcccagtcgtccgatctagatcggaggtgtgtggataggttggccttaattagttttggacccttagatcttgatctgatgtccatgcttgcattccggttcgggcgcggctgatttgatctatgcggtcggatcatgatcgaacgactcagcccg

SEQ ID NO: 122442 - DNA, 306 bp, Zea Mays
ccttttttgctgtaagttcttccccgggactccattgagcagcactgcagatgttgctgtagaatatatctccgtgacccaattaatccaataattagggaacccaagttgcctcataatcatcttgattgtattgtgttctatggtgtcgaaggctttcataaagtcaatcttcaagataatgtattcatgctttgatttctgacattgataaatgtattcaaaggcccacgccaaacaatcttgaattgctctagatttaatgaacccatattggttagtgtggaccaagggtataataatctt

SEQ ID NO: 122443 - DNA, 349 bp, Zea Mays
cggtccatgccctctccgggccttcctttgccctactggaggagatccggaacgcgatcagcaacacagacgccgcacaacatcttttccagcgcctacatgagggcacccttgaagcgccttggcgtttggaggatggcctcttcctccacggatctcgcatcttcgtgcccgaccatgggaacttgcgccaccaggtgctcgccttggcgcactcaacaggccatgagggtgttcagaaaacactccaccgtcttcgtgccgagttctacatccccagtgatcgcgccttggtccaagactgggtacgtgcatgcaacacgtgccagaagaacaagaccgagactct

SEQ ID NO: 122444 - DNA, 363 bp, Zea Mays
tttgtggaaaaggatttgttcgtaattaattttgaacacaactagacaacgagttggttttgagaaaacatagggtctctttagtaaaacatacacaatcgaagagatatcggccgatctgagccgtaggatctaaatcatgtgcccacgaatagatccttatctttacactccttatctttacaaactgatatgaagtctcattcgttagatctcgaatcagtggcccaagagtcgtccacacaaacacctatccaaagtccttggatcgctgatcagcggcttggttttaatgcactggaacattatctgactttctaatctcctccgcccaaactagatcggacggccggacgatcttct

SEQ ID NO: 122445 - DNA, 704 bp, Zea Mays
gcatgacagagagaaagttattgggcacagaggtgagctggcatgtgggtggtgcttgagtgagcttgggtggaatgtggtagagctagacacatgatggtgagttgtgagtggtgcgagcgcagtggagtgattacgtaagggcatgatagagcaagtacaatcaagctgggtatgggcacaggcatggccgagctaggaacatgcataggcgtagcaaagcaagcgtggatgaggagatcacaaatgcaggtgtgacgaagcaggcatgaccaagaaggaagatacgcatggacgtgatatatgaaacaatgataggagactgagctagtcctcggatagagagagagagaaaagagcaaagttgagccctaatctagtcattggaccatctaatgagtaatcatcagaccaacaggtggaatctgatgcttgcgtataaagcactagagagcctatataggtcatcgaactagtctgacaagtaccatcagatgatacgataggattatgcaaaagttacaatgcattgcatagagccatcaaactagtctgattcccacaaacgaagcacgattaggcaatatggtggaactaagtaggtaacacctgaaaggatcacgatgcctaagagggggtgaatgtcagacctgggtttcaggggtccaaacccgggcgcgaacttcaccaagtgtgctgggacc

SEQ ID NO: 122446 - DNA, 872 bp, Zea Mays
ggccattggctcggcacgggttgagtcagatgattccccagccagtaaactaagcactacatttatttctgcgtcgttagtgctaaccggcatctcaaaatgagtctgtttttcatcctctcaaagactccaaagtggggcgatcatagcctcaatatcctcagaagagggtcgcactctaagacccaggcaaccatcgcgagcaggaggattggacacaaactcggaaaacggcctaagtggtggcaaattccaggcagaataggccacaggagcaccagcatttgaaactttacccctcaagatcatatccagtcggcttatcagatctgcagtggggattttcttattcataacccgagtggggtcattgatgccactgtacagataagcagggtaggccttgtccttcaaaggctggatattcttgaaggtaaaatcaacaaccacagcctcagcagttagacctctgtccttcagcaagcaaacctcggtgagcagagttttagcctctgctatctccgaaggagtcagagactctacctagcttggagtgcggacatccggctgcctccctaactgaggggggagagactggcagtggttctccacaataaaccactcgatacgccaccccttgatgctatccttgagggggatgtcgaggtactctatcttcctcccgcgacgcatctctagactcgtgccaccaacaagctactgctgtctccctgtcattccaggccgataatgatacaaatacttccaaaggccaaagtgggggagaatctcgaggtaggcctcacacaaatgaataaatatggaaacttgcaagacagaattagggttcaaatgggtcaaatacagttcgt

SEQ ID NO: 122447 - DNA, 327 bp, Zea Mays
ttctcattttgctcactcaacttttgttgctacttttgagccccgagatgttggacatgctttatctgatcctaactgggttaatgctatgcatgaggggcttaaaaatttgaaggaaatcaggtttgggttttggtgccacctccttctaactgccattctatcggtacaaaatgggttttcaaaaacaaacagagtgaggatggtttggtagtgagaaacaaggcgaggttggttgcccaagggtgttgccaaaaagagggaattgattatgaggagacctttgcccatgttgcccgtttagaggccattaggatccttttagcc

SEQ ID NO: 122448 - DNA, 513 bp, Zea Mays
gagcaaattccaccacagagaaggacaataaaccatgaataccaattttcaaatctaaaacttgcctagaaactgctatggatcgtcaggactagaccactagacctaggacgaaaggccttaggcatagagggagaaataggtggctaattaattaggccccgtgggccagtacttataatttaaggatgccctaaaaaggcaccctattttcttttgagaggcaacgtttcttccagcatgcatgcattatgaaacacaaagaggaattaaaatttgagctaaccccttttcttaaaaccatccgggctctctttttctttttccttccaccataatctttacctttgattcccttctgcagatgaattcacccaccccctccagtggaggagactctcgtttcagttctgacttcctttctcgcgatggttttccttccatcttgtgggaagtgcttaactccgccggttaccctactccccctttgtacacggtgcagttgtatgagga

SEQ ID NO: 122449 - DNA, 463 bp, Zea Mays
gcgaattggtagtggtgctgtccagaattttagtgggtgggcgaacaacagtagtattagcaatttctgggaatttttcgtggaaaattaatgagaatcagtatgtgaaccatgtagagctttgtcatacctttccaacgagtacttatgcgctcaattcggagttatagattaggagatatcgccgtttgaatccgggtatgtggctgtccaaaaaacagatttttaggtgggcgaacagcagcagtattagccgtttctggggatttttcgtgagcaattagtgataatcagtatgagaatcatgtagagctttgtcttacctttccaacaagtacttatgcactcgattcggaattatattttaaaagatatcgctgtttgaatccgggtatgtcgctgcccaaaagagaaaaaaacatattgcagggtttatcttgtggactgttttggggtatttaga

SEQ ID NO: 122450 - DNA, 388 bp, Zea Mays
cgggctactgtcgaggagtgtgtgtcgatagctggcgacgacagattcttggatcacatccattggtaagtggtaatctctagccttaacttttccatattctatttattagaactatcttcactaggaaatctacttaattcggtttttatctttgatacttgtaatgattcccccttttccaccatttttccacctattttatgaagctgggaagggtacaatccatcttattatttattaaggtacaacatggataaaatatggatgaatgaacctaggtatatttctgacaatccactataaaccattattttgtggtagcacttccatataagtagaggaaatggcaccagacacaaactattttcttcatatattttcttca

SEQ ID NO: 122451 - DNA, 726 bp, Zea Mays
gaatggcaacaaagcatgttggtgtttagcggtaatactacaatagagaactctgattgtctcatagccatccgtgttgtatgatgttccacggtcatccataatgatcttattgtgcaaaatgatacatgcatagatgatcacactgagtaactggtgaaaaaaagaacgatctatggttgagaatatgaaattgacccttgagcacccgaaccgccctctccacgtccttccttgcgccctcctagcatgtagcaagcatccattgctttggagtctataggagcggaatggtcttcatgtacattggacaccgatgatagatgtcatcagtgaggtaatacccctggttgtactcatggccattcaccatgaagttcatgtttggtgcttcacccttaagtacattagtgaacaacattgattggtcgagcacattcatattgttgttagatcctgccactccaaaaacatgccagatctacaagtcatacgaggcaaccgtcttgagcatgatggtcgggatctaatgtgtgcattttatactccctgtcatacgaggaaatccccttagcccccttagctaacagacgccatgatggttgggatctaatgtgtgcattttatactccctgtcatacgaggaaatccccttagcccccttagctaacagacgcctaaggtcatcaacagtggaatgacaactatactccaccccaaaacatg

SEQ ID NO: 122452 - DNA, 526 bp, Zea Mays
gcttgctccccgcttccctacgaatcgtttctcctgtcctggtattcatttttgtatttatcgctagctgttcttgtttcaaacgcttctaggtggtggaatctggggatctgcgggtgtttctagtccgagtattgttgatcgttaatagatcactcgaaccatttgctactgcaactcatcacggaattctcgtgggctattcattatccagggcgagtcgtttgcgtttgctcggggctaaaaatggcgtctcgtagttcataactccctttccagcgccgcggcatgtattttatgtaatttcagcataatgttggcggttttggagagattaagcaagccgttgcctttgaatcgttctcgtagtttaatccgatttctatgttttttcttcgaaaaaaacgagctaggaattcataacttggagaatctgcttggattggggctcgtgagcggcatgaattgcagctgataattggtacgggaaacctgcaactctttttagtgccgaaaattcccggtg

SEQ ID NO: 122453 - DNA, 618 bp, Zea Mays
aggtggagtataggccagggaagatgaacggcgcggctgacgccttatcaagaagggatgaagaaccagcggtagcactgtccactccaactctggaagtttttgatacactccgggaagagacattgatagatccgtaagtccaggaactgaagacacaattggcggcaggaactgcaggagaagaatgggctgaaaaggatggattgttagtatgccggggcagagtcttcgttccaaataattcaagtgtgtgggatcagttactgatggttgcgcatgtggcaggtcatgtgggagtagagaatttgcatagatggaggagctcgttccacaacgcccatattaggaaacgggtacatgaatttgtttggggctgtacgattttccaaagaaataagtctaaacatcttcaccctgtcgacatgttacaaccattctctccatcggtacaggtcacggacgaactgtttctctaggagcggagaaatgttgcggatgcattcatggggaaggcttatgctaggaagaggcacgtggagggcatgatcacccttggtgccagcagcttggcgtccaccagcacaacaacaggtaagtcttagaagtgttagctga

SEQ ID NO: 122454 - DNA, 435 bp, Zea Mays
gcgtactagacgctgtcatagagactacgaaggccttgagccctgcccctaagaaaattaccgaagctacaaaagttcaggccgaaagccaaagctgggccttcaatgtccaccgagatgaagcctgccgcacctgaggaaaaaacggcagggcacccgaagctccgaacgaagatgttggctacattattcgacatgctttggggaagaaattatcccaggaagaaatactagaagctagacactttgcccaaagactgaaatatctgaagggggctttagtgttcaatggtagtaacgaagaagatttcctgtactgtctcccgaataacaaagaaatatctgtttgccaggagatagctaagagtatggcatttcctaagcttgaagaaggcctttcggtcttatcgaaggatgatcttgctgacaacctcg

SEQ ID NO: 122455 - DNA, 638 bp, Zea Mays
actcatgagtaagttttattaggagacactggcttgatgtcatgtagatttagaagataagggtgctcaaactgtctctgccgaaaagggagaaatcagctgaaggctgaagttcagaaaatcgaaatggtaccagtgtgatgcagttgatttttgggcactataacttgtaatctatgagatttgggtccaagaaacttatagtaactttttaggttttggattagtgaacaagttctcttaatcaaaataaggagaaaaggctgactgaagaagggaggatcagtcaagtgctgtagattctaaggtgctaaaatatctatctttgatatttattctccttgccgtgtcttactttggaatagagtgaagataaagatgaggagatggcagggatgttcagaactttggtcatcactgaaatatcaccaagtctgaaatatctaatacagtgccatcttatctctaccccccttccatggataaacttccccatggcttgatgtgctctagaaaccgacgtaggactccagggttgagccacgcctccatatccatgcaatctctgacatccccaaagttccccatgctgtaatcctaagaagctagccatcccttgatctttttactgcctattt

SEQ ID NO: 122456 - DNA, 600 bp, Zea Mays
cctcgcgtgcgacaaatccgcgcagaagtcgcctaagggtgcagccggactaagcacaacaagtgcgaaaaaaccgaagtctatcgcgaagactatccgcgcagaagtcgcccaagggtgcagccggactaagcacaacaagtgcgaaaaaactgaagtctatcgcgaagactatccgcgcagaagtcgcccaagggtgcagccggactaagcacaacaagtgcgaaaaaaccacagtctatcgcgaagactatccgcgcagaagtcgcccaagggtgcagccggactaagcacaacaagtgcgaaaaaaccgaagtctaccgcgaagactatccgcgcagaagtcgcccaagggtgcagccggactaagcacaacaagtgcgaagaaaaaccgaactctactgcgaagactatccacgcagaagccgcctaagggcgcagccgaactagtacaacaaaagcagaaacgacagcatcaaaccgtccgcgctaagaccgactataatcacaccagtacacaatgccttcgcaggcacaggcaagcgagggcacacgacttcattgtgcaagcctttacacatatacaagcgagggcgccac

SEQ ID NO: 122457 - DNA, 295 bp, Zea Mays
caaaactctatcatcaggtgcgccggcctctaaggcgacctcctgacccgaagctcgtgctgctgccatgcaaccagaatgtggaggagaagacccgacgtgaacatccatggaagtatgagaaggagaacccgctcggacaccctcgggggctgggtcatagctcgtgttgcccacccgagccggatcatcaccggcaacaccctcgggggctgggtaatcgcaagcgccatccttggggaccgagttctctgtagcagccacctctaaggctgaaggattttcaaccacttcc

SEQ ID NO: 122458 - DNA, 500 bp, Zea Mays
agcattagaaaagaatcaatttgtacacttcgtcaggctttggctccaacatgtcttgtgaatttagtgtataaacgatagataaagggttgaatttgtgttttgaatcccctgtggcatcttcatttcgaaaagacgttgagtagtgtacccctgctcctttaaggaaagccctagaaaggagtgtgcaaagggaaaaaatgataacaaacaatgttttgcattcattttttcatacatacacaaatagacacaaatttgaactcccaacttacaatacacaagtgccggatgaaatggacggacgatcgcaactagctacgcccgtctaaagcgaatacaaactagactttttttcttcatatatgggctagtttaggctttatctacagggtatgccgtgaccctgacccactggcatacctatagatccaccctgcccgtggctgagagggatggctagcggttgaggcagatatgaaccaaccctaaaattattg

SEQ ID NO: 122459 - DNA, 432 bp, Zea Mays
ctgcgctagacctggatgcattgagggattgagaacgtcgtcgatcctgcgaaattgaagtggtgcataatcatgatcaacatcaagatctacttcatcgactttaggggcgtggtgaagtccagcgctcatccgactgcttgcgttgaggtgactggtgttcgttgcacgctctcgtgttccatgggtggcggggagagcgtcagtgttctcgtcgtcgtagtgtaccctctttcaactgtaggtgacgacaccgtggtgacagtgacctcccgcgacagcccatccccgacatcctcggtgtcgaagtcgtccgtcgtgtcctcgagttcaccactccatctccactatagactcataaaaaatgacgtcttggctaatgtggactcaccgtgtcactgggttgaagagtcgttacgccttggagtcagc

SEQ ID NO: 122460 - DNA, 383 bp, Zea Mays
ccatagaagtgccaaactcttctttcaacaaattgagacttctattggcattacttgacacttttgttgcagaactcaatcacaaacttcctaggcaatcattctaataaaacttgcgccaatgcttttgtcgtcctttcggggtggaaaattgatatggacatggacagtggatttgaggaaacagaaacactattgcagaactcataatacaccaaagcctctttaaagcttaatacacagacaagttaggagtcaatcttgattctttttcaagacaagagaaacctatgaaggccagatgaagggaaaagtggatgattttgtgacatggcaattttactaagtcgagcaattaccctaaagaaacaaagtggttgtac

SEQ ID NO: 122461 - DNA, 309 bp, Zea Mays
ccttctgtcgagaagggttagagaagtgacttcggacgtcggcaaatgttttggaattgaaaccggccacagaagaaaccgaatccctaactcaccattctttctatcttacatcgccatcgagccttggctgcagagtcatcggtttctaatcgcaatgggtttatgttttctttggcttttccatttgctgtattcaaccctgatctagatagatagtttgacttctattagctgagaatgacattctcaagttatgagaaagaatgggttttaatgtttttcatttaaaaagaatgaagaatattt

SEQ ID NO: 122462 - DNA, 271 bp, Zea Mays
atggggttggacgaaatactttcttgctagctctgaaatgaatgcgacttctagcctaggtggaagcacctctctagctatgcttctccgcaatcaataaatcatttgcaaaggtttgtcacagcttgccagtgtttgctcacagtttactggtcgtgcttctagcctcggagcaacggggaaaggaggctgttgcgtcgatggcaggatgaaaggggacatagtcctaaagcagaggctatgcttctctgcgatcaaagaaatcatttac

SEQ ID NO: 122463 - DNA, 524 bp, Zea Mays
tgcggtgtcccgacccatgtccaacctgcttcagaatggcacgagaatctaggcatctgcccagccctccacatcctctggtgtggtacggaaatcctcagtggcaggagcaaagcatgtttaagggcaagctaggccatgccccccctgcccaagttgtttccctttactaaatagtaatgtctttactgttcatgcatgatttactcaactgtagagactagcccatccagatactctgatcaagctccgccactgctcggttgaggcttgacccttctccatctaatctgagtttgtgcacgtagggatggacacgagtccgcttgagtgagtttatcttaacctcgcctgatggcgtccttgtggatgcactcctcctttcctcggtgatgacctgacgtactggcagtggctcacttgcttctcattcatggcattctcactctcctccggggtggcgcaaggacctctagttcttctagtctgatgcagtgcatagtgcattgtgggttgcaagatga

SEQ ID NO: 122464 - DNA, 395 bp, Zea Mays
gcattgtgtatgtggtcaatgcgctcgaatattctgttagaaaatgttctcggtactgaatgctattattatttttctgttgtttgaattcaacactggttacgattgaagaggtaagtgcagtgtgatgattttgaaacttctttctattttgcgaggcatagagatcgccctaagacgagtaatcgcgagcgggcttatgctggatcgagtagatgtgagcatgtctcgccgatttaaatcactaccgacttaaaaccgactgctctgttcgtagggtatagtggtcacccagggttaagtaagcgtgagcatgtcgcaccaccttaagtcattaccgacttaagccgattgctccgtttgtagggtatagtggtcaccctgggttaagtaag

SEQ ID NO: 122465 - DNA, 550 bp, Zea Mays
ctcggaatgtgctgagttaccaaaagatcacaaggccataggcttcaagtgggtatttaaagtcaagaaggatctagcaggcaacattgtgaaacacaaggccagactagtagcaaaagggtatgcacaaatccagggggtggactatgatgaagtttttgctccagtggctagattggaaacagtgagggtgttaatagttttggcagctcaaagggattgggagatacaccacatggatgtgaagtctgcctttctaaatggagaactaatagaggaggtttatgtaaatcaaccaccaggtttcaccagctcattcactgtgaaaagagtgctcaagttgaaaaaggccctatatggcctcaaacagacccccagagcctggaatgtcaggcttgatatggaacttaccaagctaggattcagaaggagcacagaagaatgtgtagtgtatagaaaggggattggtggatcactgctgctagtaggagtatatgtggatcatctcataatttgtgggcctaacacaagagatatctctgtgttcaag

SEQ ID NO: 122466 - DNA, 502 bp, Zea Mays
tttctatttataatcttgcttcagaccaattggttcactttgctgatctatagcatttggatgagattaatttccctgtgtcctgtttcatgtcgaaagtatgtgaaatgcagtgcttaatcagggcgatgatgctcaaccttatttaaaattgcatgccattgaaaacaaacaaaaggcttctgcatgtctgcatgcctgtttactcattcataactgttgtggttgtgccttaggatggtcatttggattaatgacaactagcgcagttgcactcaaaataggatgactaaattggccagcaagaagacaagggatagcatggtttctttgattgaactaaggacatgatgagcccctctttctacgctacatccattatatatataactcattttcgggttcatttggtcacgggagggagtttgtggattatgcttctccccttgtactacttcataatttcgtaggtgatcttgaattgcttttatttgtgaatttt

SEQ ID NO: 122467 - DNA, 436 bp, Zea Mays
tctgggcactgcaattctggctgtcaggcgctctgaataagaattccgatggtacagtgctacacaaatatcccaggttcagagaacctcgccaccggcgaccgtgcgcccggattcgcccctgacgctacaattcgtgctcaacggagtacggatagttgctcggggtagtaaatattgtcttgtggatgaacttgagccactttttcactccggccgccatgtccgcctgactcacggccgattcggatgaactcaccagagttagccacctatcgtccatgcgccacgtgccttggtatcttaccacgtcgcagtagctcgtattactcatgtccggtgatcgccggtgagctcgccacggggaaagccacgaattccttgcgccagtaacctcccctctccccggtcgctagcgcttctcctccaaattgag

SEQ ID NO: 122468 - DNA, 498 bp, Zea Mays
cacagatgggttacagggaggctgctactcatatccaactctggctacttggtgccatggtctctcactcagagtttgatgttgtggactttcttatttgtgagattgaggacaccgtactggatggtatgcgtgcccagcgacagctgccatatgctcactatctctgccacatcttcgctcagctaattcggccaccacagttctagggaactcttgaggcctctcgcctcctctttgggtcctaccgtccagcccctgaggatcctgtgtcggcaccttctcaagtgattgacactcaggccgaggataccgcttttcaccagtttgagactcagggcgcaacagtccctgacgatgatgatgatgatgactttggggttccgcctctgcctccacgcactcatgattatgaggctaggagttccagtgctgcccctgctagcccgcctgccattggccctgctcttgctgtgatcctccagacccttactcagc

SEQ ID NO: 122469 - DNA, 299 bp, Zea Mays
aaagatctgagatcatgatacatcttgttactgccggggtgcatggaaaatttggaaagatgagcttcatccaatattttctgcctgagttctggattcttaggaacaaccagtcggtcttcaaaccatagaactcccttgctgtcctgacaaaagcatttgtacttatccaccttttgctcgagcatctctttaatgacttgaacacccttgtcacccatctgtgccatgattatctgctcctgtagagtgggctccactgagataaatttcaaggtacttggggaaataacttccag

SEQ ID NO: 122470 - DNA, 436 bp, Zea Mays
cctgatgtaccctctaatggtgcaagagctcttctgaagaaatgcggaggtttgcccctggccataattctagtcgcagggctagtggctagtaagctgagatcagcgtcagatgttgcccctaaagagaagaaggaccattcgactcaagtggactgggatgtaagtgaaaagttggatgaattcatggtaaaagtggagaagcaggacgttgttagtacccatatagaacaggacaatgagattattagtgaacggttggacaaattcatggtccaagtgggcgaggatttaagtgaggatctagagaaaaatctctccacagaaggagtcacagagatagtgaaccactgctatacccaattgcctgcagaccttaagacctgcctactctacctgagcatgtttcccaagggttgtttcatcagtagaaagc

SEQ ID NO: 122471 - DNA, 423 bp, Zea Mays
gttatagtaatcatgaaggctttccctctctagttgtctgcacaatgatagttcaacgagggcgtcggtctacgacctatacccttggaagttgaggaggaatttctctcgaagggcagcccatgagtcaattgtaagcaaaggcagcctggtgtacctagttaaggtggggccctctagggagatgatgaaggactttgccattgagttgtcatctcccccagatgaagccactacgacttggcatctcatgatgaagtgtgacgggtcagcgttgccattgcactttttctagtttttggccctatagttgcttagccagggcgtcgcctgtagcctagtggagagcggacacttattgtcggtgaaattgaaagcttggaaagcgtcattttgcggaggctgtgtgacttcgtcaaaact

SEQ ID NO: 122472 - DNA, 424 bp, Zea Mays
cccccctttaaaataatctcgtcctcgagatttaggaagatctagggaaaaggtggggaaaatctatgcgaagctcttcttctctttcccacgttgcttcatcttcaccgtggtggctccattgcactttgcacatcttaataaccttattccttgtgacacgagtcagtatatccagaatcttgatagggtactcagcataagtcaggtcatcttgaacactaaggtcttccattggtaactgttcttcaggcaccctgagacatttcttcagctgagatacatgaaagacatcatgaacatccgcaagatgatccggtaactccaattggtatgcaacctctcccactcgctttaagattaagaagggtccaataaagcgaggggacaactttcctttgactttgaatcttctcatacccca

SEQ ID NO: 122473 - DNA, 437 bp, Zea Mays
ccgtaattgtgtcacgtcgtgaccctttcaccacttcgtaaccagccatagtagctcgccagtgaccgccgtagctccttagcctgtgactgccacgatagttcacgtcagggaccttctcctctcaccggccgccagcgcgatttcttcaaattgggcgccaccgctctcggacactataaattgaaggtgtcgctagctccgttaggttgtcacgaagccagagcacccgccccggcctccgattagccactatagcgccttaatttctttcttcccccaattcggttctcctcgccaccgtgagccaccgcgtcatggaccaccgtttccaggtctgttcataccctccttgcccttgtttcagcacccttgtatgctatggatgcttatcagcacccttgtatgctacgttagatcaccgggatcacctcgag

SEQ ID NO: 122474 - DNA, 482 bp, Zea Mays
aacaacacaattttaaaaataaatcagggtctcaggcagcatgctttggtctattgggtcacgtcatttgtcattaaacaaattaataaaagttgttttggtccaaggctgcaaggcacgttaacgcatgggctggccgactgggcttgttcgcatgctggtcgactgggcttgactgcttgaacgagtgaaaattgaaacgcgccaagcaggctagcggcttgcacctgagactccacggacgcaggaactatcggaactgaagtcgggtacccgctacccgggtacccgtatcctacccgtactttccgggtatttgtcgggtagtggtcatcctgtatcctacccgtatccgactgatgtatatccgggtagtatccgtatccgacccgtatacaaaattacccgtatccggtacccgaaaacccgggtattttaagtactcgtatccggtacccgccgggtaatccgtcccgttttca

SEQ ID NO: 122475 - DNA, 274 bp, Zea Mays
atcatcgtagcgtaaccactaatatatgaactccgacactcatgtcttaacaatacatcctccacacaatctagcattttctaaactactcgtcacatcaacaaatatatcccctatataatcacgaatcccatcacatggcataggatttgcacttcaatctctacttaattgcacgcctcatacttgtctattccacaattctttgcctagacaatacactacactctgcatacataggatccatttaacacactcgacgtatacacttaat

SEQ ID NO: 122476 - DNA, 371 bp, Zea Mays
gttattactgcaggtttatcccggatttctccaaaatcgttaaacctattactgagttactgaagaatgatgttaagcttaactggtctctcaagtgcaatgaggcctttgaacaattgaaaatattgctgaccactgcaccggtttttgctcaaccggatataaagaagccatttgatgtatactatgacacattaggcattgggcttggatgtgttctgatgcaagaaggacgagtaatagcttatgcctcaaggcagctatgctagcatgaggaacattactcaacacatgatttggaactggccgcagtagttcatgcccttaaaatttggcgtcattatctactaggaaatgtatatcatatgtat

SEQ ID NO: 122477 - DNA, 296 bp, Zea Mays
gaggaggcagagcgagccttccaagagttgaagcagcaccttgtgtccctaccaatactggtagctccggagccaggggagccactatacttatatattgcagcgactatagaggcagtgagcatggtactggtcgtcgaaagaacgacgcaacatcccaggggagtcaggaaattcccctaggagaaggcggtggttcgaccaccacggaccttgaggacccggggccaaccgtaggggtctggaccatacagaagccggtctactacgtcagcgaggtcctccatgaggcaaaa

SEQ ID NO: 122478 - DNA, 676 bp, Zea Mays
acgctacacactgctagcgtgagtaagtatgtgtcccatctgtactcgatgctagcgggcccaatgtcagaggcttttgccaggcatagtccgatggcttactctaggggcgtctagccacgtgttagcgtcgaacccctgcttgggtgaggggcagaattagggatagctggtgacacttttttcccaagtctttcccaatcgtgggcttgacccgcactcgagggggtccaagctcctgcctggacacgtggcggctccggacctcaccgggcctgaggtacaaatggtatttttcatgactggagctattttcaaggcttggtgctataactagagagtgccttcttttctagggctttatgctcccccggatccctttgtctatggatccattaggtcacaaggaggcctgggtcctatttgtaagatcccagacctatagttgaagttgttgatttctccctttatggggcttgatggagacggcaatccagcctagaaggcgagcctggctggtcatgactctatatggtgggccttagtcccgtgctaggccggctgcccgtgaaatcctaaatggtggctcttgaggactcaccttgacatagcaggagtaccccgtattcagggtaccatgcaatgacgtggctttctactcaagcattacatgcat

SEQ ID NO: 122479 - DNA, 291 bp, Zea Mays
tagcactgtttttgggggtggttctccatgttcctattttcccaagtctttggattgggcctcaattacagaaaagtgtaggggccacggggtaagaatccctaggcacagtgaacaggcccaatgaattgcagattaattttataaaaatagaggggttcttatgctattcggccctagcgaaggggcatcggccaacacgggccatccaatcgagtctggacggacgagattagatccggatcaacccgaaccggtacgcaacactagccttacgatctgcgatcaatg

SEQ ID NO: 122480 - DNA, 407 bp, Zea Mays
ccccggggcactcgaatgcgcagagaaagaggttgatgtcctcgatgaagtcataaccgaccatggagatttctgtgcactggtggcttcttgtggtaaagctgctgctctcataaaagccgagtgtaaccacgcaaggactatcaataggccgaatttcagcctttcatcattggacctggttgatgttccagccgaagcccgaagcatagggaacacgttcatcactcaaatttgggctaagggcggacgcgagttagcttgagacgaagcccggaacctgcttaacaaagtatagctctttacctttattcttttacttggctccttaccagatttctgattaccctgttcttcgtcattctccagggtgatggcgccgaaggtcaatgaaccgaagctagatc

SEQ ID NO: 122481 - DNA, 512 bp, Zea Mays
gcggagttagggaatgagtgctaatgccgaagggttctgcagagtgcatgaacttcactatcagaccaagtccagagcagacagcctccacaagaacttcggatgttataactttgcctatcgaaaggacctgaaggctccagtgattggatatcgcattaagtgggctactggctggaccaacgaatggttctatgtgaaggctgatgagaagaagagggaaaactcatgagtatggcgatgagtctgttaaagctgagcttcggcatgacaaaactactgtgcaatatgcaactcggatccccatgccagttagctgaagttcaattcagagtcgtaggcgagcacattagaactcagggtttagtgcaagaatacctagcaaatagcactttctcgacatcaggtggatggggaatgccgaagaggaaagacgaaggaaataaacttgagcttgtaaggctaccataccgctttaaattccaaaaaaccttcagcggtccttgtgccga

SEQ ID NO: 122482 - DNA, 618 bp, Zea Mays
ggcgagcatagcaagtccggcaagcagcaaccgagtctgggagcacaaggtcgtgggctgtgggttttataggccggcgagggggaagctagagtgcctggcagggagtaatgggggaaggggagaaaacagccggtttgaagaagattgaaggccattaatggttaattagacgctgttaatagagggaggccgctcctcttgattcctcatagaaacggacgagcaagaaacttcagacattaatggtgtcgaagaaaggaagagtaacggctggacaggggagaggaaggggaagagctaggggatggtggctggcgctccaatcaaacagggaaacgagcgaacgggtctcagtggcacgagctggagaacaacggctcggaagcacaagcggcacacacaagccagacagaacagaggagctgtacaaaggttgaagacgagctgacctagggccccacaggtaagagagtgaaggaggagagtggagtggagcacggttaggctaattgggctggcgcacagcatatattttttttatttccattttttttaattgaatacgtagagaatatatatacatacatatatatagttgtactaggtatgtgcccg

SEQ ID NO: 122483 - DNA, 599 bp, Zea Mays
ttttgacagatttgttgggaggggaagtgtctgcttttttcttgttaatacaaagaaaacaactcttctgcgttttcaagaaaaaaagtatcggctttgtttgctagtacagacatgttcaaaggatagttcttttattcttgcttaaaaaaagatgtttgaactctgaagtagcaagcaccaaaggcctgggcatgttaattttttctgttcatgatgcatttgccacaaaatcagtgttgttaagtgccaatcttaccttcttttttgaatgcaaccaaccttagattctaaaacaaagcacttaagcaacgtctcacaaaaatctaaatggtaaattgatgttttccactttccggtacgtccacgtgttcctatgctatttgcatgctagttgtcaagttattctttggtacactagaaaaaaatcttcttaaatttcattcaggaaattttggtattactccctccgtccccttttgataatcataccagggaaaaaaatctgtaccaagtgatcatcattttgtcatggacggagccttatcagcgttaatgtggcattggccacttgggttccagctccaatgcaagttccc

SEQ ID NO: 122484 - DNA, 350 bp, Zea Mays
gtttgtagtgtatttgatgaggctgtacttaacatcactgtcatgaccccataagggggaatattttggagctgtagcaggtaaccgggggcataactatacttaggaggacacacccaccaacccggttacctataaatattctcgcattgtacattgatcagacacgcttaacaagacgctacagttcactgcttactgttttgttgagcaccagagttccctctttcccgagtgtttgggcccacttgaccacgtgtcaatcagtatcaacatttggcgcccatcgttcgtgctacgacaaaacaatcctgcggtggctcccaagaaagcaacttccaaggccacca

SEQ ID NO: 122485 - DNA, 488 bp, Zea Mays
gctcatggcatctgtggtgaggacaaaggtactctggtggggggaggatcatacttggaagtctcgacgatggcggtattggcactggtgtgagggctcggggtctaagaaggttgtagagctcttggtgaagtaagcatggggtgccatgggtcaacttttagagggccatgccattgatgatggggaggggtgatgacaagggtagcacggctagggccattgttttatgctagtgaaatcgcttgagtttatggcacgggcatccgacgaggaaaatgggggagcaacgaccaaggtgaagacatgaggtctctactgctagatgacgggcgcgagagtggtgtcctagtcaggggcaaaatcagcgttgatgtgtgcgccgttgaatagagagcaagcaggaggtcgtggatgactgccgcgcccgcgtgtcagataggtagagagacagcgcgcggatggagttgactgattggcactgcttg

SEQ ID NO: 122486 - DNA, 634 bp, Zea Mays
gactgaatggctggcacgacgaaagcctgaagagctagaggaggagcagactgcactggagggatcggaacaccggtgtgctgaagaatatgagtcatgaatgtctggtgctctaccgtgtctatgagaagctgctgctgaagagtgtcctagcggtcctgaatagtctggaacatcaatagcatccgcttgaacaactgctgctcaatagctgcttgtctggcctgctctgcggccaaatgagcctactgttgagtgagtgactgtaggatgacagccagagcggggtcaattgctggaggagcagcactggagccaccagcctcatgatcatgggaaccaggtggcacaagttgtggtggcggaatttccatatcctcatcatcatcggaagaagtatcagcaactgcaccctgatcctcaaactgtcggatggcctcgtcctcaaccttgagatctagtgccagtggatcaactagagctggagcggtgtccttaggagcaaggcggtagaaaccaaactacaacctggaggcctcgagggtggcctaaatctgaggaggctagatcagctgagcaaaaatgtgacatagatagtgagcgtaaggcagttgacaccgagcctgaagaccat

SEQ ID NO: 122487 - DNA, 510 bp, Zea Mays
gcgtggaggatgatgtctgtgaactttgcttgtcggccttgcaaagcttagtgcttctgatttctggttgcccttttgttgttggtttggcacgactaggaatgtctcttacagaagatgtgtcacatctttggtgtgttcggtcccagagtcacttgcctgttgcatactttaatgctttcctccacttgtgttgttggcgtctctggaagcaacgccacgatgttgtttttcactctctcttcgagctatgagcgtcttatggctggttggcgtgatgatgcagaactgtactcttgtagactcccctctaattattgttatgtaattcttgcatgggtttcaatattctctttgccaatccccttagtaacaacttaaccgacatgtaactaactgatgtatgagcctttatgttggcaatgaaaaggtgaggtgtctcgcccccctgaatttctcaaaaaaataatgtttgggataccggtaacacattaggcgtgcttatgctag

SEQ ID NO: 122488 - DNA, 645 bp, Zea Mays
gaaagatacacagactcagtgaatccaggactggaccgcggttatttagtagaaaccataggggtttatttgcaatgttggtggccgaaggggtatgttgaaatggcgatcgtccgatcaataaccgagggtgtagattagatcaaaacgatcaagaaacctcggccgcacgatccagacggacgccccagatttaaacacagccggattcgccgttggccctcggatcaaaatcatacggctgctatcaaccgagcgaaggggtatgaagtcttctaatcctagccgttgaataccagatcgacgatcagggcgcccccctacgctttcctctctccctgctcactccggccggtggtgaacccaaattttgcggcggcgccattgactgggttacgcaaactggctaactcgcgcacaaccccgaataccgaacggtcctacacgaagtatagcgtatggcaaatctaatggcggtttgtttacctgatggggtggtggcagattggctaaccatggcgggaggcggacccgcggcggcgagaaattcgatcggtgcccccaagtttccccccactgccaaccacgcgcacaatccatgcgacatggccaacctgccagacccccaacgcacgcgaggcacgc

SEQ ID NO: 122489 - DNA, 674 bp, Zea Mays
aaaaattcttaattttcttgaagatcactggtgaaaactagctaaacttcttcagctcaattggggtcagtcgattttctctggccagaaccggttgaaccggccccttggtcaacggtcaaatttgaccgtttttacccattctattgcacatgctctggccctgtcagtctgccctgctatcagacttacagtcaagctgacctgacaggggtcggttgaatcggcctcagacaccggttcaaccagttttctgtagcgccagctaggtttttaaaatccatggctctctatctctctctcccctcacttcaactccattctacccaatctagtcgccgcccagccgagaaccctctcacttttctctcatctccacttccaaatcctgcaaatccatccatccaaatccgttgaaacttggagggattactccctagaggatcctcctccacttcctcaagtttggttgaagttcttcgggtggattcttagatcgaagtatttcttcgttttcactcttttgacccgatctacatttctagacatcttcttgtgaatcccttcgaggagtaggctaatccatgcatatggtatactttctttaaaaagtttagccttgttattcacatttgttcgggtatagtgtgtacgcgctcatggcaagttgaact

SEQ ID NO: 122490 - DNA, 385 bp, Zea Mays
aaaaagccccacttaaactctattgagttaagtctgaatttcagtggaattggaccaactttgaagccctatatcttccaaattatgaatgttttgccctaggtcagcacatcaaaattgtagagctatgtaaggagaataactttgctatagggattatgccttggttccatgaaatgttttgagataattaggctcaaagttgggctatcagactgtcctaggtctgaattcaggctgacagtgtgattgagcaaactttggacttggattcgaccataatccagtcagtgtttggctatggttgctatagtaagaatgtagatggatcattaggctacaactttgctacagaacaatggtcttgttgccatgtaaaatcaag

SEQ ID NO: 122491 - DNA, 574 bp, Zea Mays
cttggatcgggatgctggtccttcggctcctgctgctgaggaagtgcccgtgcctgaatttactgaggctgatcccaatgggtgtgaccaatctagtgctgatcccaatgggtgtactgtccgtgttgttgatgaaaatgaggaggaagaagaagatgaaatcactctgattcggaagaacagtcggcgctacatagccagtggggaaagtagtggagtgccttctcctgctttgtctgccctcgttggtctgcaagaattatctctggcggactttgatcaaactcttgaagacatggttctagaagatctgttatcagaaccggcagatggtggcgcgatggatgtttgtgttgatgtgctcgatgctgggttggggtcatcccgggcagcgtcccgcgcctcatcgaccttggagcgcggtcttgagggtcaggaagctgatttggattgtcctgctcccatggaagtgactgagggaccttcagcctttgaggtggctgctgcagagaactcgaccctcaaggatggtgttggcactcacccagcccccgagggtgttgccggggatgat

SEQ ID NO: 122492 - DNA, 470 bp, Zea Mays
ggaaaatggagtttctacattggttctctaactttaatattagcccagaacaactattattttcttaggatatttcaaccttattcgtaacatggacaatagaaacaagcatggggaaagctcagctttgatgttcgagtttaattactcaattagccaacttggcaatctggaaattgccttgaaagggcaatccttcacctggtctaacaagcaacaacactcgctcttagagaaactggactggtgtttcgtgacacaagaatgggtctcacaattcctaggcacaaaagcttgtatgctcgaaagagacgtgtcgaaccatgtcccttggataattgaaatcaagacatgtatcccaaaacccaacatcttttgattcgaaaattactggatgctgcatgataatttcctattggttatgcaagacacttggaaccaaccgctataccaaccatacccagcaagga

SEQ ID NO: 122493 - DNA, 593 bp, Zea Mays
cgaggtaggactcccaccaggactatgctgctccccttagcagatggggaccatacagaaccttctcacaatcgttgcactgatcagtgtgcaattcacgcttacacagccaatctttggcgtccatggggtcagcagactgggaaaagacaaagggatgacccctcatgaactctgtccgcttgtccctaggcatctgtggcatctgaacttgcatctgaggttgaggtgggggttattgctgctgcacctgctacattgctgctaaagtctggccaattgcttggactgcttaggtttgcattaggaacatctgttcaatagttatcggggctggcggtggaaactgctgctgaggtgcctcctcttggggtgcctgctgctcctgctgagcacgccttccacctttgcgcctgttttcagacatctgtagaaaccacacacacatcagatctaacactgcaatatttcaacataagaaaaggtatatgaaaatcttcataacacttaacaattgatcatcttaactgactctcaacacagccaacacaccttctcagataaagaggaaagtggaaataaatgggttgccc

SEQ ID NO: 122494 - DNA, 1129 bp, Zea Mays
tgatttccaggagaaattgcaaggtagttctgtgtatgagccaatctcaggagcatagattcaacacgatactgagacccccgagaaagaacagaaaaaaaatcaataccaaatacacgagcaagttcagatgttcgattcacctgcatgccaggtcaacattaggacaatctaaaagttgagctattcagaagaaaaaaataccaagcaagaataccatggaggaaattcaatttaccaggtccatttgattcattatttcaaggttgattctagctctattgctaatgtattctatgcatcggtgtcttcctcgtccaggacctgttgcaaaccatcggttcaatatcctgcttggtatcagtggtatctttcgcctcagtacttcatcagctacagcttcaagggagtaattattaagcttaacttctgcacgcatgagacgccataaattaagcacaattcttccaccaacatgtataccgctcgcatgagtatggctccaatcattctcactgacatcatcaataatatcatccgcagaagatgtttcagaaagcacctgactagagttatcaactgggatcttaggtggatgattcaactcatgtggtgttcttgaaattcttttcagtaagcctatacccagataagcagctctttcggcaagaaatcctaaagatcctaactgaatctcccatccgactaggatatcaggatcaattgaacatattgcactaataagattgttcaaaacgtccttttcttcagggaagacatttatattacagccagcaataccatccagatttctgcatatacaagaaagaagattgagacatttggatctaatatctatgagcatctaagaagagaaaatatcacaagccaacacaagcgcacactttctaaatgaatcaagaaattctacattagatcatttagtaacttggctatacaaggcaacatacatcagttgccattgtcaccatcctagtcagccaatatgccctcctgtcaatctcacttgtccatattctaagggaatcaatcgtttggcagggttggctggtagcttcaattaactgcctgcctagaagcctccaactcctggctcctgactctagcc

SEQ ID NO: 122495 - DNA, 294 bp, Zea Mays
catagaatgggaatgtgttgttttgtttgtgtactatcgcatgtttttatctcagtacagatcgagtggactatgatgtggcttcaaatgcatcagaggggtggatatcaatatatcatcatatcttaatgcctcaacaaactctatatttgtgattgcacctttgatcatctgtgttggcaatttactctagaaaaatcagatacacgatctttgttttcttttttcatctggcattcctatctgggaattgggattatcatgtagaagcttatatacttagtctgataggac

SEQ ID NO: 122496 - DNA, 450 bp, Zea Mays
cttcgccgcgcgcggagggttctgcggggctccaggtggtagtactgggtataggcggcgaagggcggtggtgaaacggagagtgagtgaattgttgcgaagtggtaggcgtcattgtagtgagatggagagtggtcgtcttcgcgtggacgggaccggtaaacgagaattgttgtcgtcgccgactggggcgagtgtaggtgaaggggagctgcgaaatctttttgagggtgaggaattgaggataatgttgttcaactacagggagatgggtatcattccgaaggttgagccaatgtaatatatgatgcccttgctgtgtgtatgcaaccgtaatttgtatgataaggttgcgcgccttctttgatccggctgtccccgtaggcgatttctgcgctgagtcttatgtgaaagacttcgatcttttacgtgcttgttgtgttgttccag

SEQ ID NO: 122497 - DNA, 1954 bp, Zea Mays
aatatttacttttgtgatatgtttttaaatgttattcgatttacttatgcatttaaacttattatgtacacatcaggcggataaccatcacatgaaagctgcaagggtattccagatgcatgatttggtgtatgaccttgcaagatgtgttgctaatgaagaattcctattcatggatgccaaaaagagtggcatgactagcgctagaaatgatcattatcgacatattgtgctgatgaattatgttgaggtaccaatgaacagcaaggctgcactttgtaaggcaaaatcacttcattttagagattgcaaaaggctgcagatttctgggagatcactctccctgaccctgagtaaattcttgcgagtcttggacataagtggctgttctatgttagggttaccaagtcaacttaaccagatgaagcagttacgttatcttgatgcatcgggaatgcagaatgaattgaaacaggagtctttcgctggtttaaaatgcctaaatgcactaaacctttcggcaggttattttcagaaactgccagttcaaatagttaaccttgagaaattgcattacttaaaccttcatggttgttctcgtctcatgttaattcctgagtccatttgtgaactaagggatctggtgcatctagacctatcaggatgcattaacctacgagttctgcccacatctttcggcaaactccataaattatcattcttggacatgtctggttgtctcaacctagttagcttgccagaatcattttgtgacctccgttccttggaaaaccttaacttgtcatccttccatgaacttagagagttgccgttaggcaatcatcaagaactcctcatactggacatgtccaattgtcataaaatccaaattttacccatgtcattttgcaatctcctacatttagaggatctcaatttgtcatgctgttatgaacttcaagaactgccagaagattttggaaaaaatcgtgggcttcgtattctggatctaagtaactgccacagacttcagacattgcctgattcctttactgaccttgtaaacatagagaaactgatcttatccgattgctgggagctagtacagcttccagaactgcttgggttcctacagaaaattcaggttttggacctatcatgttgttcacagctttttgcattgcctgagagtgttactaagctcacaaatttagagcacctaaatctgtcatgctgcattagccttgaaaagatgcctggagactacggcagcttaaagaaacttaagcttctgaacatatcatattgttttaaggtccgtatccctaatggcatagccaatatgtctaacctgaaatgtttgatggcggttgggttggacggttactcttgtgggaataaggatgatttcaatattgtaagtagcttactgtgtatgcctaggatagatttgagtaaaaaggacagccccattggtgacttccatgggatcttgaagcacaaaagactacatctttttggtctcggcaacgtgcaaagcattgatgagtttgagaacttgggattatgcaggcatcagcagctcaactcactaagacttagtagctcctacatgaatggtaatgaagtggctaaatttatcccagatgacattgtacttgaaaagatcatacctccaaggaccctggaacactttgaacttttgggctatcatggttcagaatttcctgagtggatgctgaatctgacaaccattttgccaaaccttgtacaccttaagctttctggccttgctacatgtgaccatctgccgcctcttggccagctaccaaatttgcagtccctggtcatagaatgtataccaaatgtcaaggctgttggagaagtttttgctggtggcagcagagcgtttctgaaattaagggacctcactatcagtggtatgccaaaccta

SEQ ID NO: 122498 - DNA, 392 bp, Zea Mays
attttatcatttgttatgatgtcagaaagtgaactacatcagctttattcaaaaagaaattgttaaccttgaaagctaaattgtaatatgggacgggagaaaagaccaaatctgagctctataatccttgcttcatggtggtggattgttttggcaagatttccggagtcgatcttgtttaagttttcccccttctgggcttaagtcaggaggttatctgacatccgccaaatgtttttacatgttttattagttcatggtctgccttgataaagatcctcaagatcctcgtagttgcgcttaggctgttcacaatagactgtgtaaaataggggattaatattacactgaagtttgaaatagaggacgtaataggagcaggtttaccttcc

SEQ ID NO: 122499 - DNA, 727 bp, Zea Mays
tgaaactgcaaattctagggctcgggtgtaatttatttccaactacgattggatggcgggtttattctaacaaagaacaatggcccttacgcaaaatggcacgaccgaaagagtacgggcagattctggccgcatgattagaattccgcgatccagattagatctgaactgtatcgaagtggtacgcgacggtagccaatggatccaataccgacggcggggattttaaacgggcacgatcggttggatccgtccgatcgcatctgatggcctagattcgaagcgcgaagggaaaaccttggcttttaatctcaaccgccactccctaaatcgacgtccaccacgcatccttctcctatgccgtgatagggcggtggtgcacataatgccgcggcgaagctcccgccggtgacacccgtcccggccagccgacgactgattccccaaacctgctaggattatgtgcaaaagggaacacgacatatgagatgggacacttactggagacaggaatgacgcccgaagagccacccacggcacgcagcggcccacgatggcattgtgcggtctggcgagaaattgccggtgactgccggttcccgcacccaatagaacactcgagcaccttccttggtccctggcgactcctcccaccctcttgcggagcccaaagcaagcccgtggcatgaggtcgagatcggcgaccaaatctcccactcacccacgc

SEQ ID NO: 122500 - DNA, 443 bp, Zea Mays
tgggcaaatacctgtgagtagtgtgactccccagcatccatgtggtctgtgtgctgaatcgagtcaagcaccccctttgcaaatatatgcaggcttgtcacattgttaacataaccatctttcaaaaccctgttttggctctcagatctctgggtggaagtcattcgcccacaatacatgcctttgaaatatgttgctttccatatcttccttttctgccacaatgcaacaattgcagggtgttctcttatgccacattcatccaccagcttattccactccacctcaaactgtgtgggccccagaggatagtttatcagggactgcagcttctcctttagattattatcattgtgcaatttgtacagctcctcgagctcgtaatcctatgttctggttatgtgccatcggctttttcagtgttgtgtcttgttaaacacaat

SEQ ID NO: 122501 - DNA, 553 bp, Zea Mays
acgtttggtaacatggaaggttattgagagctcacggcttccaacagtttaaaccttaactagacgcgtcctctactagatataacatgcggggcgtgtactttcaccacgcatatgcatgcagtttctattcctacagtagatacaaaaattatggcaaccaatcagaacatacatatggtttctatttttacagcagctcctaaaattatagcaggtagtgagagttgaataagaaatttgatttttttatggcaatcaaggacaatataaatcaagggattctcttttgtgcacacgggaaatacggcatgcaatatactagtggatgcactccatgttcgagcgtaaaaatcgtcagatttgatagtgaaaatccccagttttgacagtaaataccaagccaacgtgagagacgttgatatctctgatgtgttgtatacatgatcgtaaaaatctccaaatttaagcataaatagtgtaacatataacgtaaatgtcgattcactacaaaacaacaacctcccacggccattcgtccaccataaattaa

SEQ ID NO: 122502 - DNA, 398 bp, Zea Mays
cagtcatcctccctcaaagtggaacaacctgtttcaatatagcttagcttcgaaggtctgtccttgggcagcaccggagtaggtcttgacgacgacgaagccctcatcgcttcagagatgggcagggtatcttgtcgtgcctatgaagaggtaggtgtgattggttttgtgatggtccgaatcctagccatttgagtggactggaaattgtctaagatgacttcgctgaagccggcttctaaagcggcgatggatgggaagctttggtggcacagaaaattttggcggcaggtagttgagggcagtaaatgtgatacatgcccacccgcttgattgtttttatactgagaaatgcgcgtgaagcggcgtgagtcgcaaaaaatgttccctcgcatcac

SEQ ID NO: 122503 - DNA, 589 bp, Zea Mays
cttgaaccagccagcccatggacccattcatgtcgtccccgactcccccggtgccggtgcgttgctttgggctggctaggagactgggaaggcgtttggtaaccacagactgttcaggtagggagggactggtggcgccgacattctctgacgggcattcggtcggtcggtttgttcacgctctccatccgtaagctgcgtgccgacttgacgaagcgtacactgagagggaggacaggacaggacaagccatatgcgcgtggttcgactcgacatggctcatgacaacacatgcagaagcaggatcacttcccttttttttctctacacaggcacacagcctcacgggtgcagtgcaaagcacagggccatcggacggtcagagaatgccggcgctgctgcctgctgggacagacaggacagtggtagatgccttgcccgcgtctgacttttgtgcctcccctgggccctgtcccttctctccctccctttcactttccctttcccgccgtcggtcctctgcgctcgcgcgggcctacaccagtggaagcgcgcgagttacttcccggcgaatgcagctaacttcgac

SEQ ID NO: 122504 - DNA, 279 bp, Zea Mays
atgctctcttccttttatacaagatatgcaaggaatgtatagaagaggaagatttaggtacatgtgtaaatgtgaggaagtagttttacccttttgtaccttcacatagagatgctctcttcattgtgctttgtccttagtcttagttacttaagacctatattcaagacagtgtatgaaaatattttgcacaagagagggttctacaactagtgatccttttctaagtcattgttattatatatcaagtagatcataaattgcatgaatgtatcatga

SEQ ID NO: 122505 - DNA, 495 bp, Zea Mays
ccgaccgccatgcgtcgtcactcgaattcccggccaccgctctcgcatagtataaattgaccccgccgtgagctccgtaggatcatcatgcacccagccaccaagtattgccctcagtcgatcaccagcaagctccaattttagatttcccccaaaaccttcaagaataccgagtgaattgatctcgctgtggtcagccacttctaggtctgctcataccttctgctcctcgtttgagtgttcttatgttctcgtgatgctcatcgacccacccaattgatctaagctgccttagatcatcgggaacacgcttagtgctccgttgttgccgctgtcaccgtgggcagagcactgtaggtctccaatccagaaattgattgaggggaaatacgagggagtagttcaatttagtgtctgccgcttgggagcaccagtctttgcgccatccggccagtctaacctcgccggtgttcattgctccgtcgtgcgacgtcg

SEQ ID NO: 122506 - DNA, 300 bp, Zea Mays
caaaacactagccatcctccttttcttaggagtcattgttgcaacagttattagcttcggcaaccgcgttgtggttgggggactcaatagttttgattgctcttctgtgtgtgagctctttgtttccgactcttttgctggaccaacactagctttgaccatcacaacaggaattgtctccgaagccaaggggatagcttcgcctgttcagcaatctctatcctctttgtatcaagtattgtagttgtcctttctaaagaatgaggcttcaacctatgagtcaaaaccttagctctcttt

SEQ ID NO: 122507 - DNA, 485 bp, Zea Mays
cgaaaagaaagaaattacacacgcccagccaaaggctaaggcacacagacacacacactacccacaaggttggactacagagagccggttagaaaaaaccagcaacagcagccagcaacctaacgactctaaggtaaaaaacctacatcatccacatcctgcgccaactgtagcaggaggcctttagcaccagccttgctccaacaccaggcctcctctccagcattggagagagcagtagagagatggggagtcgcaccattgaagataatatcattcctgtgtttccacaaggtccaggcccctaatatgatgagagaatttaatcccttcttcaaagctttatcgtcacagacactgcctgcagccaccactccaagaaggactccgacccgggttgaggtgagagcacagacagacccagcctttgtagaaagtagaaccaaaattgcctagcaaaaacacagccagctagaaggtggtta

SEQ ID NO: 122508 - DNA, 418 bp, Zea Mays
tgacattccactaaaggatagtatcaagggatggcgcttcgagtggtttaccatggagaaccatcacaaatcgatgcacgctcgctctgggagataacccgacgtttgaacgcctagttggattttgcttgccgagatatctatactgaagaacaggggcttgactgctgaagctattgttgttgactttgtttataataacatataacctttgaaggatagagtgtacccggcttatttgtacacaggggtgaacggcccttctcgagttaccaattagcagatatccgaggagaatgtcctgagtcgagttgatttgatgttgaggggtaaaatttcggatgttggtgctcctccttcttactctgcctggaatcttcccccaatggtaagtgctagcatgcacgagcttctgtat

SEQ ID NO: 122509 - DNA, 497 bp, Zea Mays
taaaaatgaaaaattcgcgggaaagtggataagggaattgccttatgtcatttggagcctaagaacccaacctagccgagccctgcatggaaacactcctttcttcatggtctatgggtcggaggcagtgctacccgctgatctcaagttcggggcgccaaggttgattttcgaaagcatagcagaagctgaggccaccaggctggaggacattgatgtacttgaagaagaacggctaaacgtggtaatccaatcagcacggtatcagcagactctaaggcgctatcacgataaggctgtgcgacaacgattcttctcagtaggagatctcgtcctccgccgaattctaacgggggagggacggcacaagttatcacccttatgggaaggacccttcatggtagcagaaatcactcggcccggatcgtaccgcctcactcagatggatggcactgaagttgggaactcctggaacatagaacacctcagaaagtttt

SEQ ID NO: 122510 - DNA, 382 bp, Zea Mays
ccttgtgcttgcgacatctttgtagatgacccctgaccatagccttttgtattttggtattctttcctatttcgtcattaaattgctaccattttgcaatctttattcccctggtattgacatgctcgtatccctggattctttaatactcttgtttcaatacctacctctaataaaaactctgctgcctacttaaacatttcagttatatgtccatgaccttcctgtcttttgagaccctttcctattctattgttaagtcgctatatttttggcaatttgtactctcttagtcttggtatgctcgtaccattggaatcttgcgtactcttatttttatatatgctcacctttatatcgcaatgtctatttagagcatttc

SEQ ID NO: 122511 - DNA, 281 bp, Zea Mays
cagtaatccaatcagcacggtaccagcagactctaaggcgctatcacgacaaggctgtgcggcaacggttcttttcggtaggagacctcgtcctccgccgaattctaacgggagagggaagacacaagttatcacccttttgggaagggcctttcatagtagcagaagtcactcggcccggatcgtatcgcctcacccagatggatggcacagaagttgggaactcctggaacatagagcacctcagaaagttttacccttagctgtatttcaaaacagct

SEQ ID NO: 122512 - DNA, 660 bp, Zea Mays
gccagtgattactggaaaaattattgggaaaaaacagttgtagaacttcgctcttcaaaataatgatgttatgaaaaatccatagaatgtgtggaaaagataaaaactagcttcgccaatgttggcgcatatttaagtgaagacaacttcgtacgcagcgatcccgaggggccaattgagtggatcagcagcgaggccgaagcctttgaggagattttaaatgaccatggggacgtctgcgctttctcaggtgcgaggggaattgctgctattttggagaagtcaggttgcgatcatgtgaaagctttggcccaagttgaagctactttatctattgatgacacgaaggacccctcggccgaagcgagcttagttggtggaaaattctttactgacatctgggaaaatggcggccgagggatggcccacgaaataataacaaagagcaaaaaagatactcacgatgcaagggaagcaacgaaggcagctgaaaaagctacggaactcgaaaggcggataggtattgcttaatagattttaactttattttgtttatttttgtgacttcaaacttatttacgttttctaccgcagccgaactatctcctcccccagagcccttcgagtcattgatcgagccagaggcaaaggaaccagcag

SEQ ID NO: 122513 - DNA, 446 bp, Zea Mays
aataaccggatgcaactatgcgtgttttgctcatatgtttgttgcagcataatgaaatgtataattaaaaggaaaactgccgaactaaatgtagaaccacgataaaatcaacgaatcaaatagaatgttagagatttagaacttactgataacagctcctccaatgcgattatttggtgcttccttcaaacgaagttgggcgaacggacgaagtgactcgatgtcacgaatgtggcggagagaatgaaggagatggcgatggaggactgaccggtgtgtggaggggaatgaggatcggccgattttcggtctctctacggtggagaagatgaaggtgatggcacgaatgcggcggagaaaatgaaggagatggcggtggaggactgaccggtgtgtggaggggaatgaggaccgaccgatttccggtctctctgcggtggagaaga

SEQ ID NO: 122514 - DNA, 530 bp, Zea Mays
cccatccaaagttgaaggaaagaacaattcaagaatgggatgcatttgttgttgtttgtggagagaaagagccaagaggatgtgtccgagttttgggtctaggactaactccccaaaatattagtacccagggcctaagaagttacacacccacaagactccaaatggaagtactagcccgcaaaaaggctgaacgtgagaaagctgctctagaacaatgcatagcagaaatggaggagaaaatgcaggagcaaaggatggctcatgaaatgagagatgtggaaatcatctcgcatgatggttctaatacacgaaaccatctagtaaactagttgaacatcttagagtcatttcgaaatctagagcatatttattacttattacccttatatttattttaggacacgaggtctggacaacatgttgatgaaacacataacattgctcagtttcatgaagacgaagcttatgtggaggatgaactctctgatggcggtgaaaacttgtttggcagcaatcatgatagtgtt

SEQ ID NO: 122515 - DNA, 803 bp, Zea Mays
cagctaggaaaaagcagctcccattccgttgtacagaaaaatctgtcaattcttgttagcgttggattcgcttgcccgttgatccaagtgtagcggcggccattgagatggatttccttcatctgtaggttgtccagtgctgatttgaacgcgcccattaggcgccgattcaagttacaattatttttatccgaggcttgatatatgagattgaaatctcctaacgccatccactttgtccatcgttgtgctgcgaggccacttagttcttgaagaaaaactagtttctcagcgctcgactgtggcccataaacccctgtgatccaccaagctgaattgtccgccttcatagtgatcatggccgagacagtgtgtgaggtggtgtacacttgcgaaagtgagaaaaagtcattcgaagctgcaagcagaatcccacccctagaatccatttgcaggcagcacaacagtgttgtttagaaaattcggacccaaggtacgaaggatggttgcatcgtcgaatgtagtgagtttagtctcctgcaagcaaacaatggtactactagtatctcgaactagttcttgtacagaatcacgcctggccagttcattgagcccccgcacattccagctcaaaattttgcagttatgttgagacattggtagacaactgagacccaagataaatcagaccaagccaaggaagtggcaaattaattccattacactcaaaccagatctagaacagggggtactgggatgaaccttgaagttcccagaacactgcagatagtagacaaacaagc

SEQ ID NO: 122516 - DNA, 616 bp, Zea Mays
gttcgctatctcaatgaacattcgcttcgtcattcgaaaattggaaaatgtagtcaccatgagataaaattgaagattggattgatgaacaattaagcctagaacaatagaacaaaaaagaaccgtcgacgaaagatgttgtcttcgtaaactggattagggtcaaagtaattggacattagctttcgatgcccagtaaaccggtcgcgttggatgacttgatgaccaaagacagagccccagtgtcggcgttgttggcgttctaattcttcttcaactataggaatagcaactgacctatcttgttctcgggcacactttcttttgcgccaaaaccacagccacatctacaaaaccaatgtactgaggtaaaaaatgtatagagaaatttcatgtcaataaacgtagatccaaaaaatgtacatctgatgtggtcacagggattgaacaaaaaaatgtacagtactgttggatgaactggtatcgtctttctacgaacggaaaggtcctacatttacattggtggacttggtgttgttgggtgtttatgttccaatcgggtgttggagctaatggccggttactgggtgcgacggatccgagagctgggcgtggc

SEQ ID NO: 122517 - DNA, 907 bp, Zea Mays
tgattggtaataaacacttcgagtgcccttgagaacgaaatcttttattgatgaggtatttaccgattatagaatacaatgctccccctatagcttttgaaatcttgctaagggtaaaacttcctgagatgctctatattccatgaattccctatttctgtgacatccatttgagtaagcctatatgattctggtcgagtgacctctgctactacaaatggtccttcccatagtggtgataatttgtgacgtccttcccccgttagaattcgacgaaggaccaagtctcccactacaaaggatcgatgtcgtatggccttgtcatgatagcgcctcagggtttgctggtatctggctgactgaattactgtattcaatcgctcttcctccaatacgtcaatgtcctctaatctggtagcctctgcttcagctatgctttcgaagaccaaccttggtgccccaaacctgagatcagtaggtagcactgcctctgaaccatagaccatgaagaaaggagtattttcatgtagagctcgactaggttgagttcttaagctccaaaccacatacgacaactctctgatccattttcctgtaaacttttcattcttgtcaaagactttcttccttagttcttccagtatcattctattagccctttctacctgaccgttagcccttggatgtgatactgatgcatatttaatctggatgcttcgttgttcgtagaaatcaaagaattcagagctagtgaaattggatcccaggtcggttatgatgctattcggtatcccaaacctgaatattatatcttgtatgaactccactaccttggctgaagtcagagaagcaatgggtttgtattctatccatttggtgaatttgtcaatggcgaccaacacatgag

SEQ ID NO: 122518 - DNA, 879 bp, Zea Mays
ccttggcaaaaatttattgttttcttagttttagggccttgctccagtcttagcattaagcaagacaagaaccaatacagcattcaggtggggcacacctgtccaaatctgctccagaagctaaatccaaacttgacaggctgactcatttgcctgatatgttggattggtgagccatcagccagaaactgtttcgcctcctcagggaactcttttcacctccaagctgtgctccttctgaaacagcagcctctcccagtcattcttcacctttcctagccaaaaaatcattgccggacttgcagctcggaaatcagctccctgagtcttcttcgctggtgtgcacagcaggctccatcctggtagcattactgctacctgcctcacaagctattccataaccttccaaatagtttcctggaagcatagagtgtttttgtagtttccatagctttcacgaaacaaaattttggacatgtttggatccattagcactaaaaattagcaaccaaaattagtactagtggaccaaacaagtctgctaatagacctaccaatcattagctggatgcctactaattattagttccattagcagatttagagttgctaataggcgttaactaatcggtagcctatgtcttactacggtctctatattcacaatatttacagtatctatctttgtagaacacaaacaaatatgtattctagtttgggagatagaggggtaggtatttgaaccccaggttctgtgcctattttttgtatttttctggcagtgcgcgtgggagggaaacgtggtaggaaatgcccacttaaatatagtagagatagattatatgcatcatcaattcactatcaatcacttattcgcag

SEQ ID NO: 122519 - DNA, 478 bp, Zea Mays
aagacccgggaggctgtttggccatctatacaaccgctgcctgggctgctggggcaacagaggacgtcatgaaaacgtacttgcccattgttctgggacaggacacgctgcaatggctccgacacctacctcgacactgcatcaacgaccagagtgacttcagtcgccggtttatcgtgaacttctagtctctctctgataaaccggcacagccatgggacctcaaatccattaggcgccaaaatgatgagaccctccgatcgttcctcaaaagatttcaaacaatgaggaactgtattgccgaagtcgctgaagcggctgtgattgaagacttttatcggggatccaacgacccaaccttcgtccgagcaatacttcaaaaggcaccgaccacctccgaacaattattcagagaggcggacatctacatcatcgtggatgagcgggcccaggacctaatcggaggcgcaaaatccgc

SEQ ID NO: 122520 - DNA, 1032 bp, Zea Mays
gtagaggctaactggaccgcctatatagaggtttactatagtagtgacttgtgaatggtccccaatattggtgtcgagcattcagatcatggattaatggcgcaacaacttttgatctgatcctcctagattcgaatatcatctctaggacatgattattaaaaaatgaacgagatgcatacaatatatatgaagcactagttataaccattacttatgggtgtcacttgctgctgtcgtagggtctatatggttgactagacgggtgaatagtgttttttaaaacttaatcgagttggctgaccgaaattattgcggaattaaacttaacggtctagccacatccgagatacgaccacagcgaggtagctagaacttgcggccacgacaccacgtgtgcatggtgttactaatcatggcgaggcagcctaggccaatagattgatggccacagtatgaaagtatgttgacattgcaccgcgacacaacattcatgcaggagtagtcatggaaacacgcacgcagtgtcttcatccttcaggcagcctgggtcgaaactttgtggtgcacacgtggcttagatgtctaccttgttggtccccatatgcatagaggtgacccaatgcacaagcacgctggtgatgtatgcaatctgctctagagattgtatcttttatacgatttggcttctagttccaattgcttttaatccatcaggacacctaggagactgatagggagtggccggcaacgcaactcgactacaaggtgtggtttgtcttcgggtggttccacatgttgtgcttttagttgtcatccttatttgcttgggctcctaccaatttgcgcgttgccagatgagagtgcaaagtgcaccgttatcaaacaccacgaccacatgaagaaacacctcggtgagcctaaggagccatagggtagagtgtacctaaagttgcccaaaatgagccccgtgtaatattggagctactccaatggccttgacatgacaccctattgccagcgtcgtatgtc

SEQ ID NO: 122521 - DNA, 494 bp, Zea Mays
gttctcttaattttcaattaagacagaccagttactgttaatagaacttgttcctagatcaagtgtctataaatttattataagtctcttggacctaatccttatggattacaagttatggtgctcaaaaatcagctgcaaaacactggtaccatttcacttttctgaatttcagtcttcagttgctcatcagatttcttcctttctgacagtgacagtttgggcaccattatctcctgaatctatataacattaggccaaagtttcttaataaaacttgctcatgaatactagctttccagttttgcttagatcatcctggcaccaagtctcaaaggacagtccctgcaaggtctcaaagttgctcagacagataaaaattcagagcaggtctgctcgcaccctaaccttcagtcttgttcagttgactctcccctttcaacagagacctttttggattcctatttctcccaagtttatataatgtcaagcca

SEQ ID NO: 122522 - DNA, 359 bp, Zea Mays
gcgtaataccatacatcatattggtgctgagtactgagtttgctgatgatgctcgggttacaaatgagtaatggatggtggtgggtgaattctctatgtcaatctaatagtagtgaggttactatgagagggatgatcagatgatgtcattttgtagagtacccccagccttatataggtgaccggagatatatatccctttacatatgagactactattgtgcgccagctctttcatggttgttaccctccgagcttggcatgcaaacaatccgctatttgttcgtacgcagggcgcattattcaaaatcttgttggctcctatttgatacattcacgtggataatgccttaatgtcg

SEQ ID NO: 122523 - DNA, 697 bp, Zea Mays
tctaacatatattgaatttccaactaaatggcgatgggaagacaaaacaagaagctggaaaccaagacatgcaaaggaagggaaaataggtcgtatatattatgtacatccatctacaggagaaagatactatttacgaatgcttcttatgatcgttaaaggtgctacaagctacgaggatttgagaagatataacaacatattacatcccacatttaaggaagcatgtagagcacgaggtcttcttaacgatgacaatgagtggtacaatgcctttgacgaagctgccagatgggccacttctgagcagttgcgacatctatttgtcaccatgcttctttattgtgaggttggagatgagtatgcatttttcgagaaagtatggaaacaactaacagatgatattcaatatagaatgagaaaaacattgaatcttccttcctatcaaatgccaacaatagaattgcgagatcatttaattgacaaattatctgtgcttttcaacaaatgtggctccaatataaaagaatacaacttgccacaaaaaactaattcaacgggctcaatccacgacaatcgatttattgaggaagagttatcatataacttcgatactttatcacaaactgcatacaatctccgtgtgaaactgaatgatcaacagttgcatgcttttaatactatagttgatactgtc

SEQ ID NO: 122524 - DNA, 359 bp, Zea Mays
aagagtttagatctcttatgaattgtggaagctatgatttaagaaagcacatgaattggctccagtctcagcctctgcctcacctttttatagtgcctatgagtcaagggtcacaaccataggataggatcgtacccccgattttggtgcaataagttgtagattgccccatactaagtttattggcaaagttcaaagacatataatgtattctcctgttggttcttggcttctctagttctttgacgatgtggagcttgttcttcgtttgatagattcttgaacacctcctaagaagacatgtcatggaggagcacatgaaggttgctctagagttgataaaaacacttagaatgctc

SEQ ID NO: 122525 - DNA, 304 bp, Zea Mays
gagagcttgaagtcggagcaccacttacatgtggagaagttccgaggttttcaatggagttacctaaccaggggcttggccctcgtatcggcattcccttgtgtgggctctaacaaggattaggtggaagattttgtgtgtttctcaatatcttggtgaacacactggctcatcaacgagagtttgtatctctatcatatttaagttttcgtatttatattgtgttatattctttatatgttttatcttccgaactttgttataggctagtgaacaggtttggaaaaggatgatacattgctct

SEQ ID NO: 122526 - DNA, 371 bp, Zea Mays
tccatgacaccttcaggtagatgaggtggtggtattccgaagcttcatgatgtatctatatttgtcgctgatgccgaagctgaacagaccgttgctgaagctgatagcaaaaatgaagatgaggatgatgacaacatcctaagcccgagcaaacccagccatattgaatttgggagatccacaattaagacacaggatctagttttaatgaagaaactaggatactttggagagaatgatgacaaactggttcattttgctagagaggaggtgattccagaaccaaaataggatgaagtcgtagtcttcaaaagcttcttcagggctggacttcggttccccctttatgagatgatcgctgaagttttgaa

SEQ ID NO: 122527 - DNA, 399 bp, Zea Mays
ctcaagtctcaacccacccaccccagaaaatgacaaaacagtgacttgcttgcgttcgctgtgcttgtttacttactcgtgccatgccatgatgacgccgacaaatggaggtagctcgggcgctgactgatgcgatggcctgtctccattagcccggccttatctgaagcctgaaaaggaggagtcagggcacttaccattatccggaagcctgtggttgatgcagaggctttatcatctcatctctcggaggccatatgatccactaaccacatatattctgcgtgaagctatcccatggctccactgcatcgatccaccgccctacctgcacagcgcagcagcctgtgacacgaacgtagcagaggaagaagatgctgtccgtgtttagctggccac

SEQ ID NO: 122528 - DNA, 687 bp, Zea Mays
cttcaccttaggccaccaataatgttgtttcaagtcttgatacatcttagtgcttctagggtgaatggaatactcactaagatgagcttcatctagtatttgttgatggacttcagcatcatttggcaccactatgcggtctttaaaccatatcacttattgatcatctttcctaaaacaattagctttgtcggcctccattttctcatgaatatatttcatacccttatctgtcctttgagcatcaataatcctttgcagaataactaactcaagcttcaaatgtgtcaaggtcccttgttgtactatcctaagatttaagctttccatttcctgacatagagtggtgtcacatgatcctaccgtgagacaatgacaagaggctttacgacttaaagcatctgccaccacattagcctttcctgggtgataatgaatctccatgtcatgatccttgattagctcgagccaccttctttgtcgcatgtttagctctgactgggtgaagatatacttcaaactcttatgacccgtatataagtgacatatattccccagtagataatgacgccaaatcttaagggcatgaactactgcagccagttccaaatcatgtgtggggtaatgttcctcatgttggtgcagctgccttgaagcataagctattactcatccttcttgcatcag

SEQ ID NO: 122529 - DNA, 381 bp, Zea Mays
tgtcgtgactgtatacattggatccagtccgcaccatgtggaatggagtgtcactgctgctgggcatagattcaaagacacctgccaagtcgtcgcccgcaaggcattgagggccctgtgtcaaatctatgaagaagaagtggccgacacaccgctcagattctttccgccctttcagagaaaccatccagtttggatggccaggatgcgtgctttggaggagcagcagctgcttgaggacgaccccacagtcgtgtacctcactgcatacctgctcatcctggatgcacaatatgatttcttggctcggcaccaccgtcagatgattgtccgagcagaagatgcagagaagcgcaaccgttagctccatgtggatctcgc

SEQ ID NO: 122530 - DNA, 1347 bp, Zea Mays
aagaaaaagaaaaagattaagaggaactgggccggattcagcccagcgggccaagaccagggaggaaagcgcccgcgcgcactggcatttttgcagaagggtcctctggtttttagctaaccataactgggttctatcactatttcactgagtctctgacatactacagaaaacccctccaagttctaatccttcactgtgctgagtccacgacggcgtcgagcgcggccgaagtccggcgagctcctagaccggcgggatagggcaacgactagggttcccgagcgacggacacggaattggactcatcccaaacctttcccccaacttaatttcactaatgatcaacagggttgtgctggccacggtgaccgtgaaggttgcggatggatggggatgttcctggcgatgggtgggcttctagtgtaattggacggtttggtgagcatcaagggcacatgaggacgctagaacaagaaacagagggacgcgagctaaccggaattgagctggccgcagcgagctgttcttcacggcggcgggaactaatttggggcgaattcaaaattcgcggattctagcgaatggatgcggttgattcgtggtggctggatagtttactgccctacggagattgtggcgcactcaatttatagatcccatcgacggtggtgtccaatttcgcaaggtcgtgctggcggccggagatgaggaaggactctggcgccacggtttcgtgtcccactgccgtggcgggctcaccggcatcggtgagatagcagcggggaaacacgatgacacgacagaggtgcccggatacgtggcgtagggtcggacgacggctatgaccggcgttcttatcgtctcccaccgcggtgacgtagtatggtggccggaatttttaatggctggagcttatccacggcggcgtagcgtacaccgggtgttacccacccacccagagcacaacgtggaccggcgacggcacaattcgccgtgtagttggtcgtcggcggtgggtcagttgcgctggcggtctgatcctatcagtcgtgacactgtaccatggtgaatggagttcagtcatcctgacagaccgtttttgagctcaaatttttcccaatttggtgcagtgacggagcaagctttctgtaccaaagttatagccccatgttccagctacaactttgttatgggaatcatacccaaacttgcactggatcttgtttaaatctgggttcaaagattgacccaccccactgtcagaccaagtttcagtcatcagtcagcctgacagtctgattttaagtgggattatctccaaatattccttaacaactatgctca

SEQ ID NO: 122531 - DNA, 376 bp, Zea Mays
tgatttctgcctgttttgcatagccttgtatgttgtcttcttttatactgagggagctcagtggggaagacctaaaggtgaagactgtaagtttgtcattgagtcattttgactttttattgaatgataacatggatctgattgtccttttctgagtttttaattccttcctatttagtgccatttggacatgtggtagctggctgtcacattgatctgaattcctatatatattctttagatggcataatcattttatcgttgcaaaagttgtttcagataaaattatgtctgcataggttcccttgccccaaagaaactccatgttcagttcaagaccaaagtacaaaaagaaatcttcaacctacaatactac

SEQ ID NO: 122532 - DNA, 578 bp, Zea Mays
cttgaatcttgatattaacatgggggcatgagtgtgtggccttcatgtcacctctcggtgaactaatgtgtaacatcttcttaagggggtacttaggtatgttgtgcttttccacaaatgactcagttataaacgaatgtgatcctccagagtcaaataaaactgatgcaggtatggagttaacaagaaacataccatacactatgtcgacatcctcaggcactgattctgcggtgacgtgattgacccttcctctactctggttctgcggagtcttgttctgagcagatccacgagcgggggtgttctggtcatttctttggttattatttttctggggtgtctgctggttgcgccttgggcagttgttggcatagtggcccagctcaccgcacttgaaacagccattgggttggacaggtgtgttgtttctggcctgcgtgttactggcgccaccttgacagttctgtgaactcccaccagacctctggttggtctgagagttgctccttggttggttctgactatgattatttctctggccttgctgtccagagcattgcacttgataattgttt

SEQ ID NO: 122533 - DNA, 278 bp, Zea Mays
gggtaggggtgtggaggggtacgatttatagcccggtgtgctcaatttagatggaagagcaacggtgagggggtatgggtggagattgcctgtgacgaccgagatgctctcgggcattgctggcgccattaagaaggggatcgagcggggaaagggtctagtaatgttgcacatgatcttagctaactcctgacgaaagcagagagaccggttgggctctacaggggtgagatccacaaggaacacgcgacaggttggggatggcagctcgatccaac

SEQ ID NO: 122534 - DNA, 304 bp, Zea Mays
ttaagcttcagcatattccattcctttaacgttggaaatactctattggctaagtattcctgcaccaaatctctagtaccgatatgctcagacacaactcggaattcgcccacagcttctcggcatggtggcccttgcagcatgtcgcacaggggcctagttaatccgaaggttaggtccagtgggctctgaactagcttatccttcttctcatcaaccttaacataaaaccactcatttttccaaccggttggccatttggtacaatagcttatcacaggagtcttcatgtctttgcggtagg

SEQ ID NO: 122535 - DNA, 409 bp, Zea Mays
tccggacacacgataggctctcttggaaataggggcggtgcctggtataagctctatggcaaactcaaccttcctttgaggtggcatacctggtaactcttgaggaaacacatctaggaattctgacactacattgatagcctctaatggtttaatctcctcaatatgtgcggtgacttggtgacaactccctttccttggtcctgacaagaccaactccactaacacttctcctgatagggacactaacttcactgttctcttgtcacagctaagactggcttgatacttggttaaccaattcatccctaggatgacatctatagttgtatcctggttacccataactattagatcagcggggaactctatcccccttatttgaacctttgcactagggcaaaatcta

SEQ ID NO: 122536 - DNA, 437 bp, Zea Mays
ctgagtagttgttgtgcatccccacaatgaacatacgtttaggaatagaaaggataagtacatttcacactcaataaagcaacaaccaaataatgcatatgaaggctttatagtggactagatcaacaactagcattttagttgatcaagttttattaatgatataatgtttaaaaatacatcttggatgtaataattaggatagagagtaatcattatttatcaattctttcatcatgaccgtcatagtccacaaaccattccataatctatctaatcaatgagggtacaatccacccttaaccgtgagcttgactcatatcagtttcaacactctatacatgttttatatatttacccacaagtcataattcccatatgttgcgatatctcggtgtaggtggattgtgatatcctgtcccaaggcttaataggat

SEQ ID NO: 122537 - DNA, 950 bp, Zea Mays
ctcattccaaataatgaaaaggctgagggtgaaactacagacatggtatgtgatttcagtaatgagcctttggttttctattgtacattcaggatggtgcaatttcagtctatgatctgggtaataagttttacattggttatggtactgctattataatctcatcttgtgcttgttttttttttcttgaacacacatgagatgtacgcatcaatgtatcattatattaagtagagatcatcttatgcatgccgtaaagttgctattggcttccaatttgaatagatgatcttgtaatacattctatcgtacgtgaatttggttgatacaatgggcaaggcttgccttgttttgactggattgtgttgaaatgtgtcaagattttgcatgcccccatcccaccatacggcgaaaaaaatgtcttgtaattttttgtgtatgaacaactatattacctgcaattttgacagggtgctaactgtttcatgctgacgtgcattgacttccttattgttcactatttggagttgatcatcgatatttgggtcctgttcaatcctttttatttgttttccatcaccaaaaggtgattgcgacttcttcccttaatgttatcttttttcagataaaggactacagtttgtgggaactgttgactttcaaattcgttaatccagtgatggacattggtatcacaagacaacttgacttcacagatttacttgagttaccaaatgagctcagagctacctcctgttatgacaaacttctgtcttcctggactgctgaatatcaaaaccaccatgataactcatctctacttagagccatgtctaattcttatggatggacatacttgcgtttgggccttcttaaggtatccttttctttccattgaggttgttgaattgagaaaaggatgttgctagatgtcagctctgagattcatg

SEQ ID NO: 122538 - DNA, 505 bp, Zea Mays
aagtttgggcatgatccccatagcaagattgcagttggttaattgggctataactttgatgcagtgggatgatggggttgttacatgaaatcaggagaaaatcgagctccaaattgctcggtcaggtcaactaaagataaatgccatggtacagtaactgaagaagatacctagttcatcccccttcgccgccgatgaccgtcgcaccgcgattcacgtcggtcgccatgattcatgcgctgtgacttgtggataacggtgaacgagtaaagatcttggcgcctggatcaacttgggtccggccgcggctaagttccccgtaccactagctcatcgaccgatcgggataaacctcgccgtcattggccgattaccaccgtgcgccacgtgctaaagtgttagaccacgtcactatgaattgcgtctcgcatgcacggtgatcgccggtgtactgccacggtgaaagccactaacccgagcaccagtgatctcccacccctccgac

SEQ ID NO: 122539 - DNA, 349 bp, Zea Mays
cttcttcgttgtctccaatacttccttgaccactagcacttgcatttgcgctttgacttccacttggagcgtttggacttgcacttgcatttgcactttgactagcacttgcgctttgcacaactgtaacaaaaaacaaatgttaacataaaattactagttgcataaagcttgcgaaactaatttgtgcaagtttaaaaatatacaaaccttttgcaagtgatggcactaaaacaatagctctatccttgcttgatgctactgccttggatgccttgagcttgctcaaaggagtagtggttcgctgtttcaccacacgattaacaacacccaagaatttcttcttctt

SEQ ID NO: 122540 - DNA, 380 bp, Zea Mays
cctagaaaactaagaaattgtgattggggtaaagttgaagagcgttttgagaagagacttagtagctggaaagggaaacgtctctcaatcggaggtccgctgactttaattaattcagtgctgagtagccttatgatgtatatgatgcctttcttctccacacccaaaggtgttctcaataagttggattatttccgatcaagatttttttggcagggagatgagaacaaaaagaaatatgggcttactaaatggaccattctgtgtcaacctaaagaccaaggtggccttgggatcttagatttgaacactaagaacacaaccctacttagcaaatggttgtacaaattatttacctctgatggaatgtggcaacaaat

SEQ ID NO: 122541 - DNA, 296 bp, Zea Mays
cacgacaacagagtctccataaatgacgacccacgtactagaaaaggataggacaacgtgcctagtgcatactcacccatgttggagggtggcgcaagggcattgacagaagatgaagtcatattgtacatgaacctcaaccttacagtgagcgcattcttcgggacacatcaggtgcgaaagcataggcgtagagcaagctacaatgactcgtacgccggatggataagatagaatgtcataccaagagtacggaagcacacgacccgtcggaaggagccaggctgtcacacccg

SEQ ID NO: 122542 - DNA, 1169 bp, Zea Mays
tgcacgccagtccaaatgacggacgttgcagctaggttttctatgttacaggaatgactcaacgccactaccaaatcctgagctggaatgtgagaggcctcaatgaaggggtgagaagggacactgtgcgggatcttgtttgtgatacaggtagcacaatcgtatgtctcaaagaaacaaagctatcggtggtagaccaccatgacatcgcacacactttaggggtcaaaattcattactaactctgttgctcagctagtaaaccaaaccagagggggcattttgcttgctgtgtcagaagacttcttcacgctctctaatgtctctacttccgacaacgccatcacagacatgatcaccatgaaagcggacgacacagagtggtggattacagtggtctacgggccccaatccgatgcagacaagctcttatttcttcaggaatgagggcccttgcttccaaggggcacgagaggtggctagtccttaaggattttaatctcatttaccaggctttagacaagaacaatctaaacctaaataggtgcctcatgggttcattcaaatccgtcatagatgacttccaccataaggaacttcgtctgaatggtcgtcaattcacctggagcaatgggcaggctaaaccaaccatgacaagaattgacagattcttctacatggccgattaggagcttctcttcccaacctgctacatccactccataccctccctcatgtcggaccacaaccttctgcttttacaaggggagataatgctcaaaacaaacaactccttctgcttcaagaacttctgggcacacattgatggattcaaagaaggggtccatttgtcctggaataagccgttaccctctgttcagcaaccactcttgcgcctgcacatcaaactagcatggacggccaaggccatcaaggctttgagaagagtgaaagtaggagacacgaaacttcagctggccatagtcaagggagtgattcttcacttagaaactgcttaggaagtgcgcactctctctattgccgaattgaacctcctcagaagattgaaagctaaatccttgggagtgacactcatcgagaaatcacaaatcagacaaaggtcccgcttgactgtcgtccgccttggggacgccaacacaagatttttc

SEQ ID NO: 122543 - DNA, 597 bp, Zea Mays
accgaacaatatctaataatatgtgagatctgttttctatccgtccaataatatccaatcctatattgtatactacccacacttttactacctcaacctaataatatctaaaattaagaacgtttggcgcgattcctagagtggctccacatgcttaactggcaccggagcaaatagaaccacgatacacaatgtggtgaccggttgaggaagaacgtcttctagccaccctaaacgtgtgagggccacattcacataccgaggtagagcatcaaaaagtagatggtgtttaggatatccggatagctcacaacacctctatattagggtctgtttgtttctatagtgctaaagtttaacaactgctaaaatttagcatgtgctaagcttttgctaaattttagtacttggggtctttttggatgaagtgctaaactttaaactttagcacttcgtgtccacgaggagcacatggctaacggtggaggagagagaaagatatattcaatgtaaaatagggttggtgactatgtatggcaatgtgtaagttacctaatgggcacacaaagccatacttatatccattaagaggaaaaa

SEQ ID NO: 122544 - DNA, 1312 bp, Zea Mays
ggaggtgaacccacatgaacatccatagaagtgcatgaaggagacctcgctcggacatcctcgggggctgggttacagttggcactgcccacttgagccggatcatccccggcaacaccctcgggggctgggcagtggcttgtactcttcacccgagctaagtcttccccggcgacatcctcgggggctgggcacgtgtcagcattacccaatgggtccagttgctctgccataaccactcctaaggtcgacgggccttcagctacttctgtgggaccagaacaatccaattgggcatcccgaccctcgagatcatgctctaaggtcgacgaggcacgggacgacctcaatccagcatcgggcatggcagcacaagcctctgttgtatcatcatccacaggctccaacaacaagtcctccgggaccatatcctctagagtttgatcaaagttggccagggacagttcttgcaagccaataagggcagataatgcaggagaaggaactccactactttcaccactggtgacgaactgccgactattcttccgagttaatggagcctcattttcttcctcctcatcttctacagcgacaacgcaagcagcacccccattgggatcagcgacagataaggcacctgcattgggatcagtggtagtctgggtacacccattggggccagtgtcagttggtccagtcactggcacttcttcagcagcaggagctagggtactggcgtcctcatcaaagctggatactcgccggaggcgtcttctcttcttcttctgctcatcagcagaaggctcgggctgactggttcggctagggcgccttgggcgagtgctaataggtctcagaacatccgaagttgtatcaacctctggaaggggcaccaccgtcaacgtaccatcaggagcagcatcggatgaatcctcagctaacagatcaagcatatcatttatgtcgacatcactagggttcaggggcacttcaaaataaacctgccgttcatcatcagggatcgccccgagcgaagcaaccaaagcattgacttcttcagcagagggtcgcactctaaggcccaaacttccatcagtcacaggtggattcgacacaaaaagagtgaaagctttgggaggaggtaagttccaagccgagtatgccactggagcaccaacattcgaaactttacccctgagaatcatttcaagtcggctcaccaagtcaacagaaggaattctcctgttagtaactcgagttgagtcggccagccctcgatacagatatgccggataggccctgtctttca

SEQ ID NO: 122545 - DNA, 441 bp, Zea Mays
cgagatagtgcgtcgacgaccacatttgcccgtcctagtttgtattccacagagaagtcaaaccccatcagtttgctaagccagtgttgttgcggtggagttactagagcttgatccagcaggaatttcagactggcatgatctgtgcggaccacgaatgggcgcccccataaatacggtctccagtgtcgaatggccttggataacccaattaattccctttcataagctgcgagtttcacatgacgatctgccagtttctgactataataagccactggatgtccttcctgttggagcacgacaccaatccctgtgccagaagcatcacattccaccacaaaaggaacaacgaagtccggaaggcggaggactggagccgtctgaagagcttgtttcaaacgttgaaaggcagctatagcagcttcggaccagtggaac

SEQ ID NO: 122546 - DNA, 457 bp, Zea Mays
aaaaatgatgtcgaattcacttggggggcagaacagcaggaagcgtttaatctcatcagaaattatttgtcttcgattcccgtgttaaaagcgccacaggtaggagtaccatttagattatacattgcagttgaagataaggttattggatctattctgacgcaataaaccggagaaaaggagcatgtggtaacctacctaagtcggaggctgatggatgctgaaacgaggcacacttttatcgagaagttatgcttatgcctgttttatgcatgcaccaagtgtagatgttatttactgtctagtcattgcaccgttgccggtcaaactgatgtgatcaaatacatgttgcaaaacccgattatgagtggtagaattggtaaatgggcttatgcactcatagaatatgacttggcatatgaaccattgaaatctatgaaaggccaggtcgtagcat

SEQ ID NO: 122547 - DNA, 394 bp, Zea Mays
tactaggcttctcacatatctcacaaccaaaaaaacattgtcaaccaccattcacaaaacaaggaaccacttccataaccaaccaaaatcatcgacacctaggtctcaaaatgaagaaacatctgtatgtggttgcaaaatgtgaatcactagcatgtaagatcaattatcatccaacaaaaccaggccatggcatgaatgtacaatcagtttcctactctgttaggacaataccgcatgacctaattcgttcctaaaaagagcaaaaagaaatagtcagcagatcagccaacagtttccccaactggttagaagctgccgtcaaccaggtgcccctgcaatgcctcagcgaaccaaatcatgcttgccaatgccaggtgattgctcgtctgat

SEQ ID NO: 122548 - DNA, 407 bp, Zea Mays
atgacctcaacccagcatcaagcacatcagcacaaacctccatcacaccatcatccgctggctctgataaaaggtcctctggaaccatgtcctctagagtctgatcaaaatttgccagagataactcctgtagaccaacgagagctgacagagcaggagaaggaactccactactctccccactagcaatatactgtcgactgttcttccgagtcagagggacctcatcttcttcctccctgtcgttttcatcgacaacataagcaacacacccattgggatcagcaccgggtggggcacacccattgggatcagcagcagatagagcacacccattggggttggcgtcagtaaaatcaggcacaggaacctcctcagcagcaggaaccgaaggaccagcaccccga

SEQ ID NO: 122549 - DNA, 398 bp, Zea Mays
tggatcatgacgtcgtgcgtctcatgttaaggtcatttactattattgatcctcatcttgttaatcttattcgtgaaaccccggttataccaaaatgccacccaaagaaattcttggtaagtttgtaagatggtaaaagaagcaaggtacgtcgtcgcatcaccaacgaacctcttcctcattacgagccgcaacccgttgcactcaaagcaacaaccaacaaggaggctctaccaaacaaggtggtgcaagttgaggcagctagacttaatgaggaggaaatgacacttgtgattaagcgcttcaagaccgcattgaagggacgcacatactaccccaataagaacaaatcaaggagaaatcattaatgcttcaagtgcggtaagtctggtcatttt

SEQ ID NO: 122550 - DNA, 2325 bp, Zea Mays
atctgaagagtcttgtttcttatcccccttatcttttttccctgacttgttggagccaacacagccaggcgggttcttctttttcttcagggctttgtcagccaactcctcttctgatagattgcaaaagcgctcacctaagcgcctgatagttttagctgaaagagaggggggaccctcaaacttgtgctgacacatcaaacagttcttcttttggcaggagccctgcctgaatccagcccgggcgtcacggagcctcttgcttctcctcaggtcagattccactacaacaaattttggtgtggaggaggccaggtccgagggaacagaagtgtcgtcagcagattcctcagaaaggaccgaatcaagaaacttgtcatcaggacacttcctggggatgacaaaaggatgtgtctcagtctctggctccaacagagcggaaggaatatatgaagacaggaaagtttttgaccaactaaaggaatcttcttgcatcaagttggataagaaaaaggacgcccatttcttgggaacctgcaccgaggtcaccgagctatcagcctgggccaaatagttagcccagatcctaaagaactgggcattccttttcctttccaagtgactcagcaaaacaggatccggttgccagtcttgcgaaaacataaagttcaacctcacgttgttgtgtccattaacgttaggttccgccggctgggcatcaggaataacaatatccccaggcacatgaagaacaccctgaattggtgggccgtcaacctcctggggcccaatcatagggaggtcacccaaggcaaggggggcaggggcattaaagttgggcaccggccccacagccaccagatcctcagggatctgcccattctgaagcaaggcaccatgaatgtgaccagaagaactatctgaggacaggtccgaataggggttgctgatttgttgctcgtcaggtggcaggtccagatgaggctgctgaacaggtggaacattaacaatccattggtcccaatctccttgaatgttgtctgctggctgagcttggaaattgtcttctggcgggaaaataagatcccagcccaccgccggcacaagttgacccaaaccaaaaaaactcaaaagggagctgctgaccatcctccgggaccactggcaccgggtccttatcttgaggctgacccccagcaaagtttgttggatgatctcacactgcaccgtccacgagtcaccaataaagccatcagcttctgaaaaaacaatgaactgcgggacctcctccagagacgtgacccgcaccctgagcagagtcctgtaaacattgcgtctgtcctcttcccacaagatcaatctgccaaaagagccaatagccgcctgcaagtattctgatgaacgataatccagagggaatcccaacaacataagccagcattcccgattaaagtaaagggctctatgattccaagcatcattatgtcgctgagcagtgaaggaagcatcgaggtactgttgcgggccgagcagaacaagattgtctctttcaagaacgctgctaaactgaaccaaaacctgacccaggtgcgaccgctggatatctcgcaccccaagccgtctgtgctccacaaggtattctctaaccacatccctcaccgccgagaaagtaatctcatggtcaggtaaaggttgaatgctgataatagcccagtcctcaagcaatggcgggaggcaccgagtaactgacctggccataatctcccggtgaaggaccaccgaagcgctgaagcccggcgggagacagggttcaggatcaacgcgcctaaacgccatcggagcaggaaccgaggatcgccagctagcagacgaagacggagcaggttggggttttggtgaggtgacgcccaaagaaagcgtcagggactgaaggggtgtcgattcaaaattttttaatacctcccgggcgaactcctcgaagcaactgaatatgggcggtccactgatcagagacgcaaccggtgtgcgaaaccaggtactgtgatcaggagaattttggtttcccaccaagaaggcccgactcccaaaggcagggaacgaagtcagagaagaaccgaaggaagtatacttgctgggacaaaaaaaatccaagtgtccccggcccttacagaaatgacagcttaaggtcggcgggcctggcagcccaacaggcccgcgagcacgcacggggcgccattggaggttgcgggggcgagaccagctggagttcgaaatttgaaatttagaacggttaggaattccgcctccaagagcaacaccagaaga

SEQ ID NO: 122551 - DNA, 728 bp, Zea Mays
tttaattccttgaaatatttaaattgtttcatctaccgcaatctaaatttgcatttaagacctttccaagcactcaaacctccacgctagattctgtttagaacgtcctaaagctaatagttagcctgggtattagaccgcctccaacaaaactcctaccaaactccttgtttcaactataaaaagaagaagatgtcccaaggggcacggaaaataatcagaacataacccggtaaactggacgtgaggtattatcgctcaggagggctcgaatatatataaattttatgtctataggttgttcgcttcaaattaaaatcagttgtttgcactgttgcaattgtaatttatagaggcaaaaatactgtagaatataagccgatacaaattaaagccaagcgaatagggtgttcatatagacagaaattaattcgagatgcagcaagcaacatcacattgaattattttgggtgatagctccgtggaatttgctttcttggcaaatgaaaaaagtggatcatgacgtatccctctttcaagatgctccctacgttcataaaagatgcaactatagaagaatttgggcgagtcaaactagtttaaaaatatattatttggtcataaaatgaaaacttctcttttataatactccatctgttttaaaatataatttgtttgatattttcaaccttaagtgttattcaaaaaattatgagaaaatgaaaaaa

SEQ ID NO: 122552 - DNA, 870 bp, Zea Mays
cgggccccgatggcttcccttctgaattttatcaggaattttgggaagttataaaaggtgatttgtttaatctctttaaagcttttcatgatggttctctcaacattaagagacttaattttggaatagtcacccttatcccaaaagtccctgatgcgacagatataaagcttttcgtcctatttgcttgcttaatgtttgttacaaaattatcaccaaagttctaactaatagattggcccgctgcattacctctgtgattagtgaccttcaatatggatttatcaaaggaagatatatcatggatggtgtcctttctttgcatgagattattcatgaagtaaaacagaggaaacaaaatggggtaattttcaaagttgattttgaaaaagcttacgacaaggttaattggaattttcttcataatatgatgattaagaaaggctttggtgataagtggagtgattgggttttgaagactgtgaaaggaggtaaagttgctatccgaactaatgatgtggttggaccttactttaaaactcataagggtgtgcgccaaggtgatcctttttccccctctcctttttaatgtggctgctgatggtcttgcttgtctgattcaaaaagctaaagatgaaggtattatcaaaggtcttattcctcatattatttctggtggctgctgctgtctacaatatgcagatgacactatttttctatttcaagatgatttggaaaatgctagaaacctgaagtttattctctgtatctttgaacagatatctggccttaagattaattttcataaaagtgaaattatttgtttgggaaatgcttgtaacagagaacatctgtatgctgacatcttta

SEQ ID NO: 122553 - DNA, 399 bp, Zea Mays
ggcaaacagatatatccgcggatatccgttacccgcgggtaacggatgtggatactgtttgttatccatagcgggtaacgggtacgggtttggatatcggatataagtcgcggatatgtatgtccagagacactatccgcggatattttacccgttgccatccctatcctcacataagaactttgcttccctccatgacaatggcctcccaagtgtcttcctaccaaagctcgacctctatggcacctttttgcatgaactcaacctctatagctacctcttatcgaactcaagctccccggcgccttcctacatgacctcagcctgaatggcaacatcttactgaagctcgacattaccatctatctcttgttgaagctcaaccccctcaacctcttg

SEQ ID NO: 122554 - DNA, 386 bp, Zea Mays
ggacgggtgattcgtggggcatctgttgcgcgtgcgcgagtcattcgaggaatggaaaaaaccgctttgccttcgagtttgaaattcacaaagggttcgattgacgttttgggtggatctcgctcgggcctttatatacccggaagaggggtcgacagttgtttcttaccctgccatttgcgcttgccttctgcctttgttttcgcaacctgagggagtagacagagaagaggaaaccgcgcacctcgtcccctttgctcccaccgctcccgttcggcgatggctgataaggcgaccgtcattccgccgcgcgacccgtggcctttctccaccgtcactatggaggatttgcaggcccttgttatagagggtttgctccgtcctct

SEQ ID NO: 122555 - DNA, 798 bp, Zea Mays
agcacgtagcacacgagcaaattccggcgctggcggcaggacgcgtccacgaccacagtgggatcacaagtggaaattctgaatgttctgcttgctccacgaccacgagcaggcagtgcgcatacagtacagtgcatgcatgcactatgtcgtcgttgtgttggctatgtaatgtcacgtgtgacgacggatcgagagcacatgtacaggcacagcgtcgtcgtcgtcttcccctcgccggatcggcgttaacgttcttgtgcattatgcataggctcgagaccacatagtagtttgcaaaccggatgcatgcagatgcaggcagccgatggaggcagcagataggcactcaccagtcaccaccagctagctagctgctgcatatgcacactgtatggcagtgactgggctggaggaggcggcaggctgcagtggcgcagcagacatgcgtagtaggactagggacgacggtgaaagaaaggctgcgaataggaggcgtcgacgtcgtgtagctagttagccattcacgtgaccctggctagtagcctactaggctgtagcctcgctcatcggtatagtgcaccagtggtccgagctagcccgagcatggcccatgtccattgtcatgcacgagagcacatcctcttgctccagaaaacacgcgtacacgtacgtccatatatattgtcaccgtgtgtgtgacctgtttcaaaaccccatgtattcgatctgttcatgcatgcatgcgtgcatgcccgtggacggtgttcgtaataatagaccgtagagcaattgttt

SEQ ID NO: 122556 - DNA, 646 bp, Zea Mays
aacatcacttggccggagtttggttgcatgattaaggaccgtttcggtcgtgatcagcacgaactccttattcgacagcttttcacattaagcaaaccacaactgtcgccacatatgtagaacagttttctcagctggtcgatcaactcaaggcatatagcaccatttcagaccccctttactatactatgagatttatagatggcctacgtgatgagattaaatcagttgttttagttcaaagacctcaaaatttggatactgcctttgttctggcacaattgtaggaagaggtgggcacgacacggaaggatgctaagaagtacgatgcttctttcacccctcgagcattttctcgaaatgctctgccactgcctccacctcctcgtcaagctggcacttctaagttggattcggaccagtcggccagcactgcaaagtttcaatccactgacgacaagctttactcattatatgcctaccgcaaagcaaagggcctctgctacaagtgtgggcttcagtatactcgtggtcatcgctgtgcagacacagtttctctccatatggtagaagagctttggcaactgctggcaccaccagacctagaagttgactgtcagtctgaaccagagggggaaattcattc

SEQ ID NO: 122557 - DNA, 757 bp, Zea Mays
tagtgaaccgtgtagtctgctcatgcgaagcatgcaaaaaattctcacctcaggcaggggcgccttcgtagttcacaaagcttattgctcacacttggcccttacagcgatggggcctcaacatagtcggaccgctccccactgcgtaaggcaaccccaaatacaccttcgttgcgatggaatacttcactaaatggattgaagcaagggttgtatccacaatcacagcgaagacaacacaaaaattctctggcagatcattgtctatcgcttcggagtccacttcgaactgaccgtagacaacataaagaaatttgataaccaagacttctgagaattttgcacctcaataggtacacgtgcaatctttgcattagtctaccatccatagtccaacagagtcatggaacgagaaaatggcaaaatattaataggaatcaaaaagagactgctcgaagacaaaaagggcaagtgggcagagcagttacctgaagtattatgggcattaaacacaacggagtctagtgcgacaggtttcacgccatttaggctgatgtatggagctagggatggaaatcgggaattcctcgtcgggttttaactccccgtccctgtccccatggcaaaaaaaatatccctacaggaatccccacgaaagcttgcgggggacatttcttccccatccccgttcctcgtggggataaatccccgtcggggatccctgtccccacttaaactataagtaggatgcacttca

SEQ ID NO: 122558 - DNA, 1537 bp, Zea Mays
cgaagacccctgccaccagcagcagactctcgtgctcaacttaaacccttgtcaccccacataccaccttcgcaccaactgccttccaagggctgaatttaccttgatgaacgaagccctcttgcaccacagcttcaggcctcctcttggccgcaaaattatagagcaagcacttacccaaagtataacggcagtgcagaccgaactcagtacatcatgagttatcaggtcgcaatcccatcatctggggggacaacgccaccatggctaagtcattcatcgtagccctcgagggcccaactctcacatggtattcaaggttgcctccattaccaattgattcatggaagacactccacgacgaattcatgttgaactttcaaggtcacagacctgaaatagacgcactggcaaatctttcactttgtaggcagcaagagaaagaaagtcttcatgaatattacaaaaagtttctcctattgaaatcatagctgccctcggttgaagaccatatagccatccactatgcaatcagcgaccttcgggcaggcgtcttatacaaccactacataagggatccaccaactaacctgcaggagttgtaccagctttctgaaaagtatgcccgattagaagagctccaccaaagaaaagttgagtctcatcaaaagcctaaggagactccgcaatccagcatgacttggatcaggcctccgcaataggacctagcccgcgcaagagcatgccctactccatctgcacaacatcgcaaatcagtagcaaccaactttaccgcacccacatcccagccatgcacaagcggccacactccgcatgcaatgaactcttccaccaaatcatggtcgttgctcatcctggccgcgcgatgaagggtgtcttcgtttttatcccccttcttcaatttaaactacgggaacatgatgtcgtagtgcgagcacaagatagatggaggcagcctaggaacccccttgtcgtcctccaacgtcacatataccaaaaatcccactagttccccacttattcttggcgcatgacatgaaagtgcatgtatcaaactatgcaatcttgccaccaataaccttcttctaccaataaaggcaatagttcttggcgaagacatcagccgagggctctccgccatacaaagtcgtagcccacatgaactttgccaatgccaccatggcgttcacgtaaactggtgaatctaaacttcgaagcgtcgcaacacttcgacgacaaaaccgatgctcaggcaagcgaagtctagcagtgaaaaacgcctaaaaacaaccaactccccgtctggctctaggatctctttggctcctggagtgcgccctacaccattccaaaataccccaaacactgcatctcctccacgcggctgagtagatccctagacatcccaaattccacagtatgcccccgacaacaactccactaccagtctaccaccgtcgaatcactaactgtcttctccgatgacgatgcgttcgacgacgcagacggagcagac

SEQ ID NO: 122559 - DNA, 400 bp, Zea Mays
tcaggacctgaagtgattaattttataaattttaggtacctgaatctgcaactagaagtggactcatgtgatggaacaaggttagggaccccaagcacattttactcttacttacatgaactggggtaacatgtaccacacatatgccaaactagattggattttatcatcatgcagtagaccatatacatggatggcattgccagcaacaatgcgccaatgcgggaatgttaggtaagagaaagtttaggccataaaaggacataaatgatcagggctatgtgatcttcattagcaacactgtgtcaacacctttattacgcaggtccttagagggcaatgaaataatatctattgacaatccattgatattaatttattaattttcatatgccaatgc

SEQ ID NO: 122560 - DNA, 810 bp, Zea Mays
acatgagccatgtccactgcggtgttcccggacgacgacgcgacgttccctaagctacgttgtggtagcgttcaattggccgagaccgggagtttcactagcaccagaggatgtagaaacatggatcagagggacatgaacggacctgagaacggctagccacgacgtgatgcctcacggcggcgttccggccgatttgggggaaatctggaattcgcgagctatggtggatgatttaaggcgaggagtggtgctctgggtgcataacaagaaggcgaagcaaggagggcactcaatttaaaggggccggctgcggttgctctgaattttggacggagatgaactcacggcggggatggggtgagtcaccggagctcgtctaccgtggctctcaatggggtaaggactcagggtagtaaatggtcatctaccatcactcactgcgacatggtaagtcggcacatggtgtggcatgaccgagataaatggcggccaccaccacaacggccggatgaccacgtcacgacccaagtgggtacagcggggcaggctcaatccaacccccctctgatcttttcatcctcgcggaaatatcccttctgacccaggcacgaatcatggtggccagcctgaatcaccgcgcccgttcaccgcggtgaggtggactgcatatgtgatcttattcagacactatgtcattgcgatcccgttcagttcgtctcacagagcaacttcaaggtcatttctcttcgattttcatacaccgaactatcaactcgactataccaaagttgttcccctatataccag

SEQ ID NO: 122561 - DNA, 332 bp, Zea Mays
tgacgagtgagttagggtttgggacggggcgatgggtggactgccacgtgaccaccgagtatttatacccaaccactgctgatctggaccgggctgcactgttcactgacagtcctgcaccacgggccgatttctcaacccgagcacaacccgtctgaatttcgtgctgggttgtgtcgtgctcttgtcgagtcgtgggccatctgctaggctagtccatttggataagtatagttgcatgtcggtccctctcttcgtcctcatcgtgcggctgcagctacggtgtcccgtcccaccccgtctagaggtgtcaatggggaattcctcactga

SEQ ID NO: 122562 - DNA, 379 bp, Zea Mays
agcttttagagacatgagagatccaaagataacagcaacattcattagtccacatggatatgtcgtttagagataagttgataaaacaagcgtcatgatcctcagagaagggggtatgagaatgaccagaaatgagagatttaggcaagatcaacatccgatacttgagaacaggttatagtagataaccagataacggggcagaatcaataggggatcccgagattcggatgataaagcaaacatgattcataagaaaaaggattaccagatccaggtgaaaggagaggtaggcaacaagatcagctggatgatcaacaggaatgttatgaagttttaggggcaagggtttatggaaagaaacatggccttgataggg

SEQ ID NO: 122563 - DNA, 652 bp, Zea Mays
taaattttattactgttttcatgacaaaatagagacactaagtatcaaacaatactaatacaaaattataggaactggaatgggtcaatttggacttcaaatgaattttctaaggattaaataagtttctgtaattaattttgcattgaaaatcctttctaaagtgaatttatctgtctctggtccgcgcacactaataaacgaaattccaggggcctcagcgcaagtgttcccaagacacagaaaactcctgccaggactgcgggttgtttatgtgaaagctgaggggctcatgtgacaaatggtttgggcgaaggggtatcggcgtaactgagccacccgatcaaaaatcgagggctcagaatagatcttaggcttcgcgtgaaccggtacgtgcgataatcgcacgatcatgatccagtggtctagattttatcaatctaagtctaatcccacacgttcacagccaatccaagggacgcgaatcatcaagccgaatcactacgtctcttctaatctccatcgtccgccactatatcgacggtgaacagaacataatacgactctctcttccccaaccctgcacacggcggcgcagagtgccccaggcaatgccatggccggcgttcggccaatcccagggttagggccc

SEQ ID NO: 122564 - DNA, 590 bp, Zea Mays
tcgggaactaactcaaggtggaaggtctgtcagtgagtacgtgcacaaattcacagaattggctcgctacgcgcctgacgacgtcagcatagaagccaagaagatggcctactttttgaaagggctcataccaaaactcaagaccatcctcgccggccaagatttccttagcttctctcacctctcaaacaaagctatacaagtggaaagggcaagggaagaagaaaaaggtcacctcaagaggaaattccaagtcctctgagctcagcagcaagaccggcaccagagaactcgatcctttgggcttccacctaagggaccaagcttcaatagactagctggacccactccgtcacgttttagtcagtagagtcagagcttcttttaggccccctcagtcacaagcaaccaaccgccagctaatgcctgttggcactgtggagaccccagtcacttcaagaataactgcccccagttgaaggcatcaggacctacttactccaactcggtgaatggccccaaaaatgcccctgcgcccgcgtccaaggcaccctcctccatcagccagcagaccaagacccagtatcatg

SEQ ID NO: 122565 - DNA, 434 bp, Zea Mays
agcacccaggctaacattcaaaaacatagcagaagcgaaagcaaccagactgaaggaggttgacgtgctagaagaagagcgtttgaatgtcgtcatccaatcggctaggtaccagcagactctgaggcgctaccatgacaaagcagtgcggcaccgatcctttgcagtaggagacctggtactccgccgcgtattgacaggagaataacggcacaaactgtcaccgccatgggaaggacctttcatcgtcacataagtcacctggcctaggtcctaccggctaacccagatggacgggactcaagtaggaaactcatggaatatcgagcatctcaggaaattttacccgtagtaacaccataaactccagatggcaagctacacattgtaaaccagagatctcattatcaataaagcttctatgttcgtccata

SEQ ID NO: 122566 - DNA, 368 bp, Zea Mays
tgtcatcctagggatgaattggctaaccaagtatcaatccagtcttagttgtgataagagaacagtgaagttagtgtccctatcaggagaagaagtgttagtggaattggtcttgtctggatcaaggaaagggagttgtcaccaagtcaccgctcatattgaggagattaaaccatcagaagctatcaaggtagtgtcagaattcccagatgtatttctcgaggagttaccaggtatgccacctaaaaggaaggttgaatttgccatagagcttatcccaggcaccgcccctatttccaagagagcctatcgagtgtccggtcaagaattggtggaactcaagaagcagattgatgagttgttagaaa

SEQ ID NO: 122567 - DNA, 946 bp, Zea Mays
ccgagccagaagtgattgtgcagccgagtcagtcacataggaattcgtaacttcctggacccagagaggttgaacttcactgactgctgtcaatgccatcacacaacccacacgctacagagcatcagctactttgttctctttaccctgctagtagatgactttgaactacagccccataagctttgccatggctttacgttgcaactccgagtgaagctcctgactacccaagaagctgagagccttatgatcagtctgtatttcaaactcgctccattgcagataatgacgccaatgatccacagccataatcagggcaatgaactccttctcatagatcgacatcttctgattggtaactcccaacgccttactcaagaaagctataggccgcccctgctgcatcaacaccgctcctaccccatcatcacaggcgtcagtttcaacagcaaatggtatgttaaaatcaggtaatgccaatactggagtggaaaccatggcctgcttcagacgctgaaaagccagttcagcttctggtgtccacttgaaagcccctttctgcagtaacttcgttagtggccgagcaattatcccgtacccttgcacaaagcgcctatagtaccctgtcaacccagaaagcctctcaaatccgtgacattcagtggttgcggccacttgagcatagcttcggttttctgagggtcagtagccacaccctcaccaaatataatatggcccaaataaatcagcttctttttaccaaatacgcatttcttctctttgagatagaacttgtgttcccttaaagcagaaaagaccaacctcagatgctccaaatgagagtgccaagtggaacaataaatcaatatatcatcaataaagaccataacaaatttctgaaggaaaggagctagcactaaattcatcgcacactggaatgtag

SEQ ID NO: 122568 - DNA, 874 bp, Zea Mays
gaaacagagcattggtgggacgtcacgaagtggaagacatcgccggatgggtatggaccgatcccgtcttcgactagatcggggtaatcaacgcgatctactatcctcgacgtccggaatgtgtattggtgagggggacttgcggaatctgtttgagggcgaagagtttaggatgatgttgtttaatttctgggaggcgggtcttattccgaaggcggagcctatgtagcatttttgctggcctcgccctcgtgttgagatggtgagtgaaaacgttgtcctccccctcttcgcaatagagagtgagggcagcaaaatgtgatttgtattattgtgtgatgtggccgccaggccttgcgctttatgtatgtaacctacgatggcatattgcgtgctgcgcttattatgagattgcttcgatttgtaatcgtgtttgcatgacacttaggtaggatgagcacttcgcttcctgtgggtgatgtcacacacttgttatgctcgcccggctgcacccttaggtggcttttgctcggacctgtcttttagtaaagacttcgcaccctgtgggtaatgtcgtgcacttattgtgcatgtccggctgcacccttaggcggcttttgctcggacgtgtcctttagtaaagacttcgcaccctatgtgtgatgtcgtgcacttattgtgcatgtctggctacacccttaggcggcttttgctcggacgtgtcttttagtaaagacttcacaccctgtgggtgatgtcgtgcacttattgtgcatgtccggctgcacccttaggcggcttttgctcggacgtgtcttttagtaaagacttcgcaccctgtgggtgatgtcgcgcacttattgtgcatgcccgg

SEQ ID NO: 122569 - DNA, 579 bp, Zea Mays
gaaggatatgatgatttctcaccagcggtgatgtagtggtgaggtcgaatcgtgtggtggacgaatcctcgacagagatttgcttcatgagcaatctgccatgagtagggcgactccagcctcgagtagtcaccaaaccgactttaatggctctagacgatgaccttcaggcgctttctcaaagctgactttgtcgacaagctaggaatggcttacgatggattttgtcctttctgtccgtcggttcaccaccgacaattcttgttccattgagttagacccctctagtttttccgtgaaggatctggccaccaggacccctctcgcccgctatgtcagcgccgggcccctctacacgctctggcattcttccactggcgcatctccaccacccgtcctggtctccaccaccacctccacaacttagcatcgtcatctcgaccacctaggaactgacgtcatgaccaagctttccagcagtctaaattcttcttgtagtaggggacattttgagggtctgtgtcatgcttgtcagtaaggccgacatactcgtctcccatttactacctcttcttctca

SEQ ID NO: 122570 - DNA, 495 bp, Zea Mays
cagccaccaagaattgctagcaatcgatcaccagtgtccccgaattccttgtttcccccaaatcctttctccgccaccgtgaagatccgttcgccgcggccagccctttaccggtcagttcatccctcactctcacttgttcgagcactcttgacgctctgtgatgcttgccgaacccccaattcgtacggagtagctttagatcatcgggaacacgtaccaattgtcttcatcgtccgcgatttacgtggacagagctcgagagcttaccaagtgtgaaattggtttaggggaatcattcggggagggtttaatctggtgtatgtcgctcgagagcaccgttcgtagcgtaaatccgccagtacacttcgccggagctcgtcagcgcgctgccgtcgccgtggactcggccgtgcgaagaattagaagattgaggactattctgcaaagggtcagtgacacaggaaaacagtagagagaccggatcctagttat

SEQ ID NO: 122571 - DNA, 730 bp, Zea Mays
agccaacatgatgcacaatttagtgatatcatttattaattatttacttttaaatggggtgttcacatgtgtttatatgtagaggcaactcatatataggaaataatttccatttcttatcctttacaacttgggtattacatacatttcgcagagcaattggcattgcaggatcttgatctgcaaacgatcacaacacattcatttaattttaatttcatgacgaattagcataacaaattcgcataccacatacctgtcagcataactctcgatccctcgcatcccatacatgttttgaatgcattgaaagcccattcaaatgtttcaacggtctcatctcccaacaacacaaagccaaacacagtacattccagatggctgttacctccaataaacatgcccagtggcttatcatatagattggtcttgggtgttgtatcaaaggtcacaacatcaccataatctacatattcccctgcatacttgcatgtgaccaaaaaatactcactattttttcatccttgtctagctgaaaatcacaaaagaattgtggattctatttcttgcatgccgtaaagaaagatagaagtttagctacatcattagcacagttctctcgtatccttgttgccctcctacaaatgttttacccaaaaactaccatcaattaatcataaatatatttcatatactaatatttatgccaatccatatatataaactcaaa

SEQ ID NO: 122572 - DNA, 355 bp, Zea Mays
gaggatagggtttagctttggtggtttcctcaacaacatggagtaaaagctttggtagcaatctaaaccacgagataaatgcattgttcttgtgttctttctattgtttttgtgctctaacttctcttagatgtatttctagggtttactccttatctacttgtgctagagcgtccatcctaggataagtgatgaaatagtccactactgggaacactagtaatttactcaatatacttttcttcttgtagattatgaattatgttcatgaggtgctctattttgtgatagtagcatagttgcacctagaaccgtcgcaccactagtacattttttcctagaactgtcacaccta

SEQ ID NO: 122573 - DNA, 621 bp, Zea Mays
aatgaatgccgtcttcggaatgtctgagggtcggatcctgagctggtgataacctgacctcagatctatctttgagaacacgctggctcctctcaactggtcgaacagatcttctattctgcgcaaggggtacttgttcttgatcgtgacctcattcagagctcgataatcgatgcacatccttcttgtgccatcattcttctccacgaacaggacaggggcggcccaaggcgaggtgcttggccggatgtaacctttctctaacagctcatcgatctgcttcttgagttcaactaactctggtccagatactctgtaggctcttttagaaatgggggtggtgccaggaagaagctctatagcaaactcaactttccgctcaggtggcatgcctggtaagtcctccggaaacacatctagaaattctgacacaaccttgataactttgagtggatctgcttcactgctatcaacaaccatctgataacaacttcctttctttggctcaggcgggactaactcggtcaccacttcctctcctagtggagacatcaacttgattgtcctcctatcacaactgataactacctgatacttatctagccaattcatccctaggat

SEQ ID NO: 122574 - DNA, 473 bp, Zea Mays
ttcgagtgcatgcggtcacaggggcaagaagaccgtgtgcaaggcatcttcaagcttgggagtggtcgacgtacgatggagtctcactggtgcaggaatgcggccgcaagaccacaccccgccatggacaggtttccctgcgccaccatccatcagtaagaacctcctctactagctcttttcagcctccgcctcacatagggttaatcgaattccgtttttggttggggaattaggaagccaagtcggtatactccagtgccaatggcatgtccctaggcgacttggggaagaagatgactcgaggaccgttgatctccgcgcgaacgatcctaattagatcccttgtgcacccccttcgaccgagatcttgaccgttgatctgctaatcggatgggcgtaattgagggagaagggtaccggttcggactaagggatcgtagccgttgatctagtgctgggcggttaatatt

SEQ ID NO: 122575 - DNA, 455 bp, Zea Mays
gtggcatcgcacgagcacctacctagtatatatatatatactttgtatgcatgcacccgcatcagatcggagacaagggcatacatatcctacccactcgaaatcaagtacgtagtagtaataagctccgatcaacaagcacagcactgctgcaaaattgattcgattcgcataagcaaccgatttgcactgtacgactatccccgctgggcctgggcctgggccgcctgggaggaaacgtggctggatggcgattcgagagggagaaatccagagccagagccggcgccctgtcctctcgtctacgtacgtcggaggtggatgggagatcgatgggatgggaccgaaggagcgtggacggacagcgccactttttccatgtgtccgcaaataataaatgcatccttcccttcccccaggcggcccggccaggccccttgcgcatcgcatcgcat

SEQ ID NO: 122576 - DNA, 689 bp, Zea Mays
tataaatactgtaaagactagctggcaaagatatgaaataacagaaccaaatccacatacctcgtgtgcacctgagtctgtcaggtgttcgtcggagaacctcacgtcgcggtgactctgccgcggccacggggaaacgtcacagtggtatcaaagccgacgatcttcggagaccgtcactacggcgccgtcaacaaaaccgtccgtgcagacccgtttgctgctggaagctatggccggagcggagctgaagggagaggagcgttgggataagatgatgcgggtgttggagagggtggatcggcgattggaggcgctggaatcagggcaacagtctgcaaacgaggctgcgcgaaaggcggaggaggaacgtgtcatcctggcacgacaggtggacgagacagggaagacggtttcgcgtcttcgactggaatggatggcgcaggaaatggaaggtatggagtctgatcctgagagggagaatcgtggtcgacgagagtttggtagaagaaatttggaggagagggagcagtatcagtttggagggaatagaaatttggaagagagggagcagaaccagtttaggggaaatagaaatttggaggagagggagcagtatcagtttgaagggaatagaaatttggaagagagggagcagaaccagtttagggggaatagatatttggagg

SEQ ID NO: 122577 - DNA, 504 bp, Zea Mays
gccagagagtggaccggttccaaatccggctgaaccggcccaaaaatcggttgaaccaattttccaacactctgcacacgactttttctgacaggactgactggcagactggcaggtcagaaagtggcagagtgaacagtgcgaaaaccggttgagccagttttgagtccggttgaaccggtttttcaaactggctaacagatttttagaaaactgaaaaccctggggaaatcttagtgggaagtaaaaatggtttttccaagagcattcatgatctagtaaatgttttcttagaggatttgaaaaggtttggactgagctaatcgcacttacttactcaactattgcggatccctcttaattgaacggcgattcctatgactcaagaattgtaaaaagtaaattgccgttgttcccaagcacttgaagcacgctatatgatgtagaattttaatccactgtgcttttacatttgcgtacatatatgatctgtgcttctcctgt

SEQ ID NO: 122578 - DNA, 425 bp, Zea Mays
ttgattcaaaacaattatgaaggaaaaacataaaataaaacataaaagaaaaaggaaaaggaagcttacctgggccggctattccctttttggcccaccgggaaggcccctagccgtagcccaatcccttcgctcgcacagcctgtgcaaacttggcgccgccgttcactcgacaaggaggtaggggaagaacatggcccgttgatgcgaagatgtacgactacgattagatatgggcgtgtgaggttttcaatcgttggatcggttgcagaggtttaaatctggcaaagtgtagaccctcgatcgttgatcgtacagtggatggcgtagatttgatcgagccccttttaagatcagaaccgtcgctttcggatctgatggccaccatttcttaccgattcgtttataggcgcgatttaatcctg

SEQ ID NO: 122579 - DNA, 718 bp, Zea Mays
gaagaatggggtatttccatgtagagctcgactgggttgagttctcaggctccaaaccacgtatggcagctctctgatccattttcctgcaagcttttcactcttgtcaaatactttcttcctgagtgcttccagtatcattccgttggctctttctacttggccattggctcttgggtgcgctactgatgcatacttaatctggatgctccgctactcgcagaaatcgaagaattcagagctggtgaagttggatcccaggtcggtaatgatgctatttggtatcccaaacctgaatattatgtcttgtatgaattccactgccttggctgaggtcaaagaggcaatggacttgtactctatccattttgtgaatttgtcaatggcaaccagtacgtgagtatagcctccctgagctttcttgaaaggtctgatcatgtccagcccccaacatgcaaatgaccatgttacaggatggtctgcagctgctgtgcgggtaaatgttgttgctttgataagaattagcaagcttcacatctctggactaactcggcagcatcactcttcgctgttggtcaatagaaaccagatctaaaagccttcctgaccagagttctggacgctgcatgtactccgcactgcccggcatggatttcatctaacagttgcttcccaatagccaagtgaatgcacttcatgaggactcttgtcgcacctc

SEQ ID NO: 122580 - DNA, 559 bp, Zea Mays
tcaggcattgaagaagaagttggtgaatgctcctattttagccttgcctgagagttgtaagcatttcacagtttatacagatgcttctcgtattggccttggttgtgtgttgatgcaggaacacagagtgattgcttatggctcgaggcagttgaacaagcatgatgggaattaccctacccatgacctcgagttgcccgctgttgtttttgccctcaaatcgtggaggcattacctctatggcaaatcttgtgacatttacaccgatcataagagtctcaagtatatcttcaatcagaaataacataatttgaggcagtgtcggtggcttgagttgataaatgattatgatctgtcaattcaatatcacccagggaaggaaaatgtggtggctgatgcccttatcaggaccggtattccaaaagtggccatgcctttgattgctgatctggaccatatgggagtttctttgtgctatgttggcactgctagagaggagactcggatgctcattcaatcctcccttctagagagagtgtgcgtggcacaacagcaggat

SEQ ID NO: 122581 - DNA, 315 bp, Zea Mays
acggagttcagagcttgattggttggatggaccggaattgttatattagtacaagaggaaactattttccacggtggttgaagattctttttctttgtggaaagcaagataatcaatcggatgggatcgactaactgctagccggcctgctttgagcatagagccagtactgttggagtcctagtagatctgtactgctatctcgcctaatcaatcatagcatcgcgaacagcaagcatagcatagcggatactttaggtgcccattctccgtttgtccttgcagtccagccagaaaaccgggtacctgtactgg

SEQ ID NO: 122582 - DNA, 315 bp, Zea Mays
ggtggttctgtttagactctcgcgatggaaagctaggagcagctgatttctcgtatgcacgtaaatgcattttaacagatttatctacatattgctttaactgatctcctcattgatccatgaaagtcgtaagagctagatctggagtacttacagcgggaccctgaagtggaggtaggagagattccatatcgatctccccttgacggatgatcttctggtggcgatccaccgtgaagtgtgacaagtacttttctgccgcctccttgcgccgttcggagagtttatgcagcagttccgcctcttccttgtcgc

SEQ ID NO: 122583 - DNA, 416 bp, Zea Mays
ttgatatattaaacctttgcctctcttcttttctccttgataacgctttctccctaactcacttcatatccttggttgtatcatttatcctcactttaatagttcatggttatcttatttcactcttggccaccaacaaatatgtcttgtttaactccttgataattcttacccaacttcttgatgttataatatctttcttattccaaaccttgtctcaccttttgttttggttgaatgagtagaattggattgtgttgtgctggtatgcttgagttcattgtcctttgtgttcatgtttgatttgcttctttgaaataattgttggtgtattgtgtgacttttgtccacaatggcatcagttagctaggtaaaaccttagatagatgggttttctctgctctctataatctgtc

SEQ ID NO: 122584 - DNA, 367 bp, Zea Mays
aattctaacagaaaattcctggcatactggagcaagctcctgataatgacattgctgcacaacacgaatatgctcaggtatttttcgaggaagaacatacaaccaaagatttggagccaattcaaaggtttcagcaagcagctgacaactattgcttgacataaaaaactggtcgtatagctagtaataactattagtgcaatttttctttgggttttatggaaatgtagaaatagctatctcccaccataatctatcaggctggtccaacatgttacttctgtcgatcggagggaactacctttttactcagaagctgacacccaatatacaatgattccatccaaaccaaagctggaactccctc

SEQ ID NO: 122585 - DNA, 1296 bp, Zea Mays
ccaccacagcttgcagtaaaaggtattcctggaccacctgagcctgagataatcttcttctggaataaactttaaacacgggtggcttcgatctccatctatcagcccgggaagactgacaagactcaaacctccgcaccctggcagagacaacagcaggagaaccaacaaccaccaattgggagaacccggaaccatgctgcccagcagtgactgcctcctccacattagcagaaacaccatcggtcagcaaataggagagcccggaaccatgctgcccagcagtgacatcctcctgacaactgacccccaacacctctgccagatccaacgctaacaccggagggtgaccaggcgcctccagctctgcaaccgaaacctccgggagagccagggcatcaactgatcccaaaactggagggtgaccatgcgcctcccgctcctcaaccgaaacaatcgggagagccgtagcatcaactgatcccacctccaccaaatcctgatgaacagcctcaacagacatgtcatccacctgcccagaacgactgcgctgacccagacgcaaatgaattggaactcgaacagaagacgcagggcgctccggccgccccacatgatgctcatgatcactatcttcgtcaacaaagcccgaagggggtggcgctggaggatccacaccggaagctgaacttccatcagaatgaagaaccaccacagaaacagggaacaccaacgtgctaggaacccatctcccatcctctccacagaccatcggctcttcagcaaggagatccaccaccgccggcagcagctcaggtgaccggcaccatactttcagtctgagaacagacatgtcttcctccttgaccaagccaggcaaaaaaccatgaatcaaacagaaagcaccaagaacagcctcagcagcctcaatcccccagagatgcgcaggaattccacgcagttcaacgccaacgggcacaagcggctgtccacctccagtagcgaaagcctgacgagaccacctccgaatatgcaacctgagcggagggacataaagtgattgaccctccccaaccacccgatcagccacggcaaccgagggaaagaagacgaggaaagaattaggcgcagcacgacgtatgtggagcgaccctgcttcaaggcaaaaccttgaggcgatcgcgtcacgcacctccacggcgcagccagaatcctccctgcctacaacactgacgatcagtgcacgacggagttcctcctcagcccgatcaattcttccacaacgcccgacaaagc

SEQ ID NO: 122586 - DNA, 287 bp, Zea Mays
tggtttcttcctcgacaaaatgaataagcttcttctcagcttctccgaagtagcccagttttatcatcatgggcacgtcggcttcaaacacggtagatttctcaaaatccaggtggctgggttttgatgggatcaaaatgctaaaatcttctccttcttcatcagtattttcttcttcaataccagcctgctcagcctcggcacgagaagtaccttcgtcaatggctccctccgtcacaactaatctcgattgtctcatgactttggagattggagctgtctcagtg

SEQ ID NO: 122587 - DNA, 684 bp, Zea Mays
tgaactaatttctctctcaatatactccaatcctgaaggagatttgagttcccaaactagccctaaaggtacaaactagcaacaacaagaaggatcgataaatcacagataggtgagtgtcctgctgaattcgaaagttcagccccgtccacaaatcatcagcttaagtacatagtgtcacttgggtcttcagggttcagttttttttttgatgaaactggaagagccaaagctcctatacagaattaattaaaaataaacgttcaacaagtttacaacaagagaatcatgaaacaacgaaaaggagaaaaaggacagcaattacaatagactttggcaccatgactcaaaaaagtggctcgatctctgtttagctctaaaggagagctggccaagctctttttggagggcacttcgacttgtctgcaaatttggttgcattgctttgaaaactaaatcattcatagtcgtcctaattgtctagtttaacaggattacgatattcatgaagaagggcgagcttagctgtatttgaaaatcttccaggacttcggacaggctcccttgttgtctgactgtcaggttcagcaggttgacctaagtgtgccttttttgcttggctagttgcagatgctggacggctgaccgtttagccaaaagaaacttgcctcatccagctcgctg

SEQ ID NO: 122588 - DNA, 341 bp, Zea Mays
tcactgaaatagcccagcttcaccattttagggagatcagcttcagagatggtggactttccaaaatccagatgactaggttcacttggcaccccacagctgtacccatcttcggaaccagcttcttcaacattagcttgtgttgctttggcagcaggtgtgtcctctgatgaaaccagcccagaacgcctcattgcttcggaaatcggcacagtttcagtggcttcggcctcatccccatcacgctcaaccctagcagtggagcgtactctggccatttgattttaaatttcttgaaaattccttggaaattaataaccttttttccgaagctcttcttg

SEQ ID NO: 122589 - DNA, 543 bp, Zea Mays
gcaccacctcgttggtggcgcaagtctagagctgcgtcgcaggaggaaaatagagtaccttgacattcccctcaaggatagcatcaaggggtggcgcctcgagtggttcattgtagagaaccactgcaagtcccttccccctcggtcggggaggcagccagatgtccgtactccaaactgggtagaatctctgaccccttcagagataatggaggcaaaagtactgcttgccgaggtctgcttgttgaaagacagaggcctgactgctgaagctatggtcgctgattttgtcttcaagaatatccagcctttgaagaaaagggcgtacccggcttatctatacagtggcatcaatgattctacccgggccgcaaacaagagaatccccactgaagatctggtgagacgactggatattattttgaaggcagagtgtcaaattttggtgcttctgttgcctattctgcctggaatctgccaccacataggtcgttttctgaatttgtgtccaagcctcctgctagtgatggtagcctgggtctt

SEQ ID NO: 122590 - DNA, 433 bp, Zea Mays
ggctcaataattgtgacacatgggtagtgcctacagggcctgcgaaatatgcgtgactcggcgatggtggtccgactcaacgggagtggtccgattaagcgagagtgcgattaacaatcatatgacgcagccaagttaatatgacacaaatattgtgtcttgttgccagggctcagccaatatcgtagctcaaccgattaattatgtagtcagattggcgtacgagtacccaatatataatttaatcgcccatcgtgagtccaaaatctcaacgcaaaataaatatttagagcgatatgagtctgcgcactatagtctgcacacacgttttaataattttctgctaattatttactatgagaaataaagcagaaaaataataatagaattaatgcatgagcataagcagatcagatacatgaaaacattttcc

SEQ ID NO: 122591 - DNA, 311 bp, Zea Mays
gtttccaccgtgtcgccgtgaacctttgtgactctccgtggctcgccggagtaactgccacggtgctagacacccagccgctgcgccagtaactccctgtccctccgaccgccgcgcgtcatcgtcccaattcccggccaccgcttccgcttagtataaattgagcccacggtcagctccgcaacatcatcacacgccccaccatctagtatcacccccaatcttgcaaccgtgagcgccaattttaagttttccccaaatctgttctgagacaccgcgaagagcacctcgtcgtggccagtgcgatatag

SEQ ID NO: 122592 - DNA, 558 bp, Zea Mays
cgaaggtttaggcaaggaaagcttccatcccggatggtgaatcttgatttgtctgaagatatggtttgacttttatccttccttgacgaggttgatcttctcttctcgggtcttggtgttatcatccaagtaaaggacatttggttttggtgtttccttctgggtttaggtatagatggttgtgaaatgtgatatagataaaacatggtttatttttgtttttaggttggactagataggttacaatcttgttttgaaatagattgtgggcgagaaaggttatggtaaggagagattccatcccggatggtggatcccaacttttgaagatcttttctggcttctgttcttccttgtcttgatgaggtcgatcaccttcaatctctggtcttgacttcatcatccgagttagggacatatagttaagatagcttgtagataggaacatatagctaataggtagatggcataggacgagtgtgctatggccaaacctggtctagttgctttgttaggtcggctaggtacagatctttaggaacatgtagattaggtggg

SEQ ID NO: 122593 - DNA, 350 bp, Zea Mays
ggaggataagatggatgtttttgagattttgtatggtgatcgtgttcgttttggcacacagctgttgaaggaggaggctcaaatttggtggagaggcgtgcaggcagctcactcctcctcaccaggagtcctgacctgggacgctttcatcaggcagtttgagaggaggttctacccggtcaccttcctagagaaaatgaagattgatttgcagtctttcaagcaagagaagaagtccgtcacagagtatgaagtgggctttaacaatatggtccgctttgttcctcatgtggcttacaatgagttggagaaggcgagccagtttcgtcagggcctgaaaccttctatca

SEQ ID NO: 122594 - DNA, 281 bp, Zea Mays
cttgagtactggcggagtggtcaagaatttctttagtgcctctagagcctcctgtgcttctgtggtccactaaaatttgtccaccttcttaagcaatttatagaatggcattcctttctcgcttagccttgatatgaatctgcttagcgctgccatgcatccagtgagcctttgtacctttttctgtgaccgtggcggttccatcctcataatggcctcaatcttctctggatttgcttctattccccgatgactgaaaataaacccaagtagctttctgg

SEQ ID NO: 122595 - DNA, 297 bp, Zea Mays
gccttgtaacgctatgtgccttcccttttatagtttaagggaggcacatacaaggatgctgagccccgacatgcgggcctaggagcataatggaagaaatacattatgtgaataactaatgctgatagagtaacacatgagtaatcagcgggagtcatgatggctgcagtccatgcaacattgataggtagtaacccttttcctggtaacgcgggagtaatggtgaatcattgccctcgctatggtaacgtgtgagtaactgtacggcccacgcaacgtggactgggcacaccgcct

SEQ ID NO: 122596 - DNA, 690 bp, Zea Mays
ctacgagaccatctaccacgacaccatggtcctcatttgctgctggctgggaccctgccgccctcgcctccgcctacagcaccatggcgttggctccaccaccttctgactgggtcatcgactccggtgcatcctatcacaccacccccaccacaggcatgctctctcgctcacaaccacctcccacacaccctacctcgatcgttgttggaaacagttccactctttcggtcacctctgtcggtgcctcggtactcccttgaccgttctacctcaacgacgttctcgtagcccctcacatcactcataatatcctctctgtcccgtgggttcaccaccgacaattcatgttccattgagtttgaccctaccggtttttctgtgaaggatctggccaccaggacccctctcgcccgatgtgacggcgtcagtccctctacacgttctagccatcgtccactggcatgtctccacctcccgtcctggtctccaccaccacctccaccacttggcatcgtcgtctcggccacctaggacctggcgtcatgaccaagctttccaacactttagattcttcctgtaatagggacattttgagggcctttgtcatgcatgtcagcttggccgccatacccgtctcccttttactacatcttctagggctgagcaggcttttgacctggttcattg

SEQ ID NO: 122597 - DNA, 306 bp, Zea Mays
agaacacaaaagagaagccggatgaagactccagaaataactggggacacgcaagccaatttgtagagaaactataatcttacttcagttagtacatgtcacttttcctggctagcatctgataaaatatgacactgatgaaataataaacctaatagcataaatgaggtaatacagtttgagcagcgaggtgatgcaaatgaaacaaaaacaaagcaaagttatagaaggtagttgggggaaatacactgccagaccgtttcagataaattttagagagtttaatatttcctgaccttctctttc

SEQ ID NO: 122598 - DNA, 438 bp, Zea Mays
tactttgagtgagcccttagaatgtatttctgctacaacttcttgtggtgtacaatggagcatagaagggatgggtgtggtcttcattgatggaggagcagttggtggcttgctagatgatggttgctttctttcagtggctgtcctagagagcttccactgcagatgatgagttcttatcagacacgtatatctctacacaatcatcctcatcaacttgatcttcttcctagtcacctaggtacaatgttctacctctcttttcactgtccaaagttgccttcatttcttttgaaatttctattgtagtgttgtgacacttaacaatatctttatatccacccactaaacgctgcttcaacctcttgattcctcatgctaccttcttattgcaaagagcacatcggatcacctctcacttgttaggctcatcataat

SEQ ID NO: 122599 - DNA, 659 bp, Zea Mays
gtgcagtctacggtgcacgaccatacgcttgacctgtttgacatagcctgataaagagaggaggttctgcagccagagccaatgcaaatcatggtagttttaacagatactagcgcctttgtgaccgggggccacaaccgcaaggtcaagagaggcgctcctgatgcgggcgggcgggcgcggtgatgaacagtctccccagttttgcgctctttctgttatgagcgtggaggacgttccaacaaatcagtagatcatcacactgactccaatttccctggtgtcacttattttgtcctcaagaggaggtgcgtggttatcgcgcagctttgattatcgttttgttcgactgggacttgagatggtccagtctttttctgttttggctacgccaactaacctgcagtctcctcgacatggaattattagttttggaaccttttgtatcagtaggcggcagtatccggcgcgcggcaaagcagtggggtggggggaagaaggccaggccagggaaggatcgtccgattctcactttgggagatggccaacctgtttgattaatcgtctgctccgatggccgtggtaaataaacagcacaaagcgtctttgttttacgtccgttcccccatgaggccaggccatccatgcaccagtgtacg

SEQ ID NO: 122600 - DNA, 869 bp, Zea Mays
cacatttcaacctaatgttagaaccacgaatatcccagctccttaacatttcagtcttcaacgcatattttctgacaatcttaacggcctctgactccacttccggcacgaaagtggccgcattccgcccgcacagatccacggtgaaggctgggcttcgcaccaatttatctcccagggttagcatccggcgaggtataatctcgcccaaatcccacccatgcaccaaggaccacacctcgcaagtgatgaactcttcaaccaagtcacatccactacctaggtgggctatgtagcgaagggcctcctcgtcttgacccctctctaccaccttaaactgtggaaacaccacataacagtgcgagcacaagatagcagcggtaagctaagcaacccttcgacatcgcctagtgccacataaaaccagaactcccaccagttaccccacttatttttcgcacacggaacaatctcgataacttcggtggaggtcttcctagtcctcggtgtaaaggtgcaagacccaaactgagcaatctttccacctatcttcctttttgccagtgcagatagtaatttttcgcaaagacttcaacagatggttcctcaccatatgaggaaacagcccacacatacttcaccagcgtcgccatagcattcggtgtcaactgacgaatttgcctaaaacctccgtaggacctccactacaaaccgatgtgctggcaagcaaaatccagcagcaaagaaagcctcaaacacaaccaactccccctccgtctcagggacatctttagcccctgagcccgcccaactccgcttccaaagtaacccagccgctgcatctccagcacgcggctcgagtaaatcct

SEQ ID NO: 122601 - DNA, 531 bp, Zea Mays
cgaagctacccgaaccaccctcctttccaagtcaccttcaccggacaccgcttcccagacacttgccaaaatgttgcccgaaaagccctccgacagctatgccaaaactacagcagagaggtctttgaaacccccttcgttacttcccacctagcaacaaaaatacccctacctagaggaaaagacttcaggccctgtcaggaagagatcctactgaagatgaccccaccatagtctacatggccggatatctccacactctcgataaccactatgatgacctttcctcccactgcacccacctaaactcccgggtggaaagcttagagcaacaggtcaaggaacttaaaaaggagaaagcatccctccaagagagtctcgaaatagcagaaggtgaagaggccaacactcgtgaagcctactgaaccctgaagatggattacgataagaagctaaagaagctcgcccccacgaagaaaatccgaaagaagaccaagagccaaggatgccagactgagcggaagaaggaag

SEQ ID NO: 122602 - DNA, 611 bp, Zea Mays
aacatggtccattgaacacgagggtcattatagagcccttgtgtggaagccgttgcaacaagggggtcgataccctaccacaccatcaagtccaacctccacttgtaagtcactctactcagttggtccaccctattggtgttaggggcatgttgcttataccatcactcctccaagtggcgcaaccacaaaagttccaccctcacctaccaaagacatacgttgggatcatggggctataaatcccactaagttcctccaaatctacaccacagatattctcatcattgatggagacaaaaggtgatgacaaactactttcatacgaccttgaccatccttgcttgatcttggctcatgaatcttcccaatacctctatttggtcttgggaggagctctaccagcaatttgtgcctaactttaagtgcacttactctcggcacgacacataattatacctccatgatccaacagtagcttgacaagacattgtgtgccatcatgtagtgtttctaccgggtgagaaacaccatcttatgtatcttcatggcctccatcatcgtcactttctgctaaggcacatgagatgagaagatgatggataagctag

SEQ ID NO: 122603 - DNA, 318 bp, Zea Mays
gtgaatcccgcgggcggccactctgtcgactatggcacatgtcagggatggctcgaccgactcctcgggaagacttctgcctcgcccgagcagggctctaacctcgataaaagcagcaaggaatcacgacgtcacccagcacaaggacgctgatgcaccctgtaagcaggcttttacccataccacgacgttgttacaacaaccacggtatgagcaacccctcccccgagggctcgggcgtacgaccatcccctcggcctctgccttggctctcagaggaaatcggtgggcacaagtcagcaacgcagtacaccgtca

SEQ ID NO: 122604 - DNA, 742 bp, Zea Mays
tctgcgactccattggcacgaaggtggtattcgcggttgtctaccacccacaatccaatggggtagtagagcgcgctaacgacaaaatttctagcgccataaagaagaggcttttagacgacaagaagggcatgtgggccgagcaactacccgaagtcatttgggcactcagcacaacagaatcttgagccactggattcacccccttcatactaatgtatggatcagaggccatgactttgcaagaactcaagcacggatcaccccgaacaagcaccatggctatgccagacatcgatgaagcaacaacaaatgacctcctcgatggggatcatgtatccgcccttgaagcactgaacaaatatcaagcacaaacgaaggcctggccagacagcgttgttactcctaaagatttcgataagggggacctcgtccaaatcagaaccggcagaacagaatcctgaggaaaactcgagcctaaatgggatgagcccttcatcatcaaaaataaaacatcaccaaacacctacagactcgcaacacaatcaggcgaagaccttgagcactcgtggaacatagacaaactgaggaaattttatttgtaaaccaaccatttccagggccttcgcgcccttgtaacacctacagacacattactctggttgggcccgcactcttttccttacagggggtgaggtttttaatgaggcggtgccatgtaataaagcaacaaggaaatacc

SEQ ID NO: 122605 - DNA, 408 bp, Zea Mays
gggattcccttgaagcccaagtccccgccatggcgttgtcccctctccgcaagaggattcgctatggggaaccaggatccatcaccaggctgctttaattttttaagttataattgtaataagatagttttcgcacaggacgatgaacactcttttataatttatgcttataataataacaaccatgtgatggtgttggttgcaatgtttgatttggctttttgattgagtgcaatggtcttatggaatgatggccataagagcatataaaaaaacttaactttaataataagctattcccctctagaatctttcttactcctcactcctctaagaatttcactttctaaccaaccagatggtgaatgctcgctcaggtctcaggaacaacaacaacaggaactagcg

SEQ ID NO: 122606 - DNA, 622 bp, Zea Mays
cagacattcggcgcatggctcacacctacgactaagcgagaaaaagaaaataacgatcgaggcatggtcgaaaggtgattacgttaagcagctatggattaaagcacttgtctaaacacaactaaattaatttgacaatcacgctatgcataaaataaatttacgctacgtgtttaattattataaacagttcacggtaaattcaaatggattgtcgtacggtgaaacgcacggcgacacacgactaaactgaaagtaaaacaagtcgtcgcgcggtgaagcgcgtgacgcaacacttagactaaacttgaaattgaacgaatcgtcacgcggcgaagcgcacaacaaaacacttgaattaaatatgaaaatgacgcaaaacgtcgcgcgacgaagcgcacaaccgcatacaccagtcaaactgaatttaaaataaatcgttgcacgacgaagcgcgcgacgcaacatattaaataatctgaaaataaaatgaatcatcccgcgacgaagcgcgtgacgcaacacactaaataatctaaaattaaactgaatcgtcgcgcgacgaagcgcgtgacgcagcatgtaaattaaattaaaactacaagtaatcaaactaaatttt

SEQ ID NO: 122607 - DNA, 503 bp, Zea Mays
atcctccactatctctgatgtcgctgccttgctatcatcaaatagttcatagaacttctcattagagcagtcagtagcaactccttcattgacccgggatatatccatggtaggatagtgggacctagtcaaggctaggcttagggtgctagcccactccatacctacccgagcaaatcaagatattcttttagcaaacccactagcttttggggaatggaccaactcaatgcttgggaatcagacttgtaaagacaagttaagcatgtctaactgacatgccttcaccagttgtaggctatgtttcatctctataaaaaagaagagcgagttacaccctagtatgaaaagatcccaacaaagaagtatgggcacacttcccaactcctatgccatctccttgcctttaagagcataattcaactttcatggaggacggagttggtggccttctccctttcaagttctttgttgaactcgaccaagctcttcttcaattcacc

SEQ ID NO: 122608 - DNA, 371 bp, Zea Mays
cagtttatgtatctcacaggctggaattttggttggcaggggccgctatttggaggttgatttcccagtggtcatggaagctgccaaggccgagctggtcaaactcgtgggaaaaggagagtagcagtgtagtacttaccggcacggcaataggaacagttgctttcactcggtacgtgtcctgtgccgagtagaatgcttgcaagccgcaaccgcaatcgatgatagagagctgctacatgttcgtgccttcttcccagcttgtccgcagttggtccaccacaagcattctaaatggttacacatctgcttggcatcacctcctcacttcatacagatggcggtatttattcaagcgatgctgatgcggc

SEQ ID NO: 122609 - DNA, 1438 bp, Zea Mays
tctttggctcactctcaagaatcagtttcttgggaatcgtgagatcgacaccctctagctcgacactaacttccacaccttcatccagggcgacctactcgtgggtgactactgttgcaagatgaagatgtttgactttcttgccgacttgggcgcccccgtcaacaaatggatcctcatcctcaatattctttgaggcctaaacaagaagtttgagtgcattggggccatcatccgacgctactccccctgttgcaagctaaggaaatggcagactccctagctggcttgggcgccgctgtcaacaaccagattcttttcctcaacattctccgaggcctgaccaagaagtttgagcatgtcagggccatcatccgacactacttacccttctcgtcctttctcaaggtctaggacgatcttgttctagaagagctcaacatgactgccattggcactgctattgcttcgataaccttcatggccactcctctgccagtcccccccactagcttccctagccccttactctactctggcacactcctctaggaccaggaggaagcccactcccacctagaatatggcaagaagaaagggaacagtcagggtaatgcttcctagctgactttctacaacccatggacgagcatcatcaccatgtggcccagctcggctcctggtcacccgactttcttggctccgacattccttgttgcgtctacctagcatcgacgtcttggtcaccctggctcggatgtgttatctagtttgtctaatgcttcaactatgccatgtaataaaagcacacatgatatttgtcacacctgtcaggtaggaaaatcatacccgtttacctttctctagttctttcagtcaagcttcgaagccatttgagttggttcattgtgatctgtgggcatctcctgttgttagcgtgtctacttacaaatactattcgatcattcttgatgatttttctcattacttatgtgcctttcatctgcgattgaaatttgacacgttcactactttgtcccacttcttctcatatgcttccacttagttcgattcttccatccaggccatctagtgtgacgatagccgcaagtttgataatacttccacttggtcctttctcctttactatgtcatttttctctagatgttgtgcccctagacctcttcgcagaatggtaaaaccgagagtattattcgttctattaataatgccattcactctctgctttttaaagcttatcctctagcatactactaggtcgaaggcctccaaaccgtgacatacttgctgaattgtctccccacaaacaccatcagggcctcatgcccccatgttgccctgtttggtactccccctcctatgaacaccttcgtgtttttggttgcgcttgctatcccaacctttccacggttgctc

SEQ ID NO: 122610 - DNA, 339 bp, Zea Mays
tcactggcacattctcatccacaaaactaatgacattagttttccaatcacactccatgggactatgatcctgtagccagtcataccccaaaattgcatcgaaagcactaatgggcaatactctcatatctgtgtgatagaagtgaccattggcccaccattccaacttcttaaccatcttgtgacagaccatagaagccccatttgctaccttcacagttacgggtgaacaaggatataccgacaatgctaatttctgaaccacctgttcactgatgaagctagtggaactccctgagtcaaccaacatcaccatgacttgcttttgcaccactgctc

SEQ ID NO: 122611 - DNA, 881 bp, Zea Mays
ctccgttagtagggtatagtggtcaccctaagtcgagtaagcgtgttgattctgagtccgatcaaatcgaagtcagttgatagtcagtagtttgaatgcctttgaaaatgaaaacttttttgatgacggatcctccaattacagagtacaatgttgctccgatagcttttgaggtcttgcttagggtaaaattttctaagatgctctatgttccatgaattccccacttctgtaccatccatttgagtaagccggtatgatcccagccgagtgatctctaacacaatgaatgacccttcccatagtggtgacaacttatgctgtccttcccccgttagaattcgacgaaggaccaaatctcccactacaaaggatcggtgtcgtatggctttatcatgatagcgcctcaaggtctgttggtatctagctgactgaatttctgtgttcaatcgctcttcctctagcacgtcaatatcctctagcctggtggcttctgcttcggctatgctttcgaataccagccttggtgccccgaacctaaggttggcgggtagcactgcctccgaaccatagaccatgaagaacagggtatttccatgcagagctcgactaggttgagttctcaagctccaaaccacatacggtagctctctgatccactttcctgtaaacttttcatttttgtcaaacactttcttcctgagtgcttccagtatcattccattggccctttccacctgaccattggctcttgggtgtgctactgatgcgtacttgatctggatactccgttgttcgcagaaatcaaagaattcagagctagtgaagttggatcccaggtcggttatgatgctattcggtatcccaaatctgaatattat

SEQ ID NO: 122612 - DNA, 928 bp, Zea Mays
tatcaaactagcttctaccaaaattaaaaattaagatctgctatctaattagcctctaccacagttagtttgagatgtaaacacagattatataatagaatttgaagactactccctccattccaaatcggaagtcggttctggcctttctaggtacattacatatttttgctatacatccagatatacactgtaatacatctaaaagacttaaaaagacagaatggctcaatggcttacaatttggaacgaagggagtacatgtcaatgtaaaaaatcacatcaagtaggaagataaaataggaatgtacaacattaccactccaccagtaatattagtgaaacattttctaacatattcatatgggataatacgctgccaactttcactccttaaactagtgaataagaatatacaaattacttcatttccaaaagtcatatggcaaaaagtattgcaaagaatatatcaagcattttaatacaacccattagcacatgggtaaaattccactcggttgcatttccctaaatctacaagctattgcgtacagcatgaaagtgaggttattcacatgcaggatcaagaaacaaattttaccacaagacctgaccaaattcattgcatacgcacaagttaacacataaacactcatatatcaatgcagtttacattgctattctcaaatacttagcattgtacacgaaatctagtttacacattgcacaagcatgtgaatttaccgaacaagaaataacaattggtatggttatcactttatcatgaactaaatgacatgttccctgttgtagcattaagaaatgcaacctggcatgacaagatgaattcatgttacacaagcaaccagcaagttaatatccatacatagcacgaccaatctaactcactcttaatgcaaaatgcgaa

SEQ ID NO: 122613 - DNA, 431 bp, Zea Mays
aacctggtatcggatatgccagaatttaacgccggtgacagcatggctttgccacgacaccaatgtcattggagttgatcaccacgatccttgctgatgtgcaacaccaactatggaagtttgccacctagatgtcatccatatcatctcgcgtcgcggtagtggaacacaacccgggatcgtcgacaactacaccttcatctggttgcccctacggcatgccaggttacgacgacctgcctccatccacggtagggattgatggatacctccctccatagcccacccaaacatcagctgtcgtccgccgcatacaccaccaccaccacaccgctgtcgctccacctactacccttgccacactcgccatcaactctaccaccattgccgaacatcccacatctcgtggacaacaactcatttccattgtc

SEQ ID NO: 122614 - DNA, 435 bp, Zea Mays
gcgggataaacggaattgcgaaaacgaacggaaacggaaatactaacggaaactcataatttaatacaaatagaaatgttattgatgtttgactagtgattgagtggcagaacaataacataaaacaaaaagatatagagaggcaacattctattgttgtttggttgctaaatgtgtacatttagctacatccgatgttgtttaagactttagatcacttgtaatttgaaaagagccggtggttgcaatggtcaattgtgctataatttgtcacctaaatacacgaggctttagtttatatactaattcatattaggttcgtcccatatttgtcaaatacggaataaatacgggttcaatccgggaaaaaacgggatcacgcaaaaacggacggaataagccctctcccgtttctgtctcgtttccatatttttc

SEQ ID NO: 122615 - DNA, 587 bp, Zea Mays
gtaatccatatactctagagcaattccaatacccagcctcaacaagaagtggggtgttacgcattcaagtggcccgaacctgtataagtccctgtgcaaatccgaagtgctcctacacgtaccatagagttgtagtcaacgatatcgtcctacttgaaagcatcatgtgtgtaaccccgtgctgcgcggttgggtcacaaacactgaagctggcgagccaggtaggggctatgatgttgatctatgacgactccatggctattgtcttcaacatcccggtcaccttcaatgttgcggagatcttcttctttggatccctctcatgcattgtagatcaggaaggcaccctgcaccacattgcggactcattcaggaaaagatcttttctgatggtgccaaatgcgggagcaggcttgcctcgcccaactccagcaagaactgtgccaacgaactctaaggagtgaggatctcgacaggcttccaccctgcgcagatttgcaccagtgtcggttgggcctaggaccattgtggcacctatggctcggtcgattaaggttgcacctctgtcacggtagacccctttgtcc

SEQ ID NO: 122616 - DNA, 454 bp, Zea Mays
ttagacattgtactcacttcttagactttgttttttctgatattcgaattgtagtataatttgatttgtatcaggttagttatgtgttgttgccaacgaatttgtgagctattgaggtcgataatttttgtggtatttgcttttatgtaatcgttgtgcacgaacattttatcgaattgattgtgtgccgctgcaacgcacgggcacctaactatgcatatctgattctgagttttggtcatttgaattgggtcttacaatatgagctcaatggttgggatagttttgtccattttgtacctttctatataatatgttagtattacttagatttacaaggtcttttgtctgtgttgcttaagtatttcttatattctaatgtcattgttttcgagcatgttctgccaaatcttattcagtgtgcccatcaccttcttattattgccatacgcca

SEQ ID NO: 122617 - DNA, 541 bp, Zea Mays
gcacaggatgatgggtccagataatcggataaaagggcctcttataacacctttaaaaaggctttttcttaagacaaattcttcgtacacagcaggtacagtacttcgaacggatgatcttttcgccaacttgtgctctaagtagccgaacttcaggggctgcctaatggttgatagtgaaaaatatatctgttgtcttcttgatggactgagaatagaggaaattgcagtagagagtgggttaccacaagattgctatcatgctggttttgttacaatggattcaatatttggatgcgagctatagagtgtggacagcacaccaagatgctcttctttcattgttctctcactgcaggtctcatcaagtccaactaccggcactccgatggtagcttttaatcttttcaattcaatcaaagtatagagctgcagtattatgaatgatgagcttgtgtctggtggtgatgacagccatggccagaataatgaaagtgagcctaaacaggatttaacaaaggttccttaaacttccaagaaa

SEQ ID NO: 122618 - DNA, 456 bp, Zea Mays
ctcttcttctttaatttccagttcacctggttcagcttctatttctgcatgatgggcttgtccccggttgacagataggggctgactctttcctgccgaagcttgaccttgcttcatcggagccggtgtggtgtaggcagccctgttgggacagtagttggcgtagtgtcccggttgtccacacttgaagcatgccctattggtggttgtgttaggagcaacgggtcccgctggggtgcttgcttgtgggggagtagttggtgcccgttgagtttgttgcccggaactgccactagctggtgtacttggagtggtagtatagcgaggacgggaactacttccagcctgcccttggttggtcgcccttcttttctctccaaatatactcctcttgttttctacagcaatagctttgtcaagtagcctttggaaggatgggaatgtgtgtgataccag

SEQ ID NO: 122619 - DNA, 551 bp, Zea Mays
gtcttactattaacgtgacctggatgctgtaacacacctgctaattgtttactgagaaaaggcaaccatgtctagcaatcaaggacacatttgtcctatcaacgacatacatgttagtttttatgtgctggaccttgtcaaagttttccattcttgactagttgcttgaattaatacatcccttttatctattttttaggtgattcatatataactggtctcttgagtgaccttgagaaagctttgcaggtattttagaatccaattgttttatatgttgtgtactttctctttccgtgtgcatcattgctttatcgcaggctcgcggtccatcaaaaaggaagcatgtgcatggatgtaaccttgttagagcaaagaagttgtacggctaccattcgtccgaggagctttttatgaagatctatctgtatccactgtttactcgtttttataaacccaacattgcttctacaaatgtgtatattgtcaacattacttgtcacatcttttctatctcatatcgagcggatttagaaattttgaatatagct

SEQ ID NO: 122620 - DNA, 370 bp, Zea Mays
catggcaactggggggtatggctaggctaaacgggaaccacgtgacatgggagcttgcatctcacctccaacttaggcactctccaacggctcaccctcgctgaggggccggcaataccgtgtacgggtgcgccttccagccttctaactagggtagggataataaaacaaattctatataatagagccggacgcaaaggacgccttcgagccggtccacgtaagcaaaaaattatacgtcgtttgatttgatttgtacggctccagccatccccaccgccacctcgtccgatttgatttgtatgtctgcagacattccgtggcatgccgtctctcttatctcccatctctacctgctcccatctctgcc

SEQ ID NO: 122621 - DNA, 306 bp, Zea Mays
gtttccttagacatttagtccgaggtagaagttcttgtgttaattaagaccaataatggacccatgttttggaatggtggtgcaatatggggtaccttggaagttttgtttggagtggacgaattcgaggacgaattctttttaaggggggtagagtgtaatatcccaaaataaatgttgccaaaggtaatcttcggtgtgtggatatgggaaaagggttgtgggccgttggatgctaagtcagagtcatctgtggtgtcgcttcttttctcccgcaaagaaaccctagtggtggccttttccccc

SEQ ID NO: 122622 - DNA, 501 bp, Zea Mays
gcggggtcgtggcgagcagtggcgtcgtcgagggcttggcatcgctgcgggcgaggccaggagcagagctgggagaggtggtgcagtggtggtgcggcgatgaggtgagagaggagaagcgttgggccaggggcagagctgggcgaggtgggaatggcggtggtgcggtgctgatgtgagggaggagaggcgtcgacactgttcttcggattttgagaagctcatgatcgttgtttggtggccgttggaaaaagatcggacggctgagaacataggagatgacgtggaccctctcacaggcctgctttgcgcttagctttgaattgctagcctggatggatgcatggtttcgttgcaacttgcaagtggccgccgaggcgccgagaagctagcaagcaggtcgagcacatgggatgtggcagtcagtggtgtcgtgtggcatcttcgatcgagttccagagtcgtccaatgcaacacactgcgtgggcctccatatatacc

SEQ ID NO: 122623 - DNA, 786 bp, Zea Mays
gagcctgtcacttcaattagagtttaaccacttgaagtgttgatgctgggagaaccctccaacaaggacgagaagatgtcttcaggggttaagtataaagagatggtgacatcgggagcaagggtgtcatcgagagagaagtataaggaaaagaaggaataatcccaaggctcgtccaagtcgcataagaaagacgacaagaagaagaagcaaatgaagaaggtggtgtactacgaggctgattcttcatctcctttgacacccggtgccgaatcaacatcatccaagcgccaagagcgcaaaccggttaaccaaagccctttcgtcatcctcgcattccaaaacgcactcaatttttttagttccattaggcaaaccaccacaatttgatggtgaagattattcttggtgaagtgtgaaaatgagaagtcatttatcttcacattaccctagcatttgggacgttgttgagtttgtaatgcagattttcaagatcagggatgaggacaacgattcagacgaggccacccaaatcatgtacttcaactcgcaagaaaccacaatattacttgtttccttgtgtagggatgagtacaacaaggttcacgagttgcaaaccatgaaagaaagttgagacaccatcaagacggctcatgatggcgccaagataatctgaatcacaagaatggagttcattaagggtgagctcagaagattcgccatcaaccaaggagaaggaccacaagacatgtacaatcggctcaaagccttggtgactcaaatccg

SEQ ID NO: 122624 - DNA, 576 bp, Zea Mays
tggaaccacccacagctaacacatcgactgcaaatggatcaccttgtacctagccattgtatgatatgccgatgaatacgtttgtagaaccaccacatccaccgccgcctagcacgcgactgactctgaacatgggcgaatcgtctgaggatcatcacagattgtctagctacatcacagaccatccaacacattttgtcggaccgtctgacgcatttcaccggactttccaatcatacacaggcccatgcgcaaaccacctaggtggtgacatatatagtcggactatccaggtataccctcgtattgttcggccccgtcgtagactgactagcccattacgtcggaccgttcgggtacactatgcagaaccaggggctgcacggtatgcacagtttcacacctatcacagcactacgatacccccaccaacatattataatcatggcaagccaccttatgtgcccatggccaaatattcttcggccaccagagagcccgtgagatatagacaggaaggagtggcattaataggacacctaacacacattttgtacatccccgagagaaaagttg

SEQ ID NO: 122625 - DNA, 541 bp, Zea Mays
gtttataatggctcgggcagaatgtccctacatccaattcttcggcggctcgcgctaccaacaccgttgttgctcaatgctcgtagtaggggttacaagcggacgagttagggaagaagagctcccaagtctcttatgtgtgggtggatctaaagactatagcactagagtcctaaactaaggcttggatgtcgtggtggcccacgcctcggctctagcctccgggtcttctggtctcgttaagcgtgtgctgcctgtgttagtcatcttccatccctagtcttccctttgtctcgtgaccatcctcctccttttatgggccaaggtgggggtccatcaccggtagcatcatcgagaaggagctactatgttgtggtaaaaccgagtgttttaccttggtgaagccgcgttgtccgtatgcgtcttggtcacccgatcgtctcgactcgtgttcattacggcggatggtgtgggtgccatggggccctggcgccatcattactgcttctataccatgctaacccttggccttcatagccta

SEQ ID NO: 122626 - DNA, 525 bp, Zea Mays
ctcgggttgggggtagatgagcgcgccttggtcgttcgtttcctactggacggacaagatgagaagtaaaaatacaggttcagccattgatcggctgacgtgtggccaggggggaagaaagcgtttggtccgttggatttcaatccatcggctaagatcagatcgggaggaaggtgattgtgaccgtagattccggattgagcggatctgacgtcgacgtcgtagcacataacttcgttgttcattagatccggtgcgtccgatcgggatcccgtgacccagattcaatctcgtttcattaaaccacggccattgatcatggatccaatggctaatattgcataccggtttgattaagataacagtttgacctggacccctagattctaatcgtgcggccatgatataaggatacccctttggctgtgtggattcgcataagaacccctgctctttttgtaaatgaacccgccgtcctagaactatagcagagagtttaatataggcccctggtatttgtagttt

SEQ ID NO: 122627 - DNA, 393 bp, Zea Mays
taccagaatccatgtctgatatccacaatgtgtttcatgtgtcccagctccgcaaatgcctgaaagtaccagaaagtcacatcgaaaaagagacaatctagattcagaaagatcttcagtaccaagaaaagccaataaagattcttgactcagtagttcgaaagacccgcaactcagaagtgagactctgtaaagtttagtggagcagagaaggagaagaggaagctacctgggaaagtgaggactctttgaggagggaatacccttaccttttctcgagccctgtctgaatctcgagggcaagattcctttaagtggggtaggtttgtaacatcccaaaatttcaacccgaggtttggaaccctaatctcctaacccttttttatctctccc

SEQ ID NO: 122628 - DNA, 314 bp, Zea Mays
cctccgagtaatgatcttggaatacaaggggactgcgggttcattcctaagattttagggattcttttgcaaatccgggcgatcgaaggggtaagctccatcggtagtcgttcaatatgaaacctatgctctagattagatcggatcaatatgcactcaccgcaccatgcaagccgtcagattctggatctaaggccgcacatctgccacaccacccatgaatcggatccatcggatcatgaaccaacgaataacatttaacgcgatgaaggggtatcaattatctaatctagctcgcccatgaatgatccaac

SEQ ID NO: 122629 - DNA, 446 bp, Zea Mays
tgcattcatttataactgagtcattcatggcaaaacataacataccaaagtaccctcttaagatgatgttacatattagttcatcgggaggtgacatgaaggccacacattcatgcctccatgttaatctcaatattcaaggaatagattttccagtcaacctagtggtcttaggatccaacaatattgatgtgattcttggatgcaactggttgaaaagttgtgatggagtgatacaatgtgccaaaggaacaattatgttgacaagtccacaaggtgaaagaatccaagttagcacagacatgtcaacaaatgcaaaaggagagacaatggtaaatcacttggaagaaaagcccctggaaaatatcaaggtagtgtgtgaatacctagacgtattcccggaggaactaccaggcatgccacgtgatcgtgatatagagttttct

SEQ ID NO: 122630 - DNA, 539 bp, Zea Mays
acgaagaggaggaagaagcgcggcacgagcctgctgggcaggatcgtgttcaggaagagagccgaaggcggctcctagaccgactgcggtgacctgcatcgatgcggtggatgcgttctgctgcctacaggtttggcatggatccggccaagtgtgctgtcacgttgtgaccagtggtttttttccccttcttcagcgtgttctgtttatgctgctcccagtgagcgagcgatctttttgggcgacatatgttccggtcttgcagagccttgtggctgatggcgacgggttctgtcgcatggtgtgagctacgtgtcttcttttgtttatggacagacttttctctgtgtatttatgaacatcttggctgtgcaaaaatgtttatttattggaaggggacaggttcttttgtccttacagtaacagtgcgtgggtacagtactgtacagtactagaacagatttgtgtgttttctgagatgttcttgcacttgcctaaactgctggactataggcatgtttggttcgttgcctcaattg

SEQ ID NO: 122631 - DNA, 540 bp, Zea Mays
ggcacatgactcaaccttaagactttttcgatgaagcccattttctggtaggtctaggtgaaaaggatgtttaggctgcttcctgcatcgatgaggacttggtgcaaccttgcatctccgactgttgtgatgagaactagggggtaccggcttgggtgtggtacgcgatcagggtgatatgatctatcgatggtgaggggcacctctaaccatcgtaggaaactagcagtagctagctccaatgcaaagacttcccgcgtttctagcttctgcttcctcttggattcgtaggattcgggtcctctgatgatgtacataatatcttggtttgggcacaggtgttttcttaccatgacctcttttgagtcacctttcttgctcctttctggcttgggtgctttaggtggtggttcttttagtagcctttagacaaactattggatgtgtcgatattcctatgtggtgtggtttcactataaatattagatgcactgtccatccatgatagatttgtatttattattgtattcctcccgatta

SEQ ID NO: 122632 - DNA, 345 bp, Zea Mays
caggaggtggctgaggcaagggttctgttagcagaagttggattgttgaaagaaaggggtttgactgcagaagctatggtcgttgactttgttttcaagaacattcagccattgaaagacagagcatatccagcctatttgtaccgaggcttggctgattcaacccgggtgaccaacagaagaattcctactgtggacttggtgaaccggctcgagatgatgctcagaggcaaggtgtcgaacatcgacgctcctgttgcatattcggcctggaatttgcctccctcccaggcctttatcattttcctgtcaaatcctcctgctgatgatagcggtttgggcctt

SEQ ID NO: 122633 - DNA, 571 bp, Zea Mays
tcgtgactcgagtcaaagtatccaaaatcttgatggggtactcagcataagttagatcctcttgaacactaaggtcttccattggtagttgttcctcaggtaccctgaggcacttctttagctgagatacatgaaatacatcatgtacatctgataggtgatcgggtagcttcagttgatatgcaacttctcccactcgctttaagatcaagaaaggtccaatgaagcgcggggacaactttcctttaactttaaatctcctcataccccgaagtggtgaaaccttgaggtacacatgatttctttcctcaaaatccagtggtcttcttctattatccgcgtagctcttttgccaggttcgagccaccctcaaattctctcgaattatacgaacttgttcttccgcctcttgaataagctcaggcccaaagaactgtctttctccagtctgatcccaatatagtggagtcctgcattttctaccatacaaagcctcaaatggtgacatcttcaaactagcctggtagctattattataagaaaactcagcatagggtaagctcttctccca

SEQ ID NO: 122634 - DNA, 501 bp, Zea Mays
ggacgttttcctctataagaaccttggcgctgtctgcgttggcggatacgtgctctagcaccttgaaagcaacctcttttgcttccaagcttcccttctcaacgatgccaccaaacaaggaacccactcttcgcgcaaccaagatcttcaagtcgttagacaagacaatcttttctagagaggatgccatcagcagctgcgtttctggagaacctgatcaatttgcagaagatatattgtaaactatcactcctgccatcatattcatatataaacaaacttactaagatagtatcatattgatcactataatactgatagggaaggagatggcaccttcaataagcaggttaagtagaggttccagcctgccattttcagccatctgcacggcatttttctcacacctgtccaaattctcaagtgtcttctcagccttctcagctattgttgggttgtcagctttgcttccacacaccttgcacagtataagcacggctc

SEQ ID NO: 122635 - DNA, 986 bp, Zea Mays
atccagccttggcttcaaagaagctacagccccttattacaatactcaacacgccatattgaccaagttattgcagaaaacaaagtttgataaaaagcacctaactacaaatcctattggtgaacctccatccatacttgctgaaaatctccatgacgacattctccatcttcagacacgttgtctttatcaactctttatcatcttcagccttctgcatttgactccagaagttgtttctctgtaaattacctgcataaatgttttcattggagatttatcaaaaaccacatcatttctactaagccatattgcccaacaaatcgccgatgcacccactagtagaagttgtttcaatctacccccaatcccattaagccaggaactgaacatatgcattgtgttctgtggtggtttcaacccaaaacatatttcgactaaaccccatataaaacgtgcatttttgcactgaagaaacaaatgttgaattgactcattagctaggcaccaaacacattgcttgttaccattccaatttcgtttagcaagattatctttagtagagttactcccttatacatataccacatgaaaatcttaatctttaagggcatcttaagcttccaaatcattgtgtttctttcaaccaccccattattaataacagcaagatacatagaatgaactgtaaagattctattagctttcaaattccatttaaatgtatccttattatcattgagctgaatatgcattatactcataaccagctcattccaatttcgaagatcattatcttgcaatgaccttctaaaagatacatttaactggacagaactgagaacagaagctacaatatcattcttcttcctcactatattatataatgacgggtatttttgctgaaaagaaacattaccaatccaaacatcttcccaaaaccggatttgttgaccattgtttaaacgaaaggatctgaatctcat

SEQ ID NO: 122636 - DNA, 415 bp, Zea Mays
gaagttgtcagtgaagatgatcaattgttcaatgctatgaagatctccgtatatcttttcttatgctgaaagactacagagtcagatctgatatgtgtgtggtttctatagatgtctgagaacaggcgcagaggtgcaaggtgtgctcagccagaacagcagacaccctaggaggatgcaacccaacaacagcagttgccaccgccaccccgatgacagtcgagcagatgttcatgatgcaaactcaggcagtttagtcaattggtcagaccttagcagcgatgcagcaggtgcagcagcagccacccccacctcagcctccagtgcaagttcagatgtcacaagtgcccagagacaagcgggcagaattcgtgaggggccatccccctgtctttacccactctgctgatcccat

SEQ ID NO: 122637 - DNA, 1356 bp, Zea Mays
aggctagtaaccctttccggcgaagatttagagcactcctgtaacattgacaatctccgcaaattttttgtttaaccatcagggcccgcgcgcccttgtaatccagcaaacaatggtattccggtccgcactcttttcctcccggggggtgaagtttttaacgaggcggagccatgtaatataccagcaaaaagcccccgcaaaaacaaaaaatcaaatgcaacgcgtcgaaaaagaccgcttcgacagtcttcggcattcgaccactccgaagtcaccgcgacaggtagcgtgcgagagtccgcgcaaaagacgcctaagggtgcagccggaataagcacaacaagtgtgttaatcgaagtcttttatcaaaaagacactccgtgcaaaagacgcctaacggtgcagccggaataagcacaagtgcgtcaatcgaagtcttttttaaaaaagacactccgcgcaaaagacgcctaagggtgcagccggacaagcacaataagcgcgtcatcgaagtcttttccgaacagacactccgtgcaaaagtcgcctaagggtgccgccggataagcgcaacaagtacgtcaatcgacactcctcgcaaaaagtcgcctacgggtgcagccggatcagcacaggcgtgcgaaaacggccaacaggccacattacaatacaagttgcagttacatacacacagcgagggcaccatatactacatcggctcaaccttcggggtgatacccaactctctataattaaacaacattattctcaattcctcaccctcaaaaagatttcgcagatccccctctcctatgctcgtcccaatcggcggggacaacagttctcgtttaccaatccggtctacacgaagacggtctcgctccatcccaatacgacggcgcctaccacttcgcgaaacctcacccacgctatgctttgacaccacccctcgccgcctgtacttggtcctcgcactaggaagatcagccgcctcgccaacctccacacgcggcgaggactccgccacggccacatctaatgcagcaaaataattcaagccttcatccgagaactcttcagtccaggaaaacgaactcccagattcaccatcagactcaaaacactcagatccagaaccatacaaattatcatcggcaggcacaacggttgcggccgccacaaaattagtattgccagtagcggttgcttgcgcaggcccaaacgtcggaacctgcgcagccaccggggttcagtatcacaaaaacaaaagtttacaccgaaagccctagcccctattccgccacctgcgaaggcccgaccgacgccgctgggtcctcggtagctggttcgccc

SEQ ID NO: 122638 - DNA, 362 bp, Zea Mays
tgtgtctcccgtgcttggaattttggatagagacatgtggtggcacgtagggctggtgatttggagagcacaaagaggaagctttttggaaacaccacggttggcagaggttctacttgagtcgtcgctggaagggagatgaggcaagatgcatatgcaatggggcggcagtttgagtcaagcagcaacactaggccatggaaacacacatgctaccatatctaatctagatggactttgttattctcagtgcccccacatgtttttgaccaatggtctttttttctaataaaacataaatgaaatgatatatctgcgcggaacgttgtgttttcagaattgtttcgctaacctagtattgc

SEQ ID NO: 122639 - DNA, 422 bp, Zea Mays
cttggtttttaacgggagtaatgaagatgatttcttatactgtctcccggacaacaaagaaatatccgtttgccaggtaggtaaaagcatgggattcccgaagctggaagacggcctttcaattttgtcgaaggatgatcttgctgacagcctagcatacaacagtataaaggtatagaagttaactttgaacttgagaatgaagtattttatttgtcgtactcaattctttcctcctcttgcagggcttaattcttagtaatgtccttagggcgcagaataatattgaagacgaaagttgtacaatggctctgaataaccttcgttcagaggtgattgagttgaggaacgaaggactggaaaaaggcaaaatcttagtttccttggtagataaagtaaaagaagacgaagctaatttcaaa

SEQ ID NO: 122640 - DNA, 542 bp, Zea Mays
caatcatttaaagtgttcctttatgggcgtaacattgatggtgttgtgtcagcttcgatggaaagttcccagaaggagtcaaagaagatggggcctgcatggttggggaccctcaaagagttgtgcgagacttgctagggtctagaatatcccccgcgaaggctatgatgcctttgagtgttgcggctatgacctcgttcacgaagggtgtctcgacagggccactgacaggcagcaccgcgggtgccttcgttcgtagtggatgttgaaatacccgttgacgattacctcattgacaccatcatcagtgtggcgaagaaagggactacgacaaccggtagacctggcgagcttgtccttacgtgcttttgtttatgtcacggccgtgcctagggggtcgatgagggcgcccgatctaggcccccactccccaagggccccaccccatacacggacatcatacaggaggttaggactcgagaggaacatgggccgtcacatgttgcacactcggacgtagaacgttgtacgtgatatacaaa

SEQ ID NO: 122641 - DNA, 877 bp, Zea Mays
cgagcctgctcggacgccataagagcctgctactgcgtaagagtctgaaggattgcagccacaatagggtcaaccgcaggaggggcagcaggaacaacactggaactcccggcctcatgatcatgtgagcagggaggcggaggcggtggcggaatcccaaaatcatcatcatcatcaggaactgttgtgccctgagtctcgaactgatggaaagttgtatcctctgcctgagtgtcaatcactagattaggtgtcggcatggggtcctcaggggttggacgataggagccaaagaggaggcgagaggcctcaagagtgccctggaactgtggtggccagatcagctatgcgaagatgtggcagagatagtgagcatatggcaactaacgccgggcacgaagtccatccaatatcgtgtcctcgatctcacatataaggaagtcaacaacatcaaactctgaatgcgagatcagggcaccaaggagccagagatggatatgagtggtggcctccctataacccatctggggcagtagcgtccgtctcatgagctgatataagtacttggccgctatagtgaaatctgccggagaacgtcgcgacccatctgagaagggcggtcggaacaaagccgcgacgtgagctatagctggagcaactccgtcgtgagggcgacaaggaggatcagaggtaccgtagcacaagatgtgaagatgagtcgatgactcgttgaatccaaacagctggtgaatctggctagcatgtagagtaacatcctctcgctcaaagcggaacctcatccactggtgatcggggtcgatccatactgaagcatagaaaactcggacccactcctcaacatatctaccgctggtag

SEQ ID NO: 122642 - DNA, 339 bp, Zea Mays
ttacctctccatatcagttcacgttggtggcatctatggctcgatctctctctctgtattggcggtagtgtttggcttctcaggatgattatggctctatgggtcaggagcatgcaccaggctcctaatatactccgacgtattgaccagggaatacatatagctggcgtaacaaccaacagctggatacgggagggcggctgggtgatccgtgtttgacgcatgagtctgttacatccgtagaataggagattctattgaatccagacccacaagcagcgacctaggaagcttagatcacgttcgtgaggacttctgatggcttgcatgctgacctca

SEQ ID NO: 122643 - DNA, 395 bp, Zea Mays
cttcgttgccagctgccccaagaagggttaatcagagtctggcccgctcgaccatcactctagttggcacaagggtaagtactcctctggcaagtacaagtctaagggaggattcggcaaggaggcactcaagaagaagtacctttagaaggcaaagacaaggagcatgccttccttgcctccctcagcgacctcgactatgactccgatgatgttgtatcttcctcgagcgatgaggagacggagaggcgggtcgaggacaagctgaatgggatgtgcttcattgctgacaccgcaggaggcttctgcaccatggcacttggtgaggacgcggtcggcaccggtgactccaaagacattggcaacgacaccacttctgaggtactacctttcgc

SEQ ID NO: 122644 - DNA, 352 bp, Zea Mays
attctaacatctagattccagcaaaaatatgtcttagagaataaccctctgttaaaaaggggttgtagttcaaaacaccctctctgccctaataattttatatagagaaaaccacttactttttaaaccccaaaatttgagacagagaattataccccaaattttgagacagagaatttttggaaatttattaagttaacttgtagttcaaacccacattaaaggcataaaaggaatagaaggaaagaagggaaaaataaacctcgctccgataagttcaactagaaatcttattaaattctcactaagacattaaaaggaaatcagtggaacaccaaaatgaacttaccac

SEQ ID NO: 122645 - DNA, 366 bp, Zea Mays
gtcataaaattagaaggcataattaatgcattttagtgggaacgggtaccagatgctcacaatatgttctcgtccagttcagttgtgccagctacagtatacatatgtgttactttctataaaaaagaatatttctgactgtagtgcttttctgcaacgtcataaagttagaaggcatagtatatgatttgacattgttaattgtccacaaaaaaatagtgcttttctttctcagatctgactgtattgtcatatgcacgctgttgtatgccatcttaatttgtgttgcctgggaactaatagtaatgtttctaaatctgttttctttttatagcaaccaaatttttttgctcttattgctttacc

SEQ ID NO: 122646 - DNA, 299 bp, Zea Mays
ttatcaaaagacaaatccgtgcaaaagtcgcctaagggtgcaaccggacagtcacaacacaggaattccccatctcattcaacgaagggtaaccgaccacattacacaaacaataaacagatagtcacaggttacatacacacagcgagaggccaccaatcctaccgcacgaataaatacaatcgcattttttcctctctttattgcgagccgagggagggcagcgctttcactcactactgcaagacaagagcgagggtaccaaacatactacatcggctcagccttcgggataatgc

SEQ ID NO: 122647 - DNA, 691 bp, Zea Mays
ctaagtgccatgtcttgtttcgttggagggcagatatttcagattccatagcatttttccaattttgatcaaccaacgccacttggagtgatgcaggttccacagatgttacaacagagagaccatatgggatagtaccatcgatatagactttgggtttgcgaatacctgcttgcagccgggtgcgcggaccagagatcggtggaggtgaattgtgagcagatattgttggatctagtccttgcaactgcaaacgttctggcatggaagtagtcgctgatgtgtcgtcaacatcggttggacctggggcaacctcggttattggctcgttgtcgggcggggtaggaagcagcgaaacacttggcgaccgaggatttgctgctagaggttgagacagttctggtatgggggccctgaacgtcgctgcaaacaagtttgccagagccaaaaccgaggagggttgcacgcctaggatcctttgcggctgcaaaatagggtgagtccacatatttggaacaatgacggtagaatccgtatgaatattaacaacaggctcatccgtagggacccgagaggaattatcaggtaaaagtaaaatatcagcagaatatctagccccagccgtgggattaagttcagcaaaaggaaatccatgttcgtcaaagataacatcccttaaaatgtagatgcg

SEQ ID NO: 122648 - DNA, 532 bp, Zea Mays
ggatttccacccaaggaaccaagcttcagtagaccagctggacccaccccgtcacggttcagtcagcagagtcagagctttttccatgccccctcagttgcaagcaaccaacccccgacgaatgatgttggcactgcggagatcccagtcacttcaagaacaattgtccccagctgaagccaccaggacccgcctactccaactcggtgaatggccccaagaatacctcggcatccgcccccaaggtgccctcctccatcagtcagcagaacaagacccagtatcaaggaagggcacgagtgaatcacgtcgatgcccaggaggctcagcaagctccgggagtagtgcttggtgagttccttgttgaatttactcccgctaccgtactttttgattctggagcatcccactctttcatagccactagttttgtggaaaagcatggcattccctctactcctctagagattcccttggtcactcgaaccccagggtcagaccttctatgccagctcaaatgctcccaagtcag

SEQ ID NO: 122649 - DNA, 498 bp, Zea Mays
tagttcgaatcttgagatcaatatgttgcaaaaccctatggaaaaaaaatgtaaggaatatcttattgtgacgaaccactttgtttttggtagctccgttaaaaactcttgtggagaaaaattggagatacggcatactattaatttatctaaaaaccatgtaggaaaatcgcgagaaaatatgttgatatactgttaaaaactctataaaaacaatgaaaaagatcaggagtaattgctacataatattttgggaataagaagacaggctgtaattggtgtgagtttctctcaaccactagatgatgcacgctatgagaaaagccgctttgcaacatattgaagagttggtgtatttgacccaaatatagaccaccagctagatggagaagcgccgcaatcaactattctccttgcggatcactcaagaattctccaaccttcctcctgaaaatctcatactcctggagcgctatcgcagctgtgtttgcatcaaac

SEQ ID NO: 122650 - DNA, 669 bp, Zea Mays
gccttcgccaagatatattgccttcattggaagaagaaggttattggtagcatggttgcacaatttagtacatgcacgttcacactgaggactgagaagacttcgggtgaagttgtggagctcgtggtgtgcgctaagaataagtggggtaactggtgggattttttgttttatgtgatgttggaggatgccgaggggtctagggttacctccatccatcccgttctcgcactgctacatcaccttctcgcagtttaaactaaagaaaggggatacgaacgaagatgcccttcggcgcgcgtctaagacgagcaacaatcgtgacttggtggaagagttcattgcttgcggatgtgggtgaggtggagttgtgctcgatgccctttttgaataatcagatggtgctgagtcccgccttcgccatcgaactgcgtggtgaagattgttggaaaatattcaacaaggacaaagatgacgaggagataggacattcgaggttcgaatgtcaagttgaatcgtgtgtttgagctgaacatcctttgctatgatctatatcttgagggttctactgacgttggggatgccgaggagcagaaaaaaggtgggttgaagcatggtggggttgatgtaggttgttctaagagtaaatctactttggtgttggtaaga

SEQ ID NO: 122651 - DNA, 450 bp, Zea Mays
tgtatttgacacctggatcatttaaaggaggagagaacgagtcgactgatgaaggtgtaatgggtctctaacggaagaagtaatggacacacaatatgacaactacttcatcttttcatctgcccaaaactcctgccattatttactgcttatagtacacgagccgtaacaaatataagaagagaaaaaaccctcacttcttagcggagttgagatagagagcattcctgtctcaatcatcctttacgtgcacacagagagttgcaagatgaggcctcttggaccattgaccgctaaacacatcatgttagagagcggtgttgtggtttctcgttgaagatctcagtgttggtggacgtgcgagggacaataatacgaacatctatctacatcaattgtagtccaccgctcacaatgttaactcatgtgaatgaagccactaatgacttg

SEQ ID NO: 122652 - DNA, 1395 bp, Zea Mays
gtccatcacagctgtcacagcagcgccaatattttgctcgtaagggaaaactttggagcaccgagccagataagacgtaaaattatcctcgctgggagccatgggaatagggacttttttgtgccactcaccatcggttactttcagcatccgagaagatgcctcccggaggtcgagcaaggtcatgacctcccctggctcaacgcacgtctccaccagctccttaacaaatctgttcgaggcccccacaatagccacgaccttacctttagagcacccctcatccacaccaccacgtgtcgccacactctttctcttgcgatcatcaatatccccagcatcaatagagcctccttaggatacggttcgcaccgaagaccattcaactcgaagacacgattcaacctgacattcgaacctcgtatgtcctaactccttggcatcttagtcttcgtcgaatatttctccataacttttacagcttctgtctccacctcccttacaaaagtcgcagcggctcgaccccgcacctcaatagtgaaaacaggactcaacaccattcgatccttcaaaaaggcatcgggcatagcttcacctcacccacctcccaaccatgggcaagcggccacactgtgtaggcaataaactcttccacaaagtcacgctcgttgctcaccttggaggacgtgacttcacagaatcaagggtgtgacacacgagcggaggcctcggcaggttatggagaaacctaggacttcgcctcgcagtcatccgggcctacttgtaagccccttgcggggtatattttatgcgtccaaattaccgtactccatccactgcaatgacccgttaagtggaatattctgggaatgtagcaggtaaccggggtataacagtacttggggacccaccacccctctcggttacctataaatacccctaccctgtacacagatgagacatgcataacaagacactacatttctctacctactgtctcgttgtatacctgaaccctcttgtctcctgagtattgggcccacctgtccacgtgtcaggatagataaaacaggggtaaagtaatgtccaaccaagatgagttgtttactttaccttcatgtttatcatcttttgttcaacctttttacctgctcttcgagaagaggtaattagatggtggagtagaagattgattcatttgtgttgccttgttttttatatccttcaagtatcaaaaacaagtgaccagcaaggactttgtaggcacgacggaaaacccgatgtacgacgacatgtcagagcctccatcggcgtcggtgcggcgatccatgcacctcgccgctgcaagccgcccctctaggatccgtgcattgagacgcgccactagggcatccg

SEQ ID NO: 122653 - DNA, 351 bp, Zea Mays
gcaggttctgatggcggatttcttcatggctgaccagctaaccagccaggtaaactatgctcagccgtacactaggcatgcatggagagctagccattgtacttattactttgcggctcaaaatgtcttgttttgcagatcccactgctaagacacctcgagttcacggggtgctacttcatggctaaaactttcagaactcacgcgtatggaagttgtaccagcggctcccaattcaagaacctggcatacgtgctctctttcctgccatactactggtgagcaatgcaggtagactgacattgaacgaatctagcagatctatctgctcatcagactaactaaaatggt

SEQ ID NO: 122654 - DNA, 330 bp, Zea Mays
tttttttaagtctgtgtccacttgatcgatagcatattgggagaggtgattaaacttgttgagatgctgcattatagaatctcccccttgcttcagacatatgaactcctccagcttcatctgtagcacccctttcggaacataatgttccctaaatgcttgtttgaattccacccacgtgacatgatgtcctacaggctgaatggctgaaaaatttgcccaccaagtgcttacaggacccctcaaatgttgggcggcgaataagggcttctgtgtttcagtacatcggattaatccgaatttttgctccataacccgcacctattcatc

SEQ ID NO: 122655 - DNA, 772 bp, Zea Mays
gcagtatcacaacaacttcggttgttatggattcattgctcgttctaatgcaagctactcggttccaacatttcggaaaaggtggcccgggtcctggatagaggaatggttttatgttaagaataatctgattgaaagggaggacataaaggggattatccaacgccccatctggtctcgcttcggccttcaaaggccgaccgtggcgattgaaaatgatgtcgaagcatgtcaaaaggctttcagcaatgtctatgctttcatttgtacaagagacatgatccaagagcacatagcctacagggtatggccacttgtggataactaggagatgccgaaggagactgctaccgggtccagtcaaggtggattaattcgtttgaaatataccttcagatatagagaccagtttgacgaaccaaatgacgactgactgaaatgtattgaggctactagcgacgagttacttggggcatatactagagctgaagatgatactttgtcctcagccttcgggggtcggggcaagaaaaggttgaacagggtttttgatgcaattggttttatatatcctgattattgctatccctcacgaaagcagggaaaaaagaggaaaactaccactttggccatctctgttgtgccaaagtgcaaaaagatcaaggttctgacacatcggccgaggtatattgagacgaccacagtgccaaaatttggcgacgagacatctttcgctgccgaagtggaacaagctgctcccgccgctcggagc

SEQ ID NO: 122656 - DNA, 382 bp, Zea Mays
ttcaggggagccacatatgccttgaaatgcaatgctcgagggcatagttccacattaaaaattgtgatgattccacaagcggaatttaaaactagtctataatggtgccacacaagtctacaatccggcagagaccaatccatgcaatccggcagagaccaatccacacaagtctacacttcaggtggctggagcatgagatcagggccaaggccctgacggtcacccgtctcagattgagaagcggcagaagcgacagatcgacaagcgacagatcagggccaagagctaccattcttggcgagggagcctgctaggatgtggtatgtggttgggaaggggagcacaggcgagtcacccttgccactggatctagaactcc

SEQ ID NO: 122657 - DNA, 521 bp, Zea Mays
gctttctctttttccttttattttctaattcacatttccatttttgtttcttttccttttgaacaatttatttagtagataatctaggtgctggaaaataaaatctaagtgaggtgttcataatcaaacaaagtgtatgcatatgatgggaagaatctaagggagttttgggatagataataagaagggggggttagattagggtttcaaacctgggttagaatttgggatgttacaaacctactccacttaaaggaatctcaccctcgagattcggacggggcttgagagaaggtaagggtattccttcctcagagagtcctcactttcccaggtggcttcctcttctccatctctgctccactgaaccttacagagtctcacttctgagttgcgggtccttcggactgctgagtcgagaatctttattggcttctctcggtactggagatccttttgaatctaaattgcctttgcctcgatgtggttctctggtacttgcaggcatttgcggagctggg

SEQ ID NO: 122658 - DNA, 402 bp, Zea Mays
aagcaagcgctgcagacgggtcacaccacgggtgtggatactttagtcactatgtcgatctcccgacgaagccccgctagcttagcttcccgccctactcagaaataaaagaatggaggtctgaacatccctaggaaacaaggagagctaaagagcatggtgagaagcttactcaatgcacgagcctccatggtggttaaccgagcttggaggcccacgatacgagcatcagacgttctcacaaccaagcgagacgcttttaactagccccgcagctcagccattgccagcaacgtaggtcgaggatctggctccgcagggtggcacatgacaggcggaggtgggagaagcaacaaccctcctgcacaagatgacacgatcagggtgggggccagcaccaac

SEQ ID NO: 122659 - DNA, 572 bp, Zea Mays
atggtcacatgtttttggtgcatgaaaaactagttcttttggtagcctggtagttgtaaagtaacgtacatttagagacaaacgcgtggcttatgtgctgttgtctactcaaactttattgtgtggttaaccaacaatatctgtgatgcggtcatgtactcatgtgggcaattgttgctgtgttctcaatttctcatattatccggtggatgtaactttaagcctgtaagctgcaacttgtgaacttatggcttgtactcatgtgactatgtgaggcaatggcgtgagagtgatttgaactgctgtcttgtactcttgctactgttttttacctaacttagttaatatgtatcgggtggttgccgggtatgggttacccgtcaagtaacaatacccactcgggtacgggtatgggtaaacatttctacccgcaactgggtatgggtattgtgtcgggtacatttttttgtcgcgggtgcgggtatggaaagacaatacccggcgggtacgtacccgttgccatctctaatatggacgtggcccaatggtacaccttgctaggcaaaccgtcg

SEQ ID NO: 122660 - DNA, 635 bp, Zea Mays
ccaaatcaaacctaagccgatcatccacagatcgacggcgcacaacggttaggatgaaacggtacgcgatcttctaatccgagccgtcgatcaacagacggacgacccagatgtctcccccaattcctttgtcgagctaaggtggcgccgcccagggcacacggcggaccatcgccggatttgtgcgattcggccacacgccgcccgagtttccaatccaaccaagccacactaagccaaaggtagggcgaacccgatagagcccccaatttaatgtttgactgatgttaccgccctggccacggagtagagcgggtccgcggcggcgcatagattccggtgagtaattccaggggttcttgtaagctaacttcaattcgagttggtgcaacacgatgggggtatgaagtacaagcgagggatgggatgtttaccacggttttcgctgcgccaagcttcggccacggtgaggtgtggccatggtgaccgcccaacccggtgaggaatcctcggttgattcgagcttcgctttatgccgcggcgatgccaattttgtccacgaggatgccacgaaagtggtagggcagtcgcacgcccccaatttaccacgtcggtgaagaacggctgcaacagag

SEQ ID NO: 122661 - DNA, 385 bp, Zea Mays
cacaatcaacggaacttcaagatattcaatgaaattgcatagttccatccttcatacctttgccttttacctgaatgccatgggattcattctttttaggtagtgtggagtgagagcacctgttgtcaccaattgagggctccttatgctcatgcatctcatagctcgagagggtgcattagagacacatcatggatttcttgttttggtatacacagagtaccaagacaaagtaatcatgtgaaatggactaaacaaaactatcatgcttgcacataggttaatacataatcattaaaaaccacacaacatgatttacaaaaagatacaggtttagccacatacaccaagagagttaatcatggtaaatatatcaaatgaaaag

SEQ ID NO: 122662 - DNA, 276 bp, Zea Mays
ataatatatcttctaccctggtagatctacctaactcaaactagtctagtctagttgtatccaatccaaccttgaccctacctaatctaatctaaaggaagctcgattatgccatagtacacacattctatgtcaacactcaccaaatagctaaaacatgatgtacacttgtttttataccacacctcctaattgcataaaaagaacttcatgtgttcaaaaaatatatatatactggaatttcataaagataaggtcagcttgagatgcttaact

SEQ ID NO: 122663 - DNA, 494 bp, Zea Mays
gtcaatacgtcgactttaattagcttcaggccttttaattaagtctaggaaacgactgtctattttttagtttctaacaacccgcttttctccacagccaaattgtcaaacaccaatgttcagatgttaagtgtacctttaatccgtgcgctgctgccattgcagttgttaagtgtacctttaatcctcatgttcagatgttaacaatacgataatttggacatttaagcatatagacttcagacactgatatttaataatctggtcagtcccgtgatgcactagttggttgtctgtatttatctgttttctttttttaatcagaatctacaatctcataatctacgtattcaaacacctagattctacccatcagcttctgtccacagcagccgaaccaaatacctagattttaaccatcagcttctccccacagccagtttttttccatagccaactttttagaaaagctctttagaaaaacgccgaaccaa

SEQ ID NO: 122664 - DNA, 346 bp, Zea Mays
acgttcaaggaccactaacaagttcataacctctaatgagaccgaccctgtgcgtattgaggtgagtgcgcagttgcaacaagtcatcgatgatggatcaccagaaggcagtgacctccatttgtttgccactcacctgttcacttcgaaaaagtatagagacatatttgctgcactgaagacctcggaagggaggaacgcttggttgcgccatgcattcgagatagatgttaaaaagtccacctagatgctgctggtccgacaacagaggcttatgttcagtattatgttagttgtgtctgctttatcagtcatgtcgtgtcagttttcgttcgtatcgttttcg

SEQ ID NO: 122665 - DNA, 343 bp, Zea Mays
accgaaagaccagcctgcgacaccaaatcctccaaaacaaacaaatagctagcgccagagtcaaaaagagcatgggccacaaacgaatcaactgaaatcgtacctatcaccacgtctccttgctctctgccatccgcagcgggtagcacataagctccggaaatacccacagaagaggaagctcctggagtgaaattaacagaagaaccccactgagccaccgggtgaggcagacgcggagctccaaactgagatggcataggagtagtcggtgcaggagtaggcgcagccagatactgaggaaaaccctacaccgactcgaattgagaagtcccaagcacat

SEQ ID NO: 122666 - DNA, 609 bp, Zea Mays
atttatttttggaccattatttctatattaatcaattggattttcgttaagaaagaaattctactaaacatccaaaaatcgaatatgagcaaacaaaaattattctagatgcaaataaaaatcaaaaattaggaagaaaatttattaccattaataatctaaatgcattattttagttgatggtttttatagtgttatatgaaagcactttggttttttgaaattaagcaatccagcttttccccgagcctgttggccaagatctttgtcatgaacttagcaaaactgtgaatcaggctaatggggcgaaaatcagcagcaccatgagcgccctccctttttggcaacaatgtgataaaggcagagttgaggaggcgaaggtttctgaagtgaaggatgaaagatcacatttggccacagtttctgaagacaactctgaaatccaacaagattccccgagcattttgtctactgtagacttactccatgcgtgagctgggatgccacaaagttccacatccaccaaaactggcaaggaaacaccagtggaatgagcaaaccgtgaccatttcttgaacttcaactcaaaatccgggcagtgaagcactc

SEQ ID NO: 122667 - DNA, 517 bp, Zea Mays
aaaaattacagccccaaattagatagtttcatttggtgctaaaataacacctattttataattataagaacaattagtggaaaattagaagtaaacaagggcatgcatgtttcttgaaatacttaagtgaattgatataaattgaaacttaataactaagtcataatgatttaaacttaagacattggtgatagtgtctctccatgattttaattgatgattgagttgagtgctattgtgctagcaaactgtaattcctgcacgtacagtttttgtcgtgcggttaatctagtaatgtaaagtgtgttttctgtagatatgtgatatataaaagttataattaaattgtatatctagctcttccaaaaatttcatgagctaaggattaatggtttagaagttatacttttcacaaattcagtaccggaatctgtccaatttctgaacagatttcagagattgcaatggttgcttaagttaattttgaaataagttattggtggtcacaagaaagttg

SEQ ID NO: 122668 - DNA, 433 bp, Zea Mays
agccccttcccataccctcttggaaatgggaggatatttgcatggactttattgtgggattgcccaacacctcccggcaccatgattctatttgggtcatcatggatagattaaccaagacagctcatttcttgccagtacataccacccacaagacagagaagtatgcagagatctatattgatcaaatagtgcgtttgcatggaattccaatgactattgtatctgatagaggagcactgtttgtggcacgtttttggtagcagctccaaaagtcacttggaaccactgtgattagaagctcagcgtaccatcctcagacagatggtcagacggagagagtgaatcaaattctcaaggacatgttgcgagcatgtgtgctacactatggtaagaattgggataagtgcctttccttggcggagttctcgta

SEQ ID NO: 122669 - DNA, 516 bp, Zea Mays
tacacactaaacgacaagtttagtttggcttttgtgcgttttatagaatattgaggcattacactatatgggcattccttcccctaatgccgaaatgttctaaaagcatacagataaaatcctcaaccacaatcatcgagttgtggccattgtatgctattgtggtgatttatttagaaaatcttacgcacattatagataggggttttatgcagtgagttgtggacttagattaatgtagcggcatgaatactacatatttgtccttcaacatgaagggttagtctcaacatccagtgagacacgcaacaacaagttgcttcgtggttacaattctgcaaacttattgtttttattaccaaatacacagccaatcattaagatttagactaacatgcacaacactatttttatccataagggtccttcaggggctaatgcataccattcgtcgtttggagccattagttgacttcaggtcaacaagtaaaatgaccatcaaggtttagcgctcac

SEQ ID NO: 122670 - DNA, 389 bp, Zea Mays
ccaggggcctaactgttaagtcttcctatagtggagggatggcaggttagtttgtaataacccgaggggctccactgtaaaatagccacaatgaaggggtactgatcagttctggccgttggatcttacatcaagggccatgattagatcggggaaggttatgaactggtatgcgttcactgccttaggatcaaagatcgatggcccgaaatcgtccacgcattgttgtcatccgaaccacatgtcaggcgatcaacgacacatattctatgcatcgaaggtgtatcgctatcttctgatccgggccgtccacacattgatctagggttgagcgaccgtcttccttctctggcgtgcccgacggcggcgcaaccaccggcaacctagcc

SEQ ID NO: 122671 - DNA, 606 bp, Zea Mays
agcgttctgggttggttgtgcaagaagagactatcaccgaaggtgctgctgatgtcgaagctgaaccgactatcgccgaagctgatagtgaaaatgaagatgaatatgatgacaatatcttaagcccaagcaaacccagtcatattgaatttgggaaatccacggttaaggcagatgatctaattttaatgaaaaaactaggatactttggagcgaatgatgacggactggttcgttttgctggggaagaggtgattccagagccaagatatgatgaagtcatagtctttaaaagcttattcagggtaggacttcggttcccctttacgagatgattggtgaggttttgaagaaattcaaaatttacctacatcagctgaccccaatgccattgttagacttagtgtgtacatttgtgctcttcggagccaaggaaagagtgccaatgccgaagggttctatcgggtgcacgaacttcattattagacgaaggctagggccgatggtctgcacaaaaactttgggtgctataactttgcataccgaaaagacaccaaggctcctgtgatcgggtaccgcactaaatgggcaaccggttgaacaaat

SEQ ID NO: 122672 - DNA, 402 bp, Zea Mays
gttcgtatgattcgggagaacttgagggtagcacagactcagcagaagagctatgctgataaccagagaagaccactagaattcgaagagggtgaccacgtgtacctcaaggtatcaccaattcgtggaatgagaaggttcaaagttaagggcaagttatcccctcgctttattggacccttcagaatctttaggcgagttggggagatggcctaccagctcgagctaccagatcatctgtctgatgtacatgatgtattccacgtatctcaacttaagaagtgtctccgtgtcccagaggaacatttaccaatggaagaacttagtgtgcaaggagatctaacttacacggagcatcctatcaagatcatcgacactctgactcgggttacaagaaataaa

SEQ ID NO: 122673 - DNA, 1071 bp, Zea Mays
cggatgggtagctagcaaagcgacggtccctttctccttccgtccacggacacggaccaaccgtcgtcgtcaaagcctcgttgcttgtcacacactggctcgttttcttgtgcctgaaatggtgctatcgccgtgctctaacatgcactttggtcaccaccggtgccactgcccctgagcaagtacgtgaccaaaatcctctgtccttttcttttttacaacaaaaagctctctgatgcggagatcgctagattacgtccaccgaaacaaagggacatgatgccagatagtatagcatcccgtccaccgaaaatccgagagagtagagtgtagaggccatttgtatgacacggcaccgcactagcagcagaggcgtccaaacgcagtagcaccgcagcaccattgtccatcgcactgactttgtgcctgctgggccagatctccaaatacagagacatgtagaacacagtacacaccacagtggcttcccctgcgagcccagcacgactgcaccacgagccatgggcgcttgcttttgaccgggagagagagagagagtccagtccagagctcgaaagctgtttgctgcgtttggcaagctgtagcactgggcttttgacgtccctgtctgaacaccttcaaattcgagcagataggataggagtacagtaaaaaaaagaaaaggctgtgtattttcaccgttctcttttttttcgcactaaaggctacgtaaaggagaaaaggacgatcatggagaatcctctcttggcttggcgagcagagcaggcacctggcccgtcgtccattgacatggcgaggagatcgatgtggactgcagagaaagattgtgttgtgtgccgctgccctgcctttttcttttctagtgctgcgtgtttcaggacagcagagactgactgctgagtaagctatatgtgtttgtgtgccccggagccgagccggacccctcaacgtagcaggtagcacgcagaggcttttgctttgcccttttgcctgactcggcgatttgactgctcctgtcacactcaacacgtacacggtcgtcgcggtctg

SEQ ID NO: 122674 - DNA, 277 bp, Zea Mays
gagagtttggtgcgccgagtagggttggtatatgcaggtgattggtcgttgtgcagcgtaggtacagggtcgttggttgtttgaatcgtacttcgtgagcagttagtgctgttgatcggttcaggatctcgtatctggtagaaggcacggatgaggcatgcagactcttcgaggcctcatgcatggtagactggtagacgtctgtagctaaagacagactggtatggttttactgaacttgaaaaggttgttagctagctaatcaatcgatgttagt

SEQ ID NO: 122675 - DNA, 480 bp, Zea Mays
ctgagttagtcggtatgatcctagctgggccacttctgtgactatgaagggtccttcccatggtggtgatatcttgtggcgtccttctcccgattgtatgcggcggagcacgagatctactgcaaacgcttgggggcgtatcacattgttggggtagcgcctcagggtctgctagtatctggccgactgaataacgacatttagccatttctcctctagcacatcaatttctttgagtcgggttgcttctgcttttgcaatgtttttgaaggtaagcctgggtgccctgaaagcaaggtctgctagcaacactgcttccgacccatagaccatgaagaaaggtgtatttccatgcagggctcggttgggttgagtccgtaagctccaaaccatgtagggcggttctttgattcatttccctgtaaacttctcgtttttgtcaaagaccctgtgtaacaccctgaatttggtggtataaaa

SEQ ID NO: 122676 - DNA, 356 bp, Zea Mays
cccaaagcttgtcagaacgatgatgctccagcactcctttcagtatgctcaccttgaggcccttcaacacaagaaagacctcgtagtcctcgcacaatatctggatgaagcaaatcaccttgaatcatgcaactacaaaacagatgcaagcagcacggcaactcgatcagttagttacctcaatgagaagatgtccaggctgctgattaagctcttaaactcttagatctagtttggaaaccccattttactaagggattttcatttctccatcaaagttcttgaccacccaggatatcagaaattgacaattcattcaccctcaacaagtgatcttcttttttaacttgtgtttc

SEQ ID NO: 122677 - DNA, 461 bp, Zea Mays
gtggaagatgccttaagcagaaaggcccagtgcaattgtataagcatagatacaagagttaccaccctgtgcgatgagttgtgcaagctgaacctggaagttgttccttccggtgaattaagttatatctcggtggaacccacattgcaagaacaaatagtcagggtgcagattgaggataaaggtgttcaggttatcaaggaaatgatcaagcaacaggcagaaaaatacaagtgtttccggcaggacagcaagggaattctatggtttggagatcgattggttgttcccaaggacccagagctcagaaggaagatactagatgaagctcacctttccaaattctccatgcaccctggtagcaacaagatgtaccatgatctcagaactttatattggtggaccagaatgaagagggaaattgccaagtacgtatccgagtgtgacacctgctagagaat

SEQ ID NO: 122678 - DNA, 606 bp, Zea Mays
gtttcgagtctactgattttgtgatgcactcttgtagtaggttgagtatatttgatttagggattgcatctaggtagttgaggcgtcgaggtagggtagggtcatcgtcgtcgcaaatgtcgagtactcgttcttgcacatccatatagttggagattgttaggctgcatgaagtggtaaggcagcaaaatgagtaccagagggcacaaagtaatcaccaaatgcagcaaaatcaatattatgcatatctactcatgtagcagtaggcttttcttgaagtaagttttactactatcttatttaaaacaattagaaacttgtatgtttcataattcctaaatactgatatgcatctcattcatagcaagtggcacaacaaacgaacatccagatgctagcccttgggatgctacctctagcttttggaccactgcctccacctcctccacactttacttggcctcctccataacaggtattatcatacacattcattcgtcctttttaaccctatttaatctacaaaacttgcgcaacaaacaaacatccagatgatagcccttgggatgctacctctagctttcggaccactgcctccacctcctc

SEQ ID NO: 122679 - DNA, 711 bp, Zea Mays
ggaaacatcataactaattctgctggccatggcatgaaaactaaataaaaaatataaatactttctatatgtctcttgtgctaaagaaaaattgataattaagccttcatacctaaaagtaaaggcggagaccacgaatttcctagagatactttaagatgacatctgtggtccggctcaccccctgccgatgccctttataaatttcatggttcttacatatgcttatactaagtggagacacatgttgtccatacagaacaacatatttgcaaaaaaatattgcctagattatctatttgtgtgcgagcttctcaaaggaccgcatatagccaataggaatgaataatgttggagagtttacctccaaggcataaacatggatcattctataccccatgtgcatacacaaaatgaactcattgggtccttgcttaaaagaataaaattcattaccatgctatttctacaagataacacacttccaactagtttttgggacacacaattttgcatgttgcagaattgattcaatataaaccatatgcttaccactttgctttttcccaccagttaaggcgtagtcaacaaccaatggtttccaatctatgtaaatttggttgtgctatatatgtgttgatatcatgaccctaggtacatccgtagaacctcgtaggaagttggtgatatatgttggttataaatctctat

SEQ ID NO: 122680 - DNA, 1136 bp, Zea Mays
tcaaaagttggcttgagcctcgagggcttgtgggggatagatatctctgggtcctcacgaacatagaaacatgtcatgggccgcctaacgggcctccctacggcttgccttgtgagataggtcactgggccacagccaggccgggcgagctcgatccaggcagacgaagatcggacgtccgggttatgcacagaccaaagcactaatatcttgggcaaagaggttccgcacacttgaaggcctaaacactcagcattaactcggccgaagaattgatcgaactccgtataagtaggaatacataccgtgataaaggagcaattaggtagaatagatagtgatcacaacttgtaaagggacaaccctttggtcacctatataaggtcgagggtgtacccctactaaaacatctcataccatctctgatcaaccacatcttagcaccaccacaaagatcattagcccacttgtagcatccacgagctactagattggctggagaactcatcttccaccacccatagctcatttgtaatctgtatacctaagtgcaattccattacacatcctcaacaggaagtagggtgttacgcattctagctccccgaacatgtataaatccttgtgcaaatttgacatgcccttgcatgtaccatcgagtcatagtcaacgacgacgtcctactcaaaagcatcatgtagtgaactccgtggtgtgtggtcaggtcataaacaccgacagaagaagctttggctataggtgctaacacatgaagtagaagtggatgagaagaatctagaagatgggccagtgtaacacgagggagaaaaagacaacattacccttagaagaattgtagttcgtaagtataggatttgtgggcatgcttgtaatttcttaggaaactatatcccatggcaatgcaatgcattagggcaatttttttaggacaaggagaactggaatctctctgcccccgaaggtgttttactttatcttcgtgctcttatttgtaaagctgaaagtactcatgtattcattaataacgaaatagaatggaattaaattggatgttcaaaacggatcgtcgtataatgttttaatgtccaaacattttcagttattgtccatctttc

SEQ ID NO: 122681 - DNA, 512 bp, Zea Mays
taagatacctgagtggaaatgggaagagattggcattgacttcattgtgggattaccccgcacatctgctgggtatgactctatatgggtgattgtggacaggctaactaaagtagcccactttattccagtgaagaccatgtactgaggagccaagctagaagagttgtacatggcacggattgtctgcctacatggcgtgcctaagaagattgtgtcagaccggggatcacagtttacttctcggtattggaagaagttgcacgagtccttggatacaagattgaattttagttcggcctaccatccccaaactgatgggcagaccgagaggagcaaccaagtgctagaggatatgttaagagcttgtgctcttaaacatggtggtagttgggataggagtttaccttttgcggagttctcctacaataacagctaccaggtcagtttgaagatgtccccgtttaaggctctatatggcagaaagtgcaggactccactgtattgggatc

SEQ ID NO: 122682 - DNA, 331 bp, Zea Mays
ctcggcatttaataaggccagtccactctgctgtcaggcggcgacctgtccattccactggcaagcagtgtgccgcctcagcatttaatgagacctgtccaatccgctggcaggtggcatgcctgtccattccattggcaggcggcacgcccatgctgccacatgtgctatactcatcatcactcgtacgtaccaagaaagctaccgttgtgtatcaacactgcgcaggcagcagacatctgggcgccagaagatctctcaggcgtcacctgcattagttgctccatgtatttcttccattatgtccctgggcccacatgtcggggctcag

SEQ ID NO: 122683 - DNA, 271 bp, Zea Mays
gccaatcacatgatgagatcaattgttatataagtcttaaaatttgggtattacattttggaaaagactacatgagtccatggataccaagctaaactttagttcagcttatcatctgcaaacggatgggcaaacagaaagaacaaaccaagtgttggaagatatgctaagagcttgcactctaaagcatggaagctgagataaaagtttgccttatgaaaaattatcatacaacaataattaccaggcaagtctaaaaatggcaccattt

SEQ ID NO: 122684 - DNA, 532 bp, Zea Mays
taaatgttcgagcttcagattcttctcttgcatcgcgttgctgctgaatttggcgctgcccttcaggctgctggttgtgggatgaagttagagccagtaccggtggttgtggtaaggcccacgcaactggagagtgacttaccgaatccactaaaactgtaggttgtgaaaatggctgttgattgcccacatactctagaatgtatggggaataacacgaactaatatgtaggacttgcttcagctgattctgtcgtgcttcggcctcagctatctccttttgcttctgtattgtaacttggtaggttctagttgtgtgccccttatcctctccatagaacaagcaaaatagccttcttggttgtgagttgaatcttcctccgaagcttcgtacccctctgcctcttggggctggcggtctgaaggagctttgttgcgtcccagttgactgggaactatgctagtgtccttggttgtgattgcctctgtattcactttgactaggatcgtgtattgttctaacatgccttgg

SEQ ID NO: 122685 - DNA, 311 bp, Zea Mays
aagatttggagaaatctggacctgaacttgctctgtcaggtcggctgatggtgactcccatggtacagtgcttgaacaagatcagaacaccagcgcatctcaccaccaacgatcccccgccatgattcgtgccctcgccggcgtgattcgcgattggatcaactggataacacttgaagtcatgtaaagatcatcaccgtggataagttctggccagtaaagtatttcggccaccgtacagagcttgccacggtggaacccgataagcatgccggtgaccgccgctttccggctttgtgccgtgtgtctag

SEQ ID NO: 122686 - DNA, 387 bp, Zea Mays
attcgcgtgtttttcaggaaatgacactaacacacctattcttcattccgagtgtttgttgggcattgtctttgttggtcactcttgacttctgaaagatatcaaaaataaggcaacacaatgaattattcttaagctcctccctttaattaacccatcttcgaagatcaattaaagtgaaaagataagaaccatggacaaataacaatacaaaacgataatgaaacataacagattaaataagttactcatcttggtatgttattacttttcctcattctttataatataacaaatgattaaaatatgtcttcggcttcacaaacattaatgcgaaggtatgcagagaacacaactttgtaggcgaagcaaatcagtcctccctga

SEQ ID NO: 122687 - DNA, 358 bp, Zea Mays
ggaacgttgtgtataaggtatctccgcacagtaaattatctattccaaacgatgaagattataacttagacccggacacatgacggagagttcttccaagaagatgggctagaagggcgatttgagatagacttaaccgaagctatcggaatggaagtagatattgaaatggttgttgatgaggaggatgatgaggtgcaaaatgacttagtaatacttgaaggcaatgacgttaatgacgaaattgcgccttcagatggtgtggactataaaatggttgatagtgatgatgagacttatgatccggctaaccccgacacatatgaagattatttttaatcgatgtaatgctatatat

SEQ ID NO: 122688 - DNA, 668 bp, Zea Mays
aacagataggcgggactgaaggcaagctcaatttaaagggactcaccacgacggtggtcaatttgaccgcggaatcacggtggcggcgatagcccgaggagctccacgttagctcaacggtgtccttaggtcaataacgtggcggacttaccacgaaccccatacggtggttcaacacaagggcctccaagcagctccgtggatggccaaagcgtccgatggcttgctacggcggcggtgaatgaagcacggtgaggacacctgatgcccatggctagagcggtaactcggtcactgaatctgaactagagatcttttaccacttcatcgatccacgtctcaatggcaccaatcgtggggtgagctcgattcacggcgaaggaatgtcggtggcggacgcactgaactcgatcttattcagtttactgttcatatcatactgagttcagagtgcctcacaaagcaaattgagagtcatttttcttcgattttcattcaacaaaccaccaagtcgactatagcaaagttgttcccctatataccagctcctattttgttacagagatcttggtcaagcattcactggatcgagcacaatttgattccaagggtgatccaataccactgtcagtttttgtgtcaaaccgatactcgattgacagtccaac

SEQ ID NO: 122689 - DNA, 288 bp, Zea Mays
catggctccatgcatgtacgttttaggagagggcatggaggttagcggcgagacccggatttaccgtggaggagatttactttactcgatcggggtcaagtcaaatgctttcgccagctataaatggaggggtgatgtgcaggtgaaggccatgtgtggaaggccctgctgagctcaagattgctgatgcgatacggacatacggtcagatcaggtggtctggtctggttcattcaagccctcactcggtgaccccgtactggaaagatggagatatgtttgtttggt

SEQ ID NO: 122690 - DNA, 483 bp, Zea Mays
taatctatatatttcatagctcgtcgtaagaacgattccgtagcctccgaatgattttagtattgctcgatgtttccttcaggaggggggctgtagggtcgtaacctagcagcatggcacaatctgatagctctattgacaaatgttactttggatgaggctacacaatttgctgcgttatgctgggcgatatgacttagtagaaatgatatagtctttgaaaaaatgttcgcctaaaatatatatgcatgtgctttacaggggggaagcactggtcccggttttgggcgcagttgtagtggcgtgacgaggaaaaggaagccccttgagcaacgcatgtcgaaccttgaagacgatagttatgcatatcttcacatcctctggatgacatttttgttataggattgctttgttctaatttttggtttccagtcttcgcctagtttgcaccctgcgtggtcgcttcggatgttcttttttaat

SEQ ID NO: 122691 - DNA, 361 bp, Zea Mays
aaaccagctgtaagtcttcgatgaagtttttcgagttctccgttttgattaccacatcatctacgtaggcttccacacgcttgccccagtgatcggctaagcatgtttgaatggctctctgataagtcgctccagcgtttttgaggccgaacgacatggaggtatagcagaaagcaccgaacggagtgatgaacgctgttttttcctcgtctttctttgccaagctaatctgatgatatccatagtagcaatccaggaaagacagcacagaacatccagcagtggagtctaccacctgatctatccttgggagcccgaagggatcctttggacaatgtttgttgagatccgtatagtcgac

SEQ ID NO: 122692 - DNA, 340 bp, Zea Mays
ctgtgatggagcaagagcacaacataaaggtaaggggtgagcaacaagtagcatttagtctccagccgagaagaagattatggtgaacaatctctacaaggccaacaataagatgaatcaatcaaaattatacgaacacttcaccaagttactaaattagtcaatcaaagatataaataatgatataaatagggtccataggtttactaaaaaatgaccaaacatgcaaagctagatgatgaagaaaatgaggaagagatggaggaggagaatgcgttttatttttttacgaactgtgtaattttaatttttgtattttatttactttgtttgaattatg

SEQ ID NO: 122693 - DNA, 475 bp, Zea Mays
gtggagctggtggccgagcgcttccagcgagatcctgctgataacgagtaatctaatctgcagagacaaggcaagggtcccgctggagtgcggcttgtaataatatttggttttgtaagatactttttgagaactattaataaacaactcttatctgtatgccatttgtcatttgtcctcgttgtgtgtggtgtcatcaacttcttcctggtatttggcccccctgagatgtagtctcgacgtgtcgaggctggataccagtatacctaagaaagaattggtgacctggcacctaggaggtaggctcgactaggacctggacctgtacacagctttggctaggaagttttagtagcgcacccataggacccaccaactggtatcttttatcgtttgattcatgcaacaggacctgcaggatttagcctgggaagccaagtcgtatacccggaccccctgaatcacagctccttgt

SEQ ID NO: 122694 - DNA, 835 bp, Zea Mays
cttaagacatttccgacttaagacgatttctccgttagtagggtatagtagtcaccctaagttatgtaagtgtgagcatgtcgcatcgacttaaggcgtttccgactaaagccgattgctccattagtagggtatagtagtcaccctaagttatgtaagcgtgagcatgtcgcaccgatttaaggcatttccgatttaagccgattgctccgttagtagggtatagtgctcaccctaagttatgtaagcgtgatcatgtcgcaccgacttaaggcgtttctgacttaagtcgattgctcagttagtagggtatagtagtcatgctaagtcatgtaagtgtgaaggtatgttgtgccggttttaattcatttctgacttaagtcgattgttgatcgagagttcgtatgtggtagaacatagaagctttattgataatgagacctttcgcttacaaagtacaacttgtccactagagtttcaaggtactgcaacgaatagaatttcctgaggtgttcaatattccatgaattccccactttggttccatccatttgggtaagtcactaggatccgggccgagtaacttctgcaatgatgaatggtccttcccatgggggtgacagtttgtgtcgcccttctcctgtcagcactcggcggaggactaggtcttctactgcgaaggatcgatgtcgcactgctttgtcatggtagcgcctcagagtttgctagtatatggccgactgaatgacaacattcaggcgttcttcctctaatatatcaatatcttccagcctagttgcttctgcctcagctatgcttttaaatgttagcctcg

SEQ ID NO: 122695 - DNA, 904 bp, Zea Mays
tcagcctctaatcttcgatcaaacggctgtctctctcacctcggtattttatcagaaaacaccctccacctccctaaaactccctgaatctttaacgaaaaccccctcaagctccctgtacgccagaaacaactctgatccttatttctggccgccgctccatcgtattctggctgccgcaaaactacccaaattcagcaactaaccttcggggaaaaaaactggacaaaaaaaaaaccaaattcgctgaaaactgatgcggcggcgacagcactacagcagtcatgtgagtacgtgacttgaaggttggagctccatccctccattaatggaatcaatcaagtctggacaatgacactcgctccatgcatggcagcatgggatgcatctcccctgaagcaagaaactatggcagcatgggctgctgtaacaagcaggaaactatggcagcaaacaatttcagaaaaatgtatggtatgatatagttgcagcaccaaaatatatcaaaactaattcatgaattttccataaaggatgagcaaaataagaataacacaggataatcgtctattgatgtgcctctgtagtttcattgttggcattcttctgcttccgtggctttttagtctcattatcggcattctttcgcttgcgtggcttgggtagttctttagatttcttaattcttttactccttccctttgaacgaacatcggttggaggatgtatgtcaactttctccgggattttgcaaccaatgaaagtctcatattcttcttgtggggcttgcatattggtaggaacaatttgactgaaagaagcctctaggttcataacacctgatactaagaaattcatgccttcatttgaactctttgctctttgaatcaaatcttcgaccttg

SEQ ID NO: 122696 - DNA, 717 bp, Zea Mays
acttctcgaacaaactgcagacaattcactgagaaagcgagatttgtgctcattttgggcagccccataaacgttaacgaaattccagataaaattttttctctgtggaggacaagggagcgagttaagaattcaccagcttcaaattctctgacatcaaacacctcagaattaaaacccactaaaagacctcccgatctcccattgggaggagaggagaaccaggcaaaaagcttgctaccagcaagcgaggacagaagagagtcattaaaatgttcttttttagtttcttgtaaaccaacgaaatcaattttctcttcccttatgatttctcttaggaaatcaaacttaatgtcgcgacccaaaccctggcaattccaaataaggcctctcatgatttaaaacggatcaggagggaggtcagaacagacagactccccttttttcgtagatgaacctctactttttggggaagccttttttttaatcgtttttttccgatgcttaattttcctaccttttcgtaaaaccatcacatcaagtaagtcctgatcaatattcaggtcagaatcatcatggacactactatccatgtttatgtgatcaacaagggaagggacctccacatttgaggtatttttatttttgcaagcttggaaggccaaaatttttctggaacgttccagatctttgatcaactccaaattatcaataaca

SEQ ID NO: 122697 - DNA, 465 bp, Zea Mays
ttgagacgctaccattggaaactcaactcggacaagtgtgtgttcggaattccggctgagaagctactcggcttcattatcagccatcggggtatcgaagaaaatcctgagaagattggcgccatcttatgaatggaacccccaagatcatagaagaaggtgcaaaagatgatggactgcatggtgtctctgagtcaatccatctcacgatttggcaaaaggggcatgccattgtacaagttgatcaataaggtggaaagattccagtggactcctaaacctcaagaagcatatgaagcagtcaagaagttcttgacgactccccggtcttcaagccatctaaccgagccaccatggatcagccagtcaaatatttcttgctatacattttgtgtacaactcatgtggtaagcaccatgttagtagtcgaacgaagagaagaaggacaactataagcagtccaat

SEQ ID NO: 122698 - DNA, 277 bp, Zea Mays
cgggcgccaagtcttgtctgtctgcactgttcaccagcgacaaaactgatgtcaaaccatgtcaaacgacctcggtttgaattcaaatttttcagggatgtgccttgggtaatttggtccaagtggttttggcgccagcacaagggtgaacacatttgatctttgtgctagggttggttttggggacttagagaattttgaatggctctagtgtgctccccacttggtgaattattttggggtttttgatgggcctttttgtaataccttcttaata

SEQ ID NO: 122699 - DNA, 522 bp, Zea Mays
gatttggggaaatcccaaattagggcgctatggtggacgatcggaggcgagggctggtgctctggctttgtaacaacctagcggagctagcagcgtactcaatttatagtgtccaagagcggtggctccgaattttgaaggggaaagctggcgggtgagtcaccagtgcggagtatcgtggctttcaccggggcaacgtcctaggcgatggacagactacctaaggtggtttactgcaacgtggtaacacttctcagtacgtggcgtttgagcggcaagcggtagactccggcgaggtcatctggaccggccgcagagcaagtgggtacgacgactgggcggcttgatccattccccttttggatcttttacccctccgcgactatcccctcgccagagagcacaaatcgtagcaccaacacgaatcacggcgcgagggtcaccggcggtgaggtgcgatgtatctgcagattttcttcatcactgtaccatcgcgatcgttcatcagaacgcctgagagag

SEQ ID NO: 122700 - DNA, 320 bp, Zea Mays
gacctagggcaaaaaccctagaatttgaaagatacaaaggctcaaagtcgaagcaatcacactgatttcagacttaggctatatagaggtcaagtggtactttttgcaaatagcccccaaaacttagggtttggcttgtaaattcacatatgagtggcccaaatgacttaagatacttatttaacttggtttttgcactttagtccaaaagtggactaattttgcacataggtccctagggtttggatttagggttttccagggttccaattagggtttgtgatatcccaggggtataaaagtgattcaagttcattctt

SEQ ID NO: 122701 - DNA, 328 bp, Zea Mays
cgtaggaggtcatggcacaacctatagctctgttgctaggggagaagcattatcaaaagcaatgttgtcatggtgaaaatcatcataccacatatcatcgtggatgtgatactcctgacgaaggtctctttgttgtggtctatgccctttctcagtatcttgtgtgatttgtcgcatttcctcggctgcttcgtcaaacttgttttgtagcttcgacagccgaagcatcttctcccttctcttttccaccatttgatgtatggccactaggttgctgatctcttggtctagttcttcatcttgtggagttgggctagtggcatttctc

SEQ ID NO: 122702 - DNA, 534 bp, Zea Mays
gtgggttgtggttatatttatagttatgtagctagtaattagtgggttgtggttaggcaataaccatccacagtttatattgaatgtttaattcatgtttgaaatagatggacattttttaagcttatatcatggaggcaatgtggaacaagatccgtatggaaatgccaagttcattgacatgcgacacgtgccggtactattcgatggtagaccctcgttgagtgatgtgtttacaaaggctaaacaaaagctaggttaccatgaagatgatgacattgcggttgacgaagtgcttaatattggtcatccaccaaatgtcataagacgagtcatcccaattgattgtcaactggattgggataattatgttacatcggctatgaagacccatttgcaactcatggaggttgtggtgcgtctggttgtagtagaccgtccccctgaagactttggtcgtgctatcgatgacgtgccaagtgttcctgatgctcaatcttgccccaatttgatctcattaagtcagcgaggaga

SEQ ID NO: 122703 - DNA, 459 bp, Zea Mays
gaggtattccgtgtaaacacactattcgatcaatgtataactctgtatatttctgtgccttgtaggtcgtgtgtaccggttagaggtgagctttcttgattagcctatccacaatgacccatatggaatcatgcctttgggaggtattgggtaagcctacaataaagtccatgctgataccatcccacttccaagagggtataggaagtgtttgcaaggcgcctgctgcttttaggtgacttgctttgattctttggtaggtgtcacacttagacacatattagcaatctcccttttcattcttgtccactagtataggggtttcaggtcatggtacatcttgttacttccacggtggagggaaaaattggagcaatgagcctcgtctagaattttctttctaagttctagatccttaggaacaacaagtcatcattcaaaccataatatgcccttgct

SEQ ID NO: 122704 - DNA, 300 bp, Zea Mays
gtgaactcatttgaccaccttcggcaagctgtgaccttcgtcatgtcgccaaagaagtcttcagggctagggctgcactacagccactggacgtcaaccaagaaacattacgcgaaactagcagccaaaaaaggaaggctacaagcccgacacctcaggaggaggagttggaccaagaaatcatggacctcgaagccattcatcaacaggtctagaggaaaaaaggaaaagatgcttcgtcttgctgatcttcagaagaagattgatgaggctgctgaagaaatgtgtcatctcacccaa

SEQ ID NO: 122705 - DNA, 334 bp, Zea Mays
cttgtgcacttgttgtgtcaaaaaaaatgtgttggtgtctagtagtgcaaaccatatgcaagccatgtttctttccgtaaatccttaatccaaaactttatagcatttatgctgctcatcctagcagatcttgttctcctacctctccttcgtccgaatctggtaatcattttccttgtgaatcatgttgtggcctatcatctgaatcttcagatccttcattgattttgccccgttatctggttatctgctataacccgttctcaagtatcagatgttgatctgcctaaatctctcatttctggtcagtctcataccccgttctccgatgatc

SEQ ID NO: 122706 - DNA, 910 bp, Zea Mays
cccgacggtgaaccgcacagggagccgagctccagcgagctagactggtcggagggagccaagaccggtgctcccgagtgactgacaccgaattgaacccctcccgagcatttcccccaacttaatttcaagaatggcgacctagtttgctctggccacggtgaccgcgcatcccgggaacaattcaaagtgttcccgatgatctacttcggtttagtacaattggttgggccgatgagttataggaacacacaaggatgctggaacaagatcaaagacaacatgatcggacctgtggagagctgcccacggcgagcttggttttgcggcgttcttcgaccgatttggaggtaatcccaaattagggagctgtgggaaacgatcggagctgagagttggtttactggatgcacaattacctagcggaacatgctgaggctccaatttataggatgctcaagcagtggtgatcaatttgaccgaatcgcgttggcggccggaggggaaaaggggctctggcgattgaaacaggtggctttcaccgtggcaagtactccagtgatcaccggacatgcatagcacggttagccgcaacatggtaaagtgtatggacacgcggcggacggcagtggtggattgacggtggtgaaggttatccgatcgacgatgaggaagagggaaagtacggcggctagccggattggtgtccagcccaacggcggtgatgatcttttgaccccgcgacgttatcgagactaagatgggcacgaatcacctcaccggcacgaatttacgtgtgaggtcgtcggcgacggggtgagcggtggatttgatcttcgtcaggttactgtacaatggcaaaccccattcagttggactaacagcctgatttgcagagcaaaaatctccc

SEQ ID NO: 122707 - DNA, 932 bp, Zea Mays
cgagcataagaggcctacaggtttactaaagccattggaaattccaaagtggaagtgggagcatatcatcatggattttgtggtgggcttacctcgttctcctcggggtagggatgctatatgggtggtagtggatcgcttgactaagtctgcgcactttattcccatgaagaccacaaattaagcttcagaattggttcccttgtatacgaaggaagtagtctggcttcacggggtgcctaagtccattatttctgatcaagactccaaatttgtatccaaattctgagagagtcttcacagtgcattgggtaccaagctctcacttagtgtcgcttttcaccctcaaactgatggtcagtcggagcgaacgatccaaaccttggaagatatgttgtgtgcttgtgttctgtcatggaagggtagctgggaggatcatctcgcgttggtcgagtttgcttataacgacaactaccaggctagcatcaagatggcaccatttgaggctttatatggcaggcggtgtatctcccctctgtgctgggagactttaggagagagatccctggttggtcctgattgggttcagccgaaattggagaaggttcgggaaattcatcagaatattttggccgctcagagccgtcagaagagttatgctgatgtgaggaggcaggacttggaatttgtagtgggtgaccaagtccttctcagggtatcacctactaaaggaattgtttggttcggcgtctctggaaagcttagcccaagatacattggaccgttcactatcgtggcccaggtgggcagcttggcttatcgcttgcgattgctggattccatggcaggggtgcacccagtatttcatgtctctatgttgaggaaatttttgcaggatccggaccatcaaatcgagatggaaccgattgttg

SEQ ID NO: 122708 - DNA, 412 bp, Zea Mays
cacctagggtgatggacctagggtgattaacggtccatcacttggacaaccccctggagcgccacatccgccccacccgatcgaaccgcccacctcacctgaaatgacttaatgtttactgaatgacttaatgtagcctacaatgacttaatatttttttaatgacttaagcaataacataagaaatgtatgagaaaacccaaaaaatggatgaaaaacaataataacttaatgttgttggaatgacttaacgatgtgtgaatgcctgaatgaatttgcttggactctaaaatgacttaatgttgtttagacgctagaatgacttaatattgcctagaatgactgaaccgataataaggaatgtctgagtatgcataaaaagatgatgcaatgacttaatgtacgttggaat

SEQ ID NO: 122709 - DNA, 397 bp, Zea Mays
tgaaactgaatgtcgaagtacacgatggctaatagcacgaaaacaattctcttgccaggccaccaacactccacccctagtttcttgggcagggagaaagacaaaggaactgaagtgttgtcccagaatagctacgacatccacagaagtaatatgagcaagtttggtctcttgcaaacagacaactgatggctgacaggcctgaaccacttggtggacaacatcacgacgacatctatcattaagcccacggacatttcaaattaaaaagcagctagcagaagccataacacagagagaaatgcgaccagctacaaccacccaattaagcaaggaggtggttgctgatcgaacacatctcttcctcaggggaaacagtcaacccaaagagagctgc

SEQ ID NO: 122710 - DNA, 573 bp, Zea Mays
ctttatgcggcatagtatcagtgatgcctataggtgaaaccatcttacacaagactagcaattcaagactttgtccattgcaaagtcgtgaggaggtgaatcctgtactacaaggtgtagctcaacccgtatcgggtctgcactgtaaagttggtatatgaaagcgtagagattgagtcaattggtgaccttggctttggtggggattgctggaattaggtccactagtgtgtggcccaattcaataaggaagccaaggtggtgtgtagagatgacatgagactttagtcccatatcgtccatctaggtaggacagaaccagcttatatgtgggagtgttccatactcttcacatgagacaaataaagggctatcgaggctgccacgcgctcgctcgctcgcgtttcacgttttttcgcgttatttatcgcgtgacttgcgacgatgtgcgatcgtgtcatgacgagttctgaacgacagttaaagttttgccttttgtttatttggttatcaaatatcacacctagactgtcacgtcaaccaggagtaatgggcacgcacgttacgtgcgag

SEQ ID NO: 122711 - DNA, 652 bp, Zea Mays
taggagggctcccaaatgcagcaacaacctgaaaattaattttaatttctacctagtatagttgtacgcatacgcttctgcatgtgaaattaaatcctggcattcaaattcaatattcattcaggaggtcgtcgatccagtaatgacgtgtttggattgcagcatcatgtagcccggagttaaatcatccgtcatgggttagagatcagaaggacgaggtcatccgctgctttttcaaggaaccagctcgaccgtcaacttatacctatggagaaagctacgaaggatggcttgatgacggatgggtttacctcgtgacacaaaccaaacagaacatgcaggttcggacttaggttcggatgattctggatgagttcatttgtcaatccaaacaggtcgtaagtctccgacgcagctgcttctacatacatacatgtcatcatgtgaccgaggccgggcaggtatgtgtcacttgtcgtcggttagcagtagcgctacgatcgacggtggcgcggtccctttcgaccggccggcaaagcacgcgtcactgttgcttcggggatgagacgatcagacgaccgatcgacctccgggctccggcatgcagatcaaggtggagatcttttttcttcatgtggggatggagcacgct

SEQ ID NO: 122712 - DNA, 471 bp, Zea Mays
cttgtttcgtggtgctgtgagttgaggtgtttgatcttcttatacattcatctggtgtggatgtttcaccattgaattaaaatgaattgttgaagttggtaaaggttgtgcttagtgcatattatgccttcataaaagagtgtcgttttaagacattgatgctgttgtatggctgcatccaatttcgatgttgtgaaaccgtagtgttgattgcatctatgacttggtttgagcttcattacatgttggtgcatgcttgatgtcaggttgtgtagtttccttagacaattagtccaaggtagaagttcatgtgttaattaagaccaacaatggacccatgttttggaatggtggtgctatatggggtaccttggatgttttgtttggagtggacgaattctaggatgaattctttttaaggggggtagagtgtaatatcccaaaaaaaatgttgccaaaggttgatcttcg

SEQ ID NO: 122713 - DNA, 578 bp, Zea Mays
ttatatgagtaattgtaaacacgtcagatcgccttaagtcgttgctgacttcagtcgattgcttctgttaatagggcgtagtggtcacctagaattgcgtaggcgcgagcgcgttgcaccggcttaagtcgctgctgactttagccgattgctctgttagcggggtatagtggtcaccccgagttaagtaagcgcgagcatgttgcaccgccttaagtcgttgccgacttaagccgattgctccgttagcagggcatagtggtcaccccgagttaagtaagcgcgagcatgttgcaccgccttaagtcgttgctgacttaagccgattgctccgttagcagggcatagtggtcaccccgagttaagtaagcgcgagcatgttgcactgccttaagtcgttgccgacttaagccgattgctccgttagcagggcatagtggtcaccccgagttaagtaagcgcgagcatgttgcaccgctttaagtcgttgccgacttaagccgattgctccgttggcagggcatagtggtcaccccgagttaagtaagcgcgagcatgttgcaccgccttaagtcgtt

SEQ ID NO: 122714 - DNA, 551 bp, Zea Mays
gtctctacatgttcttgcatccccacaggctaaccctaggcaacccctcgttcttagaattaggcaggtgcattcctccacccagctagagtttacctccgataggggtgaataggcgaatcctgaaattttacacttaataacaaaaacgttgatcccaattatgtgttagaactagaagtaatataataagagtagggggatgagttcttcttgcacatgttctttttgaatgtagaactaacttgatagcaatgtaagagatttaattcaagatcaaggcaagagaactttagagaaaacaaatcgcaaataagcaaacacaaagaacacaacgatttgtttaccagaattaggtttccagacaaaacatacgtctccgttgaggtgtcgctaaggaccttcaaccctctcaagtgactccaaagatcgagcttgagtcctctcacttttcttaattgagacaccaaagtctccatgaggtacttcacatgtcgaagcctctcgctggcctttacaatggatgggagtcaaaactccaagcataagaa

SEQ ID NO: 122715 - DNA, 385 bp, Zea Mays
caactcgaaccacaagggacaagtcaaccttgtgatcgcagagcgtcggcgggtggaaatcgtgagcgtaggtgcaccgacgtctacgaatcggtcgcgaatacggtgagatgaagtttcgtgcgaccttttcggtggttgacaggtggatagggccttgactgtgagcttgtatatttaggatctgagagttggagccctatattagtttgttctaaatttataaaataggacctctcttggaagctattttctaatcaagaatcctatattttaaaatagaatccgatttcagaccattgttagagttgctcttacgcagggaggaaaaaatccagtagcttattttattttaccgtacctcctattccactccttgtttcta

SEQ ID NO: 122716 - DNA, 575 bp, Zea Mays
gttagggatgatgttgtgaccgttgatcagatattggacgactcaaattaggtcctcgtgtacccattcgcttgattgattctggatcattggatcaggatccggtggacaggaatacgtaccccttcatcattgataccaagcccctgattcgggatcctgcggccacgatatcatactgattcacgttatgatctgggccattaagtgtagatcagacggttgagatcattgaataccccttcgctgttgcaatatcgctaaagaccctgggttcttttatatgtaacctgcagtccatgcctataggagaaccattacaactaagttcgttttatttcaaactagacccccgagcttatgtaaatagtgtccacagcccatcaaatctaggaacttctaaactaaataaagaaaatgattttcagtgtaaaaaataattatagaaaacccaggaaattcataactagttcgttttaaccctgattttacccgttcaagttgcgttagcttcataatgaaatggtctacgctttggtaacactgtttcatcatgtaacatatataactaattt

SEQ ID NO: 122717 - DNA, 536 bp, Zea Mays
cgaccggatccggcgttctcccatggccacccaaggtggtaccgctcgtgatcgcggcggggaactcgtcggtgacgaagacggctaggtttctgggtgtcttagggcgattggtgtggtctagggaggtcagggagggtccatggaatctagtggcaagggccaaatcacagtaggagcaccgaaggtcggagatccacggtgaggcgacaaggcggcgacggtagtagctctaacgagcaattgcgcatgacagagtgcaagggagggaaatggaggggcaggggaagttccttacctcaaggcgagactcggggtcccctcgaaggctacaacggcacgatggcagcttggagtgatggcggcgactccaggactgcaccagggaagaggttaagcgaggatagggcgaagagaccaggaaaaaaaagaaactgaggtgggttcctagtgcatcgcactcaggcagagcgcaccatggcaaaggcgacgacaagagctcagcgacgacgacgtaacgacctttgcgatgatag

SEQ ID NO: 122718 - DNA, 686 bp, Zea Mays
cttttattaaaaagacactccgtgcaaaagtcgcctaagggtgcggccggaacagcacaagtgcgtcaatcgaagtcttttattaaagacgctccgtgcaaaagacgcccaagggtgcagacggaacaacacaacaagtgcgttaatcaaagtcttttattgaaaagacactccacgcaaaagtcacctacaggtgcagccggaccaacacgggcgtgcgaaaacggccaacatgccacattacaatacaagacacagttacatacacacagcgagggcaccatatactacattggctcaaccttcgggatgatacccatctccctataattgaacaaaattatcctcaattcctcaccctcaaaaagattttgcagatccccctcacctatgctcaccccaatcgacgaggacaacaattctcgcttaccagtccgatctactcgaagacggccacactccatccccatacgacggcgcctaccacttcgcgaaccctcacccacactgtgtttcgacaccacccttcgtcgtctatactcagtactcgcactaggaagatcggccgcttcgccaacctccacccgcgacaaagactccgctgcggccacacctaacgcagcaaaataatccaagccttcatccgaggactcctccgttcaagaaaacaaactcctagagtcacc

SEQ ID NO: 122719 - DNA, 572 bp, Zea Mays
tagtagggtacagtgatcaccctgagttgtgtaagcgtgagcatgtcgcaccgacttaaggcgttttcgacttaagccgattgcttcgttagtagggtataatgatcaccctgagtgtgtcgtgctgatttcgagttgtgcccgacctaggtcagttgttgatcaagaacttgtatgccttggaaaatggaagctttattgataatgaaaccttctgcttacaaagtacaacttgtcctcaagagttttgaggcattgctaggggaagaatttcctgaggtgttcaatattccatgaattccccacttcagtgttgtccatctgggtgagccggtaggatcccggtcatgtgacctctgcaacgatgaatggtccttcctatagtggtgacagtttgtgccgtccctcccctgtcagcactcggtgaaggaccaaatctcccactgtgaaggatcgatgttgcactgctttgtcgtggtagagcctcggggtctgctggtttctggccgactgaattaccacatttatccgttcttcctccagtacatcgatgtcttcctgcctagttgctt

SEQ ID NO: 122720 - DNA, 356 bp, Zea Mays
tcatttgtatctagttagtgtaccttttacacagatgatagccaccaattgcaacctacgatgcgccagctttctgcacctgaacccttgagtccaagaaccagtgcagtgaacggcttggtcaaggcaaggctaacagttgtgttgacggcggaaatgcatgtcttgccatagaacatgagcttagcatctacattactgctcccctctactttgactggcttagattgtaggatggatggtcctgacgcctctcaacccttggtttcccacataacttgcactgaagggtggtcgttctccttttccaggaatgctaggacttctggtttctatataaatcgatccaacatgac

SEQ ID NO: 122721 - DNA, 444 bp, Zea Mays
cagtccgtggagcgacaggacttcatccgtgaggaggtctggaagctgttgcatgctggcttcatcgaagaggttcatcaccccgtatggctggccaacccagtcatcgtgccaaaggcaaacgggaagcttcggatgtgcatcgactacaccagcctgaataaggcatgtccaaaggacccgtatccactgttgtgtatagatcatatcgtagactctacctcggggtgtgaccttttgtccttcttgggcgcctactctggtttccatcaaatccggatggctaaggaggataggaggcataccgcttttgtgatagtggatgggctatactgttatgttgtaatgccctacggtctgagaaacgtcttgccaacatttgttcgggcgatgagtaagaccttcggggacctgatccgggacaaggtggagatcaacgtcgat

SEQ ID NO: 122722 - DNA, 436 bp, Zea Mays
gaggattcaaacaaaaaatttgcaaagattatcgatattccaggaatgctctaggtcttcgccggatggcgttgttagcctatacgcgctgggggacgccttcatcttgacgatgaaaggaccctctgactttggctctagcttgccccgtgactctgtccgagttgtccagacaagcacgaggtccccttcgtcgaattctcttgggatgactacgtagtcacgctaggccttcgtttgagcttggtatttgttgagagcctgcagggcaaagacacggtctccgtcgatgaggtctttggaggttggttcgtctacgtcggggacggctgtagcgcttgtccgtggtgacccatgtttgatttcctgtggggtcatggcctccgatccgtatagcaggcgaaagggagtgaatctagtcgcccgacattcggtc

SEQ ID NO: 122723 - DNA, 466 bp, Zea Mays
ggtatgtatgtatattgatatggcataggtagatatgggagtggaggtgtccatgcaggcatgttaggtcttaactggacagtatgaccctccgtcttttccaattggtgaggtggtccaatcagtgttatctgctgtcgctcttgagtgggtgagtgaggtcactttgctggtcggttacttgggccggccttcttttttacatatttagataataattgatcgaaggttgggccagatctgaccagtcgcctagctgccttgaatgtgttagttttccacgtacctattttcggtcgtcgtggtttgaaggtgcgtggtcgtcgtggttcatgggcgttgccggatcgtccgctggaatgatccagactgtctggcggtgttccagaccgtccgcgtctgtgcgtcggaccgtctgcaatgcgtagaacaggtgctagcgcctggtttcctacatgcgcctgcc

SEQ ID NO: 122724 - DNA, 473 bp, Zea Mays
aggaaacccatcaacttccctgcggagacaccgaagatgcatttctctggattcagctttgtgcgggttgcccgtagcttgccgaaaacaaaggccaggtcttccactatagccaacctttccttagtcttgaccacgatgtcatcgacgtaaatttccaccttgtcccggattaggtccccgaaggtcttactcatggcccgaacaaatgttggcaaggtgttcctcagaccgtaggacattacaacgtaacagtatagtccaactactgtcacaaaagcgatatgcctcctatcctccttagccatccggttttgatggaaactagagtaggcatccaagaaggacaagaggtcgcaccccgaggtagagtccataatctgatctatacacggcagtggatacgggtccttggggcatgccttattcaggctggtgtagtcgatgcacatccgaagcttcccgttggcctt

SEQ ID NO: 122725 - DNA, 579 bp, Zea Mays
ccttttatcttgcaaattgagatggttttttcggattgaatacatagaaacccatttatcatgcagcttgagatgcaattgtttgggtggcatgcttaactatgcagttatcatgatacgtgaacaactataacgcttaatgcttacattatctcctacactaaatgatcaactgagccacatgaatcatttgatacatttatctgaatttattaaatcttttgttgcattcacataatttggtttggttgttccactatgaattaattgtgttagtttgtgtttggtaaaaggggctcgatggtgaaatgatggggacttcaatagtcctagttcatgcatgataattgattccttatttatcccatattaatatgtgataatggatctttgatccgtatccacgttctaggccagtgtcttcccctcctttagcgctacatcatttcctttgtatctacactctagtgtgcaagtcattgacatccatgtgacttagagaggttgggtacaacattgcagcacccttaagataaccttgtatcttagccagttgttaacagttcaaatctatagtgg

SEQ ID NO: 122726 - DNA, 515 bp, Zea Mays
ttcagtaggtaagggagactgaggttccacatgggagtcctggctaggaggggacagtttccatgttgggctcaacgaaagcagagatagcaccggacattaaaaatttcttggcccattcaaaataatccggcctcaacagtaggcccatgaagaaagcagcccacatctttggaacatgaattaattctgagttggtggggaacaagtcagcccaagaagaaaggcgttttctagccaggtaatcttcatatgtaggatcatggttgggctgctccaagtgttgcatgaggcccacattgatgttttcttcgacttgcatgttctcctccccctggtcgttgtttccctcaaaagcaaacctgctgggggaaatgctggcaaacaagaactgcatccacaggttctggggcttccacctgagggaagtgaacctcttgtgggataacgatgtcattcaagagacccacagattcatcagagggcagatcttcaaggcctaatagttgataact

SEQ ID NO: 122727 - DNA, 1105 bp, Zea Mays
tacattaccatacctcaaagtttttctgccaacctcaatcacatttgcatatttcttattcaacttccacttggcatccggacactcccttgaataatgttgatcttgccatagtcaaatagttgccttttattgttctttttcttcttaaaaggtgtggtattcttttggttgagctcttacttaaacttcttgtggggttttggggattttttttatcatatgggcactagaagtcccctcaacacttttatttccatagtgatcttttgctctcaccttctcttgaatatctaaagagccaatgaggtcggtgatgccaaactcgtgtctcttatattttaaagaggtagcaaaatttgtctaagtctatgacatctttgtaatgatgtagcacgccacgaacttctcaagcaatgtacaaccaaaattctcgagttctttcgcaagtacatatatttcatgaacttgttcaactatagaatgaccatcaatcatttagtagtcatggtattgctccatgacacacaacttattactgacgttaaacaccccttatttggcttctattccatcccatgttttgacatcatcacgtatgagtctactatagaatctcctagcatgctaattattgccctttgaacacatgcaatattagcatcctggaacatacaatcctcttcggtagtgtgtggtccaggtgatttaggttcgataacaaaatagcaatgcatgattgtcaatcgtaatatgcatctttgacaccaccttttatagtgtatacccttaaaaacctttggttttaacatactcataaacccaattgccaaaaaagtccttagcatttttggatcgttagaagctaaacttttcaagttgtattttaatccaaaaatttgatattaaacaattagcgacaacaggaatgtgcaaatgtggatctaacaagatagacatgaatataatgtagaaatacataaatataaaacaaaaatgatagatatatctagtggtagacattatgtcgtttgatgttgatttgtagtcggtgcattgatattaaacaattagcgacaataggaatgtgcacatgtggatttaa

SEQ ID NO: 122728 - DNA, 567 bp, Zea Mays
ttcgatgtttagtacacttcttgcctgtaggaggagatgcgaagacttcttgattcccatgacagtctagacaaactataccgtcatggtagtagctcccttactactttggataggaatcatcgctttactatgttggagcttgatcgtcatagggatgagttgagggtttctcagtctgaagtgtcccggcttaataagttactgtcttcaaaagagtccgtcatcaaagaattgtgtgcctcaaagaaacttgtttcgtaggagttggaaattgctcgtcatgacattaaggtcttagaggatgaccattgtatcatgaaagcaatgtgtgataaagcgatggacaaagctgttcgtgctggtcgaatcctgatgaaaagacctcgtgttgtggtgcctaaggacattgttgctgacgttcttgctgcgtccgctggtatgagtaaaccttctccctctggtgatcctactggcaaggtcccctgcgagaacgcttcagcatagtaattgtgtaatgaagacaaattttgattcgtttgaacagaaaatacttttcgttgaatt

SEQ ID NO: 122729 - DNA, 524 bp, Zea Mays
ccacctaggggctccctcttccccccgaagtgttcttccaaatattgaaggcaccttcggtcgagttgatggaaagagccatcttaacggtatctcctacacacaacaaagactacagaacagagattataaccttccttcagggaaatcatccaagcgatgatgaagtatatatcaaaaggatgcaagccagaacaagccatattagatgatagaaggtgaattatacaaggaaggtgtttactcacccttactaagatgcatttctagagacaaagatcaagagctaaaaagagaaattcactctagtatatgtggatcacatattagccctagggctctactgggaaaaaatatttcatcaaggcttctattagcaaaacatcatttgtcgcttcggagtctgaaatgggtgtacaaggtgaagcgtgatgaaatgggtgtactagtggaatacttctccaaatggattgaagcaaaagaattagcaacaataacttcggcaaccattcaaaaattcttgt

SEQ ID NO: 122730 - DNA, 475 bp, Zea Mays
ccgcagttggacggtcccagccaaccgggtctcaacacgtggcctgcacacgctgcgctcccattggctgcatcggcggtagcaggctatagcagccacgtacgaaaggcagtcgtgcatgctattgccattgccaataggatccgcctgcgctttacgctaggggttcccttccctttcgtttagtatactagagagtagggagtagtagagtgcagagcgtggctcgaatggaggctttttgttaatccctggaaaccgtgcccaagttattaacaaggattagcgagtcaacatgtgtacagtacagtggatgcatgatgatagatcatcctaagattcgtatcgcatatataagtattgagagggtcgtcgtcgtcgttacctgcttttgtatttggcgagtttcctattcgccccactagctggcctgctggcatgcatgcgcgcggtctcgttgctccctcccctcttt

SEQ ID NO: 122731 - DNA, 502 bp, Zea Mays
cgaatgtggaatcaagtgtcgtaaactgccataaaattactgatctgacattactgatccgaatcaagtgtcataaatatgcttgcaaactggcataaacgtatgtggaatttatcataagcaattaacagttatgtaacaaactgaatttacatctacttagcatacatgtatgtgcaaatatgcataacactactttgtgtaatgcataactataatgaaaatgaaaattactgagctgacatgttcagatggagtctgatcaaagcatggaccactgtcggggagatctgtttctgccgcttgttggacgccgccgggaaactaacaattatggtataaatggattagatgtttagtaaactactaataataatatagaaaaacaacgaggttgtgtactcatacctttatttgcggcgtcgcatcaaatatcggcgcagaagattccgtatgtggtgttgctttaggagtgacgtttgtgttggtcggcatgttcttc

SEQ ID NO: 122732 - DNA, 615 bp, Zea Mays
atcaagactaacaccttatattagtaatctcacatagtctcaagtatgagaataagtttctcatgaagtatgctactacatttcaatccaacttggtaaagtaatgtcatctttatcaaagattgtaactttcactgttaaagtagcatatttactggattctcctggtttaagcttgtttgataaactaatgcatatgttgttcttttgaacgcatctgttgtttgcttgatcattgaataacttcaattatcacttatgtttcttagtgcctcatataatttcaatcgatatctctcttgatatgcactaagttaaaaggagaattcatgatatatttatgcaatttgtgatctacttgatatataataacaatgacttagaaaaggatcactagttgtagaactctctcttgtgcaaaatatttccatacactgtcttgaatttaggtcttaagtaactaagactaaggacaaagcacaatgaagagagcgtctccatgtgtaggtacaaaagggtaaaactacttcctctcatttatatatgtatctaaatcttccttttctatacattccttgcttatcttgtataaaaggaagagaaagcgtgtctatg

SEQ ID NO: 122733 - DNA, 524 bp, Zea Mays
gcgtggtagcgttcaaattctaagcatggggagcatcaccacacataaaggaagctagaacggacagtagttgggctggaaataccttaggcgaagctagccacggaaaagttctcctcggcgacgatggcgaccaaattgggggaaagtctaaattctccggctacgatggataatcgggagtaaggagcggtgctctagcttcgtaacaagataacagagcaggccagggcgtcaatttatagcgaccataagcggcgactccgaatttggacgagatttggattacggtggcgtcgcggtgtgtcaccggagtccatcaaacgtggcgctcactaggacaaaggtttacggcagtcactcgttactctctacgactcgcgacaacgtggtactatggcatgtagcgtggcagactccggtaatggcgtacacgacgacggtggtcgcgcggccacgttgccggtcaagtgggtacggtgaggccggctcgatccattccccctccgatatttttacctacc

SEQ ID NO: 122734 - DNA, 584 bp, Zea Mays
aaagaactggagggatccaaaacaatggagggaaatatagtatgtcagtatactaaattggagggaaataaaataatgggagggaaacagaaaataataccttaattatttaattaattcaatatggttttcaaatattttgctaaaagctgattgtgtaattcaaaatacttgtattgttaaattttaaccataatacagggaagatttgttacacaattataatattaatgtacatttcaattgatacagtcgcgcaataaattgatgaaacacttgaagcagatcaagcagggcctttcctggcttttcaggggcccagtgcgaaattcgatatagaagcctcatccaacaacttttttcgatatatagaatcaccaagccatttaacctctcttgagttattgttgaccataaatagttcataaaaaatttaattttaaaaagcttctctctaccgaagcaaccatcacatgtatagtttataatactctctctatatcaaaataaaatttgttttgcttcttagtggatttatcattgctgtcacaacccaaccaagttattgggcccacgtacaccaa

SEQ ID NO: 122735 - DNA, 772 bp, Zea Mays
aatttaggtactctaagagcaccgaagatgctcctgaactgagaggcgtcctgaataggaggcccgaaatcggtagcaagcttcctctggaggtcgactggagtagtacatggattgtggtctgtcatggttgtccgttggatggcgtccaacatgcaagtgcgctggtgtagaaacaagtcgtcgaaatgacgctcaagagtgatgccaaggaagtgatgaagtagcccaaggtccttcgctgcaaattccctctgtagggcagcgatggtgcggcacagaagctcgatattggacgcggtcaaaattatggcatcgacataaactaatacatatatcgtattggagctgtgacagaagatgaacaatgaggtgctcgacttggcttccacaaaacccaatgaggtcatgtgtggcgaatcgactgtactgtgtccttggtgcctgcttcagttcatacaaggacttgttgaggcgacagatcagatctggccgagcgggatcgacgaaccccttaggctaactgcagtagacagtctcactaggagtgtcgtgtaggaaggcgttcttcacgtcaagctattgaataggctagttgcgagcagtagccagagcgagcaccatgtggagggtggccaatgtaacaactaggatgaaagtgtcatcatagtcaatgtcggggcgctgtctgaaccaccagaggtcccaacaagccttgtagcgatcgaaactcccatcggagtggaacctgtgcttgaatatccacttgtcg

SEQ ID NO: 122736 - DNA, 668 bp, Zea Mays
ttggaaactgaacaagatcatcccctgctgctcgtccttgttgtgtttataggttgagatgtgtatagatggagatatggatgtagcacataactaaggtctagaggcctcgctgctgggagaaatatcaggttctgaaccaggaatagaatatctgcactagaggcttaactgatgtttgctacctgcagtaaaggacaaaatggatatttagctaggggagcccgaccagaatcaatgtttggctgtgcttgagtgctacgtgggtgtgcaggggttgtgctggcacccagggagctcttcacctctatgaattgtgcaagttcagggacacctgccccaatttcagccactttaaatagcatggtttagtgggcagcagcaattaagtgcagctacaaatatctgctaaaaatatcaccctccactatagatcccagcttgactgaagtatcaagttgtggactgcccaactgaaatatcaagttgtgggctgtgttgggaacaatagaaccttatctgctctccaccatactttaattgttgtacaagttggatattttgtgcagtcgactaggttcaatgcttgggttgggtttgtaaacctgagaggaattgggtgcatgaaggccacatagggtagctcaagtagtgatggcactcttgga

SEQ ID NO: 122737 - DNA, 290 bp, Zea Mays
gttgtcgtcatgatagtctatctgctcaatcaatctccaaccaagatcttggatggatgcatgtcatacgacgcttggcatgacaaaaagctagcaattcacaagatttcatcttcgacgagaacgagcgttggtgaaatggaaatgtgccttgtgttattcctataaatgttttggtgattaatgtccaacacaacaacatagtaacatgtttgctaagtgtgtagatgcagaaatttaactcagataaacagaagttaagttggagaaacaattaaataaagttatat

SEQ ID NO: 122738 - DNA, 468 bp, Zea Mays
gatttgcaaaagaaaccatgagttttgggcttatttgcaaaaaggccaccctagtgctccaatggttaagtctgaaaacagttgaacaaggctgactttggagtcctgcatctcaggattcttgaagtttttactcaaagtcaatatagcaaagttgtagagttactataggagaacaactttgctatagggattaagccttggtgccatgaaaaattttgagaaaatttgatccaaagtcgggctgtcaggtcaccttaagtctgaactttcagtgatagtgagattggatgaacttagggctcgattttgagtaagatcctatgactttttgtgggtgcacaatgtaaaaaaatttaaagctagttaattaagcttcaactttgatacagggtgatggttgggtcaccacataaaatatggagcaaattgcccccaaacatgctctgtcaagcgcttcaaacagag

SEQ ID NO: 122739 - DNA, 542 bp, Zea Mays
ctgtgtaacgatggactccaagattgccaccctgtgtgatgagttgtgcaagttgagcatagaagttgtttcctcagggactttggagtatatctcagtggaacccacgttgcatgagcagatagtcatggctcaaattggtgacaagggtgttcaagtcattaaggaaatgcttgagcagaaggtagataagtacaaatgcttccgtctggatagcaagggagttctatggtttggagaccgattggttgttcctaagaatctcgtgctcagaaaagaaaaatcttggatgaagctcacctctccaaattctccatgcacccccggcagtaacaagatgtatcatgatcttagatccttgtattggtggaccagaatgaagagggaaattgctaagtatgtctcagaatgcgacacttgccagagagtcaaagctagtcatttgaaggtagtgggtaccttacagccccttcccataccatcttggaaatgggaggatctcaacatggactttattgtgggattgcccaatacctcccggc

SEQ ID NO: 122740 - DNA, 519 bp, Zea Mays
gccgggcagcggtggagagagggttgatccaaataataatttatattggatttgagtaagaaaaatgattatctatcgatctgaatcattatttgatggatttagtagaggttatgattgtaggggatttggttagatgagttttagaatctttaaattggtagattatacagtgacataaactagaattattgtgtttagtgcgaatggttgtcatactaggtgtggttcaggcagatgcaaatggttcactcttgttaatttgatcggtaagagtcatgcaatagaattattgacatcatctcatttgcggcaggatggaactgtaagctcaatagctggagcttgcacggttcgtgatgtcatggatttctgctttcactcgtacttcttgttcatggatgatcttattgggagggggtgttggaatgcactataactaatgattagctgctaaagttagtcgagacatacaaacggtctagctaatattgtagatgttagctgcttttagcaaat

SEQ ID NO: 122741 - DNA, 364 bp, Zea Mays
ggctgaagtgtatcgaagctacaagtgatgaattgcttggagcttattccaaggccgaagataatgctctatccgcagccatcggaagatgggggaagaaaagaataaatagggtttttgatgccattggcttcatataccctgactaccgctatccgctgtggggacaggggaaaaagaggaaagctgctacttcggccaccccagttgagcctgtgtcgaagggcaaaaaggtgaaggttcttacccaccggtcgcgttacattgaaccggccgtggtgcctgagtttggcgcagggtcctcttcagcggccaaaacaatacaaactgctttaactgcacatggcgctaaagaaccagctgt

SEQ ID NO: 122742 - DNA, 498 bp, Zea Mays
gtttgagctggatgggaacgatggtgtgttggtcgttgatcttttcagcagcggtcacgattagatgctagggcactggttcgatgggctcaatccggtccgtctgtttccgatcgagcgcgcgggattcacagagggcaacatagaatctggaccactgatcttaaatcgtgcggtcgacatgggatattggtttatttacacctaagatctaatctggatcacacacttatgatccgacggctgtagactcccgataccccttcggcttggctgattggcaaataagcccctgaaaaatttagaaaccaacccgccgtcctcggcgactatagcctgagtcttagaaaacttcggttgaggcccctgacttttctggaaatcgaggcccagtccagagatgattaaaaacagagaaataactatagaatttagtttttaatacaaaaacaatcctagaaacttgtaaaatgcatagaaaattcattttaatccaaa

SEQ ID NO: 122743 - DNA, 1205 bp, Zea Mays
ggcttctcatggtactgaagatctttctgaatctgcactgcctcttcttcgatgtgactttctggtgcttgccggcatttgcagagctgggatacgtgaaacacattgtggatgtcaggcatggattctggtagttcaagacggtatgctgcgggtcccactctgccaatgatgggatagggactgacgaatcacagtgctagctttccttttacttggaaccttctgacaccatgcatcggggagaccttgaggtagacaaagtctccttcctcaaatctgagttctctccgcctgttgtccgcataactcttctgctgactctaagcttcaagtaatctcctgcggatcagggcaactttttcttccgcctctttgacaaaggcaggtccttccagtgccttttcccctacattggaccacatgagaggggtctggcattttcgtccatacaatgcttcgaacggtgacatcttgatgctggcctgatagctgttattatacgagaactccgcatagggcagactggattcccaacttctatcgaatgctagcacacatgctcttaatagatctttgaggaccttgttgactctttctgtctgcctgtctatctgagggtgataggcggtgctgaaatctagcttggtgcccatagctttctgaaggcttgtccagattttggaggtgaactgggttcctctgtctgacactatctttcttggaatgccatggagtctgactatctctttgagataaattcgggcaagggtggctcctccaaaggtagttttcactgggatgaaatgggctaccttggtgaggcgatctattattacctagatagagtcattccctttttgcatccggggaagtccggttacaaaatccatgcctatttcttcccatttccattccggcactgggaggggttgcaataggcctgcaggtttttggtgctcggccttcgttcgttggcaggtgtcacactgggctacatactgtgctatctctttcttcatccctctccaccagtatctggttttgaggtctaggtacatcttggtagttcctgggtggatggagtaggctgagttgtgagcttcctcgagcaggacttctcgtgcctctccttttggtacacacagacgattcttgaaccaaagggctccttgttcatctgtcctggggtccgagagttgttc

SEQ ID NO: 122744 - DNA, 653 bp, Zea Mays
gtcgaagcaagctccaggctagaagacgttggacatggtcgaaaggaagcagctcgacgaaaaaacaaacatacatcgagcacgtaaaggaaatgtgagtgtagagaatattgtggaagtggaagacaccggataaagccgaatcaagaatccccaagctaggatacgccggatagcgaatatggcggaagtaaataacttggaaaaaaaggaacattggaaaaaaacttgacgaggaagctgagacgacaaagaaactgatagaaacgaagcaggtgtagaaatgggcacatggaaacctcataacatatccaccaaaacagatcggaccagtaaagagagctcgaggggaaaatatgtgtctcactaaacaatcagagcggaggagtaagacggcagtatacaaagcgtttaggctgaagcgaagtagacgagcaaggcgacgaaagacaaagcgactaagaaagaatgatacagagatgaggaaagcgaaggaagacgaagcgactagaagaggaccgagggcggagggagcgagaagcatccaaaggcaaagtgtcagatctcagatggaagtcatggcactctccagaggagatcctcgtctttttttctttgtttactcgccactgatgcagcgacatatatgattt

SEQ ID NO: 122745 - DNA, 539 bp, Zea Mays
gcggtatagaggcagtgggggatagcgatattccttctccagctctatctgctcttgttagcctaagagaattatccataacagattttgatcaggctctcaaggatgttgttcctgagggtatgctgtcagagccaactaatggtgatatgatggacgtctgctctgacactccagatgtgggattagaggtatcctgggcagcatctcacgcatcgtcgaccttggagggtggtctttagtaccaagaggttggtcaagattgctcgattctcatggaggtgactgaaaatccttcagccttagaggtggctgttgtagagaactcagtcctcaagggcagtgctggcggttacccagcccccgagggtgttgccagtaatgatctggctcgggtgggtagcgcaagctgcgacccagcccccgagggtgtccgagcgagctccccttctcatacctccatggatgtccacgtcgggtcgtctccaccacattctggtggagtgatagcagtgcacgcttctttagcttcaagtgaa

SEQ ID NO: 122746 - DNA, 338 bp, Zea Mays
ccgacgtcgcaaaaaaggaaaaccactcggttaccacctctaaaaatactaacagtaaatcagccgttttttctctacgaatatgcaggcaaatctaaaatgcgactcgacgattctaagtcgttactcaagcattacatccaagaacaacaactacattaagcataaatacgatcgaccgatcgacgggaaaagaagcgacgggaaagcaaaggaacacaaacagaatggggcgaaatcttcttcattataaatggaggggaagtattaccaaacttaaaaaaccaactcattatgagttggtcttcttcccactgttcgatacactacactactac

SEQ ID NO: 122747 - DNA, 399 bp, Zea Mays
ccggaagatgattgatctttgaacctcgtccctttgtgtttcgtgatttcgtcttgttgtctgactttgtagctacccgttgccaatgatcacttgacttggcctctgccacaggcccacaaccaaagtccagagaaggcgaccacgcgaagcaccaaaccgagtgctagcgatgccggtcaccagaaccacatgttgaaatagtgacatccgcatctacaaaaattaggtctaaatatgaataacttatatacatactacattagatctcgtgtaggttatgatcgacaaagccaaatagaccaagacattgttgcacgtgcctacatattctattttttctaaatttgtcaaccattgctgatctttgtcgtcgactagcacaaacttggaaattag

SEQ ID NO: 122748 - DNA, 460 bp, Zea Mays
ctcgatttttggtaagctcaggggccacggtgtaaaacttcctagactcagggaatagtcgtacatggacggcgagttgatttaaataaagaacagggactcttttgcgaaatagacaggccgaagggtatctttcaatctgagtcgtccgatttgagatggacgcacgagattagatcccgccacccacgaagcggtacgcaacgccatccaccgggtctagatcctacggcgccgcttttattacatcccgagttcccagatccgcccgatcggatcttgacggttacggtttactcaagcgaaggggtattctaggttctaatcctagtcgtccagctcccatccgacggtgcatgagtgtcttccctaccacatctgagcgacggcgacaaatcccctaaacgcggcggcgccattaccgtacttcacccgagctcgatcccgagctcaaatcgcc

SEQ ID NO: 122749 - DNA, 797 bp, Zea Mays
tgagcaatgactcaaccccctgagtcaacgagactcatcggtgacgcagcccttgagtagtcgacgagttggcaaggcggcaggcaacagagcttcctccaagttgacaaagaagtgggcgaggcgggcaacaacctagcccccaagtcagcgaaggagttggtgtggtgtgcaccagcccagccctcgagtctacgtaggagttggccaaccccctaaatcggcgaaggagtcgacgaggcgagcagtagcctagcccccgagttgatgaagaagcgggtcggtaaggtaggcagcaacctagccccccgaattggcaaaggagttggcgaggcgagcagcaacttagcccccctcccaagtcagcgaaggagtcagcgagactcagcggtggtgtagcctttaagcagtcaacgagtcgcctaggcaacacgactgtggagctgcttctaagtcgatagagaagtaggtgaggcaggcagcaacccggtgccttaagtcgatgaaggagtcagcgaggcgagcaacatcttagcccccgagtcgatgaagaaacatgtcaacgtcgcgagcagcagtctagtcccctgagtcgacgaaggagtcattgaaggagtcggcgaggcgagtagcagctcagcccttgagtcggtgaaggagtcgacgagactcagcggtggcataacccttgagtagttgacatgttggcatggcgacgtggctacggagctgcctctaagtcgacgaagaagttggcgaggcaggcaccagcccagccccccaagtcagcgaaggag

SEQ ID NO: 122750 - DNA, 587 bp, Zea Mays
tcatgcgactctacccctcatcataggtggtgattttaatattcttaggaatcaaaacgagaaaaataaacctttgactgaccaacgttggcctttcctttttaatgtcgtaattgatggtcttaacttaaaagagatagagttgtcgggtcgccagtttacttgggcaaataaccttccgaatcccacatgcgagaagttagatcgggtccttgttacaacggaatgggatcagaaatttccattatcttcggttgttgtcctcaaccgtgatatatctgaccatacactgctgttactgaactcaggggaagccacaccttgtccctgctaacaaccttttaaatttgaattaggttggttgcttagggatggttttcatgatatggttcatgacatctagacaaatgaagtcagtgggcaaacacctatgtagaagtggcaaaacaaaataagaagattacgtcagcatcttcgtggttgggcaaaaaacaccagtggtgcttataaaaaggaaaagaagaatattttaaataagctggattcattagataagaaggcggagtatgacaacttgttggcacacg

SEQ ID NO: 122751 - DNA, 945 bp, Zea Mays
cgctggggcatcttattaagtccatattctatctcgtatcagccatccagtaagtttggccaaccgaaggggagccccatggtcaccccatcaaccgggttgccgcagaagaatgtgaagtacgaccttagatgtggaatcgagcaaatgacctatgggccggtaacctgacttgcgactctctgggagcttgctcaacccacccctcgctctgtgtgaggagttggagtggattttggtttttatctggtgtgagacagttatggcggcagcgtggtaaaacatgagtcatcatggcgccgctcggcgtgggtggcttgacatgacgcgaaatgacccactcaccatgtcatgcgcaggtggtaggatggtgtcataaatcaccatgtccgttactcatgcctttcccctatgtgctctttactgcttcgttcgaggcagcgcaaaccctgcaaaacgtacagtcttctttgcggctcccacggcgggggataccaatgcggcaggttcacatgcgttgtccgtgggggtccaccttctaggtaccgctttgctaccgtgttcctgtgtatagataggatacgaaggcgtttgaggtcggttatgcttaccatgctttctcgcccgagcatctatggcccttcccctcagagagcttctcccgtcctcgtggtgacctcccttccatgatattcttccctgcccccatgggcaccttttccttgtgctccgctacccaagagcgcctcaatgacctcgataggaagggattcctccctcatgagtcggtctcctgttggcgtctagaggagaagggtggtgctccggcgtcacgcgatggcaaggtcgtggtgatggcctccttctatgagtgcggctttgggcttcccttgcacatccttcgtgcgagggttgttcttttattatgggctagagttgcaaaac

SEQ ID NO: 122752 - DNA, 313 bp, Zea Mays
aaatatgtgtgtgatttctatagatgtctgagaacaggcgcagaggtgcgaggcgtgctcagcctgaacagcaggcaccccaagaggaggcagctccgcagcagcagttgccaccgccaccaccgatgactatcgagcagatgttcttgatgcaaactcaagcagtccaggccattggttagacattagcagccatgcagcaagtgcagcaacagccaccaccgcctcatcctccagtgcaagtccagatgccacaagtgcccagagacaagcgggcagagttcatgaggggccatcctccagtctttgccca

SEQ ID NO: 122753 - DNA, 440 bp, Zea Mays
caagcatacatgcatgggacttagagagtgtgtgtgttgtgtcggtgtggatggcgtgcttccttttggcaatgtatatatactagtgtaaacaacgcgccttgcgtcttctttttccaatcagtccttcgtgttgcgtttggaagtccaatagatggtcttatccggagaacactcgccaagataacttacattcatggctgtcgaagaagcatcgtgtgcttaaagcagaaaatcaatatggtagaacaggcatgacatacggtacagtctttctagactaaaagatgatcaatgacacatatttggatttttttatcattatacattttttcctgaacatgtgtgagaaatctacatagaagcagagccaaaatgtttatgtaatagttttaataaattacaaactatactttaagccatctagtaccaacttgttt

SEQ ID NO: 122754 - DNA, 271 bp, Zea Mays
tggtatctgccatcctttgattcatgcaacaggacctgcagcatttagtctgggaagccaagccgtatgcccggaccccttgaatcacagttccaaatactaggacacccgtcgcagagtggtggagcatgcaggcttagggtacgggaccatgctaagcggcttcacagctccggaccacccctggagatgtgtgtccattctctagaaccggaccctaggttgccggacccacaggactatagttccaaatactagggtgcccatccca

SEQ ID NO: 122755 - DNA, 488 bp, Zea Mays
tatctacaacttttctatagcacatatctagagaaaacacaatttagttcatcaaacatacagcacaccgaaaacagtacgtgcagcccaaaacagcaaccaatacatttcagcttctatacaattcaagaattgccgcgttctagagacttgaattattgtaatattttaccattcgttagagttgaattaattaaatgaggactaacaagtagacttataaattttatccttatcatttagtgcactaaaattactacaaccaattaacaacgcattcttcacgataatcacccaacgatctgcgttttcaattagaccccacatgagcactactactttttactcgtgcccataaccatacccatttagaccacaacaagcaattcatcatgaccacgagcttaactaaagtcatctaacaagttggttaaccaatataaaacttagcaaagtattttagactttgcagctcaaaaatataggtg

SEQ ID NO: 122756 - DNA, 669 bp, Zea Mays
cactttgttttcaatgactacaggttgcaactttttaagtgatggaatcagccgtggaaggaaaggggaggaatgcaagtgatggaactgattcagaaagtaattcgtttgacaagagggatgatatgtctgaagatgaactggtagtgcttggtggaaaaattgatgattcagcggacaatgtcaatattgatgattctgaggacaatggaagtaaaaaaggagtcaagagaaggcgcaagagggtgcagatgaaggctacagctgaaaggagcaaaaaggcaaaatctaaagtttgggatgcctttactaaggtggctgtgccggatacgacagagaaggggaagatgatatcaaaggcaaaatgtaactattgtaagaagctatattcttacatacaaggatcaacaacatctcatttgtcaaggcacatgagaatttgtgtcgtgtatttgaagcatgtggcaaagcaacaggatcaatctcttctaaattttgctccatcaacagcaggtgaatctggatctggccttcctactatcacttctcctaaagattataaccatgagcaagtaaaaaaactaattgctaagatgataatagttcatgagtatccatttaggatggttgagcatacttggtttaacattgtcatgaggtatttgaatc

SEQ ID NO: 122757 - DNA, 342 bp, Zea Mays
cagaacatgctggaaatgtgagaatgtcgcctcttctttttctttctgagtgaatgccattgctgagctagtgttgatgttcctgatataagttttttacgtctgaccatagcatgtatttggaagaaagaggtgtttgtgtccccttggcgaatccacgagagtctggaatgttgcttggccctggctttttggatggctgctaatccaagggcttttgctttaagatagtggcggaactccagttcctcccctgagagttgtctgtcttcttgtgcccgctcaagatgtagcagagttacttgcaccattgccaactgcagcgggatgttacctatattt

SEQ ID NO: 122758 - DNA, 661 bp, Zea Mays
atgatacaaaaaaatgaatgttacctcaatatagaagcttacagtcagcttcgttgctaaaagaagaacccagaacatggtatacctgtcaggacaacaatgttcagtaattgaaaaacatgtaacacaaggcaagacaatatgaagatgggttagcaaactaacatacttgaagagggagaatgcaccttcatgcatccctctgccaacaaataaccggggctgcagacaaacataaaatcttttttttaaaaaaggaggcatccagaatctctgactctctgtcatctaattagcagcagaaaatgagagatggaatgctacctgagaccaccacattatgatcgttatgaccttaacatttgaactctctaagaatcttctcataaatgggaaaagaaatagcatagaagcaactatgtttggtgccatatatatcactatggccaatatgtacaaagatggctgattctgaccatcaccaagccaactttttattgttcttgcaagtccagtaggattctcccaagtgtacgcgtaagtcacaggtaaaatcacaacccatgcagcagcacatattaacttcaagatatatcgcagcttgactgcaaatgacatgtttcttcttgctttccaaccaaatatgaggtctaggattgct

SEQ ID NO: 122759 - DNA, 306 bp, Zea Mays
ctctctatccttccctctcacacagtgcaggcctgcaactttctactcatgactcctagccgccgcctcgtcccagtagctggcctgcacatgctattgattaaatctcaactagtgatggctgacactgacaacataaggcaaagtagcaatttaagttttctttgttatgatacttaacatgtgttatgaacaacaccatgttatttctcgaggatctagcatttacttaagacgctataacatatggatgtcactatgacactatccctatattttaggaagcaatgtaaaagaaaaacttgg

SEQ ID NO: 122760 - DNA, 619 bp, Zea Mays
gggaggtgtagtggagggtgaggtcatcatattggttatcaagggtgtgaaggtatccagccatgtagacgatggtgggatcatcctcaataggatctcctcctgacagggcctgaagtcttttcctccaggtgggggtattcttgttgctgggtggaaagtagcgaaggggggtttcaaagatcactttgttgtagttctggcacatttgtcggagggcagttcgggcaacattctggcaagtatctgggaaacagtatccagtaaaggtgacttggaaggaaggatggttcggatagtttcggctttctcccaggtagactgccatagagcatttctccattccgccctcgatatactccgtccagacgtattccggtttcttgcggattcccatgcgaagcgcacagcttcgcaacaggtgtgggaacccttccacctatgagcagtaggatgtcctaatggccagagagtcttccatctggaataggaaaagaagggtctgttaaaattggggaggaggagagaagacttttcttggggaaagaggtatttcctttttagggcaagttttagggtcagggctgcgacctacggccagtcctatgggctctgatac

SEQ ID NO: 122761 - DNA, 1720 bp, Zea Mays
tgcgtccgctggcgccgtcacgcacgcgctcgcgtgcaagctgccatcctcctgcggctccaataatgtcttcgtctcgaccgcccttctaaacatgtactgcaagctgggagctgtttctgatgccaagagagtgtttgatggaatgctacatcgcaatgcagtgtcctgggctgccatggtgtcaggttatgccactgggaagtgttctgaggaggcctttgagctcttccggctgatgcttcagaagtgcccattggagaaaaatgagtttgtaaccacagcagttcttagcgcagttagcgtgccactgggtttgcttatggggacgcagttgcatgggctggtattaaaggatggtttggtgggatttgtgtctgttgagaattcgcttgtcacaatgtatgcaaaggctgagtgtatggatgcagcaatgagggtgtttgggtcatctaaggagaggaactccatcacatggtcagcaatgatcacagggtatgctcagaatggagaagccaattgtgcagctaggatgttcctacagatgcattcgtcaggatttacgccaactgaattcacctttgttggggtactgaacgcatgcagtgacatgggcgcattagtggttgggaagcagacacattgtttgatggtgaagcttgggtttgaaacgcaggtttatgtgaagagtgcactggtggacatgtatgccaagtgtggttgtattggtgatgcaaaagatgggtttcatcaattatatgatgttgatgatgttgtcctttggacagcaatgattaccggacatgtgcagaatggggagcatgaggaagccctgatgttgtattccaggatggacaaacagggcattatacccagttatttaactgtaactagtgtacttagagcctgtgcatgccttgcagcactggaccttgggaagcaattgcatgcacaaatattgaagtgtagatttagcttggggggttctgttggaacagctctgtccactatgtattcgaagtgtggaaaccttgaagatagcatggttgtcttcagaaggatgcctgatagggatgttatttcatggaactcaattatttctgttttttcacaacatgggcgtggaagtgatgcacttgacatgtttgaggagatgaagctagagggaacggcaccagatcatataacattcattaatttgctatctgcttgtagccacatgggcttagttgacagaggctggttttattttagggcaatgaccaaagactataatttaattcctacacttgatcactatgcttgcatggttgatattcttagccgtgcaggccagttaaaagaagcaaaggacttcatagattcgataactattgaccatggtacatgcctatggcgtatagtcctaggggcatgtcgcagtttacgtgattttgatgttggagcatatgcaggtgagcagctgatggagttaggtactgaggactcatctgcttatatactgttatcaaacatctatgctgcccagcggaagtggaatgatgttgagcgggtgagacatttgatgagactccgaggtgttagcaaagatctggggtgtagctgggttgagctctacaaccgagttcatgtgtttgttgttggggaacaacaacatcctgaagcggaaaatataaatgtagagttgataaggctagcgaagcatatgaaggacgaagag

SEQ ID NO: 122762 - DNA, 505 bp, Zea Mays
gcgagcgcacgggtccggttgttttctgggagtggacacatgcaggatatcgagggaatattcctatactagaacacctccattccatttggatccaaaccaaacatctatattactagaacagagcggctctatcctacctaactctagaaccaaacactaggttacagaagcacctagctctaacccctggctcctcatagcccaaataaaaacccccactccaatcaaatcttcaggagtaaattgatgaaggtatatttcaaatgtcttcagaacttcaaccaacatcttgtgcattgcgaaacaaagctcagccttcatgaaggttttgaaaaccactacttcatctgcttcgggaagaggaacaatactttctcccccatctctcactatagatatatcatggaaatatttgcccttcatcgcttcaatctgcccttgtttaacagttgactttccaaaaacaacatggctggacctccatggccgatctttggcatcc

SEQ ID NO: 122763 - DNA, 340 bp, Zea Mays
gtcggccgatagctgcagtttataagccatggaaccaatgcgcttcagtacccaaaatggtcccgcgtacttaggcgcgagcttcttccgtgcgccggtctctagagactgagtggtgcggtggagcaaacgcagccacacctagtccccaacagcgaactccaagggacgatggtcggtgtcgtagtgtttcttggacaactcctgagcttgaagaaggcgctggcgaacctcatcaagatgtcgtcgcggttccgtaggagagtatccgcagcctccgtgcgtgatgtgtcacgcgagtacgactgcaagggcgggggcggcctgccatacaccacct

SEQ ID NO: 122764 - DNA, 737 bp, Zea Mays
attatccaccatgctattggttatcataatgcactaatcatcaaaggtaattaaagaaacacaaattaattgtattacagaagttggagtccatgtgtaagctaaacattcctcccacttgaacaatatgtttgagttgttttatgttgaagctacaaaatcgaagctataatttttgacagaagccatcccaaacatgaccttagtactagtagttaggttggttccaacgtgagaagataattaccggtgacgcggccgagccaacagattggtctagctctaatgttggttggtcaatggacctgtttataattgaggggattataattgaggggactgtttgggttcattttaccacttcgattttacccttctatccttacacaccatcgaaccactgtcataatgtcttcctcgggcttcgacgttgggatgatcgaacacgaggtgctagatatgttacatcaaactatgatggacacgttgctgaaacctgtctctggatcttcaatgagagggaggtgaaggacgtggcagcggagctacatcaactggcgtgagccatccacatccgattgatgcaagactacttaaacgacccatatgtctatcgttcgctctactttcgtcgaaggtaccatatgcagagaagcctcttcaaattttagagggattggatgagcattccccctacttcaatcatagaactgatacactcaaccacaacagttttc

SEQ ID NO: 122765 - DNA, 695 bp, Zea Mays
cgagtaaaagatgcatcaacacctatgtgtttagtaagttcatgcttcactggatcatgagcaatctgtatagcactcaagttatcacataacagaggtgtagaagtgtcacaagtgacaccaagatcagccaagagccagcgcaaccaaataatttcagcagtggtagtagcaagtgcccgaagttcgacttcagcactagaacgagatatggccgcttgcttcttggatttccaggcaatgggaaatgatccaagaagaatacagtaacctgtagtagaacaacggtcaataggatcacttgaccaagcggcatcagaatacgcatgaagctgaagtgggctatcagaagcatagagtaaacatctggatcttgtcccacgtaaatatcgaagcacacgaagcaaatgaccataatgaactgaagtaggtgttgatacaaattggctcaacatatgaacaacatgagcaatatcaggtctggtgatggtgaggtaaacaagactacccacaatatgacgataccgagttgggtctgctagtggtgtcccatccttcggacgaagttttaaatggagatccatcggtgttgcaacagtgcgtgtatcagtaattccaaagcgatcaagaagatcttgtatatatttggactgagacagataaaagcctttttgagtctgctgaatttcaatgtc

SEQ ID NO: 122766 - DNA, 792 bp, Zea Mays
cttttctcctaccagatggaaggctcttgggtcattaggacatcctactgctcagaggaggaaggatttcctcacctcctatggagttgcgcgctacgcatggggatccgcaagaagcccgaatatgtctggaaggaataccgcgaaaatggaatggagaagtgctctatggcggtctacctgggagaaagccaaagttacccaaaccaccctcccttccaagtcaccttcatcgggcaccgcttcctagacacttgccaaagtgttgcccgaaaagcccttaaacagctatgccaaaactacagcagagagatctttgaaaccccccttcgttacttcccacctagcaacaaaaatacccccacctggaggaaaatacttcaggccctgtcagggagagaccctaccgaggatgaccccaccattgtctacatggccggatacctccacactctcgataaccactacgatgaccttttctcccactgcacccacctaaactcccgggtggaaagcttagaccaacaggtcaaggaacttaagaaggataaggcatccctccaagagtgtctcgatgtagcagaaggtgaggaggccaacacccgcgaagcctaccgaaccctgaagatgggttacaataagaagctaaagaagcttgcccccatgaagaaaatccaaaagaagaccaagaaccaaagaggccaggctgagcagaggaagaaagcccctccagcaccacctcccgctaggatagagaatttgtccgacgtcgaggatatgtccctagctagc

SEQ ID NO: 122767 - DNA, 1431 bp, Zea Mays
tgagcatgtcgcaccgtcttaagtcattgccgacttaagccgattgctccgttagtagggcatagtggtcacccccgagttagataagcgtgagcatgtcgcaccaccttaagtcattgccgacttaagccaattgctccgttagtagggtatagtggtcaccccgagttagataagcgtgagcatgtcgcacagccttaagccattgccgacttaagccgattggtccgttagtagggcatagtggtcacccctagttagataagcgtgagcatgtcgcaccgccttaagtcattgccgacttaagccgattgctccgttagtagggcatagtggtcaccccaagttagataagcgtgagcatgtcgcaccgccttaagtcattgccgacttaagccgattgctccgttagtatggcatagtggtcaccccgagttagataagcgtgccaattgacagtgaacaatctgagtgcctttgaaacctttttattgatgatatttttctcgatttacagaatacatcgtcgttccgagagcctttgtgatgtagctacgggtagaacttcctgagatgttctatgttccatgagttcccaatttccgttccgtccatctgagtgaggcgatatgatcctggccgagtgacttctgctgctatgaatggtccttcccatagaggtgacaatttatgctgcccctcccccgttagaattcggcggaggacgagatctcccactacgaaggatcgatgccgtatggccttatcatgatagcgcctcagagtttgctggtatcgcgctgattgaatcaccgtattcagtcgctcttcttcgagtacgtcaacgtcctccagcctagtagcttcagcttctgctatgttatcaaagattaaccttagtgccccgaacttgagatcggcaggtagcactgcctccgaaccataaaccataaagaagggggtatttccatgcagagctcggctgggttgagttctcaggctccaaactacatatgacaattctctgatccactttcctgcgaacttctcattcttgtcgaagactttctttctgagtgcttctaatatcatcttgttggctctttctacttgcccgttggctcttggatgtgccaccgaggcatatttgatctgaatgctcttttgctcgcagaaatcgaagaattctgaactggtgaagttggatcctaggttagttatgatgctattcggtatcccgaacctgaatattatatcttgtatgaattccactccttagctgaggttagagaagcaatgggtttgaactctatccatttagtgaatttatcgatagccaccagtacatgagtgtatcctccttgagatttcttgaaaggtccaatcatatccaatccccagcatgcgaacgaccaggttatgggtaaggtc

SEQ ID NO: 122768 - DNA, 333 bp, Zea Mays
agacgacagtaacgtttcggcctacgagagtcgtgagccattgatcgtgcatcggacgtccctgattagaagttaggataacgtttcacgcgcgggatcggatccgttagacttagatcgtacggtcgagggtgagcgtggaatagttgcgcgcctagatctaatctggcgcgtccgttttggattgaacggctgaaattagaggataccccttcagccctggagttttattaaagagcctctgaaattttagaatatcaacccgccatcctttggcgctgtgtcctgtgtctgcggattattcccccgaagcccctgaacttttcggtaatt

SEQ ID NO: 122769 - DNA, 798 bp, Zea Mays
tgagttcccaatttccgtgccgtccatctgagtgaggcgatatgatcccggccgagtgacttctgctactatgaacggtccttcccatagaggtgacaacttgtgccgtccttcccccgttagaattcggcggaggacgagatctcctactgtgaaggatcgatgtcgcatggtcttatcgtgatagcgcctcagagtttgttggtaccatgctgattgaattaccgtgttcagccgttcttcttcgagtacatcaacatcctccagcctagtagcctcagcttctgctatgttttcaaagatcaaccttggcgccccaaacttgagatcagcaggtagtactgcttctgaatcgtagaccatgaagaaaggagtatttccatgcagagctcgactaggttgagttcttaggctccaaacgacgtagggcaactcccttatccattttcctgcgaacttttcatttttatcgaagacttttttcctgagtgcctccaatatcatcctgttagctctttcaacctgcccgttggctcttgggtgtgccaccgaagcatatttgatttgaatgctcttttgctcacagaaatcgaagaactctgaacttgtgaagttggatcccaggtcagttatgatactatttggtattccgaacctaaatattatgtcttgtatgaattccacggccttagctgaagttaaagaagcaatgggtttgaactctatccatttagtgaatttgtcaattgctaccagtatatgagtgtatcctccttgagctttcttgaaaggtccaat

SEQ ID NO: 122770 - DNA, 774 bp, Zea Mays
gtgctactcgttttagacaataccttacatcacgtggacgaaatgtgcaaggttgtcgcaacgttccgtcggacgtttgcaattactttcgacgggagcttgacaagggacaatatagaagggaaagcaagaatactggaggaggtatgaaagttagcattggcgggttcacctcaatgatgacgatgttgagttgcaggtcgcattacatgctttaagagatgaggaggaacttaggaggcatgcttgcgcgagtagtggcacgtatgagagggtgatggctcctcccatgggggtgttcatggcatgtttggaagaacaccttttaggaaggagaaaccacgcatggtccgaccaaggattgataaggcctcgttttcgaaggcagtaaggaatgacgtccatttcattggtaagcctattggacccccgagtctggtagtgatagacaaggttcatcttcaccccttcttccctatatcaattatccaattggtgaagtgactcagtaacccatgaggtgggtgtatcaatgggaggagcctgagtactaaatattaatggactcatggagtacgacttctgcgtggaccagacagacttggacggagtacaaaggaatgttgatgtgtgagcaaggtattatattattctcatcggaagggtataatgtgacatatgatcaatggaatgcttacccgtgggcatgatgttcaccggagggtgtattgtatctttgatgctattcatgaactatgaaattgtggcattaat

SEQ ID NO: 122771 - DNA, 300 bp, Zea Mays
ggacgaatgtattcgggttattgagcagaagtttggacttctccgatgcacggagactcagaagcctttatttgcggtgcagtagtaacgaggccctgccagcacctggtggggaaattatgtggctatccagcctgtcggccatcaagttacctgggatgaatttaaattagcatttcgggagcactacattctagaaggggtgctccatatgaaacaagaagaattcatgaagcttaaacaaggtggagatagtatctcaacaagttcaaccatttgtcccagtatgccattgatcag

SEQ ID NO: 122772 - DNA, 542 bp, Zea Mays
catctaaccctggtcggtgctcacccaacggccatcagaccaagcatgtccatacctattgggtttgcaatggtaacattcaaacttctagaacatatgataggctctggagttgtcggatccaaggttaatggttcggcagttggcgtcgatcaatccaacacccagatttctacacggtagagagaccaacaactagttgtctcttgagaccttataaatagagcgcattctagcttcccaacttaacatacaccttagtaagcctaagagaacatctcgcacacatctctagtgatattgacacattcaaagtgagattgtgagtgatctttagtgatttatattaagttattgtatttagtagcaatagtggccatattgagttgtgggattcttgttactcttggtggttgccgccacccaaacggtttggaggcaacagaaggccatgtagtagatttcgtgattttgccaattttgatcatcattgcgaggggcgcttgtgcttattcttcatgggatattcacgaagagcaaat

SEQ ID NO: 122773 - DNA, 647 bp, Zea Mays
ctcgttgtgacttgccatttgattagacaatgaccaccactcgaattttctgggccatcacccttccaaagaaaacttcgtcggatacgatcaatcctctgaatgacccattttgcggtgggaacactgttaagtggtagatagattgagatgacagaacagtctttactagggtttctctaccagcttttgataggagcttgcccttccaaccagctagtctagcaccaatcttatcaattagaggctgcacctcaatccgtcgaagttttctagtgtgtaaaggtagacccaagtattttccagggaaggtcgagatcctctcgggaaaaagatgaatgagcgagctgaccgtggcagattgacaacgaattggaaagatttccgtttttgctaggttaaacttgaggcctgagcaattagtgaaaattgacaagagttgtcgtaaattttgcagctccgtatggtccggattggcgaaaattccagcatcatcagcataaagcgagcaacgcaaacaagttgatttgggtagcaccggccttaaaaacctatttttgctgcttgctcaatcatttttcgaaggggatcaatggccaagatgaataacataggtgaaagcggatcgccttgccgcagcccccgag

SEQ ID NO: 122774 - DNA, 640 bp, Zea Mays
ctctcaaccaaacttgaaatgaagcggctaaaggcagccagtgatcccgcaagattcaggatgtccttaatacgggctggaggcctcattacctcaatagccttgattttctccgggttagcttcaatgccccggtatgaaaccaggaaccccagcaacttccctctggagacaccgaagatgcatttctccgggtttagcttggtgcgggttgcccgcagcttgccgaaaaccagggtcaggtcttccactatagtcgacccctctctagtcttgaccatgatgtcatcaacgtagatctccaccttgtcccgaatcaggtccccgaaggtcttactcatcgcccgaacaaatgttggcaaggcgtttttcagaccacagggcattacaacataacagtacaacccatccaccgtcacaaaagcggtatgcttcctatcctccctagacatccggatttgatggaaaccggagtaggtgtccaagaatgacaaaaggtcgcatcccgaggtagagtccacgatctgatctatacgtggcagtggatacgggtccttgggacatgccttattcaggctggtgtagtcgatgcacatccgaagcttccagtttgcctttggcacgatgactgggttggcca

SEQ ID NO: 122775 - DNA, 288 bp, Zea Mays
ggaaacaagtctgtccggtcatctacttgtacaggtacagtacagggccttttcgtcttcacggagctggaaagtggaaaccaagagtcggcggcgccgcggcgagcagagagatgctggttagctgacaagaaaaaactatccaatccaagggccaaggctccaagccagaagcgatcaagcgtccaagcctccaaggcacaacatagcttgttgatttgatcggtcttagagttcagactaaagcaagccaagtagcaactagcaacgtgctaacaagtagcaagg

SEQ ID NO: 122776 - DNA, 389 bp, Zea Mays
gataattttgctcatgaggcctgagtgctcttgatgcataagcaatgactcggttgtcttgcatcaaaacacaacccagtccagtgctagaggcatcacagtacacatcaaatggcttgttgctatcgggttgcgctaacaccggtgatgtggttaggtgttgccttaatgtgtggaaagcatcttcgcacttctgactccaaacaaacttggctcccttcttcaacaattcagtaatgggctttgcaattcgagagaaatccgaaatgaatcttcgataataaccagccaatcccagaaaacttcgaatctgatggacagtcgttggcggcttccagttcatcacctcttgcaccttatcgggatcaacaactatgcctgcctgagag

SEQ ID NO: 122777 - DNA, 336 bp, Zea Mays
tggatttgttgtattgaaggaagatgaatagtcaccgagtgataatgaaaatgttctaaccagtgatcaagctatgaatgcattctatgatgcgttagacataaatgagttcaaccgcatcaaaaatctcacaaccgctcatgagatttggacaaagctaatggaaattcatgaaggaactacaattgtgaagagtgctaagttatatgtatgcaaaggaaagtttgagaaatttctcatgaaggaggatgaaagtgtgtccgacatgtttaactggttaaatgagatagtgaatgagctcaagggacttggttttaatgtaccggatgtggattg

SEQ ID NO: 122778 - DNA, 779 bp, Zea Mays
aaattctagaaattagaaaagagaaagaaatattataaaatacaagataaattcataaatgaataaatcctatattgataagttcaaattaaatatataaactgagaataaacttgccacaaagtttggaaacttaaacctggaattgatttgaaatttgaattggaaatagaaagaaaacaaaaaggaaaatagaaagaatagtgcttgcctgcgcttgggcctaatctatcagtctcggcccagatagccgcatcaccacggcccaacacaacccgcccttctgtgtttctctgagacgatggcgcgtgggccgcggaaacggattggtattccttgcgccgacgcaggggacccacaggtcagcctcacgaattacttggccaggcgcgatcgtagcggaaacgtggtgggcccctatggtcattcgctagcatgtcacaatggtctgcggacccggtatgccaacgagcactgtagatcttcccagtcaactgctcgccgatttcaccgccagctcgagcgcagctgcgcccaaccgacatctctgggctattaagggtggatcacgggttcttccttctctcgttgttttcccttaatccagaccgccactcttaccgtgaggaagaagggcgaagtcgcgaccacctccataggtccacctctgcgcatcatgagaatccccgggctacagcgttgggcggtcgaagaatcagtggaaggcatcaccactgcgtggagaatccgagcggagttctattgaatcggatttcaac

SEQ ID NO: 122779 - DNA, 422 bp, Zea Mays
agacccatcaaaatagtcagagaaagactctgagcttaagccaaagaatcagtgtgtcactggatgtagcaaatgctgtggactatctccacaaccaatgcgcgtcgccattgatacactgcgacctgaagccaagcaatgttcttttggaccttgacatggtggcatatgtcggcgactttggcctagcaaggtttcaacgtgatacaccaactgcccatgaaggcagctcggcgagctttgctggcctaaaaggatccattggatatatcccaccaggtgattcataggttctcatgtctgtctgttctttgcaggccggatagtacacaagttcatgttttgatgacaactgtaaatgtatgtgtgcagagtatggcatgagtgagggcatatcaaccgagggtgatgtctacagtttc

SEQ ID NO: 122780 - DNA, 529 bp, Zea Mays
cacaatttaaagcttctgcgccaggactgctacataagtcatcagaagaaggtgccttatgagtttgacaattgcttgtagcaacccatctttttacctgataagtggtcacgtagacactctttatatcttgcagttcatcaaccatcttgtcaatcaacttgctgctcacctatttctaaagatagcctgccagctcgaagaacagataaaaatatcgagtgcctactcatttctgaaagctgtagaattggaattgcagggctacttctcagcttttgatggccgcctggtattgtagccgagttcatccgttaagacagcatattatttagcctcttatcatttccacttgtgttcttacaaattagagtgtctactacatggatatatagggccggtacaatttaattgatcaagcagcatctgaaatgtttgaagagggatcagttgacgacagtgattcttatcttcatgctgtgagggatatccttagcagtcactcgagtaagctggctccacctacaat

SEQ ID NO: 122781 - DNA, 488 bp, Zea Mays
atatcaaataaaaactctagaaatatctacacaaaattccctacaagttttgtattcaaaagataattaaatttcaatatctcgatggccccaaatagccgacaaagtacaccctgcgttctgtttttttggacagcaacctagctgagatcaaaatgtgatatctcctagaatattacaccaaattggacgcataaatactctatggaaagatatgataatgctctacatgaattttacatcgattacggctaatctttgaaccacgctacgccttccacgtcttctcgaacgtctttgccttttccgtctaggatcggctgccgaatctcattgatcttctcatcatttttgtgcccatctttgatatctcgttctagagtgggttctagctcaactgtcactccctgtgttctatttagaaatccaagactcagtctgtcaaattcctttgctagtttatatggcctcgggcgagtgaccatcat

SEQ ID NO: 122782 - DNA, 534 bp, Zea Mays
atgcttcaacttcagtgacagttggcaatgggacccttgcttctttctggttctccaattggattactggcacgacggcgcgtctcattgcccccaatctcttcattaaggcaaagcgcaaaaacattaaggtacaaaaggccctgctcgacaatacatggatttctcttatttctctggtttctggggaaactgaaataattgaatttgtgagactttgggaagccatccatgaagtccatataaatattgaggaagtagacaaaatcatatggcgaatactctaccaagagtgcttacctggctcagttccacgggagttttgccaagctcaaactttctccagtttggaaggcgaagacggagcctaaatgtcggttctttgcatggaccctcctccataaaaatattctagcggccaataatcttcagaagcgaggttggaataatgatcctatttgcaagctttgtaagcgagaaccggagacggtgggccatctagcaaaagattgcatattcacaaaatcgtgttgg

SEQ ID NO: 122783 - DNA, 619 bp, Zea Mays
ggcaaatgataccatgtaagattaggcacaaagaatagtagatagattataggagatatggtgttacacatatataggcaaggatggccgagggtttatagcataagaaccaatcaatggagatcattgtctaatagagatcaatctatatatcctagccataaagacattatgcccaaatagaggcgtgcaggcccagcaagggctgccgcaccctgtctaacagtagccaactatcatcttgagctctccatcgtatatccctctatgcacataatatggttctttttatcccctcagaggcaatggatattgctgtcacaatgagcattctctggatccaccttctcatggcttcctccgaatgcaggtccagggctgttagagtggtggactcgcgggagccttcattgtggcgctttcgggagtgaccgacacagcctcgcgatgcaggacagaaaacagacccttgatatagcttgtggctccacatgccaaccagacacccgagcctggggaatattcctggaattggccagggttggagtctggtctgagccaagatcggggcaagcctcgcggcgcttgcttggcagtcgtcctccaaggttgggagcca

SEQ ID NO: 122784 - DNA, 604 bp, Zea Mays
gttggctaaagcagcggccaagggcgaggccttgccctcagacgtgttctaccacgtcatcggcacaccagctgtccgcaacccagaaggtttacaaataactcaggacaccgaaggccaccgcatcgtcaacctcatcatggccaaagattggtgggccccaataactctgtatctgcaaggacactaccatccaagcgatagcaatgaggccaaacgactaaagcacagaagccgggacttcgcattagtcgagggtcagttgtacaagaaggggatcagtcagcccatgctgaagtgcataactgaaatcaaaggcatacaaatcctccgcgaagtccacagcggaacttgcggctcccactcaggacccagggccctcgctgccaaggtgattcgtcaaggattttactggcccgcaataatttgtactgccaatcgagtcacgaggtcatgtgaagcatgccaaaaagttctcccctcgctcaggcagcccttcgcaattcaccaagctcatcgcccatacatggccacttcaacgctgggggctggacatcgttggaccactgcctacggctcaagggaacctcaaattcaccttcgt

SEQ ID NO: 122785 - DNA, 368 bp, Zea Mays
tgcatgatattatagtagcctaaggaaacttaatatggtcatgcatccacagaaaataactaattttagatttaacttgctctcacatgctttattgcattaacaaattgttatttttgtattaaataaaatataaaatctggacatgtgaaatttatacattggtcatgatttgttattacctatgcctcataaaaatcccagcaccaaattagatagtttgatatggtgctaaaataacacccattttataattacaagacttagtgaaaatttggagtaaacaaaatcatgcatattcatgaaaggcttgagttataccttaaaaccaattagaggttaagtggttgtgtcatgatggtctaaag

SEQ ID NO: 122786 - DNA, 389 bp, Zea Mays
gaacccaaacatttcaggcaccttcacaacaccttcagtaacatattcgcgcaatttcacgccaatctgatattccaggcttcattttcacacaattccctgtttcgagcgatcaattccgagccgagtgcctaaattctgttttctctgcctaaattcaaaccaagcacacacttcactcatatttacccatataaacctattcgtgaagtatcaactcaattccacgtcctttcatgcctcaacttgaattccaaacctcctatggcactatttctcgttcaaacgccgttttcgcgtcgtttgacctctcgatcgccatatctctcgttttccgtgccataattctctgtgtatgtatttattcacatttcatatacttatgacta

SEQ ID NO: 122787 - DNA, 516 bp, Zea Mays
ctatttttggcatccccaaaggctatttctggaggtcggtagcacatgtttttagggttgaatagtcattttcttgtggttggtctgcactaacgttttcatcccctaaggtcggtagcacacgccttcatgaccgaacaacattctttatgtctcggtctgcctcctatgctttgggcccttaggctagtgaggttgtttttggcctcccctaacttataacacatgttttcatcgtcaaacaatgatgtcatgtctctcttcagccacccatgttttggtgcctaagactggtaaggctgtttttcgcctcgtgtgagctatagcacactttttcaaggttgaacaaccatttttgtgtctccattctgcccccacattttggtccccggagcatggtaatgcagtttttggcctcctgtgaactataacacacgtttccctagccaaacaaccaattttatgtctccagtccaccacatatgttttagtccatagaggctggtaagacatttt

SEQ ID NO: 122788 - DNA, 624 bp, Zea Mays
ctgaagccttctatcaggcatgcactgggggcctttccattggtggacttccgtaccacggtggagcaggtgctgggtgtggaaatgcaacaccagtataccatggagtcgcagaagtcttcgggtgttgatcagcctcgtggccaggacacgaggaggggcaacactggaggtccagctcacaagaggggcaagtctcagcattagcgccaccatccttaccgtggcaaatcttctgacgcgggtacttcgggaggaagtactcagaggtttcgggccgttcctaagcccgagctagggctggtgtgtttccgctgtggagatgcgcatcgccgtgtacagtgccagtggagtggcaggtgttctatctgcagtcaggaccacaaggacgtggtgtgtaggaggaatcccaatgggaagctcagatgggagccggtgacttcctcctcttctcagggcactatcaacatgatgtcaagtgctgagcagcagttttcagttcctcttcctccacaacagctttatgtgcccgggacttctcagttcgtgccgatgcagggtttccctcagtatcaggtcgcgcctactcctgcaccgtctacccctgtgctgactcagtttgga

SEQ ID NO: 122789 - DNA, 508 bp, Zea Mays
tgcaaattttccaaattgcaaggggaggcacttctatttatagaggaatcctagggttagggttccaaatgggctgggttgggctggcccaaaactctcaaacgggtcgcgctaatttattttccggagtaaaaatgctcccgcggaatttgtctctacggagaacagagcgaattagagttccgacgaatggacgattgcacgattaactcggtcgagagttcgatttgactttgctcgaaaataattcctcgcactcaattaggaacaaaatgaattgagaccgattagtttcggatttgtgatcgagatcaagcgggtcgggttaataaaaatcattgtcagtgttgattctgaaatcagattggatacagagatattaagccgaatcggataaaaattaattagaggatgacctgttgagtattccgtttgatagtacggactcggattaatttttggacatagatcaaacatcgagaaaattggattcagacacagctcgact

SEQ ID NO: 122790 - DNA, 653 bp, Zea Mays
taaccccggcctggcagtccccgctccccacagcgagagatgacgatctgaggcgcaagaatataatcttagcgtgcgcatctcccgctcgaactgggaagaaaacaatataatgcggctgctatgggcagccatcgtgcttcccatgccggtatgatttggtccctcgcagtctgctaggcacggcagatcttaggggatcctcctcctcctcctcctcgtctcccaccccggcctgtgttaattaagtactgctaactccgtactacgcttcacgatcgaactaacttgagttgtataatcccagcgtagcagtgcgcgttgtgggcaagtggctacaaaagcagcagaaccttctgcaccaaaatcagctaggtcgccacgcaagcaaacacactaggcgatgctccgaacaagcttgcgctgcgctgtcccagtcccggcagctgtctcgcttgcatgcagagcgctgcaataattcggcaaggaacgacaaggctctgcgtgagacgcgagcgtgttattttaatccagtctcggtggcctggccatgtagtagctagctcctagctaggggagtgaggaagcaacttgcgaggcatcgcccatgccgatcgtcaggcaggcaaagggcaactcgctcctgcaactgc

SEQ ID NO: 122791 - DNA, 529 bp, Zea Mays
gccatcatgagcaggagggttggagacaaactcagagaatggcctatttggaggcaggttccacgtagaataagccacaggagcgccagcatttgagactctgcccctcaaaatcatgtctagtcggctcagcagatcttcattgggaatcctcctattggtgacatcattgacgccgctatacaagtagcgcgggataaattctatccttcaagggttgaatgtttttgaagacgtagtcagcaaccacagcttcagcagtcagaccccatccttcagcaagcagatctcggcaagcaatactttggcttctgttatctccgaaaaggtaggagattctacctagctaggtgtgtggacatctggttgcctccccggctgagggggagagacttgcagtggttttccacgatgaaccactcaaggcgccatcctttgatactgtccttgagaggaatattgagatactctactttccttccccgacgaagctccaaacttgtgcctccaacaagttggtgctgtcccc

SEQ ID NO: 122792 - DNA, 2655 bp, Zea Mays
gcggtgtctggtgaagccctacaacaccttcagtcgtaggacctaacaaccaatcgtgtgtggcgcggtagtcaacagtgtgtgtcatgcactcgccaccacggccagtgcagagcatgtccatctttcgccctacctctacctcagtgcgtgtctagagttggatgatgaccgccgcaacttggtcctttgacgctaatagcataagccacatgaagtgactcttgtcgtcgatgacgaggaggaacaacttcttccctccagatgtatccagggtgaacggaccacacaagtcctcatgcaccaggtcaagcagatgaggcgcaaggtactttttgaccatagggaacgctacttcccagccaaacagatctcgcatacttggtcaaaatggtcaatcggtggtagtatgcacaccaatgtttacaagtcgggcgaccagctggcagttggtcgagtgagaggggcgaccaggcgactaatcgcgattagggcgacgattggtcgacctaatcggtcttggtcgacctctagtcgtccgttagttgtcctatagatttaaggacatatgtatatgtatataactatatattaactatataaacactgtatttctacaataatataggcataattagtagcagactagcagtaattcagtaaaagtgtaaaactgaatccatccaaagtccaaagtccaaactgaaagtaatattagcataattacttgcagtaattcagtaaaaagtattgtattacctgttggctgctacctagagcagatcagcatccaaacaaaatgcatcagcagcagcaccatcttcgtccatgtatccagttgcttcttgggtttgttgttgttctgcttgtgctgcagcaacaccatcttcttgatcatcactatcctcttctccaatatcttgagctgctgtatttctagaatgcttccttgtcctaacatatgttcgttgaggctgagaagacgaaccagcacctgcaggctgcagcagctattcttggcaagtttctgcctcgaagagcctgagttgctcctaatgcctcatccacagcatgtcatatgttgttgtcaccatcatcttcattttcttcaacccattcattttcccacatgaactcttcaagcatcagtgggttgcgtctttttcctttggatcccagctcccttagtgtttgaaacctattttccatcttcctgttgtaactggcatagaccaatttattaagcctctggtgttctagtcggttcctcttttttgtttggatctgaaaatgcacaattgcaagacatcattttcagcaaataaagggctgacccatcataatctgccagcttcttgaattgacgacattcaatggaatcttgttctcatatagaaaatcaactacatggtcgtcaacaatttgctttgcttctgttcctttctttgtgcaatgctcaagagtgatctgagaagttttatttttatgtctctctgctacaacttcctctggagtcttgcaaagcatggcactcactgatttgcttgccttctgtgtatttggttttataggagctgctacaacaaatgaagacatggaagcttgagcaatttgcttttttgcttgcttggtttttgtcccagaacttggtaggggacatacatcaatctgctccccttcctcttcaccttcatcaccatcagcagtaatcataaccctcatgttccttctcagataggtgtgcatctcctttgaaaccacttctggtactctagcacacttcatggtgtcaccaaacccaccggctagatgctgcttaaacctcttgattccagatggcacaatcttcttacagaagacacactgaacaaaatccttctttgttgtgtctggccaccacccaaactgccatcctgggtcttgtgaccttgcctttctcttggggtcatttgcttgtgcactaagctcaggagggagtgctgcaattgccttttcagcaagggttttacaatctgcagcagctgataaagcagacgcaagaccagtgctatctgcatttgaggccacatgaggaacaaaagcactttgacttgcactgccgaccatatttgactcaaggaataagacctcaacgttattagcacgtccacagccaccattaaaatttgaacagacaacacaaacacacaaacagagatacatggttactattgggtattgggctactgcctactgggagataccagatgactgctatcttccgggcgttgcagaggtaatagagggaaagggaagggagactaggagataatcagagaagggagagcaagtgctaccttcatatgacgagctcatcttcaattcttgactagctgacagacgccggagcactggacgccgctggacggctggagcacttggaggctggaacagagacgtcgacagaaaccagagaggacagaggagaggagtagggtttctggcggctgggaagggttctagcgggtttctggcggctgggaggggtcctggcggctgggagggtttttggaggggcaggctactgtagatgggccaaaaaccagagtgaagcccagtaccaaaactgcaacgaccaaaaacgaccaggaagtgttcgaccagacaactaatcgc

SEQ ID NO: 122793 - DNA, 379 bp, Zea Mays
attttctaaaatatttgtaaggttgattgtgagagttgtgagaactctatgtactgcctaggcacaacaaccgagaacctcgtggtggccaatggagttgccaagactgttggctagcttgtcatgcatttctacgtacgtacgtacgtgtgtgtgcgcgcgccaacagatcgatgacacgtacagcttttggaaagcgctagagcactgcacgttactactatcctagctccataccagctcagcccccggcgagaaactctgctggttagagaagctccatcatgcatgcattcgtgctacagcgggtggcatatcatccaatgcaaccacaagcagtctggctagctttgcacatatttaattagctcttgccaac

SEQ ID NO: 122794 - DNA, 601 bp, Zea Mays
gtccagctaagatgggacaaaccatctttgtggaggaggagcacgacgacgccgattgggttgctctcgagccaactccaccatccgccccagccgagcctgcttccactactacggctgatggacccaaccccactacttccaccacttggggtccgctcgagccagctcctactgagactggaggagttgaagctgctattgagggggaggccacttcctcaagggaggctccacaacatattcagcgctgtcacccacctcagcagatgatcggggtgcttcacgagcgagtcactcgctctaggtcacaacacatttctcattttgctcactcagcttttgttgctacttttgagccccgagatgttggacatgctttatttgatcctaactgggttaatgctatgcatcaggagcttgaaaattttgaaagaaatcaggtttgggttttggtgccacctccttctaactgtcatcccatcggtacaaaatgggttttcaaaaacaaacagagtgaggatggtttgatagtgagaaacaaggcgaggttggttgcccaagggtattgccaaaaagagggaattgattatgaggagac

SEQ ID NO: 122795 - DNA, 550 bp, Zea Mays
aagaacaccgccatacctgctcctttctaccctaatgtcctcttcatccagaggagattggagtcagcacccatctccgacgatgagcctaccatgcagggggaggaacctcccgagcgtgatgcccggcgacggaggaacagatgctgaaatatgcagcgacatcatgaagccggagaatgggatccggtgcatcccgtatcccgggacgaagcctcagaagtgggggaatcccctgatgaacgagtacaccgagaaaaacgcaactcccgccgtcgcgatcgtcgacaggctcaggagcgagagcgagaactagatgaacaagatgctagactccagcgagagaaccctctcctcgctcgaaacctgtaccccgattttgctcgagcattgaacacgccgagtgaagttggaggagtgctggcagagatagccgacgtccttccgcgaaccccagaagcggaaggctactggcggctgcttacacaggcggtcaatcatcttctacccctcgctcatcctacaaacgacctatgtcatgccatcaaca

SEQ ID NO: 122796 - DNA, 375 bp, Zea Mays
gtgtattgtactcatgttaactcctctgggcgaagggctccttcgcgaataggtgactctagtccatcggcctaaaggcatagttgtagtcgacgtcgggaattctttgacttggttgatcccgtgtcaggcaaggatgtgtgtattagggctagtgagttgggcgacgaggacttgggacctcgttgtgtcatgtcgggggtcgtaagtggtgatcacgccatggatcgtgttagcgagttagtcctcgtgctttttgacaagggccaagagctagagattatgttgtttaattgcagggagcgtgtgctgatcttgaaggaagagccccctagtccgtgactttgtgttgtttcacagttatgttattatgta

SEQ ID NO: 122797 - DNA, 428 bp, Zea Mays
ctaggcaaactccttaaagtaaaaaacttcgagcgaacaaagaactcaccgagaaatccgaggccttctcgacctcgttgtgaggtagcaagcccaagagttccatgtcattgcaccgggaggcgggggccgaccagtgtactgcatccatagtaatgggaaatgacaccttaatgggacagctaccctagctcgaggaaggcatgacatgggtcttgccccattggtgcccaaggtcgggcagaagcgcgccgagcattcctgacctagtgcctgggaggagggataggagggggtcagacaatagccatgagtacaactagcgtcaaggaggccgcttcaatcccgatgagggccaaagtttgagccccaccgtcggggccacgagcctttagccgccacatcctctgggcgtcagtactgcagtg

SEQ ID NO: 122798 - DNA, 807 bp, Zea Mays
acatagtatacatctaagtgcaaaggaaaaataatgtatctacagacgccaaaacgtcttataatttagagtggagggagtacatgctatttgcggttggtcaaattttcagattcatgtttatgtgtatctatgttacagtagagaacttgatgatgagttctctgaagggcaatgcaatgcctagaatgtaaagcggatgcgaaactgaaacggcatcttactctacgcaattcacttatattttttttccaaatttacaattgtttgctcagttcacacccatgtactttgattggaatctattgacacttttgcaaatctgttagtacggttcacttgcttttacatactttcttttattagtaatttcctgtttggcatgagttgtcttaccttatcatagttgttgtgatcattagctactaacaatgtttacaaattgtatagtcgaagctagtcgccgtgggactgaccaggcgattaatcttgattagtcgtcgaccaggccgattagtcgagcctagtcgatcttagtcgtcctatatatcaggacatatacctactatatgtatacacaataaagcaagcatcaagactacattattgtttagctggtgacttacttgtgagagttgttttctgcactgtctagagctccatattcatgtcccaaacttcatttatttgctgacttgctgctggagtaccaaaccaaagtaggacataattagcaacactaatgtagtcttggtcttgactaacttataagtagagcagctcaacagtaacactactgcattagca

SEQ ID NO: 122799 - DNA, 815 bp, Zea Mays
agtccaagtgtccaacacctgtcatgtgccataagccacattaggaatttgcacttccctggtgcccaacttttccatgtcctctcccatggcctaaattgtgttgatccaataaaaaatctctcataagctgatttggcagaatatattcctaaattagaaagctgccaaaaatgtttgtcctccacttctggttgtaaagttcaattagcaaggatgtcccacaactttagggattctgccaaaattgttactttaagttctccttttatgtcttgcacccacttcctgttttagcatcatagacactccttgttttgcccttgcagagatcaactcagctaaatgaggtgttagttgctaaatactttggccatgtatccatttatctgtccagaacaatgtattctttccattgcctatctctgaagcaattgccattgaaaagaaagcttgaatagagggatgcacttgtatttaaaaatatgcccatggctagttatgttctatcttttgaagccatagccaacaggttctaagagcctagctcatcaattgtaaatgagagatacccagccctccaaattgtgttggtcgagtgaccttggaccaggccacttgacaatgccctccatttgcatcttttcttcctttccatagaaagcttcttctgattttgtcaatggccttaagtgcccaagctggaaggtatattgccatatctacgtataataacaaggaggtgagtatagattgtacaagaattctccttccaggttttgtcaataggtctgccttccagctatggagctgat

SEQ ID NO: 122800 - DNA, 858 bp, Zea Mays
ttctgtttacgacacctgaaccagtttttggtaccggtgggggagcactgtcccaatggctggccgccgttcgccgtcggcggatcccggtctcggtcactgcgaagctcccgaaatgagatccggtggcgctttagagccctcgtccgttccaatacgcagtcggatgctgggttacgctcgcctctaaatctaagcttattatttatgcctttgcttcgtattcgtcagatctgatttcgtatttctgtctcgaccgaaattttgcgcggtgcagtgattataaaaacattcctcgtactgatgggtcatcctcgtgaacgactcctatacacccatagaatctgagcacccaaaacacatctccaaattttttttactttcgtgctctattttgtttgtttgttatactatttaggttttttaaaagaaacttgacttccgcgctgttttgcaaatctgtatttttcttatttgctttataatttgtattggatggttttgaattacttggatttatcatgacaatacattgttgtagcactcaaaacactgctagatttatcttctagcctgtggtcaagtcgtcacagcgagtggctctatcgttcatctactgcttgcccagtgcccagttgacacccgtccttcctgcgttgctattgtcgatcgacgaattcttcatgagatcttctatctggtcgcaaggtggaacttttggttccgatgctaccgcaacgtcagcatcgcatcaacttttgtattgacacaatgtattattaaaacaaatatgttattgataatgtaatgatgaaaattaaaatatgtaatttatgaaacatataattttactagttg

SEQ ID NO: 122801 - DNA, 785 bp, Zea Mays
aaccggagtaccactacgagcttcatgcccatccacagcatcagagagagaccactgacgggaaggggcacctcagtcccaccacctagagcagcacccgcagggacagcgcccctaggaactcctttaccaccagcaccctgagcagcaccagcaggagcaacatgaatggcttgcctcggaatggccaactcctgctgcatggcctgcatcacggctaacattgtcgccggactcatagaatccccactatgatcttgcgagctgccacgagccctatgaggcagcataactgcagccacatgagtaagtaaataaataaataaataaataaataaaattggcataacaccaacttcaaataatatcaaactagcattgacaattcataatatagcaatagtaaagcaagcaacccatcctatatgtgcagtgtgtcaacttatcaccatttcctcgctaggaccaacaacctatccctctgataccaactgtaacaccccattatcccaaacacaatggatgtcaccaaaaacaattcccctaaattgttatgtataaaaaatgaagacagaaaggaaaaattcggcagcaactcccttggaagttgcataacgaggaaaccacagtgttcaaacatgatgcaagagaaaggtaatccacagtgtataatcatgatgcaagagaaaagtaaacattcaaaacaagattaattcagctaaccaaaaatacgaccaccataatgactagaacatattagaccacttgcacacactatttaaaaa

SEQ ID NO: 122802 - DNA, 378 bp, Zea Mays
actatgtggagacctgttcgactatggagcttcgcccgagcacccagtatggatgttaatataattacattttcagccgattacactattatcgacaacgatgaacctgtagttgctcagttcgattttggtcctaaagagacaatcttcaccaaactaaaggaatcagttaaccacttaaaaccaatctttgtgtgctgtcatgttgatggaatatcgatttccaggatgctggtagatgttggggcagtcgtgaatttaaagccttattcgttgtatagaaaattaggcaagcagaacaataatatgatcaggactaatatgacgctcaacggtgttgggagcgacagtcctatcaaggccaagggtgtcacgtcc

SEQ ID NO: 122803 - DNA, 1173 bp, Zea Mays
tgtgattggacggagggtatttttgtttgactactattaagacaatttttgtggtagttgtgatgccaaacaaaataaacacagcttgccatagaagccaggcatgatgacaattagcaaggaagcacctcgtttagtattattaattatagatgaccggtccatattttgaaactgttcttggacaacttcataagctttagtttgttcgaatcccgtttgtctaggttcagttcaatggtgtacatgtcaatttaattgttctgttagaatctcgtttgactttgtaaacatgattttagtgtactgagttcaaggtcatatataccaaacactggtattttgaatacatgtttggttctattttgatcttttttttcttttcatctcgtgctagggtattagttaggctcttgttcagttagggtgtagttcttacatttttcaccaaagcatcgtaattttggctataattgtaactgatagagcacatagcaatgcttgaatagaaaagcacatctgacccagttagtgttccaggccaatgaactccatacagattagatcagtcttatttcttgccaatggttcaactcattccattaatgtcattctgttcttgttagcaacaaacatatgtaaacttttcgatttatctttttcctagaccctactcatgtgggagcctctagcactgtctgccctggattatatgtgataatatttcatttggcattttctcatgcactagcaagtgtatcatcatatctgcacatttcatgcaaaacgtcttgtaatagtacatgctctatcttttacccacttctctttacactgaattatcaggcacatacaataatgttttgccaaagatcaattcctttctctatgatatacacatgtttgctgggttgcatcacctcgaacaagttccgttttgggagttgttattaacagtttggagtatgggaagcagattcaaggtttatctatcaagtattggttggcccgcaattcttacataggttctcgctcgatgacatttatgtgcagggtattggtgggcagtggtacatctgcggcgggcacaccctaaactgcagcaagctctgtcgcatcctggacagactcttcctacagtaccccataacgacaaggtatggaaattggcag

SEQ ID NO: 122804 - DNA, 491 bp, Zea Mays
cgacaatgggagactgatgacaatctccctcgtcaggctacatctatgggtatcccttttgctccccgctcgcctgacgtgcccctccatgcacctccgccagaaataaatgaatggcatcaacaaacttatggagttcctttcatgacggctgaagatgaagaagctgaagaagaagaattctttgatgacagggatcagtttgtcccgcctccccaccagggggatccgggtccatcttcatcctatcctcccccctaggatccttcaggcaccactcctcccccagctaaccctggggtggaaaattttgcagtcaatctagcgtcgcgattctttgatccatccccttcctggtgatttgtggttgtttctcttctcctgttttttggtgctcgttgccaaaatgggggagaagggttgatggcttggtagcccctggggctaaacacttttatttatgtaatgaacactatggtctgtaataactc

SEQ ID NO: 122805 - DNA, 531 bp, Zea Mays
cgtcagggaggcatatgcaacaaccataagatagccaccgacaaattggatctcacaggagagcccaaacttgtataaacattgtgtcacctgtgtcattactttcaattgttagatcttgcgtatacccacaacaaattcactaaacaccatcgagaaatcctcgatagttggcacaccatgtagggggacactagtcataatagatctgatgtcgtccatcaatcacacacaggattaaacctaaatcctatttgcgatgttagtactgtgatatctactgacccatgtacgcagcaagggtcgattggatgctgatttcagctcccatatgatcaagtaaatgatcaaggctcgaagacattggaccataccacgacaatgacaacccagaacatagtgagttcaatccaagattgaactaaagaaaaccaagacccgaggatcaccactaggaacgaagtctcacctcgactccgacttgggctcggtgacatcatggtccgattccgactctagcaatgcctcaac

SEQ ID NO: 122806 - DNA, 887 bp, Zea Mays
gagaggtagttgaatgtcttggtatttgggagtattgctactggtaggtttgggctatggtcttcactggttggttcggcattgttcttgccattctttctttggtctcctttgtggccggacaatccttggtggactgcctaacgtctttgccaaggaaggcatagtacaattttctatcttgcgtaggcctttgcctcgcccgtggcctctgttggtcttgtccccttggcctggttattgagggtgattttggttgcacgggggcttcaacctactgttgttgattggtaatgttgtgtacttgttgttggcgatcatgctgctgctatggcttttgacccctagtcaaaggtttgctgcaagagtggagatatccttcgactttcactatgtttctagcttgtagtaatgcagctcctctgaccttgcatatttctcaaaaagctgatagagttcctggagcatgcttggggtccctggtgtagtggttgtagatgtggccagcttaaaggccgatgattgcatagtacacgacgatgtggtcttcgaccgatgggagctaggacttcattaacaagaatttattgtagtaatcgcaaaggctttccttctcctaatgcatgcaaagagattattctacaagggcatcagtatctagcctataccctaaaagttgaccaaaaaattctcacaaagggtcctctaggagtcaatggatagatgtggcatccttgtgaaccaagtaagggtagtcttcgagcgctatgatgaatgacttcaccatgatgttgtcgtcacctcctgatggggccactccgacctgataactaattatgaactacaaagtgtcagatcttgaggttgcaaaatccattgcatctgat

SEQ ID NO: 122807 - DNA, 545 bp, Zea Mays
gccatcaagaggcctatggtctatggagccaaacgattgctgacagagcgtgttgtgcagccaaactatttgcgcgtacgacgtcctagccctagctagttgactggacagacggtatgctctggacttggagaggactcattgctctcatcatatcatgcatgccccaatataatggtcacatggtggttgttaggaaccttcatcgatcacatgccaaaacaattaataagagattaggtttcaggaagctctccaatatgagattcctcctcctcgccaacccagtcgaagaatcaacagtttgttctcttctctagcgctagctcatggatggatgatcagttgccgagtagtggtggtggtgcatgattgagacgcgccggccgtctgcctatatattcctttctttccttcgtctcccgcgtctcagtctacctccagcgctccatcaccatatgacaacaaaggttagttgtgctgcctcatggaacacagctttttttttattatttgcttcgcctttgtttgattgcttgctgctg

SEQ ID NO: 122808 - DNA, 1020 bp, Zea Mays
atttgattaagtgagtaagccctagtaccacatgaaaatgggagaaaaagagacctaaaactggcctgtcagacagccttaactgtgaaaacctaagttcagtgacatttggttaaatttggaagcagttcatggttaattcgatggagataaggtcagggtcactgtggcaaagttgaagccctaacattggtaaacaaatttgttgtattacgcttggcctagtgttgtgcaaattttgaagtaaatcgccccccaaatgtgctctgtcagaacgactgacgaagatggccatggtaaagtgcacgaaaagatcttcagatgcagtgtatcgtgctgccggtgaactccgcgccgcgatcctcgccggtgtcgcgatttgtgctcggcgcaaagtggataaccgcgggggggggggggggggtaaagatctggcgggggatggattcggtcgcgggcaggggcttatcggatgcacctcatgaccgtgcgacgtggccgaacggccgatgtcgtcgtgggtcgctggtgagctcaattgcgccacgctgagatcctttaccatgtagtcataattgtggcacacttaaaattaatatccctgcgtttgtatgttgttgagcgccacgatggaccctccagtacaatgtcttgtcacagtcgtgctccgctctcctcccgaattcggagccaccgcttcgagctgctataaattgataccccggcctgcttcgccaacttattacaaactcaaaacactagctctcgcctctgattagtcaacgtagctcgcgaatttcaaacttcccccaattccgttttccgcaccaccgtgagccccctccatcggcccactgtcccgtcccttcaaccgacttcctagttgccgttcttgagctctggtatgtcgctaaagcttaccatgcccttaatttgaatgttgttgtactatatcgtcgggaacacaacgggaaagactccatctccgcgggtgcacgtagaccaagctttagggcagca

SEQ ID NO: 122809 - DNA, 344 bp, Zea Mays
ctcagcttcagtttgatgtcttctggggaaccctaatggacacaaactttcacaagcatcaagttattgattggaaatttatgttgggccagtcagtcatggagggattgattccaaagttcgaggcatgtggtctctatgactttatgggccagaagacagacttcagtgagatggatgtgaaacagttccgggcaactgctgagattgacattgatgagcaatcaatcacttggatgactggctttaagaggtattctgcaacctttgctaagtttgctattgcaaacagtttggactatgatataatctcagctgggattgatttgtatactgaggacaac

SEQ ID NO: 122810 - DNA, 627 bp, Zea Mays
aaaaaagttagtcaaagtgtgacaagttaggcagaaaatcaaacaagcctcagatctctactttgtttggttacagggaccttaaacacattaaatgcaacttacgaagtctaaaatgccccttccatctctcaactaccgaacacaatacatgtacacgtaatgggtggtgaaggaccggtgaggcgaccgatgactaaccccaccttggcctataaaaggaggttggtcacggtcacgaggatagaagacactcaacagaagtcgaacgcacacgcccagcgagatctgaagatctagaggccgaagctaaggcatagcataggactccagtttcgtagtctttaggtccatccgcgcataagagactttggagcccttcctctctctctctcccccacttgtaacccgcttgtaactcctactacgatcatcgagcaacaaaagtgccagtagcgtgagctgacaaagactggatgtagggacattctgcccgaaccagtataaatcttgcgctctccgggcacaccatccatatcctagaaggcacacatagaaatttaattatcggagcaaaggctcgaaacaccaactattggcacgccaggtaggggccttgcgtgttct

SEQ ID NO: 122811 - DNA, 829 bp, Zea Mays
tacaagaagctataactggaagagcatggatgtcggatatttgaggggccctatctgtgggggcaattgttgattatcttcacctctaaaacttattgttaactgctgaattaaggtagaatgttgaagataagcacatttttaggctggctaccaatggaaaatattcagcgaaatctgcctacgaggggcttttcattggctcgattccttttgaaccgtatgagaggatatggaaaacctgaccgcctcctaaatgtcggttttttctgcggttagttgctcaaaaaggtgttggacaactgatcgtctagcaaaaagaggattggatcaccctgatagctgccctctttgtgaacaagaaagtgaaacaatagaccatctactggtctcttgtgttttctcaagggagtgttggttccttttgttgagacaatttggactgcatactctgtccccctcaaccagaaaatgatagtttcctggactggtggaggacaataagtgaaatggcagctggacaaatgaagatgaggattaactcccttgttttgcttggtgcttggaccttatggaagcacaataatcagtgtgtcttcaagggcagcaatccgagtattgctgctgttctggagcaggttggagaagagcgaaggttgtgggagatggcaggggctaaagggcttattttcctagcagctaatcttcctcacggctaatttctgtttttttcctaaggcagttcaaggtttgtttactgttttgaggggtttaaacctcaatgtcatggcttgtaagggcttcggcccaactttcttcttaaatataa

SEQ ID NO: 122812 - DNA, 274 bp, Zea Mays
ccatgtttctttccatagatcatgtcccgaatcttcatagcatttctgctgctcatcctagcagatcttgttttcctacctctcctttgttcgaatctggtaatcttttttcttgtgaaccatgttgtggccttgtcatccaaatctcaagtatcagatgttaatttacctaaatctctcatttctagtctttctgatgctcattctctaggcatcatgacgtcgttttatccattttatctgtaaacagtgtatccctttggttcaatggatt

SEQ ID NO: 122813 - DNA, 650 bp, Zea Mays
tcttgttcttgttctgtgttcaaaatggactttcattttcattgctcaactttgtatttcttcggtaatcccttccattgtgcaatttgaattgctcctttcgatgttggtactaccagtttttatttgtttggagtggacgatgcattcatttggaattgccgtgttcttgttaggggtatattctgcatttggtgttagtttatcctaatttgggtctaggagccaattttgtcccctaatttcctaattgtatgtcttgaataattttcgcacatgacataagcagtgttttttaaatgttatgtaattcagagggtacgtggacatttgaatgaagacaaacagatgaatgacatttactacttgagtaaacaaacaagacaatcaattcatacctggattttatattaatgctttggccatccaaggattcaaatgtgtcaaacgtatgcaagaaagcaactttgacttaaaatagttgtggaatgctcctttttctttaggaaaaaaacaaggtgattccatcatatgtgtgctggctgctagttcaggaacagagtttttatggggaaaagctataattgtgtcattcaaagaatattctaggaaggtaccttgaaactacactaggctgttttatatattgc

SEQ ID NO: 122814 - DNA, 386 bp, Zea Mays
aattaaggtcttgacccatcgaccaagatacattgaaacggccatattgccgaagtttggtgaaggaacatcttccacttccgggacagaacaagctgctcctgccagacttagtgccaaagaatcgactaaagtgccgaaggtgcctatagccgagctagccgaagccaaagaagaggcggccaaaaagctagagcttgaaaaagtaatagtgccaccagaaatcttgagcccaccgccagaattagaattgccgaaggttacaaaggctcccgccacaactcctaagaggaggagaatggctagcgtgctagacgctgtcatggaaacaacaagggcattgactcctgctcctgcaaataaggttgccgaagctgttacggctc

SEQ ID NO: 122815 - DNA, 544 bp, Zea Mays
gcaagcatgatcggctaactgattaaagctccttacccaacgcatcgcgaacgacccggtgcttccatgtggttggtctagaacccacacatacaatctgactcatctcattgaacgctggcagcaaccagaggctgaagtgtccacacacctttaaaagcatcgataaccagaaacaggtacgtcgaagcaaaattcatctaaaacttctggtgggatggttaaagccatccctgcttttgaaaaggccgtccctgcatttggccaacaaaaccactccggtcacctacaaaggcaatacaactgaataaaacggtccaacaggcgacgcaacaagggtcgtctgttcaactaatgatgccatagtactttccactagcctattcatcgacgatatattttcctgttcaaacatggggtagtgccgcaatgaacccgtattacatgtgtcagtgctttgcttatttgagctggggtaccacaattttgtacctctattgattcattgatcaagtagtcatgtccgagaaagatgcaatcctaa

SEQ ID NO: 122816 - DNA, 527 bp, Zea Mays
cgctgttttttccaattctggctctctggccgcatcatctttggtttctgctggcccgactataggcaccttcagcactacaatggatccttcagtgctccgggtggtgggagcagcttgttttgcttcggcagcggaggaggtcccttcaccaaattcaggcactacggtcgtttcaatatatcgaggtcggtgggtcaaaacctttattttcttgcccttcggcacagcaatggtggccgaagcggcagttttcctttttttccttgccttctcaaagggtagcagtaatcaggatatatgaagccaattgcatcaaaaaccctgttcaatcttttcttgccccgacccctgaaggctgaggacaaggcatcatcttcggcccaggtatatgtctcaagcaactcgttgctagtagcttcaatgcatttcaaccagtcatcatttggttcgtcaaacttctctctgaatctgaaggtatatttcaatcgaactagtccaccttcgcaggattcagcagtagtctc

SEQ ID NO: 122817 - DNA, 497 bp, Zea Mays
tttccgcgcaacttggtgaaaggatggctaattggatccgcgctagaaaacccagggaaactgaggcgggtgtatcttttgatgatccaaatgtcgaagaagctgcgaaaaacatatatgcaatggcagctaagcagagccaaggaccatttaagcaacaaatggagagagacatcctaacggctggtctcggtaaccctgagcatccagaccgtgtacgaggaatctcgtctaaggaaggatggaaggaaggattcagaccacagtgggaaggtttgtacaagaaacgtgatcgatccaaagaagagttgtcggattattttaagcaggaggcaaagaaagagttcaaagacctgatgtctcaaatgctatcaaatcctccactagaattgatgcagcagttggcgagtgcgatgtctgttcaacagatgaccacaccacatctacaaataattctagcagctcaaccgctggcttccatcgattgtacaaccgtc

SEQ ID NO: 122818 - DNA, 586 bp, Zea Mays
gtgatgtaggtacgcctagagactgatgaaaactataccaatggtttatacaaggcttcctagaaatttgaaattgttgttgggagggaagttggtactatgacactttgggtcactatgagagaaatttgaggcaacttcgttactttgggatgaatctagaacaactttgtgtcaaggtttgatgccacacaacaactattatagcagtactagctattgacaactgttggggtacaccttcgtagcgtatagtccgacacttgtggatcaatgtaacatcctttttccttgtctgaaacctctttatctatcgtcaacattatgtctgatagttcgacactcctgactcgtctcagtccgacactcctcagagcatgaacaatgttgttgtttggtatgacaccctgttctcctttctgcctagcaccctcatataggaattgatccttgattgtattttcactgctatgttccttgattgtttcttctcatcatatgtcaggttaacgacaccatgaccacttgtcttggacctccttgttccttaatcgtcagttctccaaccctagctagaggcttcctc

SEQ ID NO: 122819 - DNA, 309 bp, Zea Mays
gttgggtcatgccaggcctaggtcgtgcctgaaattgtgggctttgggttggtctattaggcacagtataaatgtacaactataggtagattaagtagcagagaccacaaccacatcttcctcatccacctcatggttgggtatgagagggtcataagaggttgggttgtcaagttttagtggatacccatgaggggtgggatcaaagggcaccttatgcacaaccacgtgtccacatctaaacattagaattgagtcctcatcaccgatcctaaataattttgccactgatcctcacatgaaattaag

SEQ ID NO: 122820 - DNA, 335 bp, Zea Mays
tatattcagtgaaacagacaagcattccaacagaaaataacactgatgttgccaaacataaaaatgtgtaatctccactaagttatactacaagccagcaagctttttgcaaagagacatacaatgctagcaaaataagtaatcgctagtattaaatatatgggcgggggagaacacaggaacctctcaccgttgagctccatcgagtgtccacagcaaagcgcctctgccgctgcggaaacatatggatgcatgatttggcagaaggatccacaaggaagaacaacggaacatccacacccaagagcagccgtggaccgtggttctcaggcaag

SEQ ID NO: 122821 - DNA, 564 bp, Zea Mays
atggtgccaattcaggaacctcgctctgcctcgcacaaagggtgccacttgtaaaaccattatacaagatccaaggggataataagcaggaaaaaggcaatggctaaggtgaacagtatcagccgcatcaagaatagatgataatcaacatgaaaagcacggcaagccagaaattaaaaagaattaaccttaacgaccaccagtactgttccagatgcaggctaattcaactgaacctaatttctcaatgaagatagtatactgggatatgaaatctttaagaggcggatgtaaaagtaatcaggcaaatgatccagaccatctatctgaatcaacaacgctagaagcatgggcaaaattcaacaggccaaagaacctggtgaaaagggagggcgcaatcaataagtaccacaacagcattgacagtcaagggcaagcaggattcatctgggcaataaaatcgccctgaaagtgcccagaatataactttaacaagcatatacgacaatctatcaatacttacaagcaacaatactaataaatgcactatcaagacatgttttc

SEQ ID NO: 122822 - DNA, 505 bp, Zea Mays
tctcaagttatttattggttacttgaataatttgagactattacttgaatatgacaaaggaaaggagcaattaaatctccaatggttccaaaaattctcaaaaccctaacataataatatttatttatttatataatttttccctgatacaaattttgggctttacaaatcctaccccccttaacaagaatctcgtcctcaagatttaggaagaactagggaaaagatggggaaattctatatgaagctcttcttctctttcccatgtagcttcatcttctccatgatggtttcattgcactttgcacatcttaataactttatttcttgtaactcgagtcaatgtgtcaagaatcttgataggatactccgtgtaagtcaaatcaccctgaacactgagctcttccattggtaactgttcctcggggacacggagacacttcttaagttgagacacatgaaatacattatgcacattcagatagattatcaggtagctcgagtt

SEQ ID NO: 122823 - DNA, 920 bp, Zea Mays
ttacagagtacaatgtttcttcgagaatttttgaggcctcgctagggatagaactttctgagatgctctatgttccatgagttccccacttccgtgccatccatttgagtaagccggtatgatcctggccgagtgacctctgatacaatgaatggcccttcccatagtggtgacagtttgtgccgtccttccccgttagaattcggcgaaggaccaagtctcccactgcaaaggaccagtgtcgcacggctttatcatgatagggcctcaaggtctgctggtacctagccgattgaattattgtgtttaatcgttcttcctccagcacatcaatatcttctagcctggtagcttctgcttcagctatgttttcgaaagtcaacctcggcgccccgaatattaggtcggcgggcagcactgcctctgacccataaaccatgaagaacggggtgttttcatgcagagctcgactaggttgatttctcaggctccaaaccacgtatggcagctctttgatccattttcctgcaagcttttcactcttgtcaaatactttcttcctgagtgcttccagtatcatcccgttggctctttctacttggccattggctcttggatgcgctactaatgcatacttaatctggatgctccactgctcccagaagtcaaagaattcagagctggtgaagtttgatcccaggtcggttatgatgctatttggtatcccaaacctgaatattatgtcttgtatgaattccactgccttggctgaggttaaagaggcaatgggcttatactctatccattttgtgaacttgtcaatggcaactagcacgtgagtatagcctccctgagctttcttaaaaggtccgatcatgtccagcccccagcatgcaaatggccatgttacaagaatggtc

SEQ ID NO: 122824 - DNA, 610 bp, Zea Mays
cgtcgatcccagggaagggagtcagtatgaggtcgtctctaccgtccctagaatgggctgttggttgaagctaccaccgactcgatccatgttgcacggcttcgcgctggtacaccatgatctcggacgtactcctcccagcgccttatttcatttttgtgtcgttggtcgtgtgaagcattgatggtgctccatgcatctcgtcggctgttgatggcgtgacacaagtcgttcgcaggatgagcaagaggtagaagatgattggccgcctgagcaagcagccgctgataaccctccgcgtctagggttcgcggaagatcgtcggctatctgcgccagcactcctttgacttcactcggcgtgttcaatgctcgggcgaagtcgaggtataggtttcgagcgaggagagggttctcccgccggagtctagcatcttgctcagctagttcccattcccgttcttgagcctatcggcgatcgcagcggcttgagttgcgtctttattggtgtactcgttcatcagaagtttctcccacttccaaagcttcgtcctaggataccggttgcaccgggtcccgttccccggctttgtgatgccgccgcacattcc

SEQ ID NO: 122825 - DNA, 535 bp, Zea Mays
gcacgtgatatgcttgagtaacgtccccacatggccatgtgttgccgtttggttggctcacgagttcatgtttcgtgttctagcgctcatacgagatttaactggccccacactggatcctgggattttctgcggctgaggttcgtgggcgctctgtgtggtccatcgtatgggttagctttcgaccaatcgaatcacgtcacgtactgtaaatcccgagaaacactagttattcaatatatacgttacgttgcgagtccgtctcgactcgtttcattcgtagcgacttcgtaataacctcgactacgtgttagtaatattatttggttatgttttcgttaattatgtagttaatcgtttattcgaggtttatttgaatgacattctaagtaaaattaaggtatagtttttaaatggtgattttatagatgcaaattaatgtggttagtgccaactaagatgttttcaactaatatttgtttaatgttaatgtgacgtctgtttagcttttctcgaatatcgcgttgtttcgcac

SEQ ID NO: 122826 - DNA, 502 bp, Zea Mays
cgcaacatctaatcgccacccgatagggatcggacggcgcacagattctcttcttcctccagacagcaccttcccccccccccacagtcctacaccgacacggcgaggtccaacgctggcaagattaatccacgatttaagtgtatgaaaccccaattcgacccgtccatacgctacatcaatgatgacgggtacgggcgagtggtcttaccagtgattttacacgacagcgagcagtccacggaacgaaggttgttccgccccagatttgaactccggcgagcacacacctgacccccggtcgccaaacctccacagcgagatcccagatactatactcagggcgcgacggggcatccacacgacgtgacgacgacgaattggcggattaacggcggcttccgctgcgctctctctcccgtgggcaacagcgatggcggcaagctggatgaggtgagaagaaaaggtcgcggggcccaatttatagcccagggcgaggacg

SEQ ID NO: 122827 - DNA, 333 bp, Zea Mays
cttgtatattttaataccatatggaaatactacaccataattacagatggagggtctctatcacgtatgcagagaaaaagtagtcatatgagaggtgtcttcgtgttttggattcttgtgtgcacatatgactgcacagttttataatacagatttatgattccacaatatttatggctcacatatgactgcgcaaatttggattgtgcatatattagtgtatagtttttacgaatagagtgaatgaatggctacatgtaaatcaaataggctgttacattgttggttgaataatcagtgtagactactggttaattagccaatccactatta

SEQ ID NO: 122828 - DNA, 1012 bp, Zea Mays
gaacgggttcggttactgttttcttgagtcactgacagtttctaaaaaggacctccaccttctattccttcgcagattatggtccacgacgaggaacagccctcgccgcactccggcgagcacctggaccggccgaagggagccaagactggcggcctcgagtggcgaacaccgaattggatctcccccgaacaattcccctcaaacaatttcaccaatggcgcactaaaacgccttggccacggtgaccgtgcgggtgatccaaagaacactgcgttcccggcgattggcggcgatctaattgaattgggtgggtcggtgagcatcacaaacgaatgagactgcttaaacgagggagcagaaggtttgcactgacctgaatcgagctagccacgatgagatgttcttcgcagtgtattcgaaccggtttggggaaaatgcaaaattcgagctcgctggtgatcggctgggggcaatactgggtgtcggggtacttgagtaccttacggagcttgcggtggcttcaatttatagagctagtgggcggtggccgcaaatttgaagaaggacgcgcgacggtcggaggaagggaagagcactggcgcagtagcttggtgtcctacgccgtggcgattactccagtgatcaacggagagtgagagtaggctacggtgatgcggtggaaaggtagagacacgtggcggacgccggtgatggcttaacggcggtgagaaccttatccacgggttcggtgagcaaggggggaggcacggcggtgagttaccggagttatccttaggcgaagagctgctatctggcaggcttatctggtcaccggtggcgtaaatcacaacggcggtggcgcggatcgcagcggagatcggtcgtcggcggtgagagctctgcgctggcagtctgatccacttcagttattgtaccatggcgagctccattcagatgaactgacagtcacagtttagggccaaattcctctcagatttctatagcaacg

SEQ ID NO: 122829 - DNA, 530 bp, Zea Mays
gacgagatatggattaaatagtttctaggtattttattattaaatttatacctaaataatacttccaggggttcatttgctaattccagggacttaattgtgaaatactcatactattgagggatggcgggttagttattaagttctgcgaggtttcttttgcaaataaggctcgacgaaggggtatgctttgctaggatctaagttgctggattagaaaccaagggttaggattagatcggccaaaatactgaaccggtacgccacgagatccatcagatctaaatctaatggtactaactcattacgcggtgatctaatcttggccattggctaaagatccagtggcttggattaagtgaccgaagaggtatgctccccgcctaatccccgccacacatctggcaaccgacgacagaagccctatcttccccccatcggtacccaggcacggcggaagagggtgatgtcacgacggcgctttcgtcgagataggtggcctggcggtaaggtcttcactcctacagaac

SEQ ID NO: 122830 - DNA, 335 bp, Zea Mays
gacgacttcacacccttgggtgttgttatgcacttgttgtgctaatccagttgcacccttatgcgacttttgcttggataaaaatgtgcgtctctcagacaacttcgcatccttgggtgttgttacgcacttgttgtgctaatccagctgcaccctttggcgacttttgcttggataggacttgtcgcgcgcagcgacggtttagactggccgttgcggtgactgtttcagcgtcgaatgccaaagtctgactccgcggtctttttcgacatcttgctgtcatggagtctaattttttgtggggagattttcgtggtgatgtattacatggcgcc

SEQ ID NO: 122831 - DNA, 542 bp, Zea Mays
cactgtcgacctaggatggctggagggcagcaccagctcgtgggtggtgcgagtttggagatgtgccgcgggaggaaaacagaataccttgacattcctctcaagaacaacattaaagggtggcgccttgaatggtttattgtggaaaaccacggcaagtccctccccccttggtcgggaagacagccagatgtgtgcactccgagttggattgagtctcctactgccttggaagtaacagaagctagggttttgcttgctgaaatctgtctgctgaaggagagaggtttgaccaccgaggttgtggttgctgactttgtttttaagaatattcagcccttgaaggacaaagcatacccagcttacttgtatagtggtgctaccgactcgactcgggttaccaataggagaattcctgctaaggatctggtgagccgactagacatgatcttgagaggcaaagtatcaaatgttggtgctcctgttgcctactctgcttggaatctgccacctcctaagtcctttttcaatttcgtgtccaa

SEQ ID NO: 122832 - DNA, 293 bp, Zea Mays
atttaccaggtatgccacctgagcggaaagttgagtttgccatagagcttattcctggcaccgcccccatttctaaaagagcctacagggtatctagaccagagttggttgagctcaagaagcagatagatgagctcttagagaaaggttatatcagaccaagtacctcaccttgggtcgcccctgtcttgttcgtggagaagaaggatggcactaggaggatgtgcatcgattaccgagctctgaatgaagtcacgatcaagaacaagtaccccttggccagaataaaagat

SEQ ID NO: 122833 - DNA, 444 bp, Zea Mays
cgacacctagcgtcattgtcatgactttcgctatttgccaaagtgatgcttgcagaagctagagagagcttagaaaaagcaaagcaaccttgaacaagagagttggagtttggtcattcactttgcatattcaccggagagctttcgagttatgaagagcctcaggattattgtaaagcaacaaagagataatgaagactcgacttatcacaagtggtgtgataagattgagaggaggagtgagttgaaagagactccaacggttgactatctcaacaatatggagtaggcaagcatttaaagtttagctgaaccatgggataaatcgtgtcttgtcctctttgcttatttgttttaccttacacttcctattatgtatttggtatatatgtgctggtaaagtgtaggtactagacattaatctgctgcaccaatttgctaagc

SEQ ID NO: 122834 - DNA, 534 bp, Zea Mays
gctaatttgcgtgtaacaatgtagctagattcatatgtgaatctcaccttaaaagctagaccttaaaattaaaacatcgcattaacaccttaaaattaaaacaaaattaaatgtgggatatacacgacaacgtgagatgtgggagtttgagatatcacaagcgcatgcctattgactgctgcagatttctttttgattgttatagtacttagggcctgtttgatttacgacctggccttggagtgctcggccaagcaggttgatctggcacatgctcctttcgtgtaatgatgtagtttatttagtgccaaagcattaacgtaattggaggaggagccaatgcctatcgatccctgctacttgcaatgatgcgtaaccgtgccacgtatggtgctaatgctttggccacaccgatatcccgatggtaaacgtcctggaaaaaaatcattaggtgcagagaatagtctacagatggttatgtagtttgtagatatggcaggatgacagcgctagcgcacactgctatatattgtg

SEQ ID NO: 122835 - DNA, 358 bp, Zea Mays
cccctcaaattggtcttggcacaagttcttggcggtcgggctgatgtctgattgagcggagggtagaaggagatgagaccttgcttcggtttttccggggttgttggtgatacaggacaatgaatctgttgcttttgctgaattctagcagagaattcagtttgggacagtagaatttgggcaaaacgtgccacctgtttgtcaagtttgcatgttgtaggttgtagctgcttactccgaaatgagatggtgagttacgaatttcatatcaatggattgctcacaacatttttcctctgatccatgcacaataatagcgatgtaatttgggggccaaagtaggtgtaaatctttggat

SEQ ID NO: 122836 - DNA, 295 bp, Zea Mays
aacaaatgctgctttaaggatccaccggtgcaacttctgcgtggaaacaggtaaccaaacacaaggtctgagaacacgaatggttctttttaaaaacagtgtttggattttggtctactccctgccacgccaccattacgcccatcacggttcccgtgttggtgtttggttggttgacgcgaaagctttggctaccagaaaaggcaagctttgtatctgtatatgcaagaagcgaaagaaaagctcagaccggtctaagtgcgacacggtcgattagacgcttcgaccaaatgcc

SEQ ID NO: 122837 - DNA, 455 bp, Zea Mays
gctacaatgtctacctttagcttaacatcagtagccttttcaactttgatctgggaacaatatgatactcattatctgcatctactgagcagttattcatcatcctcttcatcaacttcattgtcaatgtccactaagtctgaatcttcattactgctaatacaaatgtctgcatcaataactagacaatctctatcatttgcaggtatcaaatctctgtaaaaatctagtagtttgtcaccatctctattttgagttccttgtaccaccaccaacattgttatcatggtcaaaatacaaaattagattcttcactcgatcagtcacaaaacaccattgcaatggtgtctgaatctgatatgatcaaccttaatccatcatccaatccttttctaggtaataaccaatacactattagatcctcagactttacatatccatgttcttcaacaaaa

SEQ ID NO: 122838 - DNA, 302 bp, Zea Mays
agagccaaaatatagaaagtccacattcggtcaaaacttcggaagatgtgccaaaatgttctagtctcaacgaaatttgtcttccctgtacttttcgtggaatccttttgtggtgagcttccagcctacaaataaagtttgtcacaaagcaatcccaatcaaatttgttgtcaagaaatattgacagaacacatacgaatatcaaatttgtaccgttgttacaggccttgaatcatgcacggatttgaaaaagtcaccatcatcccgcataggccacccaagcgagaaacaatcagatgtcc

SEQ ID NO: 122839 - DNA, 289 bp, Zea Mays
catagcaatcgggaacaagtgaccaacatatacttagttttgcttgaaaagtcaagataacttcctttccttacccccctaacataggggctccctagaggtagtcctcggtgcgcggggcttcctttgaaccagagagctatctctgagtatggtttaggaatagtgcttagcaacgtatcctagtgatccttaccttgtcgtctcaatctatcaagggcgagtttagaatggcctttcagtctatacccttagcagcctcgtgcttagccattcttggtggagtgtg

SEQ ID NO: 122840 - DNA, 512 bp, Zea Mays
tatgggaataaaagtggatattgaagggccatatatgctggatgcaatgatgaaatgcgcctcaattccgaattccttgtctctatgataatgtctcgtttaaaggtatcaagtgagaagtcaccaataacaagcatggctaaatcatcagttgttggcatattgtactgcacgggatctccctctctagctccaacaattctgatgatgaattcttcgtttgtgtgttcattaagtctttctctagcaagtctaaattttttagcaaagggattgtgctcatctaacatctttagcaattcatgaacaatttctggtcggataggagaagcaggagcatcagtactagataacgattgtattcgattgttaacctcatgtgtcgtatcatacacgtaaagctgaagaaacttcgggggctcattagtcataggtagcaatgatcctattcgatggtggacctgaccacatactttaaaaatgggtggatcgtggccatcattcattgatct

SEQ ID NO: 122841 - DNA, 285 bp, Zea Mays
tgcaggaagagcttgcggaggccaacgctcacctagaaatacaccaccaagacatggaagctaatgaggcaagcagcgagggagaggaggatctcgaggagatagagccagcttccggaccgaacacgactccctttggagtgccccttcacctgcatccagcgttgcctctactaatcgtggttagacgggttagatttaacatgttaggagaatgggaaaaccacataagcttagtttttggtaccaacttttgaactaggctttagggtggatcccataaaa

SEQ ID NO: 122842 - DNA, 899 bp, Zea Mays
gttagatctgaaccaagtaaagggcacccctgaggacgtagacttaaactagggggctcagattatctactgagaagctctggaatgatagagaaggcaaatgatgctagtactggacgagtaataagaaaaagagttccagctgtccaactacccgattcgttaaagtagcatggaataggcgaaaacccttgttccttcttctagctcgggaagcagtttattagcgaggaaagacaagccttctgcttctgttgatggcttgatgctgaggatgtagtcgttgttgtaggattggcagggatagaggaaactgggaatagcgattcttcctccagataggatttcatgattgaaagttgtagctcatgattgatttgaaatacgcatccctcccgtattgatggaagtagatcttatatcccaccaaagcatcagctagttgcaagagatattgttcgtaatgcgccgcttgaatgttcttctcccatatgttgatcaagtcttgaaaagagaaataatccataatctttttgttcttcaaccagagccttctgagtctatcattcccttccttcctattaatagaagacagaatgctaggcatgaccagtcctatattcattaaatcatcccaatgatccctaagaatacttaaaaacttagcatttattttattttgtacgctctgcagcttgttcagactagagagtactacttcagtctcactatcatttaccatgtagatatgaaaattaccctcgtcctttttactctatagcattgtggtcttcctagaaaccgctccctcagaatttaagtaaccgcctgatagatcacatgctttgtgtgtgagacgattcatgtcagaggccttcacccattttgatgctctgcga

SEQ ID NO: 122843 - DNA, 751 bp, Zea Mays
tcctgattgagtctgttcttactagcatggctatgtccatgctgtctttttcgaggtgccgcgtggagtgcttgaaaagctggttattatagatcaagtttttttggcagacagatagtaataaaaaatataggctaattaaatggaaaacctaggtatgcttgagtgcgggcacgtgccctcgctcatatctttggtgaagtagtagaggctagagtgctctgttattttggtgcttatctttacaagtatgtcgctctgagtccactcctgtgggcctccgttccgctcgccaacacggcctctaatttggattataaactcaacaacaacacgctccattaatggccacatgctatgctactagcctggtgcgggtattgctgcagtgcggtggatggaattgtcgaagtaaaggaggcacgagagcacgatcgagccgtgcgaatcgcaaatcactgcatcccaaccaagaggaaccatccaaacaaaaagacgagcgagatgtcgtagagacatctgagcggcctagctctatccccgttcggccgggccattcatcacggtcctgcagctgcagagcaagggtcagttttcacatggcgatggagagctccatctggagatacaatagaacaagcacatactacgtatgtagattcatcagtcttctgtgtgctctggccgacaatgttcagttctatacgccttgtgccctacacacacatttatttattactcaccagatcag

SEQ ID NO: 122844 - DNA, 308 bp, Zea Mays
tttcttgccagattccattttcatattcaagtttccaccaccacttgcacataaggcaaatattcatgactctcaaatccttaatgtcgagtccaccatttttcctgttagcacaaactctatcccatttaaccaggtggtatttctttctatctcctccaccttgccatagaaattttttccgtttaatatcaagctttttgatagtagtgctaggaaggagatacatcgacatatggtagatgggtgaattggataaacaagcattaatcaaagtaattctcccagcaatggaaagagaacttccc

SEQ ID NO: 122845 - DNA, 924 bp, Zea Mays
ctgacctcagatctatctttgagaacacactggttcctctcaactgatcaaataggtcttcaattcgaggcagggggtacttgttcttgatggtgacttcattaaaagctctataatcaatgcacatccactttgtgccatccttcttctccacaaatagcactggggctgctcaaggtgaggtacttggtctgatataacctttctccaacaactcatcaatttgcttcttgagttccaccaactttggtccggacactcgataggctctcttggaaataggggtggtgcctgggataagctctatggcaaattcaacttttctttcaggtggcattcctggtaactcttcagagaatacgtcgaggaattccgacacaattctaattgcctcaatcggattggactctttgccaactactgataaatggtgacgggctccttcttctagttcaggcaagtacaacttagttactacttcctttccggatggggacaccaacttaactgttctcttgtcacaactgacagtggcttgatttctgtgtagccagttcatccctaggatgaaatctaacccttgagttcccattactactaggctagcggggaagtctatcccccttatttcaatccttagattcggacaaatcctatcggactaaacttttcccccaactgaattaactcttaaaggcgggatcattggttctatggggatgttatgtgattctacccaagatgcagaaacaaaagaatgcgtggcaccagtatcaaatagtacttttgctaggtaggattcgactggaaacatacctactaccacgtcctgagcatcctagattgcctcggcctccaggtggttcacctttccacagttgtaggcctgaccacgaacttctagggcgagaaactcctccttcc

SEQ ID NO: 122846 - DNA, 1028 bp, Zea Mays
atcaactgagaccgtacatgtcaccacgtctccttgctctctgccatccgcagagggtagcacatatgctccagaaacactcatagaagaggaagctccctgagtgaaattaacagaagaaccccacagagtcgcaggatgaggcagacgtggagctccaaactgggatggtacaggagcggtcggtgctggagtgggcgcggccaggtactgagggaatcctcgcataggcacgaactgaggagtcctcggcatatagaactgctgctgaggggtggtacagaaaattgttgctcagcgcatgacaacatgttgacagtgcccagcgaagaggaagaagtcactggctcccatttaagtttctcattgggattcctcctacacaccacatccttgtgatcctggctgcagatagagcatctaccactccactaacactcggcacagcaatgcgcttcaccacaacagaaacacaccaaccacaacctaggcttaggaatagcccgatacctctgagtactccctcctaaagtacttgattcagagggtttgttatgataggggtggtggtgctggtgttgtgactttcccctcttgtgggctggacccccagtgttgcccctcctcgcgtcctggccacgaggctgatcaacacctgaagacttctgagattccatggtatattgatgttgcatctccacgcccaatgcctgctccatcgttgtacgaaaatccaccagcggaaaggtgcccagagcatgccagatagagggtttcaggccctgacggaactggctcgccttttccaattcattgtaagccacatgaggaacaaagcggaccatcttgttaaagcccacttcatattctgtgactgacttcttctcctacttaaaagactgcaaatctatcttcatcttttccaggaaggtgactggatagaacctcctttcaaactgccttataaaaacatcccaggtgaggactcctggtgaagaggagtgagctgtctgcacgcctctccacca

SEQ ID NO: 122847 - DNA, 496 bp, Zea Mays
agggatcctgggggatacttcagatccttagcataatgcatagctttcggcaatctgttcccctgatagctttttccccgccgcacgacacactataaagtccatcccctcagtagaagcttcaacgacaggggattcagattctttgccacttctccctttttctgacgataacggagcttttgcagtatccgaaggtccttgttcagtattcttttcaacagttcccgcatgccctgtttctgcggaagctgagggcccggcttcagtttcaatatgggtcatgacagcttcggcagtttccttcgtattcttttcacctatgttatgtacttctgcaaaggcaggagtctgtacttttgtcgattatatgaccgcgtctaaaacgctggccattctcctccttttggagttgttgcaggaatttttgtcatctttggcagccccgtcggttgctcgaccgacctctttggttctggttcttcggctgattttt

SEQ ID NO: 122848 - DNA, 533 bp, Zea Mays
gaagagtcttcggatgatgacttggattattttgcggcactggatgtggctgcggcggaagcgtctccgcgtgtgataggtgctgaagttattcctggtgtgagtgctgggcgtaggctacgaagggtggtggcgaaatggtgggtaagtgaggtggagggtggtcgtcttcgtgtggatagggctagcaaacgagaattgttgtcctcgccggctggggcgagtgtaggtgagggggagttgcgaaatctttttgagggtgaggagctgaggataatgttgttcaactacatggagatgggtatcatcccgaaggttgagccaatgtaaagtgcgatgccctcgctgtatgtatgtaaccgtaatttatatgaagctgcgtgccttcgttgatccggtcgtgcccgtaggcgacttgtgcgcggggaaccttttggaaaagacttcgattttgcgtatttattatgctagtccggctgcacccgtaggcgacttttgcacggagagtcttttggagaagacttcgattttgc

SEQ ID NO: 122849 - DNA, 475 bp, Zea Mays
taatgatgccaaatcttaagggcatgaactactgcagccagttccaaatcatgcgtgggataatattcctcatgctggcgcagctgccttgaagcataggctattactcgtccctcttgcattaggacacatccaagtccactgcctgatgcgtcacaataaacatcaaatggcttttcaatatccagttgggccaaaaccagtgcagtggtcaacaatactttcagttgttcaaaggcctcgttgcacttagaggaccagtcaaacttagtatcatttttcaataacccagtaatgggcttaacaattttggagaaatccggaataaatctgtggtaataactagccaatccaagaaaatttctaacttgatgcagtgtagtgggtgatttccattccagaatatccttgaccttgctaggatcaactgcaatccctttggcagataaaacatgtccaagaaattggatttctt

SEQ ID NO: 122850 - DNA, 419 bp, Zea Mays
gccagaaaaattatcaaacttatagaaataaccaaaatacaatagtcgagcactcatctatggatctatcctcgaccatttgatcaccaagttttttagtgccttcgcttgtcttgcaacctctgtcttggtcaacatgagctactcctctgggtactcatatatacactagcaaagtgtccatacgatgttacaatttccatttatatttaagtgtacaatataaaacacaaagacacgtgtgttttcctggctagatggatgtgaatgtgggttagttccaatcctcatttgtgcatgaaaaccgtgaaagagactttggatatctcctgccgttagccacccactataactgttctggacttgttgatccctcggtctaacccatgcatgtgacgaacgttcgtcttttagcactt

SEQ ID NO: 122851 - DNA, 372 bp, Zea Mays
ccaagtggtctatggaaggtcaccaccacccttactgtcgtacatggaaggaacaacagccacagatgcagtagatgatctattgagggtagagacatttttctctcggatgttcgagaaagattactgcaagcataggcatatgcaaaacggcactatgatgaacaccatcgtgagttggaattccaggtgggtgactgggtatggctgtgacttctacatagccaggcacgagcactagttggcaacaagaagagcaaactatgtccaagatatgcaaatctgtttcaggtgctggaaagggtgtgggcacggtggcttatcggttgcaacttccagatgacgctcgaatccataatgttgtccatgttg

SEQ ID NO: 122852 - DNA, 398 bp, Zea Mays
ggccattgctatgggtagagagccggtggtccactcggccatctcccccgcgcgggcctagaaggctagaaccaccagtccacactccccactcgactccgtccgcgggagcctagagccagcgagttgctgcttttgttgcttgccttgcagctgagtctgtcttcaacaaggtatataaattccatcctttaaaaatatgctctatcctttatagcatcatctaaaatattttgttttctataaattttttatcttcagcaatatcctctagatctggtccactatacctacaatattaacagaatacataaactactatatttactcaatgttttcatatatatttcaattggttctaacgtacaccgttaaaaatgatgttaaaatgatgaaat

SEQ ID NO: 122853 - DNA, 378 bp, Zea Mays
gtcgttgtcgatcgtttttcaaagatggcacattttataccctgtcacaaaactgataatgcttcacatgttgctgatttattcttcactgagattgtgtgtttgcatggtgtgccaaatactattgttttttatagggatgctaagtttttaagtcatttttggagaaccttgtggtttaaattgggaacaaagttgttgttttctactacttgtcatccccaaactgacgagcaaacagaggttgttaatcgcactttatctaccatgttgcaggctattttgaaggataatttgaggttgtgggaggaatgtttgccacatattgagttagcttataacatatcaattcattccacaaccaagcttagtccattt

SEQ ID NO: 122854 - DNA, 387 bp, Zea Mays
gcgatgacccgcctgcgtcgtcgggtggatggcgcttcgctggggcagacaccacgcgagatgaggggaagaatgactggagcacgtgagaggtggaagatgatgcgatcaccgtccgatttaggttgagtggatgggattagatctggggaagcaatcaccgtagaccgttgatcgggtatccaacgcctggggtttgatctcacataaattgaatccgagccattggtcacaaatccatcggtggaaatcgtgtaccccttcggcttctaatctcgacccttgaaacttgatcgggcggttgtggcttggctgtacccccttcggcgcgctagattttcaaaagagaccctgtgttttattaaaactaacccgccatccttttct

SEQ ID NO: 122855 - DNA, 553 bp, Zea Mays
ggcggatgcaaggggtgggcaaggtgggccatggccccacctcaatttttttaaccccttatacctaggtttaggtacacagcaaaataaacaaacttttgtatagttagcgtggacaaatctaataaaaactagattttgatctatttttctctcgacgtttcactgctcagtccactcttcacctgagccatttgattctcttccctagcgcaagcccactcgtggctcactcacttattcggtcatcgactgaccagtaagtcggtgacctaacccgcccgctgcagcgcaccttgccttctcatcacccatcagctcgtcgactcgtcgggatcctgcacacaacattgatattttgcctcctagtccgcatcagcagatgggcaagctgttggtgggatcgtggcgtcacctgcctctcgctaactcattagggtctctgcgcgccgtcgcaagtcgcaacacgacaatggctgtcgcttgccatcaccgatgcgtctgctctgccctagtgtctcgtcctcagtcagtccacctattttctctcttt

SEQ ID NO: 122856 - DNA, 579 bp, Zea Mays
cacagggtcacacccattgggatcagctctggcagggtcacacccattggaatcagctctggcagggtcacaccaattgggatcagctctggcagggtcacacccattgggatcagcattagcaaggtcacacccattgggatcagcatcagcagggtcacacccgttgagatcaacatcagcatggtcacacccattgggatcagctccagtaaagagttccaccggtacttcttcagcagcaggagcagaagggccagcatcctggtccaaacacgacactcgccgaagccgtctctttttctttttcttcccctcggcaggtgcagttggatgactgacctggcggagacgtttcgggcgagtaccctcaggcctttgagtatccacggttttttcaggctctaggatagttgcaacagccattgtttcagcagggaccgagacagaagaattcccagccaacatgtccagcatagcacttatctctgcatcacctggactcattgggaagatcaccaagtgaagcaaccagaacctcaacttcttcgagagagggtcgcactctaagacccaaac

SEQ ID NO: 122857 - DNA, 703 bp, Zea Mays
gtttgacctctgcctccttgctgatgaaactgatgcctagccatttctcgcagaaaacgagtgttatcagcactggcattaactaaggcagtgatagcatcaaccaacgtgggaggtacaggcggcgggttcggagtttcctccccaccatgggaagttctcgccccgtattgaacatgagttttggatggcatctgaagaagaatcaataaaacatactcgattattacaggccacaagtacaccatcattattacattatgccagactattactaattatacatactcactggtacaactcaaatttccgtatttaatttacataaggaaaccacctactcctataccactctagttatcttcatccttggctgctcccgctccactcccaacttcgggagaacgatcatctacgaggttcctggaaggaggggctccaaagagatccaactccccataaggtccttcgccagctgctcctgacgttccatctctcattgctgcaaccttcggtggtacgttcagatgcagttggtcgtatagcacatgcacttcctcatgcagagtgttattgtacgcctgcaaattttctagggctatgcttagctccaccatccgggctcaagaattctcctcgtaatcccaggctatagatcgtgaatttacggcccaatctatagtcatgtctcgttccacgatct

SEQ ID NO: 122858 - DNA, 422 bp, Zea Mays
catgaggcagagaagatggctagagctgatcaaggattatgacctggaggtacattatcacccagggaaagccaatgtggtagcagatgccttgagtcggaagatgcaatgcaattgtattctgatggattctcgcatcaacaccttgtgtgatgagttgagcaagatgcaaataaaagtgattccttctggtgctttgtctcacatttctgtcgagccagctttgcaagaccagatcatcatagcccagctcagtgacaagggagtgtagattatcaaggagaatctccatcagaaggttgagaagtataagtgtttctgccaagatgaaaagggtgtattatggttcaaaagcagattagtgattcctaaaaacaaggacctcaaggagaaaatcttggacgaggctcatctctccaaat

SEQ ID NO: 122859 - DNA, 304 bp, Zea Mays
ctttgaatttgtcatggctgtttcctcacctagccctccctcttccatgtgtaggggagtgggttagatgagacaactatgtaagttcggggttttatggtgcaattctcatcctttttcgttatattttgttggagtcaaatataaattgcccacttacaactatttttgcagaatgcatcatggttaagaggtgtgaaaactgatgcataggagagcatcagttccagatatggatgtgcatgcttgcctatctatttatgtagcagttcttcgaataaccatgtggtcatctgctattttg

SEQ ID NO: 122860 - DNA, 404 bp, Zea Mays
aaacatatttttttgcgctgtaccgcagtgcataaatatctataccatgtagcataattagtgtctatgtcataaaccggttccaacgatcctacctgcatgactgttgtcaagatcctacctttatgaacgaaataaagcatttaaattagatttttttgtttccatgcatgtcaatgtatttcctttcaacccacattcttatcattctaatttgtgcgtatacggcaggaaacagattttttacatggtgtaccacactgcataaatatctagatagtgtagcataattagtatcagtatatgttataaactagttccaatgagtctaactgcattgctcttgtagagatcctagtttcatggacaaaataaaacattaaaatctgatttttttgtttcca

SEQ ID NO: 122861 - DNA, 626 bp, Zea Mays
cggggacctctctgcgaggtgcgagcgccaaacggtacgcgataagtcaccagaccgtccacatgtaggtcatcatcgagcagataattacgctcttctctgtggggtgcggaccgttcgtgtgtatgtggcggaccgtctgcgctggcgtagagggattcacgttgaacctagatctcgcctcccgggagggaccctgtcggggaggattgatcatgtcgagatcgataggccagcctaaggctgttgctacaactatccctttggctaccatttgttttagactcgcttttagtactcttagttttcctctctagtagtcactagtttagccaggagatccattacgctttgaaccttcgtgattgtgtcttgtaatctgcaatgtttaatccgaggaagggtagctgataccgcccacatgttttggttggcttcactctcagtttgtatcttgatggatatttgaagttttttggctcttgtgttcttcccctccttcttcttgtgaatttgtgaagaaccatcgagttcttttggtgtcagtgttgtttgggtttgttggtgggcgatatatactcctagtatcattacttacgtcctgatggtgctatttgtggtcgtga

SEQ ID NO: 122862 - DNA, 729 bp, Zea Mays
cggcgactggattcgtgcctggagttgatggatagcatcgcggggtaaaagatcatcaccccgtgcgctggacgccactctggctagctgtcgtgcctcccccttgcgcactgatccttcggataaggttctcaccgccgttaagccctcaccaccgtccgccgcatgtctttacctgtctaccgcatcaccgtgactcactctagctccacgttggtcgccggtgaagtcgccacgacggtagacacaaatccactgcgccaaggtccttctttatctccggccgcctgcatttgcccgaccaaattacgcgccacctcctaaaccccctataaattgatggccggggctgttgcgccgtataatcccgaagccatagcacccgctcccacccttaatcattcacctagctcttgaatttcaaactttccccaaactggtctccgccaccacgaagagcacctcgccgtggccagcgtgatacaggttagttcatccctgctgctcttgtgtttgagtgaccttatatgctcgtgatgctcgtcgacccatttgattaaactaaactgccaccaatcaccgggaacacattcatctgtccgcaacaccctcggttaccgtggccagagcgaatcgggtcaccatttctgaaattaagttaggggaagtgatcgggaatggttcaatcctatgttcgctgctcgggagcactagtattggccccctccg

SEQ ID NO: 122863 - DNA, 375 bp, Zea Mays
acgatcacgtcggcgggaattcctcctttccctgaagactcgttcatcaggagtttctcccacctccgagatctcatctcgtgatacaggccgtgtcgggtcttgttctccggcttcatgatgtcgccgagcattccggcgtcggttccttcgtcggcgagcttctcgctgaggaggttcttacccaggaacggttggctcatcttcggagatgggggatgattccactcttcccccgatgaagaggatatcggggtagaatggagttgttgtgacgacaagcttctctctattctcctttgagggcaaaggtgccagaagagcagcttgacgggtctttatttcgtttgcttcttttctccttgcaatccacgt

SEQ ID NO: 122864 - DNA, 389 bp, Zea Mays
cgccggttttagtagcgcccgatcccaacgaaaccctcctcctttacattgtggccaccacctaggtggccagcgctgcactaatggtggaaagggaaaagcgagggacatgtactcaaggtatagaggcatgtttaccatgtcagcgaggtattaacagagtccaagacacgataccctcggatctagaagttgctcaatgcggtcctcatcgccaagcagaacttgatccactacttcgatcgacaccctgtgtcggtggtgtccacgacgccccttggcgagatcatccgaaatcgggatgcgttgtaacacaatggaaagtggtcccttgatctcaacaggctggacatcatatacgtcgctagaaccacagtcaagtctcatac

SEQ ID NO: 122865 - DNA, 414 bp, Zea Mays
tcgactctgccaactgagaacctttataagtaaccttgaccggaatgaagtgagccactttggtcagtctatccacaatcacccatatcgaatcataaccctttgaggtgcgaggcagcccggtaatgaaatccataccaatttcttcccacttccatttgggtacctttaacgagtgaagtagtccagctagtctttgatgttcaactttgactctttgacatacatcacacagagtcacatgtgcagctacatctctttttagcccgtaccaccagtacttttgcttcagatcctgatacatctttgtgctaccaggatggatagagtaatcggagtcatgggcttccttcagtatagtctcacggaggctgtcaatctcaagaacacatatccagttcttgaaccatatcg

SEQ ID NO: 122866 - DNA, 421 bp, Zea Mays
gtctcaaggcctcaagcagacaagcacagatgcattcatccagccgagcagaggcagagctgctgcacacacataggatgtatattcgtgcacttgaaactccctatgggaaacgacagtgaccaatgggccaagaattcatgggctttgatacatgcacacgatccgcaaaatgtaaaacgggataaaacgggaaattcccgttacaatacgggataccgtaaatacgggcgggaaacaccttcaactgtttccgatcccgttcccggatatatctatcccggttcccgtaccgttttcacattttcccgataaaacgaaaacggacggttttaaacgggaatacgggacggtacgggatggtataattcctgttcgttttcatccctaatcacacttgaggatgagcactacaggggcc

SEQ ID NO: 122867 - DNA, 819 bp, Zea Mays
gaaatattttctaggaggtcaatttttaggtcggctcaaaaatcatctctaaccatgtctctagaaatcaccgtttcataggggaaatgataacccctgcaatggcaatttgcatgtgattcttgagcagttgatggctacttgtgtatttgagtgtaggacaaaggaagagtatggaaaaatcaatggatgtgggcttttactttcccccggcaaaacgatgttggtttcatgagtttttggctttagaagcctgtgatgggacatgcgctaggtggcgcttatgaataagccaatgcaaaagccgtgccaaaatgtcacttaacatgatttaaccttagaagtcaaagaagccacactggaacccctctcatgaaaacctaccaaaaagagtcaaactataaatgttgaccacatttaagagaaccattaataccactgacttaaaatcatgtcttttgataaactgttcctcccttataatgggtaacataggataagatatatgaaattgtatatgaatgtaatttacacatagtattgatggttgaggcgccaccaattcattaacacatggtggatgacaagacaaataaaacagaaaccacacagagaggaacttatatgctgcaactacaatacaaagccaccagacaatagaaaagatcacataaaatatgcaagaccatcatcactcactaagattttcataccccacgccaatgtgtgtattgggcatttgagccccgcacaacccctccccactacaactacaagttagtataatttgcaataaaatttttcaaattcaaccaaaat

SEQ ID NO: 122868 - DNA, 558 bp, Zea Mays
tattggcatgccaccaccagctcagccagcagtcgtcctagtcccatgccacagtctccaactctgctctggtaccccgagcccactatccgagcccactatccaacggagtgagaaattgaggaggttcgacaagacatctggtattctggtgagaactaggaagtcccctctccattctcttctttgttgcagggtctcaaaatctcgaacccaaactttaaaaagtgcagacccagtgctagagactcgcacgagtggggtctagggaaggaataaacaaggcaagccttctccccgtaaatgcggagagactacttcgaacccgcaatctaatgacccaatgcaccagatctgccctaactttctcggtgagacagctctaaccccagttttctctgatctaatttgatatagatgcaaccacatgtgcgtagtagaattgtagatgtattggttgattacttatgcatgtgttttgattgtaggatagaaattagtcgggatgtaggatttgtaagtagagggactctaactctcatcaagaggatgacacta

SEQ ID NO: 122869 - DNA, 333 bp, Zea Mays
ttgcgtcgatccattctgccagtgattcctcccctagcccatgaaggggtggccttgcggaataatgagcctggagtctttcgcgaggccttccaaccttctagtggacccgggggatatctgtcccccgcagggggggtagatgccatcggcgtgatagtactattggttgtacttgcgtccattcaccctaaagttcacatgttgtgcttctcacttgagcatgtaagtgaacaataacgattggttgagcatgtcgacatcatggttcaaccccgctacgcaaaaatatgccaaattcacatgtcatatgaggcaagcaccttgagcgtg

SEQ ID NO: 122870 - DNA, 609 bp, Zea Mays
aatgccccttttggatatttaaatttctgggtgtaatattgagcttctcgcttttcttcttcagataacctttttcccgaagcatgtcgtacaatataatcagatacttcggaagatgcttcgggagttgaagtgacagttatttcaggcagaatttgttttgcagcttctttttccgtttctttttctccggtttccaaggatttctccttggcaggctttgaaggcccagcttcagtcctggtctggctctttgcagcttcggctttagttagttttgtctcagcctgcgtttttgaagcttcggcagttttccctgaagtagagcttgaactctttatcgtctccagtacatctagtacattgaccatccttttcctcttcggggtcgctataagatctttttgtgccttcggcactgtcacttctgccgaagggctcagaacttctgatatttttgtttcttcgattctaggttctttaattttgttaatcttcggcattgtagctggttcttcaatcttttgcgtgggggtaggttcgtcggctttagtagctgaagatttttcaccgctgaattcaggcactgcggccggttcaatgtatctc

SEQ ID NO: 122871 - DNA, 641 bp, Zea Mays
ctgattgcttaggagctaagtaactttattttatttctctgagacaagagctcctgtatgagttgtttatgaggacggcagcaattattggttggagagaagtggtcatctgtcgaccgatttacgcagcacttattcgttggctgagacctacgcagggaatagagcgaactaacgtacggatgaacgagaggccacagaataaaatagaccgagacattttatttggttgttgcttgggaattaaattctcgcgcataagtagaaataaaatgaatcgagatcaatcggcttcggattcgttatcgaattaaagcgaatcggattaataaaaatcattgctgatgctgattttcgaatttagattggacatagagattttaagccgagttggataaaattaaataggtgccaacacgtggagtatcccgtttgagagcacgggctcggattaatttttggacacagatcgaacatcgagaaattggattcggacacagctcgactagcaattgtcgagcgcctaattaaatgagttttagacgagatttataaatcgagattgattaccgaatttgcattcgttccgagaagtaaaagtttttaacaggctccaaatttgactgtccttgagatcgaat

SEQ ID NO: 122872 - DNA, 401 bp, Zea Mays
tgagaagagctaagttacctgaagattagaaaagattgaaggcaatcccaaatcatgagaagttgtgttgtagctcgacgaaggaagatcaattggaacaatctgaagagcatcgtcgggggttgatttagctccactagcagatatcagaattctggcatccggctcgccgacctctaaggtgactccctcgctcgaagttaaagaagtacgcatcgctatcactccatcagatcgtggtggagacgacccgacgtggacgtccatggaggtgtgggaaggagagctcgctcggacaccctcgggggctgggtggcagctcgcactacccatcggagccggatcactaccggcaacaccctcgggggctgggttgcagctttcgctacccaccagagccg

SEQ ID NO: 122873 - DNA, 392 bp, Zea Mays
aagggcagatgtgaattggctggagacaaagcccgaaagctgcttaacacagtacagaattttacctttgatttttaccttgatcttctcttgccaaatttctgattaccttgtactttgctaatctgcagaatgatggcaccgaaggtcgataagccgaagctaattctgaaatgccgaagaagaccttaggatctgcttttgtagtcatctgtaggaacacttgaaaatcctttgtaccatatgacaaaaagttgtgattgacactgaacaaatttttgtaatcatttgtaaatatcttgtaataccattttaccttttgcttcatgtatgaactgctttgctgtggacgaaacaaatgctggtagattttttagccgaaggcgaaaaac

SEQ ID NO: 122874 - DNA, 638 bp, Zea Mays
tttgaaatgaacctctaatggactacacattcaaaatactttcgtagaatgaatattatgtgttgcatattgaaaacataggctaaataaataagtaaggaagtaagtaaacgaataaacttgattcatgtaccttgcatctatgttgaaatatttttgagtgagaattagaacttcgtttgaatttagatctaattgaatttgaaaataagaaataggaaaagaaaaagaagaaaagaaaaaaaaatggaaaggaaaggaaactcacatttgggccgcttctcatctcctcggcccagcaacattctgcccacactcggctgcgcggctactcgcgtcgacgggtgggtcccagtgcccagtgactgctctcatccgtgtgtggctttatgtgtcactgcatgtggggcccacttgtaatgctcgtctccttcgtcgtcgcgaaccggggtgagcaccaacagactccgtggatctcgcgtaacaaaccccgtcactcaggtgcgcggattccgggggattctttcgccgcagcctgatctccccccgtcatgatcttcgtagaatggcctataagacccggccactgccatccctagccctatgcctagtgagcttgagccgcgctgggagttgcg

SEQ ID NO: 122875 - DNA, 539 bp, Zea Mays
aggatatggataaacaagggtaatcaaggataaatgcagcaattgtttccagtcaactcctacaacctaatgcaacaatcatacgcaggtaagtgaataaaacagttattgcaaaccatgggacataaatgtcagggcttgcctagagtccaacactaggttagtgttcttttagacgatatccgtttgatgaacatccacttgatcaattcatcatcttcgggtttagcactccacatcacgtccttcacgtggtatgtctagcgtacctgatgagatgcattatgcacatgtatgaatataatgaaagcaacgcgatatggatgatgcaatatgatagtaaagtaatcaccaataccaagacaccataacactcatacacaagtactaggtatttctataacatagggcataccaaactagcatcgcttaagacaagtgatactcgacctacacttaatttgtatacaaatttaacacaagaaatgacaaccatatcagtcaaggacacatgctaacttaagtataacaactataag

SEQ ID NO: 122876 - DNA, 1042 bp, Zea Mays
tgagaccactcctaatactagtgggagaaaggcaagttttagatcacttttatttagtatgctcgaattgtgtttcttcttttactcatgaagtgactcctgctgctgtcacaaataaagttaggataaacacactgctgtttttttttttgcttacatccaaaacatatatttgatattcttctatgtagatggatacagcagatatttactgtaaccataaacaaacaaaaaaagtagcatcaagtgaattggcactgaagcaatattcaattctacaacaacagtcaaagaatgttgaggtaacttctctatttttcactctattccttaacatctcaataacggttacataaacgtttatggttcttgttgtctctaggaacttaagagtgatttaataaatacaagggatggtatggagtatatgcaaatgaagtacgctgaggatctcaaccttcttggtaatatgtaatgtgcttcagaagttttggtgatttatgaactactttaacacataaaacaataatgaaagtacacatttgcaatttttgtttcaggaaggcacctgtttagcttggctcatgctgcttctggttatcacaaagttcttgaagaaaatagaaaactatacaaccaggtgcaggatcttaaaggtgcgtttgttacattgaaccttcatgtatggagatcccagcctgtataggcaaagggttggtgtttaaaaaaacaagaaatgtggtcttaatattttatttttcttatctatataggaagtattagggtatattgtagggtgcgtccctttttgccgggacaagcaagtccgtccactgtggcttccattgacgagggcaacataacccttgtcatcccttccaagtctggaaaggaagtacggaaaacttttagcttcaataaggtttttggctcatcagcgacacaaggtactgtgccctgtcactactggctcttcattttcagttatgtattggaggagatccacatagttgtactgtgtgcagatgaggtgttcttggat

SEQ ID NO: 122877 - DNA, 648 bp, Zea Mays
cgacgatcctagggactctagcttaattggatgggtcagagagtatcaggagcatccaaggatactgaaacgaggactcatagggcatgaacggacctgagatgcgctggccacggcaaggtcaaaccgctcgttgttcttgagtgatttgggggaaatcccaaattggggagttctaggggatgattcgaggcacgggttgcttcactggttgcacaactacctagcggagcaggcgggtcagcaatttatagtaggcttgagcggtggcgtccaatttcacgatgatgcgctggcggccggagatagggaagaacacgggtggctgtgaccgtggcgttcaccgatgcaacggctcaaggattatactcctaagggtgccacgattactaccgcgcagtaacaagctacggcatggcgcaaccgaggtcatcggagcttccacggcaacgctggcggtctagccacgtcgcaacggctacaagcacggtgatagacttcaatccacgatcaaatccattcccccatgagattttttaccttcccgtggatatcctctgcgtgccaagcacgaatcacggtgaccagctcaaatccggacacacggatcgccggcggtgagcttactgagctggcaatccaatccgg

SEQ ID NO: 122878 - DNA, 483 bp, Zea Mays
gtcagagggcttttagcactgtttgtgccttcattggcacaagggatttgattcaagagcatatatccttcagggtatggccacttgtggagagctgggatatgccgaaggagaccaccgccgattctagttgtggtggtttggtccgactgaagtataccttcagatttagggagaagtttgatgagccagacgacaactggctgaagtgtatcgaagctaccagtgatgagctacttggagcttactccaaggccaaagataatgctttgtccgcagctttcgggggtcagggcaaaaagatgaaggttctgacccatcggccatgttacattgaaccggccgtggtgcctaaatttggtgcggggacctcttcagctgccgaatcaaagcaagctgcttcgattgtgcagagcgctgaagagccgactatagtgccgaaggtgcctacagtcgggccagccaaagttaaagatgataaag

SEQ ID NO: 122879 - DNA, 426 bp, Zea Mays
gggaatcaccgcggggccacgctccaccgtgggtgggtgatttagtgttacgattcacaggtaagatgcactccactaagtctgccttctcctccactttgtgtagcgtcttttgtatggagctttgggtgcagaatcctagggtggggtggttcagcaatggcgccaccgtagacctttggtcgttgccatcatagcctagggtctggggaagaagacaactcgggtggccatgtgatcgacatcggacggctaggttttaatctggatatcgattcactgcgattgaatcatgtccgttgatcaacgtgttggtggctaggggtggagttcatctgtggtaaatcgtcaccatgggatctggatcctatggccatgatggcatgccagtttcagttttgggttttaatctcgactgcagatcag

SEQ ID NO: 122880 - DNA, 473 bp, Zea Mays
tgtggttgcaccagatgttggcttcggcaactcagttacggttgggggattcggtagctttggatgctcttctgatggaccgataccagctttaactgtcgtcacagcatgaattgtcatcggagctaagggcataacttcggcatgttcgacagtttctatattttcagtatcaaacattgcagttgccttctctaaaggacgtgactttggcctgcgagtcagaaccttgctcttttcggtgtagatgcggcggaagaggacgaagcagccacttttctctttaacccttgctttcgggcagggaaatagtaatcaggataaaaaatccaataacattaaaaactctattcaacctcctgttttcgcgagcaccaaaggcaatggtcatagcttcatcctccgccttcgtgtaggctcccagcagctcataactggtagcctccatagcctcaagccaatcatcattcggc

SEQ ID NO: 122881 - DNA, 807 bp, Zea Mays
attatcctttgacttatcagaaatgtccatgattgttgcccatagtgcttcgacaacattttattcagtgtccatcgcgctaatgttgtgtggaaggagaaggtcatcataataggggagccgagtcaagcctgacttatgggtccacatatgctgctcaccatatcccacaaaaccaccttctggattgaccacgagactgtctatctattgaggaacttcggcaccaatcatcattgcgggtgggccgtctatcacaacaacacctttcataaagttcttgatgtctagtctaaatgcattattgtgagggagaaattgtcgatgtttattaaacgacgaatatttggcaccttcttcaataagatgaacctaagagcttccttgcaaactatgcatgggaacttatcatgaacacaccaggcgcaaaatagcccatacgcccagtagtcatgcatggagagctggtaccaaacatgtgttttgaagtttgccttcatagctcaatcgtatgtccataccccttcctcccaagcatggagcaattcaccaatcccaggctccatgtacacgcccatttttttcccgagatgtccaggaattatcaacgacaagaatatgttctgtttttgaaagcatacacctagaggcaaattgaggtggataacgaacatggactaacatctgtatgggtagccataagttcatagggaatgaacccatctatggccagcacaacacatacattatgagcctcttcggctttctcctggtgaatggcatcaaagtgggtccatgcttcgccat

SEQ ID NO: 122882 - DNA, 403 bp, Zea Mays
ccggaatgaccaccatcagcagtagaatggaaggctgtaatcagcttggtttgtaaggctgagttatgagctacccagattctattatggtacttaataattccctgacataatgaaaatccttgttcatccggtgaatggactgccaacctggtgagtagctcttgagcctctgggtcggttacataggtgttcaacaactcttgcacccatagaggtcgaactgcggttaaagtgacattatgcatcaagtgtcccactcttgataatgcatcggccaccacgttttctttccctttacaatacaccaccttaaactggagacccatcaatctggtcattgcctttcgttgcatttctgagtgcaacgtctattctgtcaaataggacagactgtggtgat

SEQ ID NO: 122883 - DNA, 319 bp, Zea Mays
cataaaaacgtaaaggagcaataaaaagataagcgcaaatcaattcagttcagttcatgaccatgcattccattactacacaaaaaagcatgcagcagcactactaacatctatgcatgttgtgcaaaatacgaacaaagggggccggggagcactgctagggcccactaagaagggtttggaggtagggatagggagacgtgctgctgcgttcttcatatatgatgttcgagccaaatcaaacaacacatatacataaaaaacgtaatggatcaataaaaattctgctcatatgcgacgtccaattaatgtataatct

SEQ ID NO: 122884 - DNA, 742 bp, Zea Mays
cctttatcaaaggaaggagtatacaagacaatttcctgctggtgcagcaacttaccagatccttacacaacacaaaagagcctcacatcctgctgaagttggatatttccaaggcctttgactcaatatcctggccattcctgcttgacatgttacaacacttgggatttgatcgaatctggtgcaaccttattagtctgctgctttgcacttcctctacacggatccttgttaatggtgagcctggggaatacattctgcatcatcgagtcttcggcaaggcgatcctttgtcccccatgttgtttattcttgtcatggaggctttgaatgctatggtcagttatgctttcagggaacatatcctgcagccgattgcaaatcaacatgccaaacattgtatctccttctatgttgatgatgttgttttgttcatgcagccctctcatcaggatatctcaacaatgatcagcatttagacatctttggtcattctacagggctaaaaacgaacatctccaaaagttctgttacacccattcaatgtggagcaaatgagctgaccaccatttctgccttattaccatgtgctacaaaaaattttccctgcacttacttggggattcctctatcaatcggtaagcttgctaactctaatctcttgccgcttgttgataaagttgctgataaacttctaggatgtaaagccaatcttctcaatcaggctagtcgtcttgtcatgg

SEQ ID NO: 122885 - DNA, 403 bp, Zea Mays
ggattagacccaataaacatgttttgggcctaagttagtgccttagatcaactcaaccatacactcccaataggttacataatccatctatgctaaactatcgataaacaagattttgtcctacccatataccctagctatcttaactatagctagctccctagctcggatggagacaccaagaccaaaagaaacgaggagatcaacctcgacaaggaaggatataacaaccaaagcgaatctcgagatgaatcaagacataaacattttggataaagtctttccttattatactcttccttgccatgacctatactgaccataagggaatctcatagatgcctagacataatatgtccatattttcataaccatctcctaaccagtattttattattttagg

SEQ ID NO: 122886 - DNA, 368 bp, Zea Mays
cagacttataggtaccttaattaaggtttagcttcgggattcgtttttagcttcggaattaacaaacatttttttatgatgtagctgaacttttacctccaccggagccatatgaccgcgaagccgacccagccatgaaggaagcgttggatataataaaaatcgctaacgaagctgctgacgaggttgtcaacagactactgaacgaagccgctgagaaagtgctaaaagaagattaaaactttgtatatttaggagtttaatgtttgcatatggccttcgtctctttgtaagaaccaaacatcaagtattcgtgtacgtgttaatgtaatatatttctttgtgatgcatgaaaccttcgtatgtac

SEQ ID NO: 122887 - DNA, 398 bp, Zea Mays
actcaaagaacgaagaagaacatgtcgggcatttgcatgtagtgcttcaacgtctgagagaacaccacctttatgccaagttgtcgaaatgtgatttttggctacaggagatcaaattcttgggtcacactatttcttaggcaggcttagttgttgatcctaataaagtgcaagaggtgatgaactggaagccacccacgactgtccgtcagattcagagttttctgggattagccggttattaccgaagattcattccgaatttctctcaaattgcgaagcccataactgagttgttgaagaaagaagccaagtttgtttcgagtcagaagtgcgaagatgccttccttgcattgaggcaacatctgaccacaacaccagtattagcgcaacccgac

SEQ ID NO: 122888 - DNA, 366 bp, Zea Mays
tgttgctgggtcgtcgaacgcggcgtgggtgatccagatcaaaatgggataccggtccgtgctattgtgatccgggacgtcggggtcacaatcaacaaacgcgatgaagactggatttgtgttgtctgatctaatctagacggcgtagattagaccaatggagaccccttcactttagtagatcgtgaccatagatggtgaatctaacggttcaggcacgcgcatatccttttggtcagccgcttttacatatgagcccctctattttcgatgaatcagcccgccatccacccaaagacatagaataatacgcataggtcccaaaatttacaccgggctccctggaaaactctaaaataatatcgc

SEQ ID NO: 122889 - DNA, 748 bp, Zea Mays
tgtgaggctcctgaatcaaacagtattgatgctgatatggaattaataaagaacgtaacaatgactatgtcagaaccatcaacagtagcttcaacactgatctgattaaccctggcgatgttataccctctttggtcgtgactgttgggtggagcctgcttcccattactagaagactgattccacctgttcagattactgcctcaggctggagtggtgtatgcaacctttttgggacaaacgatagcataatgacctgcttcaccacatttgaagcatgtactggttgttggggtagctagggtggctatgttttggttgggtgctagcttcacgagtttgtggtgtttggggtgtggtttgcactgtttgcggagtagggcacggatatgagtgttgcccactacttgggcggactggggttccctgtggtggagcatagcaagtggcccgatcagtcactccagaaatagttcctgcttcttctcgtcgtctgcaacttcctcgggagcatatctggataattggatgaatttgtctatgtactcgctctctgccatccctctatgtttaagtgaaagaaactccttcttaatcttcatcagcccgacatgaatgtggtagtttcagaagttggttgagaattttgtccaagtgatggtgtcggcggtagcatgtgatgcacaataggcatcccaccaatccacagtagggccagtaaggcgacctgatgcatatagcactttct

SEQ ID NO: 122890 - DNA, 553 bp, Zea Mays
tcccctaggatgtgggttgattactagattctacaggggctcttttacaaaatcaaacggcgaaggggtatggtgcattatgggccgttggatcgactacctacggatcagattagatattcataactgtgaaccggtacgcaactcaagccgttggatcaaagatctatgttctggattttattagggtgcgatcagatctagttcatctgatatctaatcaacggctcggatttaacctaacgaaaggcattcaacacttaatcagggtcgttcattctgatcggatggccaggattctacagcgctgaagggggagactctgattaaatcagagccacacattctccgatcaaaggttagcaaactctcttccctcccgagctctggtcatggcggcgctgcccaccgcggcgtacgctacatcgccgattggtgattccgcccaacgatgggactgccccgagtttgacaagctctacacgaagctcagcatatggtggactcaattcaaaaccctgaacaacctgatgggataagccctggccccttt

SEQ ID NO: 122891 - DNA, 427 bp, Zea Mays
ctcaggatggagtcacgatgttttatttgtatttccttgggtggtttgggtgtaatctgccattagttcttgaaataatggaacgtagacaaagtgatatttccaacaagtacttatttacattaaaaaaccttagaaattgaaatatatgccctatttaaacttgtacttgttgtggttatgaaaatcccttcaaaaacaatagcttttattgccttgttgccttcttcacttatagttggttcaacttccaagcaccagaaggttttaatagtaacccatttcaagaataattaatttcaatagctagaaatgaatccacctaataattaagttcacatcaaggacgtgcgtcattgttcatttcttatctgcaaacggtgaaggggttgtcggtgtgattgtatccatggcagtgatatcctca

SEQ ID NO: 122892 - DNA, 742 bp, Zea Mays
gcgcacgatagcgaattgattcgaacaaggcgcctgcaacttcacaaccgaaaaaagcacaagaaaacgtggacgaggggcgaattgattcgaacaagcgtggacgaggggcgctccggagttgacacggtgacctgtgtcccccacgttgcgcagccagtcaacggagatcgccgtgaacgagatagatccaaagtggattatctttcctgaagcgaacttgatgatatcaatagagttgatggccatagagctagctgatgttgatgtttagtaccgacaatgcaccatagggtgtaccacgggatgcttttgtgagtcggcaacatcaactatagctcgatggttcgcttcgagatgcgacaaaacacacgatttatacaggttcaggtcgcgagatgcataataccctacatcctatttgcggtgggttgtattgatttgatatctagaggtttacaatgagggctagggtttggatgtttgatgagagagcggggggtgtgtataagatcagatgccttggagggatccctcacctaccttatatagtccggcgtggcatgggttacaagttggtttccttctatattcctagacggtttagattacaatagagtccttgtcttgtgcgccaagtttgttcatttggtcagcctcgggcccaagtcagtcggtcggccctagagaatacgcctcatttgtacctaggggatacctatcccccacaacctcctccctg

SEQ ID NO: 122893 - DNA, 411 bp, Zea Mays
taaaccatcaggttttggtgggggctcgtcggtgtcaggaaatttccgtggccgaggacgcgggcgcggaagaaacagtgggagacgcggtggccgcaacagcggccgtggaggaaagacggccgcgaacgacgaatgtcgttattgcggaaatactggacactgggcgcgggactgcaggaagaagaagcgcgatgagcaatcccacgccgtgcatactgaagaagtggacgaagccttgttactagcgagaaccagcgtcatcgacatacaagagaacctcgacgacgccccggcttcgctggggccgcaccatgtcgttcatctcagggaggacaagctgtacgttcagcttggtgacaaagtgaaggaagaggcgcggtggatcctagatacgggagccacaaatca

SEQ ID NO: 122894 - DNA, 598 bp, Zea Mays
gtgaattcccgaagcggccatatttggagacagagcgaaggcatggaggtggagtgtggagcaggctagggagaagtatggggagtcggccctgggctattgccatatcaaaaggccccgaggagttgcgctcgcagattcaaaagaaatggggtttctcgcaacccagcagatgccagaaggctacatatgggcaaaaaacagaagaagggggtgttattgttgatgggcgagatgagccactgagcaaaagatgctcaaaagtcatagtgggaacagtggagtgcgacatattaaatgatacagaaggttcccaggcagaggtggcaaagcagaatggtcaggtggttgtcactaagatttacacaaagaagggtgaggaaatggcagctaagccaagcatagggcatggacgcgtagctgctgctaagacaaacaaatcacaagggagcatgctgcgaagtggtggtgatcaaggggtgagcagcaagcgcatgaggcttgacgtaggggctgcacgagaaatgaataactttgctagctgggagggtgaacgcagggctgaaatgattgcaaatcaacgcatagttggtcccgg

SEQ ID NO: 122895 - DNA, 380 bp, Zea Mays
cgccatgtctggcgaccatccattgagtttgtgggtggaaatctcaggttgcctgacatcactctgtcggctttcctcctagggatgtttgaggtgtgtgttaggtgtcctattaatgtcaccagctcctgccctatacctctcaggctctcttgtggccgaacagtattcagccctatgtccatgaggtggtatggtaggattataatgtgttgctggtggggcaccataatgttgctgcgatgaatgtgggaactgtgcgtattgcacaactatcggctctacgtatgcatatctggattgttcagctgtatatggtgctacgtgggtagtcttgtacccagaccgtctgtcgtaaagaactggacggtccgcgatcg

SEQ ID NO: 122896 - DNA, 571 bp, Zea Mays
ctgagattttgcgcggcgatccaggggtgagtgcgggagagtctgcctagaaaaggattcatacagtgtattgcggttacctttccgcatttgcttcatctccaaacatgcgctcttcctcgtcctttgtttgcgccgccaccaacgtcatggcttcccttattcatcctcgccgattccaaacccaatgcgaccttgataaggtgtgtcgtctgctggggtggacttcaccggagcacgccagcagaatccatgcggggatgctaccattgggtgccttgtagccaagggagttcgtcctttttatctccaacatgtctgcttggcttgcactaccaattcctccttctttatgctactgctggatgagtacgacctccaacttcaacaccttaccccccactccatcctctaggtggccatcttcatccacttgtgagagatgttcgtggggcagcacccttgcacttcacttttccaccatttcttcgtgttagtgaagtcagagaagggaagggacgtgcttggtgcttactacttccaaacgaggcccgatccatccattttctac

SEQ ID NO: 122897 - DNA, 419 bp, Zea Mays
gagccagcaggttatagccaggttaggcgagtctggtccacgaagacaaagacgaacctcccatttatatgttaccgaagcactgatatctcaggtggcgcagttgtaagaatctgaggagccaaacattcggcgataactcggatgagaaggtgatcaagactgcaagttgcgacaaaggagataagtgaagtagatagtgatcacaacttgtaaagggataactctctagtcaggtatataaggccgagaggggacccctacaaaatcacctcatctcactccatcctcatcaacaacaatcgagcaatcgcaaagctcatttgtaatgctcataccctagaaaaccaatacatagccataacatgaaatagggtgttacgcaattcaaagcaaaatagtccgaacctgtataaacc

SEQ ID NO: 122898 - DNA, 369 bp, Zea Mays
caagattatgtggaccactttgcccaattatttgaccaattagcagcatatgaatctacctcggacatgctttattacacttgtcgtttcgtagatgggctcagagatgatattaagtctgttgttactgttcatcattcggcatccttggatactgctttttctccggcattattgcgggacgaagtggatgaacccatcaagaggcgtgactttcgcaagccggatgctcgcgggttttctaagccatatcccaagggaccatttcctctactgtttccccctactgctgacaaaactataccaacgactaaagataaaaggttatagtatgttggctgctcgactgatgacaaattggagtctctc

SEQ ID NO: 122899 - DNA, 569 bp, Zea Mays
gccagggtgtatgcaagcgttgctcagtcaggtgtgacaaactgcgctgatccgtataaatgatgaactcagcatgctgcaggtatggctgccattgatcgacagccaagatgatagcgagatattctttttcataagtggaaagtccctgatttttgacacccagcgcgcgactgacaaatgctaaggggtggccatcctatgtaagcactgctcctatgcctgtgccggaagcatctgtttccagggcaaaaggtctggtaaagttgggtaaagccagaaccgacgcaaaagaaagagctgacttcaatgcctgaaatgcttgatcgtgctcgttggtccagacaaacagtgtatgtttcttcaagagggtagtaagtggtttggctagtattccgaagtggcgcacaaacttgcgataataccccgctagtcccaagaatcctcgtagttctttacaattagtaggtgtgggccaagaggtgacaacatcaattttggcagggtgagtagcaaccccttgatgggagacaacatgccccaagtatgaaatttgttgtctggcaaag

SEQ ID NO: 122900 - DNA, 379 bp, Zea Mays
gttagaagcattttttgcactatttacatgagaattagctaaaaaactaacatgtcctatagaattagggaagcattaggcaggacattgctcccctgtccccctggcttgcaggctgcctcttgcgtcgggcacatgcgtgctgctaactgttagatgtgcattggacgtgcgcgctagctcatgactgcgtcctgtgtggtggcgtggatttgcactgctgaagcatggacgggtccagcgtggatgcgcgcactaccacctagcgtgctggtggcatggatggaggccaaatacatgtgctgaatgacacgatcagaaagaaggttgtggcctaccttagttaacctttatagtttgcattaatgttataatatac

SEQ ID NO: 122901 - DNA, 502 bp, Zea Mays
gagacgttattttcagcatgcatgcattataaaactaaaaggattagaaattaaagaagtaaaaatttgatctaacccacttcggctcttttattttcctttcttcaccataatctttacatctgatacccttccgcatatgacttcacccacccccgccagtggaggagacactcattttagttctgatttcctttctcacgagggttttccttccatcttgtgggaagtgctaaactccgccggttaccctacgccccctttgtacacagtgcagctgtatgaggagcatcgggtggcacattgtcgagtctagctgactctggaggctcatcctcttcaaccgggatggtgttccattgactccgagactgttggattcatgatggacgacaccaccgaagcggcagctttgaagaccctcataactttctgtggctaccatcccctagagatggtgatgcaccccttaggactctttcctgctgagaagagggacgac

SEQ ID NO: 122902 - DNA, 551 bp, Zea Mays
acactttcttcgtgcgtggcatcctgacctgatgactgcaaatgagagagagaaactaagcacaagttgataactgtcgatagaatttcagaagagtggatgtctacctggaaagctcacacgagaggtgaaaatccaggcaggacaggagacggctcacgggcaggcaaggtcactgaaatgacagaagaggtgagcacgtattagtcacatagtcataagtatatgaaatgtgaataaatacatacacagagtgttatggcacagaaaacgagagatatggcgatcgagaggtcaaacgtcgcgaaaacggcgtttgagcgagaaatagtgccataggaggtttgaaattcgaattgaggtatgaaacaacgaggaattgagccgatacttcacgaataggtttatataggtaaataagagtgaagtgtgtgcttggtttgaatttaggcgaagaaaatggaatttgggcactcggctcggaattgatcgctcgaaacagggaattgtgtgaaattgaagcctggaatatcggattggcgtgaaatttg

SEQ ID NO: 122903 - DNA, 519 bp, Zea Mays
ttatttctggccatctagtagacaagatttggttagagcaaggataggttgaggcaataaaggcagggcaagaaaagacttcatcttggatggtggatattgattcatctgaagttctgattctattcatatccttccttgtcgatgttgatcttctcttctccggtcttgatgtcttcaaccaggttagggataagaggttaagatagatttgtaggcagtgacttagtaggtagtgtagctggtttagtaggtagttataagttgaatgagattagttagaatgtagtttgattgtttgcttctagattgggtggataagttatgtaacctgttatataggtcgagttgttgtgtatggctgagttgatctaagtcaccaatttaggcctaagtgaattaggagtatggcctcatattttgtaccaacattaagcaacttacattagattagctcaacttaaggttagccttcgttaggttagactaatctatcacattagatcaggtctaggttag

SEQ ID NO: 122904 - DNA, 553 bp, Zea Mays
tagaatcatggtgtcgggaggtattgggcaatcccacgataaaatccatgcaaatatcctcccatttccaagatggtatggggaggggttgcaaagggcctgctaccttcaaatgactggccttgattctctgacaggtgtcacattctgatatatactttgcaatttccctcttcattctggtccaccagtataaagatctgagatcattatacatcttgttactgctggggtgcatggagaattttgaaaggtgagcttcatccaatatcttctttctgagcttagggttcttgggaacaaccaatcggtctccaaaccataggattcctttgttgtcctgacagaagcatttgtatttgcccaccttctgctcgatcatttccttaatgacttgaacaaccttgtctccaatctgtgccatgactatttgctcttgtaatgtgggctccactgaaatataatttaaagctccgagggaaatgacttctaggttcagcttgcacaactcatcacataaggtggtgattcttgcatccatgttcatacaatt

SEQ ID NO: 122905 - DNA, 379 bp, Zea Mays
ggatccgaagaagatgcgttgagattaccttgctattctaccggagcggctaccaaagaacgctcgtcgcctgtccaccacatgccaacctccaaacaagtgaggcgtcgcgttgatggtggggaggagagggggcggtgggtgggcaggggatcgacagaactgtggaccaaaataatctgtggatgcctacagtagcgtcttaagacagacatgtcagtaatatgagatttgcacagataagtaatgggcaaactaaattacaagcagcaagaaacttcactcggaactttgtgtagtgctcagcaacaaaatctactattacatgatgtttagttttacatgattagtttatgcccaattttcacatgtggcaaaa

SEQ ID NO: 122906 - DNA, 458 bp, Zea Mays
caatgattgtccattagctatattctcatctgtgggtagcctgaaaaaatgaccaagattagttagataaagagcacctgaaacagggtgttgctctagcttgaactatgtttaaaagccagccaagccgtttcggaactatgcttaataacttgcggcgaaaaatgtaactaattaatcttgaatacaatgaatcaaacaaatgaaatggaataggatctctagttctctaccgaagtgtagagaagtaaacacctgcaactggacctgcttataggactcgatgtccaacaggcaataggtgttttcacttcttaggatcatcagctagtcgtaacaaaaaaatgcacacctttttccatttcatcgaacacctttaggccgagcatgtgtgatactgacattagaaattagattagctaagagagtgaagtgtcttaccttcacgtaaacctcca

SEQ ID NO: 122907 - DNA, 836 bp, Zea Mays
cgaggacaggagcagcagcaagggcttgtttcagtgtttgaaaagtcgtggtatgtgcatcggtccaaacaaataataccccttttttaagcaaagctgtcaaaggttggcaaatgaccccaaagtgtttgataaacttcctataataaccggcaagcccaagaaaactgcgcaattctttgaccgaattgggcacaggccactgcgttatagcgttgattttcagtggatctgtggctaccccctcagcactgaccacatgacccaaataagctaccttgcgttgagcaaacgagcacttagagagttttaccttccactgttcacggtccagaagttggaatacttggtgcaggtggttcaagtggtcttccatggtaggactgtaaaccaaaatgtcatcgaagaaaactaatgcacacttgcgtagaaggggagccaaggtattgttcattgcgcactgaaaggtgccaggtgctccagtcaatccgaagggcatcactcgaaattcaaagtgacccacatgagtttggaaagctgttttatattcatcaccctctttcatcaagatctgatggaatccagcgcgaagatccaaaatagtgaaccaagcagcaccaaaatgttcatctagcaattcatcaatgatgggcaccggatatttagccttgaccgtgagagcattaagatgtcggtaatcaatacaaaatcgccaagaagcatctttctttttaactaaaagcactggggaagaaaatgaactagtgctatgctgaattaggccagtattcaacatttctgaaatttgggcttcgacctcatctttcattgcaggg

SEQ ID NO: 122908 - DNA, 399 bp, Zea Mays
aatgtcccccgcaagagttcgtggggtccccacggggacgtggatagggagctattccccaatggggaatttcacattgccatccccatatacaactgcatgcattcacattgtttctgcgcaaccatgaaatcgcttatgcatggtgaaaggcaaagtttgcatcactttccttgattgtttgtttgtgtaatgcacatactattatcagtgtcagtgttgaatgtgagtcattggggtttcatgcgagtctctatgttatgtttgatcggctttgataatatgtacaattttttgggtgtatgtattaatattctttttccgtggttttcggtcctatgtatatgtttgtgtttgcagtcataagcacaagcaacacctctttgatctgcttataac

SEQ ID NO: 122909 - DNA, 664 bp, Zea Mays
ctttaatggaaggacaagaaggctaggatctagaagaaatgctgccatgacgagcggtagatacgcagggatcgtgagctaggccgagaccgtcttaactgatgaggaggaaggtgacggtgttatgcgtgcaagctccgaattctcagctattcccgtgggtgatgcctaccttgatgtgttaaagcttgattccttcctggcctttccagatgaggtgacaaacgcctcgtctactggggcgggggtgcaaatttcttgaacctccaggcctcgaccccttggctgatgggttctgcgacctctgccttcctaccctctaagaccatggtatgcgagccatcaaggacattcggtggagaagactcatccccaccgagcgcataagcggcccccaatgttgtgccctcgggagccctcttccctgccttcgatatgggtggtgggcccaatgttctatcatgaggagacgggggtgagtcaccaaccaggaaacaaaggtttgacattacgcgcatgctgagctgtggtccttgccgacctttgcttctcgcccttctatcgtcttgtcgtctgacgtctccctcccccctttggcaatgctcctcgcctctccgcccctttgtcacacgtaaggaaggtcatatttaagaagcgaaaaatg

SEQ ID NO: 122910 - DNA, 315 bp, Zea Mays
atatcttttaacaaattaatcgatcgaatcaataacttgatgaggattgctacccatgccatgatgctaactctaggagtggaagcacaccgagatacctcaatatatataccaatgttcaaaaaagcgtgattaagttcatgcataatcatgattagacactaagaggcatgttagcattgcacttaggccctgggtggtggtttacgtggttagtatgcgtaggcggcgtgtaatttgcgttgtgtgcgatgaggcggaaaggagccacgtggaagcggggcttggcgcacgaaaaagagatgcacatgaaca

SEQ ID NO: 122911 - DNA, 326 bp, Zea Mays
acaagtttcttcaatcagaatcacaatctataagtaactcatcttcggagtcatccgtcgcgcaatcctcaacgacaacctcattccacttgctgcattgtcctgcatcacacttgttaacagttctcttgtaataattggcttctgcttcatctgcagcttgggagaatagctcatcctcagcctcagcctcatcagacttctgcttgtaataatccgcctctacctcttcggcggcctgagacataaattcgttctcttcctcttgagcacgtaattctgactcaactggtgcgatgagctcactcaaccttgatgtgtcgtcc

SEQ ID NO: 122912 - DNA, 1154 bp, Zea Mays
aaagaggtgacaggggactgaacaagtttcctgacaaaacatataaaatctcatatgtgagcccgaaaggtcagcccctagctccagaagaggcactccctaagttccggaatgcacttgggttcttagttagggataatcttgacatcacaatccgacaattgaaatatgtgtgagatgatgccaagaatcaaatatggaataagctattaacgaggtttgttctacctcggggttcagaagaactcgtgaaggaatacacgatgaagcagcttgcaatcaattttcgaaactggagttctgagatgaatacaaaatttgcaaagaaaggcctagacccgataaaaaaatataaaatctcataaggtcagtgggcagtatttctagagcaaaggagcagccctgaattcatatctctaagcgaggcaaattcagaactatctaagaagaacaagtaccaccaccacttaggcacaggtggttacaagagtcaagtttctaaatggagacaagaagacaccgagaagaaggccgcagggttgccgacgcttttcgagcaacttggtgaaaggacggaaaattggatccgtgctagaaaacccagggaaactgaggctggtgtatcttttgatgatccaaatatcgaagaagttgcgaaaaacatatatgcaatggcagctaagcagagccaaggatcatttaagccacaaagggagagagacatcctaacggctggtctcagtaaccctgagcatccaggccgtgtacgaggaatctcgtctaaggaaggatggaaggaaggattcggaccacagtgggaaggtttgtataagaaacgtgatcgatacaaagaagagttgtcggattattttaagcaagaggcaaagaaaaagttcaaagacctgatgtctcaaatgctatcaaaacctccaccagaattgatgcagcaattggcaagtgcgatgtctgttcaacagatgaccactccacagctgcaaataattccaacagctcaaccaccggcttccaccgattgtacaaatgtcccaagctctgtcgcttcaacgggaaataaggtccgttatccagttgatgacataacaaggctagtgacgtgcacactggctataagatatggtattaacaataatcgc

SEQ ID NO: 122913 - DNA, 687 bp, Zea Mays
aggcggaatgggaatacggtcgatacgcggctgcgacgtgtgatagggattctggccaggtggaccaatggggcagtgcgcgcgttcggtggggagagaggctggcgacatgggcccgcatctcagtggcgagcggtcggtagcgcgcggtggagctaagtgggccgcgcagagggttttccctggtgggccaaaattgtagccgaagcccaggtaagtgattttccctttatcttttgtttttattttctattcttcttattcataattattttgaataaattttgaatttgaatatgagtttcttttgagtaaattacacaaattcaaaccctagtgcagagataatatatttttatttacttatcattatttttacatccacttcatgcttgttttcttctcttttctaaattctagaattcctttttttgaaattaaattccactttgagcttttaatatatttcacgtcattttatgttgtcacaaaatgcacaccaaataaaatatcagcatgatgcatgtattatcttcgggtatttcttgttaatcatgtgtttgtgtaagtgatatgttcacatgaaatgataaacatgggtaacacatatagatatagagtattatactttctctttttagcctttcatacaaagtgagtgttacagtccactccgccagcagtttc

SEQ ID NO: 122914 - DNA, 673 bp, Zea Mays
catctccggcaataccctcgggggctgggtcgtggcttgcgcttcccacccgagccgaatcatccccggcaacaccctcggtggctgggtaagtgtcaacaccatcctcgaggaccaagttctctgcagtagccgcctctaaggctgaaggtccctcagttacttccatgggaacaagatggtccaagtcagcttcctgaccctcaagaccgcgctctaaggtcgatgaggcgcgggacgctgcccgggatgaccccaacccggcgtcgagcacatcagcacaaacatctgtcgcaccaccatccgctggctctgataacagatcctctggaaccatgtcttcaagagtctgatcaaagttcgccagggacaatccttgtagaccaatgagggcagacagagcaggagaaggaactccactactttccccactggcgacatattgccgactgttcttccgagtcaaagggacctcatcttcttcctcctcgtcgttttcatcagcaacacagacaacacccccattgggatcagcggtagatggagcacacccattgggatcagcgacagatggatcacacccattggggtcagcgtcagtaaattcaagcacaggcacttcctcaacagcaggaaccgaatgaccaacatcccgatccaaactggatactcg

SEQ ID NO: 122915 - DNA, 770 bp, Zea Mays
caaaaggtcaaaggatcataaatgctctagccctatatgcttcctaaaggatgtgtagacaagcaattgaatgaatttacttttgggtgagataagttatcttacatgaaaaatgtttcatctcttctgtatttgtgtacatgtagtgtagagcatttttgttctttcgaactaaaattgtaggcagtgcaaccatcgataatttcgctcttccattgaaataaaatttaggtcactacaaggttaatctccatctacatggtaccacaatgttggctctatggcattgcttatttgtgcaaagtatagactcatgaagtatgtaatcttttaagtttgaattcttcaatgatgcacccttcaactcttgccttatatctcaagtcactagagccaacccaatgagaataatttttcagcggtgcaccattcaaccatctgtcaccaacctgatgtgaatatttatcgggtcactagcaaagtctaggtcaaagttgtctagaggcttccatgtatcactatcgtatggtgcaccatcacattgccattctaatgaacaccttatttgtgccatgtcatatgtttggtgttgtatagctagagacatgcaactatttcatacgatctttaagggacatcatttgaagtaccttatgtggaaccttggtcatcacatcctcatcatcatcattccgacctcaatgtacctcaatttgacacacactttacacttttctttctcattacctttctataaaagcatataacca

SEQ ID NO: 122916 - DNA, 310 bp, Zea Mays
cttaatttctttgattttctcattagtctcctgtcctttacgaatctcttcttccaaagtagattcaacttccataactattgcttccatattattgagcattccaaggttgagttgttccatctcccaacacaattcctgtgacaccaatgagtagtgatgttgttcacttgacctttacaactcaaagcatctgccactacatttgcttttcctgggtgatattgtatttccaaatcataatatttgattaactcaagccatcttctttgtcttaggttgagttctttctgcgtgaagatgtatttca

SEQ ID NO: 122917 - DNA, 791 bp, Zea Mays
tattgaacatgtaattttaattgaaacacaatggaatatcaggttctaagtaattcccaaatgaactgtataaatctaccgtgtttccaaaatctcttccctctatggatccctttggtttataatttagtttcctaaacacaacaatttgtttaccgaggtttgactccaaagaacctatatccccgttgaggtgtcccaccggactgggtctctctcgaccttctcaagtgatccacagatcaacttgagccctcggttcctttgatttgaagttccttctcgcaaggtactccatagatattggagactcttgctagccatacacaatgaatgtgagttggaactccaatgaaaacaagagggagaaagaacacacacaagagcacaccaccaccaccaaagaaccaagaatacaagcacaacttgcagcacacctctctctaggctactcttacttatgaatataggtgcttggatctctctggaattttgctcttgagtgacttggtactcgactatgctgataggaggggtatttatagccctaaatgccccaaagagccattgcaagaattgccaaaaaatccgctatgcgcttgttcaccagaccggtctaatacaccaccagacctcaatggtcacacgccatcaacaagatatgcctcagacttgactttccacgaggcactagaccggtctggtcctccaccgggcctgccacacgttagctagttgttgagatgatcgttgaaggttgatttacccgatggtctggggcaccactacac

SEQ ID NO: 122918 - DNA, 312 bp, Zea Mays
agaaaactgatggagatagtcttatgtaggtatgtacgaggtttaaagcaagccccatccaacactagttagaccgtatttggatacgtctactagagttaaactctggcgcatgatactagttagaagtatataaatacatggctgagcccggggtgcggaggcagcggccacacttccccctaaagaaatgggccccacccccaaaaaaacagcgcccccactgctcatcaacccctaaaagccatcagacgactgcctagcaaatgtgaaccctgcgtctcctagaagttggaacatcacgccgtcaac

SEQ ID NO: 122919 - DNA, 425 bp, Zea Mays
tcgggtttggttggctagaacttgggctaaatctaatggcagctccggaggtgcgaggaggtgggtctcactcccttctccactagcttctccttcagctcctgggggaaaccctgctccaatcccagaggcggtaggcgtggttttatccgaagccatctgccagggggagagaattactactatgcatatgccaatttttttcaaccaagttattttattcatcacacaagttcattacaagcatacagttaacacaagtcgcactacacacgagcgctttctaaggtacttccgaactccctttctaaagtgtccccaaattccttgagaaggtcgtcaaggctagctaaggacatatcctcgacgtcggacaaattctctatcctggagggaggtagtgctggaggggcttccttcttccg

SEQ ID NO: 122920 - DNA, 1013 bp, Zea Mays
ctgtatgagaaacattattctcatgcaagagactatatatgaaattactaggataaagcaatagtctcaacaaaatcaaaatataacaatggactccccctaaagatatgcatcaagtaattgaaagaatcgattttgatgcattcatttttaaggacataaaggaagactcattatacatcttgatcggggcttatgaattttgcaataaacaacttaagtctggtactctcataatgaaaggatttagaatacttacaatcacaccatagattattttgtagatcttactatccaagtaggtggtgttgttcttgatgtcctcctttttcatttgagagtcctccctttgtagttatttctttttcctttcaaacttattgaaaatacttaagagacatgttaatagcgcaagggagtatatggtgaaggatgattacattagataattagcatacataattcaacatccacaagtcacacagacatgaagtaaaatccttatcattagtgcatttcatttgagaaaaatgagtgagcaccttttaagcattttaataatcattggagattttactttatcatattgaagttagttaatcattacttggaggcaattcaatatgataacatatatataaatatcgcaaaggcattaaatagattctaatggacatgagcttttagaagaatgagattgaatgcacatttagttgaaatgagtccaaaaaagaatctatttctcacatgggtagaatatgataatttagattaaatagtcattgagatgggaactaaatttaaccaagaagatgagttcccatacctttgcttttacctctcttcctttgggtgaagagcaacccatgaggcttgtggcattaaacttgcacttactctcttgtagattttcataagtaagctcaagagagatgttaagaacaacacaagcactagtttccctttttgtaatcatttttgataaagaatgaaaaggtgaattactaaagcat

SEQ ID NO: 122921 - DNA, 321 bp, Zea Mays
tatgaagacgctaagtctaacaatagcattgggggtcagctgatgaaggtatatttcaaagttctttagaacctcccctatcatgtcatttatgggcaaccgaagccctgctgtgaagaagctcttaaagacgataacttcgtcctccctcggctccggagttatctcctccccaacaaatccaacaagcttgctcccagactccccgaaatagcccagttttttcatcataatcatgtcatcttctgttatagtggactttccaaattcaagatgactaggctttgccgagttcagaatgttgttatcctcttcgctttc

SEQ ID NO: 122922 - DNA, 368 bp, Zea Mays
ttcgggctgattgaatctagagcgttggcgctagatcggacggtccgagttgcatacccattcggattattgcagatctaatcgtagccactgattaacgatcgggcggttcaggatgcttggtaccccttggccgtgcacaatttgttaaagagtccctggatttataggatatcaacccgcgcttcacaactgtgtaaaagtaattcggtataggtccctgatttttataaagtgcaccctattctttccggaaattgtgtccgcagcccaggaagtgaatcaatggaataaaataatggagaaaatgttttctagtataaaaataaacctagaatcttatttaaatcatatttaattcatattag

SEQ ID NO: 122923 - DNA, 279 bp, Zea Mays
caggcgtgttggcagcgctggcacaacaactgctacgtactgtaggatgcgccctctctatgcaacgtcgtcgtcgtcgactcgcgagctcctctgcctctctctcatcacactcacaccgtacgtccgtacgtatacctacgtcttctgcactttgcctttcttttttgtgtgccctagctacatgcttcttgctttgctctttcttgccttcgcgttctttggctggcggcggctcacgtacgtcgtcgtcaacaacaagtatttgcatggatgggg

SEQ ID NO: 122924 - DNA, 381 bp, Zea Mays
aaaagacgcagccggaataatgttgatcgaagtctatcattacaaccacactccgcacaaagccgcccacatacgtagcaggaacaatacaagcgtacgaaaatgaccaacaggccacaccaccattacaactacatacacacggcgagggcatcgcctactacacatacacggcgagggcatcacatattacattggctcaaccttcaggatgatacccatttcctgtagttgaatagcattacctcaattcctcaccctcaaaaagatttcgcagctcgccttcacctacactcgccccaatcggcgaggacaacaattctcgcttactagtcccatccacgcgaagacgaccactctccatctcactacgatgacgcc

SEQ ID NO: 122925 - DNA, 1511 bp, Zea Mays
atatgagaggcttccaatccatcctttgtgaagcaggttacatcaacatgaccttccccttttcaccttaccaaacccatacatatccctcaatcatcccctcttgcccccctttcccatcattcagtaagaacaaaggcacttttcttgcaaggttcagtgcccatcccttcgtctaagtttccgacccattccattgcaaaaagaattgcacccatgccctacagtttgctaggtagttaggaaaatccagccaaagccggccggctgagcagatgacgatgagaggccgccggccggtacgtacgtggcttctttcctcccacaccacgccccagcgcagtactcgcatcgcaggccggtgcagtaaaaagggagaaggccggacgagcaggcgagctcagctagcagtagcatcgatcgaagcaacactacacatcgcacaagaaggggggctagagctggcaacacatgcaggctgcagaggcagccatcaggtttgtacacctacgcactattcctactcctaccgcaacagtgcatagctagctaggttcgtacgccgatcgtcctccccactctcagcccatgacttactggcaggcgtaccttggtgttatgatcagtggcgccattgttggcaatgcccactagctttttacagatcactggcaaatttatctctctctctctctctctctaacttggatcccccgctgcctcagctcgaacgaactgtgcatatgtatgtatatgcagggcgaagtcgaggcccagacaatccaaactatacgtaagttggaccacagatgatgttccctttcgcatcaagaaaaaaaaagagtccttgtttattcttgctgcgctagccttctatgctgtacacatgtatcatacgcgcagagaagaagaacacaaggacagtagtagtacaataaagaggtgtccaggcctctccatagatatgagatgatgagaagatagaagtaccgatagaatgtgcgagggattttaagatcgcacctgcaatttgttgcttcaggaggcgtgtctctgctgtgaatgcgcgatcaatgtgtcctccgttaagttcgtccgtgcttctgcagtacaatttgttctagaagacatacaagatcatggcaaagatggatgctacttcctcaactgcactgcatatgattcttgtgatggaaatcttcaaatctagatacacgtttttagcagataatagacagatttgcagatgcatgttatcatatgtatgtagggattcgaatttccgatcgaatgggggcaagtacgtagtacagatgtggacgggtgtaacagcgcgaggaaattcataacatgatgagtgctgaacgaagaacatgaacacggatttggggaaaacactgatcgatcctagtgtttatatgtgtatcttctcaaaccaactcatcaaaaaagcgaagagcagccaaaaacaaggaaatcaaaacatcaagtcctagcttctataatcaaag

SEQ ID NO: 122926 - DNA, 685 bp, Zea Mays
attgaggtcgccggaatttccacgatgacaccggcggtccggctacgtcgcacgactacaggagcggttgataagcttcaccccacgaccaaatccgctccccttctgatcttttcaccctcccggcactatcctgcccgagtccagcacgaatctccgcgatcagcgcgaatccttgcgcggaggtcaccggcggcgagggggactgaacctgagatctttctgcggcattgtaccatcagaacgacattcagagcacctgacagagcggtttgcagcgcccagatctccacttttcatgtgataacttgctaatccacctttaacaaagttgtggtcctataatccagctttaatcttgctatagccaccatacttcaattctcactaaatcacactcaaaatagccctcaaacttggtcctagttcactgtcagtccagtttcagagctgtactcgaatgacagaccaacttcaggtatgtttttctcccactttcatgtagcattaaggcttacttacttaatgaaatttgttctccttacatagctctacaagtttgctatattgaccaagagcaaaatccccaagaattctaagatatagagctctaaagttgaccccattcaactgaattcagacttaagcatatggggttcatggggtactttttgcaaataagtcc

SEQ ID NO: 122927 - DNA, 306 bp, Zea Mays
ttccctttcaatggtcaaggcacaatatggtttaaaaagagaatttgtgtaccagaaatcgagcacctacaccaacttatcttaagagaagcccatgattcagtttattctattcaccctggaagtactaagatgtaccaggatctaaaggaaaagtattggtggtacggtttgaaaagagatgtggctactcatgttgcactatgtgatgtgtgtcaacgagttaaagccgaacatcaaagaccagcaggattgctacaacctctcaaagtaccggaatggaaatgggaagaaatcagtatggat

SEQ ID NO: 122928 - DNA, 637 bp, Zea Mays
attttctccatcctatggcttttgcgcggtccatggaggatcagtagccctgagcgaagtttaggtgtggaccgtgattggtgcgccgccggagaacggcggtgtcgtgtactggtccgggctgtatgcacgccggttgaccaacgggagagagagagagagtactggggagggcacgacgtctatgcatcggcggcatgaggttgaagacgccagggcgtccgtggattaggaaatagacggtcgagatcagatgataggatacctcttcgccagcgcgatccgtgctgttggcgttggatcaaagggtagcgattagatcgtgggctcggtgaatgtggatcgtggatcatggatccaactgcccagatcgcgtaccggttcaatgtaatgtggatctaatctaggtcgtagaatcccgatcggacggtcctgggcgagcgataccccttcgctggctcattttacataagcgccccttagcttttagtgaatcaacccgcagtctagttatcagtgcgctgggtcttagaaataattgcgcaaaggcccctactcttccctgttttcgtgtgcccagtccagagatttataaaatcaggaaaatgaataagaaaatgagtttttaatatgaaaa

SEQ ID NO: 122929 - DNA, 1123 bp, Zea Mays
ccaatatcgaatcctccctcaaaccagcagccaaaacaacagtggcaccatcaggagaataatcgggtaccacatcatcatacaaggctagaacaccaggcgccgccagctcctcaaccgcaacacacgggagggtaggggcatcaactggtcctgccaatgaatccgaagagacaggcaccgccaaaacatccactggagttaaagggcaacccgaatcaccagtagccatcaacgcatccaaaagccccacatcatcagagggtccatcacgcgtcgacgtggaatgaaaacgtgggcccagccgcgagtgcaccgaagtccaaggcaaaggtctgatcacccagcctccgcatctgccgagcccgacgaccctgctccggctcatcatcagatggatccggtggaggtggcggcagctcctcctcaaggacaccctccgatccaataatcttcactatcacagggaacaccaacgaacgtggaatccaaactccgttttcatcgaggaccgccggctccacagcatgcaggtccaacacctccggcaaccccacgggagagcgacaccatgctctcaacctgatgactgacaagtcctccccgccgatagaaaccgggtgcaggccctgaatcaggcagtatggaccaagcaaaacctccgctgtctccagtccccaaaggtgagcagggataccatggagctcgacgtcaatgagggaagacaagacactgcctcccgaagcaaaagcctgcctagtccatctcttaacatgcaaccttaatggagggacaaggagcgacgatccttcactaatcacccgcacagccagttcctctgaagggaagaggacaagaaaggagcctggcgcagcacgacgtaggcggagcgcatcggcgtcaaggccaaaccttgaggcgagcacctctctaaccttcgtggcgcaaccagttccttcctgtccaacaacgttgacgatcagggcatggcgaagttccaactcagcacggtcgatcatcctggaacgcccaataaacctcacaggacgaggaccgtccaaagccgtgggcgacaaattccccaaaggcagaagcaaaggatcaccgccaagtccaccaccag

SEQ ID NO: 122930 - DNA, 483 bp, Zea Mays
tcgaatctaacttggataacctctttatctcgacggccccctcggcgccccgactaggtcaaaggggggccctcccctcagaagaaggttcaaagaaaactttcttcgaggggagatgcatatgcaaaagaggagcacgtactggtcgttagcaagaagctaaacgttaacaaaatgggcccacgctcagcgtgtgcgcgaccaccacaggaacgttaaacccctaaaactgcagatttgacttaatagacctcgagcaattcacacaaattcctcgagggctgcatctagcagatgcgctcgcacgcactgtacatcagtcttaagcagaaagcaagaagctaaacaataacaaaatggacccatgctcaacgtgtggtaaccaccgaagggtcaacccctaaactgcatacttaacccggtaaaccctaagcaattttcacaaattcgtcgggggctcgggggctgcatctagcagatgca

SEQ ID NO: 122931 - DNA, 411 bp, Zea Mays
caaaaggctaacttagatggtgaagcacctactgaacctaataaaaggtaacaatagattttatacttcaaatttggtccaaggatctctaataatgttatggttttggttgtagggaaaaagagcaaatgatgatggtcctagttccactactattgctgctattggtactagttctactcatactagtgatcctagtcaggtagtgggacatgcaatggctactggtggtcctagttagtcagtgggacatgcaacagctactggtggtcctagtcagtcagtgggacatggatctgctcttgttgctcataacacaccaagaaggaagataatttcaaagaataaaaaagaagacacatgaaaacagagaatctcaaggatctagtagtgctccaccacctgtcgaag

SEQ ID NO: 122932 - DNA, 347 bp, Zea Mays
ttccactttccaaatcaaaactttcgctatcgccggaatcctcagataacccagccagcatttcattggtgattttctctgtgtttgtcttttccatagcctcataaatgcagggtcaacaatcttcttctcttcagccatttagtcagtggttgtgcaaatgccgaagcttacaaattaatcaaaatttggcagagcaagaaaattcagaatggcaaaaatagcgcaagcacttgaaatggcacatcaaacgctatcaacgtgagtccctatttatatgcccagcgcaccacagcttggtggaccctatatgttagtatctttcgctattctagcgaattggaagg

SEQ ID NO: 122933 - DNA, 638 bp, Zea Mays
tttgccgccagtttcactacgactgttggcaattaatttgtcctatctgccttctctgccccaccggtcaacatctaacaccagagaatatttgtaccgttagctattcagtacaaagaccaacagaagaacatatataaccgtcgataacgtcaataacatgcatgttaaccgttggccgttcataatctccctaactgccgtgagatacacaggtcgtgttcctagtagtgtcattttcattctgatcatgtccacatggagctagatccatggtgatcgaataagagatcttccattgactggctgactgattgcaccctggaatcgaatctgctgccggcctagctagcaataacctgcccacctgtccgatggtttccagtgaccgtcggccattttctttttctgctcacgaggctgcagccttgtcgcggttgtggagctcgtgcaggtacggggtcaaaggctgtgggctaccccagcttttccagatgcttgtatcacatccctgccggttggctccagccttctcttacagcaacgagactgtatatacgcgcgccggaaggagattactaccgaacccgactcttttaccgagtgtcctgttatttgtggaggacaaaataagtttt

SEQ ID NO: 122934 - DNA, 888 bp, Zea Mays
ccgatttagaaagtgcactatctgcgacgcgatctggatatcgccttgccaacagagacatccaccacaaatccccaaaccgtgcacccaccatcattaaaaaggtcgcagctgccatcctgctccaaccatcctacagtgacggaaatcctgcgcccaccctcatccaggtgagtttgcattatgtttaccatttctcttgtgttgtagcagttcttgtgcaatggtcgaaccttgttgttgatacaattagttagttcctgttgctataagttgacgtgactgccaactttaaagttgttatattagttatgtcatgatttaaggaacacaatacattgttttttgtgtactgcttatggcatgtaatcccattcattataatgtaattgccagttggtttgtcgggtatttggtatcctgagaagtaagaccgggtagtaatggaaagagaggcaatgaaaggctgaagttgacatgagaagaggcagccaaagatttagcctgccttgaatatgagcgaatgtaaaacaaaaccttaaggcttcttttgggtttcaactgtagcttttcacaatggcaccaaaaggctttgtctattgtttttgttgcaacttgcaacttctgcaacattataggaaatcgcaagagctttttgatgtgcccatgaaaacccaaagtatgttatgctaaagaagaccagattttcgtccagacattcgctgagatatgtggtggcaaataaaagtgtatgatgtctgtggtgcgatgcgccacgggaaaaaggcagaatatatgatactgttattgtcttaactgtctaatcaccttcctgttttagtagtcatgatttggtacttggcttactgtttttttgttatgcagtgg

SEQ ID NO: 122935 - DNA, 584 bp, Zea Mays
cgaaaaccccaccccgaagcccaaacttctatgcgtagggtacatcacgaagcgcatgactaggcgttcaagtttacgggacctacaccgcagatcaagccctcaatcgcaccgacgacggcgcagggcagaggtgtggaaaacgcccaacttcgatgagaaatctgacctcccccgcgacccaaacccggtttctaatgtctaatacatgatgctaccattaaatcgagtcagtggggaaaggaattacctaaaaccgtggagtagaaggttctacccacagagagcttcgtcccggcggcgagacttccgctccaatgagtaatttcccccacgccgacgagtaatcccacccgaaggcactacgatcacgcgcggggagcgttggcgaagccctatgactaccctctgaggttgtatcgtggtcggaagtcgcaaacgtcgacggcggcgaagttccgcccctcacctcgctctctctcgctttggtttaatggtgacggtgtctgtgatacgggggccagaaggagattagaccctaaacttacgactttgtagtcccacgaggtcggtccaggttaggt

SEQ ID NO: 122936 - DNA, 468 bp, Zea Mays
acttgcattatttttgccacatctgtaggagacatgtcagatggagatagagataaagatagggaaagagatagagtctggcatcacggagagacgattagcgtaggttttaagtgcaagtattgtagagaaacaaagagcagagggggtggttcccgattgaaggagcatctcgcgcatagagggaagaatgtcaataaatgtccctctattcctccagacataaatgcatacttataacttgacataaataagacaaaggacaatgagaggggtagctccagacaacagttgagggcagatgaggtagcacgaacccattttggtgaatcaaaatacgatgagtatgagcatgaacttcaggcaactctgcatcaatcacgtgtggagcacgaatttagtcaaagagctggtgcagggtatgacaggggtacgataaaccctaaaccataaattcataatgctggt

SEQ ID NO: 122937 - DNA, 448 bp, Zea Mays
acaagtaagacaataaagttatctacaacttttctatatgacttttctacaaaaaacatgatttagtctatcaaacatacagcacccgaaaacagtacgtgcagcccaaaacagcaattaataaatttcagcttctatataattcaagaattgccgcgttctagagacttgaattattctaacactttgacatttgttagagttaaaataaccaagtgagaactaacaagtagacttactaatttttatccgtgtcatttcgagcactagaagtaccatactcaattaacaacgcattctctacgataatcaatatcgaagcgtttttcacccaatagtttgcattttaacttagacatcacatgagcactaatacttttcatccgtgaccatacccatacgcatttagactacaacaagcaaatcatcgtgactacgagcttaacta

SEQ ID NO: 122938 - DNA, 607 bp, Zea Mays
gaagcttgggccctccgatctaaaatggaagatgcagattagatcgtggatgggacgaagcggtacgtgtctgaggccattagattcaagattgatggcctaaattttaagtgttggagaacgactcgaatctgatcgctggtagaccaatggtccggatctcaccactgaaccagcacaaccctatctaatccagaccgcacactcgagatccagcggccatagtgctttctcctacccacgtcggtcctaaacggtggtgccgccaagctccgatgaacggtgggacatggccggagccacccgagttgatgccctagaaccccattgtgaacgcgagtttgtgtagatcatagagtatgacatggcgaattaaaggggatggttcttactagcaatcgggataacaagggggcccaaaatagcgcttggcggctccacggggaagcttggcaatggtgaggaatccccaagactttgggtcgtcgacacgcgccatgccgctatgtacaggttcccagagacctaggggaacaccgacaccccacaagggaccctagctagaagtgaacgcatagggacaccgcggtggccatttccctctcat

SEQ ID NO: 122939 - DNA, 798 bp, Zea Mays
atttgatcctgttacacccctactcgtcgaacgccagagcatgttgttgtgtctctcgcctcatgctcgcccattgtccttgtcgcgcatcggttgtcataggcactcaccacatcgtgggccatcctagccttacgcatctgcgtcaccctcaatcatggtagccgattggttgtgcatgttgatgagccctagccactagagaggcacgcttgggcttgcatagtttcatcctttgcgggtctatgttgtcgtcatctatgggaggtgcctagccacatgcatcaatgagcccctagtcgtggaagaggccactttggccgtcccaggccgtgtgctcaaccttgcatgttcatgctgcccctgctgtgaaagccacttggacacacaccccacaccatggtagccactgtttagaagacctagtggatcctggctataggagctgttaggcgctggtcgtgcatgcccctttctcggaagtgagattgacatgtggggcatatctaaagggaaaaataaacaatcctaactaaaatgcacttggatggatctatagctattgtgtagccaaatggttcttatgagagtgaagaagacagatgagggagaaatcggagtttgttgattatgccacaaggaaggccacaaattcgtaccaatgtaagacgaaaactggggtagaaaataaaaagccaacaagcaaactcttcaacacctataccaacaaggtgaacaaaatggctacctcaccttacttgctgaagaagaaaaacaataaggtgatagctatcaagc

SEQ ID NO: 122940 - DNA, 798 bp, Zea Mays
accgagttggagtaggttggttcgggtgccttcaactgagggcagttgttcttgaagtgactggggtctccgcagtgccaacaggcgtttgctggcggctggttgcttgcaacggagggtgcctgaagggagctctagttctgctgactgtagcgtgatggagtgggtccaggtggtttattgaagcttggtcccctgggtggaaacccaaagggtcgagctctctggtgacgttcttgctgttgagctcggaggacttggaatttcctcttgatgtgccctttttcttcctcttttgccctttccacttgcatagctttgttggagaggtgagagaagctgtggaagtcttggctggcgaggatggtcttaatcctctcagaaaacgggccatttttctggcctcggtgctgacatcctcgggcgtgtagcgggccagttctgtgaacttgtgcacatactcactgattgtccttccgccttgagttaactcccggaattcatcctccttgagttgaactatcccctggggtacgtggtgttcacggaaagctgcttcgaattctgcccaggtagcatctctgacggcctcactgaaagtgtcccaccatgctaaagccattcctgaaagctgatgagctgccagttgaacacgctgattctcgggacaagcgatggcttccaacttccttttgatcgtgcaaagccagtcatctgcatcgaggggattgctggaccccgcgaacgtgggaggcttgagtctcaaaaattctcccatcctgtcctgtggccttccac

SEQ ID NO: 122941 - DNA, 479 bp, Zea Mays
gtaaatattccttactgagggaagttataaggaaacaacgagatcaccaatgatgtgcaaaataaaataatcgctcatgaatcattaagaaacaagcgtggtcaaagacatgtaaactgaaatgttttaaatagacattggatataaaggtaggcatacataaaaatgcaagatttcaaggataagggcataccaataccaggggaatagaaattggcgaaggataatgacttgacaacataatagtaagggatttcaaaagacaagaaagtcatggacatataaattgaaatgtttaactaggcagtagggttttcagaggtaagtatctgaaattagagtattgaagaatataggggtacgagcatgtcaataccaagggaatagagatggtcaaatggtagcaatttaataatggaagagaaaagaatcccaagagacaagaaggttatggtcagggggcatctacaaagatgtcg

SEQ ID NO: 122942 - DNA, 516 bp, Zea Mays
gtttgtgaaaagggcaagggctcatttgtgaaattgactcggcgaaggggtatgattaattctgagccgctagattagaacccaagggttaggattagatctcacataaaatgaatcggtatgcaactagggccattggatctaacttcaatagtctagattttatttgaccgagatcggcacgtatccctccgatctcacgtcaacgactgggattcaaaacgtgaaaggggtagcctgagctctaatctcacccatccgcaagcagatcaatggttagcgcaaccttcttcttcccccaacccgagccacagcggcattcagactcccctggcggcgagcgtcgtgagcagcgcgcccaaagcccctggcgcatgattcctagcaccaaaaggaaatacacgatctacagagcatattgaattgatcacggtagggcttatgggatatggtggtggtagtgatgctacccacgcggcacagtgggtccgtcacgtttgacaaagcccgacgaca

SEQ ID NO: 122943 - DNA, 300 bp, Zea Mays
tttaatttaatttcccatattttcaagcactatagagcttgatatagttgttatggccacttggcgatatataaatatataatgccacacaacacagtcaaataaaatatagagccaaacaaaattgtttatgaaggttgcgtataatgtgacttcaggggcttgaacaacccaccacaatccacacgagtacaagctctagtgtctggtgtcaacgcgtgtgtggccatcagggctacgacaacacagccagccttcgtaattaatgcaataagcacaattatggctcggtaatcgggg

SEQ ID NO: 122944 - DNA, 399 bp, Zea Mays
cagggtatggccacttgtggagagctgggatatgtcgaaggagaccactgccgaatccagtgaaggtggtctagtccaattgaagtatagctttagatttagggagaagtttgatgagccagacgatgactgaatgaagtgtattgaagctaccagtgatgagctattgggggcatactccaaggccgaagataatgctttgtccgtagcttttgggggtcggggcaagaaaagattgaacagggtatttgatgcgattggcttcgtataccctgattaccactacccactacgagggaaagggaaaaagagaaagactgtcgcttcggccaccccagctgagctgaagagaaaaaaggtgaaggttttgacccaccggtcgcgttatattgaagcggc

SEQ ID NO: 122945 - DNA, 430 bp, Zea Mays
atctgctgggtgtcctagggcatggggttaggggattatctattaggtgccccacgacacgagggccctaggggcttatccatcagatgccttaagggcttatctattaaatgcccagggcgcaagaggcttgagggcttatatgtgaggtgctctagggtgtgaaggccttaggggcttattgctaggcaccttagtacaccaggggcttatctgttaagtgtctcagggcataagaaatcctaggagcttagttgcaatgtgcctagtgtgcgaggggccttggggcttttctattaatgcttctaccactacattttaccattgtattagactatattctaccctagattgcttagaaatttaccttatctaatttccattaggtagtttttgaattgtgaacatgtgcaagtctgagtaccaggcc

SEQ ID NO: 122946 - DNA, 285 bp, Zea Mays
tgatttccttcatgacctgattgacaaccaatttggagtcgcccctaaccaggagttgtcatgctcccacttcgcccacgatctggagcctgttgatgaaggcttcgtattcaatgacgttgttggtagcgtcaaagtggaggcgatgtgaggacgatacccgcgttgcttccgatcttgaggtaggagccatcaaaatactttctccagtactccgggtcttccactggtggtggttcctgcgcttccgtccattccatgacaaaatcggcgagggcctatgac

SEQ ID NO: 122947 - DNA, 497 bp, Zea Mays
tttcggtgcacagaagctgaagagagctaaggtcctgactcgtaggctgaagctacattccttagaaaaatttgctgaagggcctacgacagagaaggtgaagtttattgaaaatgtcgaagttgtccccttagctacagaaatagttcctgctatgccagtcgaagctagtgtcgatccggtaaaagagccgggatcaaagaaaacagaagaacagccgaaactgctgagtctcccaactgtaacagagttgccaaagctattagctactgcaacaatgactccgaggaagaggaggatggctagtgttttggatgctgttttggaatccgtgaaaatgtcaactcctgcttgtgccaaagcttctaccgagaaaattgaagatgcaagagaagtggtcactgcaagcgcttcttatgttcatgttgaagcgggaccttcagaagctgcgctggtgaagctggtgggagacagtcttacagaaaagcccacgtcac

SEQ ID NO: 122948 - DNA, 464 bp, Zea Mays
acaaatggcagaagttgtggcgtcatgtcgccatagctgggtgttcgttgctcaagctgtcaagcatagtaacagcctataaaccccatgggccagtggcgggcgggcagggaagcctttgggggcacgacatgacaagtacttgaacttgtgctccactccacggccccgcacctgactcggatggctaaatgcctctactactctactgactactctagtgctcgcagtcgcagcgcaggcaagttgcgatatcatgcaagcagtgcagggggccaagccgtcgccgatgcctactgcacaaacacaagtgcacaaccaagctctcgttctgttgctgggttggctgcataggtttgatgactgagcaaatcggagagaggatactggtttttttaggcagatagaaaacagatttgttaagttgttgatggttgattgtgcttttggcgtttgcgtgaaat

SEQ ID NO: 122949 - DNA, 480 bp, Zea Mays
tatcttcgtaccgtgagtaaatgccctgatactgaaagggcaccttgtacatgtttgcatagtcagccaacagtttccctgcccgctcgatgttctccaaggggctgaaacctggccgaggcacttctatacctgtaatccgaagccttggagtcactccttgctcaccgaaaagctggatcagcgatggccattgaaaaccatagcagacaccaaaatcaacgatgtgcaccctggattgccccaccgaggtttccataatagtttggttagcaaaggtgtatgatgccctgtggaaagggcagactgcaagataaaagttgtagatcttcaacacgacgtcttcgcttactcgcttcgccagcatcttgtggaacaactggctccctgtgccagtcaggcgtgcctcaaggccattcacaaagtaaaatgcctgtctctggcaccactctccatctcttgaggagtgctgtcttatct

SEQ ID NO: 122950 - DNA, 490 bp, Zea Mays
tggcgtatgcgattgggtagaggggctgtccagaattttaggtggcggacgaacagcagtaattctagcagtttttgggttttttcgtggggagttaatgggaatcagtttgggaatcatgtagaactttggcatacctttccaacgagtatttatgcgctcaattcagagttataaattaaaagatatcgccatttgaatccgggtatgtggctgtccaaaaaaacagatttttcaggtggacgaacagcagcagtgttagcagtttctggggatgtttcgtgcgtaattagtgctaatcattatgagaatcatgtagggctttgtctttcctttccaacaagtacttatgcgctcgatttggaattatattttaaaagttattgctgtttgaatccgggtatgtcgctgcccaaaagatgaaaaaaacatattgctgggtttatcttgtggaccgtttaggggtaattagatgttagaatttaatcat

SEQ ID NO: 122951 - DNA, 277 bp, Zea Mays
tgaaatttttgtttcgttgactccacctctaacatagctgccaatatatcttggttgaataaaatattcctcttttgcaacatctctctgcttattaaggccaacaataattgattggtctggctttagtaaattgttacaccttttcacagcagcattatgaaaaccatttaacttgcttgcatgaacatctaatctatctttcttgttccaggaagagaaaccttttgttacaaaagcaccatttttggcctgaccttcaatacaatctctaaac

SEQ ID NO: 122952 - DNA, 633 bp, Zea Mays
cgtaagagtctgaaggatagcaactagagcaggatcaaccgctggaggagcagcgagaacagcactggaacttccggcctcatgatcatgtgagccgggaggcggaggcggagggggaaccccaaagtcgtcatcatcatcatcatggactgttgtgccctgagtctcgaactgatgaaaagcggtatcctcggcctgagtgtcaaacactagagaaggagccggcacaggatcctcaggggctggacggtaggacccaaagaggaggcgagaggcctcaagagtgccctggaactgtggtggccaaatcagctgagcgaagatgtgacagagatagtgagcatatggcagctgtcgatgagcacgtagaccatccagtacggtgtcctcgatctcacaaatgaggaagtcaacaacatcaaactctgagtgagagaccagggcaccaaggagccagagctggatatgagtggcagcctccctgtaacccatccgtggcagaagcgtctgtctcatgagctgatataaaaacttggctgctgtagtggaaactgccggagaacgtcgcgacccatcggagaagggcggtcggaacaaagccgcgacgtgagttgtaccaggagcaactctgcc

SEQ ID NO: 122953 - DNA, 346 bp, Zea Mays
caaggccagtcatttgaaagtggcaggcactttatagccccttcccataccatcttggaaatgggaggatatttgcatggatttcattgtgggattgccaaatacctcccggcaccacgactctatttgggtcattatggatagattgaccaagacagctcatttcttaccagtgcataccacccatagggcagaaaagtatgcagagatttatattgaccagatagttcgtttgcatggaatacccaagactattgtgtcagacagaggagcaccgttcgtagcacgtttctgggagcaactgcaagaatcacttgggacccatgtaataagaaggtcagcatac

SEQ ID NO: 122954 - DNA, 341 bp, Zea Mays
attttattccctctctcctcaattcatgttcgccttattaggtcctggaaccgatagcttctctaacccgtctttgtcgttgttcgccactttggtttgggcacccaccgtcgtcatgggagcgtgtggtctgctcctgctgcccgccgccccgtagacattgtctgtgactccgtaagtccatgtttgctctactagaccccctcatgtcgtctgcatctgcattagggtcggctccattggtgcttgctgcattagggtgtttgctctttgcaagaactgtgttaccgtcggtcatccggtgcacaatccgtgtgtggttggtggattcttactctttg

SEQ ID NO: 122955 - DNA, 786 bp, Zea Mays
gcggccttggatgtggctgcggcggaggcttctccgcgtgtgacggatgctgatgtttttcctggtccgagtgctgggcgtaggtggtgaagggcggtggcgaagcgttgagtgagtgaggtggagggtggtcgtctttgtgtggacagggctggcatgcgggaattgtcctcgccggttggggcgagtgtaggtgagggggagttgcgaagtctttttgagggtgaggagctgaggataatgatgtttaactatagggagatgggtatcatcccgaaggttgaaccaatgtaaggtgtgatgccctcgctgtacgtatgtaactataatttgtatgatgaggctgtgtgccttcgctgatctggtcgtgcccgtaggggacttgtgcacttggtctagcgcgtttattatgtcggtccggctgcacctgtagtcggtctctgcacggatagtcttttgagggagacttcgattttgtgcacttgttgtgctagtccagctgcacccttaggcgacttttgcacggatagtcttttgaggaagaccttggttttgcgcacttgttgtgctagtccggctgcacccttaggcgacttttgcgtggagtgtcgcacgcgagggtagccaacgcttcccctcgcggtgactttgttgtggtcgaatgccgaagaccgttgatgcggtcttttttcgacgttgtagatttgcgcgggggattttttacgtgtatattacatggctccacctcattaaaaacctcaccccccgggaggaaaagagtgcggg

SEQ ID NO: 122956 - DNA, 320 bp, Zea Mays
cgttagattgcgggtggtataccgaggcgaaggcaagcttagtaccgatggagaagcagaagtccctgaagtcctagctgtcaaactgtttgccattgtcgtctgtgagctcggacgggactccgaatcggcaaacaatgttttgctagaagaatttctgggcagtcttcgacgttattgtggatactgcccttgcctcgatccacttggtaaaatattcgacgacgacgaaggtgaacttgaggttcccttgagccgtgggtagtggcctgacaatatccagcccccagtgttgaagtggccatgtgtgggcaatcagc

SEQ ID NO: 122957 - DNA, 876 bp, Zea Mays
cagcttgccacgtgactctgtctgggtggtttggacgagtacgaggtccccttcgttgaattctcttgggatgactgcgtggtcccgccatgccttcgtttgagcttggtatttgttgagggcctgcagggcgaagaagcggtctccgtcgatgaggtctttggaggttggttcgtctacgtcggggatgactgatgcgcttgttcgaggtgacccatgttttatttcctgcgaggtcatggccttcgatccatatagcagacgaaaaggagtgaatccagttgcccgacattcggtcgtgtttagtgcccagattacttcaggtagctagtcggcccatttacccttcctgtcgtcgagaagccttttcttgatggcagtgaaaatcttgccgttggcgcgctcgacgacgccgttagattgagggtggtataccgaggcgaaggcaagtttagtgccgatggagaagcagaagtccctgaagtcctggctgtcaaactgttttccattgtcgactgtgagctcggacgggactgcgaatcggcaaacaatattttgccagaagaacttctgggcagtcttcgacgttatcgtggatactgcccttgcctcgatccacttggtaaaatattcgacggcgacgaaggtgaacttgaggttcccttgagccgtgggtagtggcccgataatatccagcccccagcgttgaagtggccatgtgtgggcaatcagcttggtgaactgcgaagggttgcccaagcagggagaaaacttctggcaggcttcgcacgacctcgtgactcgattcgcggcgcagattatagcgggccagtagaacccttgacggatcaccttggcagcgagggccctaggccc

SEQ ID NO: 122958 - DNA, 778 bp, Zea Mays
cagactcggcgaaggggtatcctcaagtcttggtcgccgattaactttctacggttcagattagatttgtcacaaggctgaaacgacacgagccaatagccactggatccaagatccatgaccgagatccgactacaccaaattctcatctgaacccaccgatccaatctaacggccacgatttaatgcaccgaaacggtttacttgccgctaatcctagccgttcgggtgcacatcgacggacagcaaccgatcaccgcccgatccaccgatcagacggcggcgccgcccgcagcagtggtggcgcaacgccggcgagacccatggccacgccccgagggcccgaatctctcgtcctactgcggctacccaaccctggggtcgatgcgaacatgctagaagcgaaattaccgtggattacgccgcgacgttcactggtcacgggcggcggcggaggatgaagtccggtgagcaattcgaagtcgcgctagtggtcgaacccgcacgaggatctcacgtgtggactcccagtactacgacggagctccccgacacgatttatgggcttcagcggtgacagaattgaatatgggccgcggtggcgcacaggcagatcacacggcggcagaggtggctatgggtgtgctggtccagggttacgaaagtcaaggtggccgcgcagagcttcactttataccagaccaaccatcctccccacatcccccgtgagctgagcatcatggaaatccgttggtcaaccacccgcgccgagaccccc

SEQ ID NO: 122959 - DNA, 479 bp, Zea Mays
tgccctgtacaacacacctcccacatatgagcagcttcgagtttttggatgtgcttgctatccgaacctcgctgccaccgcaaccgcaccacataagcttgctccccgctctactaagtgtgtttttctggggtattctactgagcataagggttatcgctgtcttgatctatccacaaatcgggtcttaacatctcgtcacattgtctttgatgaggcttgcttccctttcgcagcctcgccccctcgaactaatgattttgattttttgtctgagatggatccgacgccttcacccatcggaacacgtcttttacctgtaggtactcgttctgttgcccccgtggttgcatcgaaggcaccacctacgagggttgctccgaccgacactacctcttctcagtcgggccagccctcccaggtccttgcaccggctactcggacttccacgcttgctgcgccggctagtcctggtgtgc

SEQ ID NO: 122960 - DNA, 328 bp, Zea Mays
ctcgaagcctcttgacttcgtcccttctattagctatggttcagacgaagatgagtgtgtttacccgaatcttgctctattgacgatgttgacgcttcggagacctttggcgatgaaggcctttcctcaatagtagccccttgcgagataaggtcgttttcataacaagctcaagtcgcgaaacatatttgggaggccttgcgccaaaggtccgaaaagcacctttccagggctcgttattgaaaatgacaaaaaataagtagcttcagaatgggcaaatgtatatttacggtccactaggtagtgaaaaagtaacactacaacttct

SEQ ID NO: 122961 - DNA, 443 bp, Zea Mays
tggaagcgcactatttggtcaatatagatctctacgtacctttctgccttgtgggtggtatgtactggcaagaaatgagctgttttggtcagcctatccacaatgacccatatggaatcgtggtgccgagaattgttgggcaatcccacaataaagttcatgttgatgtcctcccatttccaagatggtattaggagtggctgcaaggtacctgccatctttaaatgacttgctttgattctctggcaagtgtcgcactctgatacgtacttagcaatttctctcttcatcatggtccaccaatacaaggatttgaggtcataatacattttgttgcttccgagatgcatggaaaatttggagaggtgagcctcgtccaaaattttctttctgagttctgggtccttcagaacaacaagtcggtcttcaaaccataaaatgcc

SEQ ID NO: 122962 - DNA, 528 bp, Zea Mays
ctttgaatggggaaatccataaaatagcaccggtctatgagctaattcagcaaacaacactggtaatctaagtattcacggaataacacttcaggcactagcagcagtcagaaaaccgcacgcatcgtcctttcctatcccttccgatttttttttctttcccttacccccaaagccaaaagactgagttggcccctcgtctctcctgtgccccttgcctttcttgttccgttcttctgccaccaagcgccaacataaccctagatacatggctggcggcggcggctgattagcacttcaaccacaaaacacaagatcagaagtgagcggcgatggacatgaacagcttcaacaagatgggggatgatcccatctgcagcgggtggaagggcacatacggcatgagaggcggcaaaatggacggcaatgagatggccgacaggtcatagcttgatggaaattacagcgcattcgtagagtgagttccatatcctaatcccaacgtgagtctgattttgtagttcatcc

SEQ ID NO: 122963 - DNA, 1290 bp, Zea Mays
aagcccattacagctgtaacacacacatgtctaacacccctgtagtctcaactttaggcattacaaatgttgagactggatcgaaactccgagaacaccagaggggagccccttggtgaacatgtcgacaaattgcgaagtggtcgggacgcagaggacgcaaacatcgtgacgatgactcgctcgtggttgaagtggaggtcgattttcacgtggttcgtgctctggtgctgcacagggttggagaggtataccgcgtatcgttgtcgcagtagacgagtgtggcgcacatgaggggatgctagagcttttggagcagttgatggagccaggatgcctcggctatgctgttggccacaacacgatactcatcctcagagctagagcgggagacgacgggctgccgcttcgaggaccaggagacgaggttggtgcttaggaacacggcccagctagaggtggactggcacgtgttagggtaatcgacccaatcaacatcggtgaagacgaccaactcagaagtcagagagggccgaagaagactgtagtcgagggtcacagaggtagttaataatccccttggtagcgataagatgggactcctgcgagacatgcatgtgaaggcacacttactggaccgcgtaggcaacatcgggccaggtgaaggtgaggtgctggagagcctgatgaggcttcggtaggccgttgtatcgctgaccacgacaccttcgtcgttgtagaccttcccttgagtgtcaacaaacgtggagcagggcttgtagttggacatgttggccagctctagaatgttgatgacgtactagcgcaggtgaaggaagaggctctaggggcgtcactccatggttacctcgaggaagtgatggagagggcccaggtccttcatcgcgagctcacgttgtagggtggcgatcatgcgctggaggagggcgtcactagacaacgtaagcatgatgtcatcgacttagaggaggtaatcagtgccgtcgccgcgctgaaggatgaaccgagatgtgtctgacttggcctcgacgaagccaaggaagaccaagtaggaggcgaagtgactgtaccaggcccgaggcacgtacttgaggccatataaatagcagttaagcttacacaccatacttaggcgagtggagtcgatgaagcgacaggcaaactgcagcacactgtcttagtcagagtgttgtgaaggcattcttgaggttcagctggtggatcgcccagtcccgggagaggccgagtgagtggatagtctgaacggtg

SEQ ID NO: 122964 - DNA, 741 bp, Zea Mays
ttgagttagttgaaatgaagattgataaagataaagctgaaagatcaaaatctgaagaagtatcaaagatgccagggattttaagtcctctaacagaagcgacagcgctaaaggcagaaaagagttctgccacaactcctaagagaaggaggatggtaaatgtattagatattttagaaacaaccgattccataagccccgctcccacagggaaggttgccgaagctgacaaaatgcaacccaaagctgatactaagcaaatagaagttgaagttacaataacctaggttgaaaccgaggtgggacccttagtgcttgctgagacgaagcttgccccaaccgaggagggggccgaaggaattactccagatactaatatagcttttgagaaaagtgtggccaaagaagtcgaatcccttactcccgaagcactccccgaaggtcttgattatatcgttagactatgcttcgggaaaaagactatccgataaagaaatttttgaagccaaacattatgcccgagaattgcagtatccgaagggagccctagtatttaatggtacaactgaggatgactttttatactgcctcccggacaacaaagaattatccgtctgccgggagatgaccagaagtatgggtttctcgaagctcgaagctggcctttgcgccatgacgaaagccgatctcgcagatagtcttgcatacaaaagtctgaaggtacagaaattgtgaattttg

SEQ ID NO: 122965 - DNA, 588 bp, Zea Mays
ttctttagccccttactctcacaaatcctgagagccacagtcatgtcatcatcatgcattctctcacaatcttcccagtcaatcaccctatgacggactactaggtgcttcttggagatgatgacagagttataaaaattgacttgaaaaagattccagaaccttgggtcatggacaccagggtgtctgggaaagatggtgggattagtaaacctgattttctaaagggagtccactcccttcaaagagaagtcagccagtgtcttgagggccccaagacactatggcctgatgcatgttgaggcccccaatggaaggagcgtctgacggaggtggctcaacatcatcgtcttgagcgtcgtattgttcttgacagggaaagttccctgccgaagatccactacggcgagagcgagaggaggccactttttcctccccccacgaggggttgagagggcatggagggcccctccccctcaatccttcctgtaccatggcccctcttagagagggaatgaccaggcagaggagaatgaatgagagattcctcctgaatctcatcctcatcactactgatctccaccatcg

SEQ ID NO: 122966 - DNA, 684 bp, Zea Mays
gcctgatgacattgtagttgatgtactcgctgcatcgggtacttcgagtaatccatctgcttctggtgaccctgcggacaaggttcctcgcaaggattctcctgcacagtaaccaaaaagtgaaagtgaacatttattagtccaaacagaaaacaacttttcattgagacgatattttttgtggttttttactctccctttttgttgagtgtgaatagggtatagtatgtgtcgtgagatttttgctgcttaattgatcatgtcgcaccgacttaaggcgtttccaacttaagtcgattgctctgttagcagggtataataatcaccctaagttatgtatgtgtgagcatatcgcaccgacttaaggtatttctgacttaagccatttgctccgttagcagagtatagtaaccaccctaagtcatgtatgcgtgagcatgtcacaccgacttaaggtgtttccgacttaagccgattgctccattagcagggtatagtaatcaccctaagttatgtatgcgtgagtatgtcacaccgacttaaggcgttcccgacttaagtcaattgctccgttagcagggtatagtaatcaccctaagtcatgtatgcgtgagcatatcacaccgacttaaggcgtttctaacttaagacgattgctccattagcagggtataataatcaccc

SEQ ID NO: 122967 - DNA, 428 bp, Zea Mays
tgagcatcaattttgtccctaaggtcctcatctagcaccttttttacaagtacatcattgaagcaaccccttagctctccaacatagccttcatcatcactttgcttcatgctatagaattttccagggttcaagtagagtgctgctccatacaatggagtatccatttgtttcacccaaatgattctcaacaattttcatgatgcgactaaggcaagatttcttgttttgagtagagaatgatgaagtaatcttttgcttcgctatcttcatagctgctgcaacctcagacatggctggcttctcatcaccatcaaccaatcgaagcacaacaagtagtggtaaagaagctctaagacagtcctcaactgaattccaaaatgtagttgagaaaacaatttcatatacttttttccctgcctctgttt

SEQ ID NO: 122968 - DNA, 699 bp, Zea Mays
cttgcttaagaaggctagctcagtaaatgtacatgtacctgcttagtgtgaaatttataagggtttgcagtcatggctggagtcctacatacacagcaagactagcaacaaggaagaaaacacataccttcgatcagtcttgagttgggtgtctagcaatgagccttagttgagcatgatggtcagccagtttagaatgggaattgatagattggggttaggatttgctgttaggaacgggagtggcgcttcttatgccaaggttggtgagtttagtggcttggcaccttcaaaaaaactatagactcttcctagcccattaaactcactccacccaaatctaccaacctagacatgagggatagagtgtttgaggaacctctaagagccccacctcaaaaacaaatgtggattcctaaacctaaccatcttagcaatcctcttgacacttttcccaacatctttagtaatccccttcttagagcaccactgccacccaaagtgaatttatacccacaagagaactcgacctaagggagaggtgaggtaccactgcgagcattgccatagagatggtcacttggtagagttttgctttagaatgaagagagttgagctatagggttttgacatgagaagtaggaatatgtatcacactcttcatgatgtacatgtccctcctaattagaggccgactgc

SEQ ID NO: 122969 - DNA, 1049 bp, Zea Mays
gagaaggaacaccactactttccccactagctatgtaacgccggttgttcttccgaatcagagggatttcatcctcttcttcatcatcctcatcaacaacacggacatcacacccattggggtcagcgtcagacgggtcacacccattgggatcagcttcagtaaattcaggcacgggcacttcctcagcaacaggagcagaaggaccggtaccctaatataagctagacacccgacgaagacgtctctttttctttttctccccctcagcacgaaaagaggcttgatcagctcgacgagaacgttttggacgaacattgacagacttctgagcgtccaaagctttgtcagcctcagggatgggtaccaccaccaatgtttcagtaggaacagcatcagaagaatcctcagctaacatatcaagcatggcacttatctctgcatcactgggatccaaaggcacctcaaagtgaacctgtcgttcatcatcaggaatttcttcaagcgaagcaaccaaagcactaacttcttcggcagagggtcgcactctaaggcccaaaccaccaccaccagcaagaggattcgacacaaaatgggtaagggcctcggaaggaggcaagttccaggccgagtacgcaacaggggcgctaacatttgacaccttgcctctgagtatcatttcgagccgtctcactaagtccacagcagcgattcttctgttggtaacccgggttgaatcagctaggcctcggtacagataggccgggtatgccctgtccttcagtggctgaatattcttgaagacaaagtcagcaaccacaacctccgcagtcagacccctctctttcaacaatccaacttcagctagcagagcccctgcctcagccacctcctggtctgtgggggattcggtccagctcggagtgcgaacatccggctgtctccctgaccgtgggggagagaatttccgtgattctcaacgataaaccactccaagcgccatcctttaatactgtccttcagtgggatgtcaaggtagtcagtcttcc

SEQ ID NO: 122970 - DNA, 891 bp, Zea Mays
gatgaggatgacaaggtggtggagccctaaatagcgatgcttgtggcggagacggtgggtcagaaacaggatgaggagtagcatgtgaagattgatgaggtgatgatgaatgtacaataggaactaaagtttgaggaggcggaaatggttggggatgcaatgacgatggtggtggtggatcaaccaattcgagatcccttcgaggccaaaggatgacatttttgatggcttgtccaagtgtctcgatacctttgggcccagggatgtctagcatgtcgtcctcggatccttggacgaccgtcgtcacttctaccctacaataatcatctggaatgttgcttccatgaaacctgcctcctaggatcacaatgcctgtgcctactttcttcgtacgatgattgttaataccatatcttataactagtgtgcacaccataggacttgtgatgtcatcaactggataatggaccttatttcccgttgacgagacagagcttgggatggtcgtgcaattggtggaagacggcggttgagctgctagaattatttgcatatgtggagtggtcatctattgaacagacatcgcactcgccaactgctgcatcaattctggaggaggatttgatgatagtatttgagacatcaggtctttgaactctttcttggcttcctgcttaaaataatctgacatctcttctttgtatcgatcacgtttcttgtacaaaccttcccactatggtccgaatccttccttccattcttcctttgacgagattcctcatacacgaccaagatgctcagggttaacgagaccagccgttaggatgtctctctccctttatggcttaaatattccttggctctgtttagctgccatggcatatatgtttt

SEQ ID NO: 122971 - DNA, 535 bp, Zea Mays
ctgggactgatgctgtggtggacgctcagatgcagctactgcaacagatggctaatatgatggcggagatgcaagctcagatctgccaggaccaatagcagccaccacctccaccaccaccatcaccacctagggacaagcatcgagagtttatgagtcaaaagatgttcaccttctccatctctctagatccactgcaggcagatgattggttgaagacagtagagaaaatgcttaatatcgcttagtgcactgatagggagaaggtcccctatgcatcgggccgtttcactagccccgctgcagactagtgggactcatactatgctactcacgccgctgctgacaccaccacctgggcataatttgcagctaatttcagaaattaccatattcctgctgggctgatgaagatcaagaaggagttcatctccctcaagcagggaaatatgatagtgagtgaatacaaagataaattcattcagctgtcaaggtatgctctagaggaagttgttggtgatgagagcaaacaaga

SEQ ID NO: 122972 - DNA, 407 bp, Zea Mays
ggtgtttttgtgaatacccggggactaatttgtaatttctagaattctagggtaaagctgtgtacgtggccgaggacgacgagtttatacaaagaaaagatagcgtctcttatgcataatccctcggtgaagaggtaccttacaatctaagccacacgatcctaaacagtgctcagattttatacgcgaaggggtatgtctcattttaatcctggttgttcaaatccagattaacgtctagacctttatctcctacctcccgatgacgcccggcggcgacgcgccgtgcaccggcggtgatggcacaccagagacgcacgacccggcatctgtaccccaaatgattacccaagtggttcaacgcgtagtagggaacaaggcggatcaaaatagggagggcacactgt

SEQ ID NO: 122973 - DNA, 415 bp, Zea Mays
tttagatttaaccattgaacttcaaactatactttaggatggacaaaactatactttaggatggagtagcttttaaagaacacacaaatttttaataagataagcgattagagttttttttttgggagggggggacaactacgtcaaataaaaaatggagaaagtacaatcgaaggcttctcgatgaaccaagtatgtctaattttagtagttcgatacagaggtggtcccagaacaaaatacaaaatgagggcacacttccaaaaacaagtaccaaaatatcagagcaggagcatctaagttatgcttagcagggaccctcatggtgaaaatctaggttctactacttacaacaaagaaatgagtggggcctgatcccccactcatatacacgtaggtctgcccctggttcgat

SEQ ID NO: 122974 - DNA, 1004 bp, Zea Mays
ctgctctgttcgtctccgcgcactgggtgcattcgagccatgtcctcgtccggatctcgcccttacctgcctcgccggttcctgcgcccgtgctccattgccgacctccgacgctggtgagctttccttgttctgtaaccctagggtttgcagattagaaagccggcatggattctgccgccgagcattgtgcccagaagttgtccttggcggctgttgcagcccgtgacacactgaaagcttctgctgccgcgagtattgttgctggtgattattgcgccacattttcgttaggtaacgatgtggtttctactctggatgttcttgaatccgctgtagctgcggaaaatagtgctttgcgatcttacaaacaggcgactgcagccgtcgattgtgctaaggagacagtggccaaatattctgaggtttgtattcttaaacttatgccctgtgattgaaatgtgaagtgaggaaatgtgaagtgaggaaatgtgaagtgaggaaatttgaagtgaggaaatgcttagccctgtgatgaaatctttgaaaatagtcaactgaatactacacttgttgttttgatgcgatgaaatttgtgagggctatggctatttgagcctgtttgttgctgtttcattgaataatttgaccaggggcttgtgcgttgagattaacagtttgcttagccctgtgatgttttatttgaaaacagtgaactgtatactacacttgttctttttatgttaagaaaatactgagggctatggctgtttcagcctgtttcatgctgtttaattgaagaaatttacctgatgcttgtgttaatggaagatgatctacttgattagccctgtgaggttttctttgaaattagtaaactgtatactacacacttgttctttttattctaaaaaatgactgagggctatggctgtgccatgtttgcaaaattctccagttcagtattattgatatggctgttttcagcctgtttgctggtttcc

SEQ ID NO: 122975 - DNA, 369 bp, Zea Mays
gtttggggccaacttagtcatgactcatcttaggtagctgactcgatacctatattgtaaccaccaccattccttggaatataaaaggggggatggggagccttcgggctgatcgtatcatcatagaatacaacaccaacaacatacaggacgtaggaaattatctcacatcgagaactcgaacatgtataaatcttcatgtcttttgtgcatatacacaacctaccccatacattcactattgaaaaatcttagatagttggcacatctggtagggaaaatcacatagatcaatagaggattaatggcaaccatgggaataattcatctttagcaccctgagattcattgttgtttcgcttagaaatc

SEQ ID NO: 122976 - DNA, 431 bp, Zea Mays
aaacgagcaccgggggcactcggctaattgttctggacaggggcaggagtgggacgaatgaacacgagttgtttgaagggatatgtgggtggacgaggagaagaacgatttgaattgaaaggtcggttaccaaccttgtcctctttttaggtccttgagttgatctttcacccgcatatccttttgactttccttgtcccgcatttttggcttcaactaacagtgttgtgctgatagccctgctatatgtgaggtccagacacgtagccattttgcgttggagtatttcatttagtcccctcatgaagcaatttttctttttcaagtctgtgtccacttgatcgatggtgtattgggagaggtgattaaatttgttgagatactgcatcacagaatctcccgctgcttcagacgtatgaattctcctagct

SEQ ID NO: 122977 - DNA, 354 bp, Zea Mays
cggtgcattgacgcatcttattaagatgaatgaaaacaatttctttattttgaggaccttcggcagagaaggagacccccaaccccagcttcggctttgtaacccaatgctcctcatggttgcgggagatttttaactctgtcggagctgctttggaagaggctaagctctcgcctgacaacatccccaaggcgcttgaatgtattgaaaaggaagttgaggattttgacaaagttatggtgggacacggtgatttctgtgcactagtagctactcgagggactgctgctatcttcacaaaagttgggtgcaatcacttaaagaccgttaacaagcccaccttcagcatttctg

SEQ ID NO: 122978 - DNA, 420 bp, Zea Mays
gcaagataatggtggcagtcgtgacaagcatgaacaaataaaaaaggagttgaagaatttcctcgcagatacaagcatggtactggttttgcagccactggtcataaggcttcaataactggagtgcaatattatgctgatattggtgggtttggtgagatatctggatgtttgcagaaaatgaatagcgcacatcaactggtaattttgatggcaccctatttatacgttgcctaactctgaagtagccagtaatctctgtttaacttgatccattggggaagactggacaaggcatttcttcagctttaaacctcaagagattccatttaattttctatgcccactttttttcagattggaagacctactgaagaagacttaggaagttggggacatcactgtgacccatcaactgta

SEQ ID NO: 122979 - DNA, 531 bp, Zea Mays
tccaaggccaactagggcactttgtgataagcatgtggttcttaaggcggtaaggcgagataagacgctggaccaccgcctagacgcctaaggcgagcacgtggttttgtggcatttttcttgagtactaagaagcaatggatgcaccactgtgtgctgccattgtcatgtctcttggtagttggtgcatgcacgatcattattgcgatcaataatcatcctaagctctgtggttctcttggctttaaatctaacaggttgccttacaatctatatttgtttgtgcccctgctgtatatagttaggaaacatcctagttctatttcctagttgtcctttttgaaacgggttgaccgtcgtagtggttgaacaggctaactcttcaactagtgagatatgtttctgtaatgtgtatgacaggaccagttgaagcatctgttgcatgtatggttgctgcattgtattagtacttgatcagttaggagaagtgtctattcagtagatggtattggactgaattgctgtcactgt

SEQ ID NO: 122980 - DNA, 619 bp, Zea Mays
tgaactcggcagaaaccttcaccgaacggttccattccctggctacaaagggcccaaatgtaaacacttaatctaacaatagcattgggggtcagctgatgaaggtaaatcccaaacttcttcagtacaatagcaatcatcctgttcagggagaaccttagaccagctttaagagaacttttgaagactactacctcgtcctttcctagctttgggatagtttcctctccaccaaaacgaattaattccttcttggcctcactaaaataacccatcttcaccattttaggaagatcagcttcagaaatggtggactttccaaagtccaaatgactaggtttacttggcatcccgcagctgtactcatcttcggaaccagcttcttcaacatcaacttgtgttgcttcggcagcaggtgtgtcccctgatgaaaccagcccagaacgcctcattgcttcggaaatcggaacagtttcagcggctttggtctcatctccatcacgctcaaccctagcagtggagcgtactctggccatttgattttaaatttcttgaaaataccttggaaattagtaacctttcttctgaagctcttctcgtgacgaagcagaatccaaac

SEQ ID NO: 122981 - DNA, 327 bp, Zea Mays
gttcgtaactgaatctaccagtcgtggagatggttaccaagtctgctttagtttcctatacttctgagtatcgtaatccttagtctatacgccctatataatgacatgaaaacaaccaatctactacgagttcgattttaagacaggagagtccttcgtgttacgcgatctcgggctccatctctaacgccggcgtgatgacgacaatagcgacagtagtatctacaaaaccttgctccgttgaagaacatgcacgggttgagccaaattggggttttgaacagtgatcacatgactgcttgtcgagttgaggtgtactatgacatc

SEQ ID NO: 122982 - DNA, 313 bp, Zea Mays
gtcgacgacatggagtaggctacataaagttcttagtgggttacctcatcgtcaaggaatgctatatcaaacttccactgtaatgatctattagcctcccaagcatcgtcaaggaatgctataacctggcggagctcggactagctttgagttagtctctcatcaagatcggaataccgtctgtccatggctacaaggaatcacatacagtcagcaaaatgaataggcgacgaggccgagtgtacacaaatgactaccttaccagcattttgtgcatcctaggaagcctttagctcaacaagctatttccaaa

SEQ ID NO: 122983 - DNA, 445 bp, Zea Mays
agcagtaagtattgttgttcttgttcacttgtttgagtggttgtatgggtcagccctttatttgctgaatctgatgtcttgcaattgtgcatttttagatccatacaaaaaagaggaaccgactagaacaccagaggcttaataaattggtctatgtcagttacaacaggaagatggaaaataggtttcaaacactaagagagctaggatccaaaggaaaaagaagcaacccactggtgcttgaagagttcatgtgggaaaatgaagatgatggtgacaacaacatatggcatgatgtggatgaggcattaggagcaactcaggctcttcgaggcagaaacttgccaagaatagctgttgcaggtgctggttcgtcttctcagcctcaacaaacatatgttaggacaaggaagcgttcaagaaatacagcagctcaagatattgg

SEQ ID NO: 122984 - DNA, 784 bp, Zea Mays
tcaacttgcataggtgtggtttggtttccattattgttggtcttcgtcacaaaagaattattaatgtttctctgcttgttagcagcatggtcggtattttcctttcttcggtcagcatcctcatttcctccattgtctcgcccactatttggggtaggattaggggttatcgccggtataaaatcttgtgactccggtgtgaatgtaatatcatatccaacattgtgaaacacaacatctgttgttagtggtagttggcccttgtctatgacacccactaataaacggataacccccttccttctgtaggtcagcatatccacttccaaagttgttccaatcatggttccaattgcccaaaaccccagataatgtcgccaagcatggggaacatctgttacgtgtatccaaatttcatcgaggtgatatgcaggcttaacatctccatgcatctaccatttactgatagtgattgtaactccgctcttcaaattatatcctatatcggccatccgcagaagctcttcttcagatgggaaaactgctaggaaggaaccatctccctgaggaagagcctctcaattccagtccacccttgaaagttttgcaagttccgcttggactgccataccttcaagatcacctccatccactttgatcaaagttgttggggctggttctggtacttcaatcttgtaatcgaactcagggattctaaagaaacaaagttcattttttgcataccccatcatagctgtcgtcagttttggcatcttgaggattg

SEQ ID NO: 122985 - DNA, 477 bp, Zea Mays
atcttttctccgcgtccagcgctaacacacgacgaaatcctcttggggactcggtcttcactaccgcgaccgtcgttcttctgcccggaaaccgtgcgctgcaacgagtatatatcgagacccgttccctaggttccgagccgttttggctttgctccgagtctcaccagtgccgcaggggagagagagagaggaagcagcgccgccggatggtttcgtgtacaccgccgtcgcgtccatgatttcggccctgtgggtctctccgtgcgttggggattgaaccggggagttccctgttgtagattggcgtcggagcccttgaatttcgtcgccgtggtgcgaactccaccgcacgtccgccaaactcagtggggcggttcgtccaatgcctgaatcaaggtaagaaaccctcatctagttcgtcttgttggttacatcgtgtagctctgttcaatttgacagaggtcggggagttag

SEQ ID NO: 122986 - DNA, 358 bp, Zea Mays
cttcgactgagctaattgaaacgaaggttgacgaagataaggctgaaaggtaaaaaactgaagaagcaacaaagatgcccgagattctaagtccttcaacagaagcaatagtgttgaaggcagaaaaaagttctgccataacccctagaagaaaaaggatggtaaatgtattagatattttggaaacaacggattccaaatgccccgctcccacaaagaaggttgccaaagctgtcaaagcgcaaaccgaagctgatactaagcagatagaagttgaagctgcaatgattgatgctgaaatagatactgggccttcaaagcctgctgagaaagaatatgccaaaattgaagaagtggc

SEQ ID NO: 122987 - DNA, 460 bp, Zea Mays
tgcgaactggcgtgaaccgggcgtgtcagccacggtcgaacacgtggaactgttgcttgtgcccgagttctaacaccgattgggcacaaatcttcacgaatttgggcaagatcgctgtgaaggatttgttcccctgactgtgctttgtcgtttgtgtgtggatgttgtgcggttttaggctagggacagagagttgtagcgtcaccaaggtgccagtgtcagatggtcaggtcccaaggacaaacaatgccaaaatcgtgccaaatggtttttgtttgagttcaaatttttccagagcgtgttcaaggaaatttggcaccactttgatatttggactttttggtttcgagttttggaaaacggggaacacatttgatcttgaaaaagggttctgaaattcagaattctgaatttccccataggaccttggttcaagggctgatttggggattttggaaaa

SEQ ID NO: 122988 - DNA, 954 bp, Zea Mays
ttgttctgttttggggatgcccatgagcaggtagaggtgtacacggaactcttcgggtgcaaagctggcaactttccaatcaattaccttggcatcccaattcacttcaaaaaattaagaaatcgggattgggctagagttggagagcgctttgagaagagactcagtagctggaaagggaaacatctctccatcggaggccgtctgactttgattaattcagttcttagtagccttccgatgtatatgatgtctttcttctccatccccaaaggagttatcaagacattggattattttcgttcaagattcttttggcagggggatgaaaacaaaaaaatataggcttgctaaatggtctattctgtgccaaccaaaagaccagggaggaattgaaatcctagatttgaacactatgaaatcttagcaaatggttgtataaattgcttacctctgatggtatgtggcaacaattgctccgtaataaatacataggttcaaaatcactggctcaagtggaatggaaaattggtgactcccacttttggtcttgtctaatgaaggtaaaaccagactttctacgcttcggaacctttctggtcaatgacggatctcaagtaaggttctgggaggatagctgggtggacgggtccccgctgaaagatcaatatcactccctgtataacattacaagacccaaatcaataactatagcggaagctatgagctccttccctcctaacttttcctggcgacgacaactttatggatccaacttggtggattggattttcttgttgtcacgcatagagggtttggagttgtcccatgaccgtgatacattttattggaaccttaccccaaataggaagttctcggtaaaatcgttttacacagccttaaagtttagtactacccctaatgtaaacagagacatgtggaagatgaaggccc

SEQ ID NO: 122989 - DNA, 412 bp, Zea Mays
tttggctagaaaatttggaaaatcccagtaaaataactaatgagtattaatggctagaaatttgtaccaagtcatgttatagcatctaaatgccagcaaaaataagtcctagagaattacctactattgaatgatagttgtagttcaaatcaccccttctgccctaaaatttggcaattttgtccaaagaaaactattcacttctagaaccttaaatttcaagacagagaatcttacaccagtaataagccactgtaatttttacagaatttttgggaatttattaaggtaacttgtagttcaaacccaccctaaaaccctaaagaagatcaagggaaaaagaggaaagataaacctcactccaataagtccaacttgaattcttggcaattcttactaaagaccttaaaaa

SEQ ID NO: 122990 - DNA, 274 bp, Zea Mays
tgtgccatggattcatcgtcgtaccattccatatttgaacaggattatataccgacgatgaataaacgggtggaaagtaccctggtctcataggatgaacaggcgatgcttgttgtgtcgtctttcgggctgttttgttcagtcgtttcattttagcaggtcaccggggtttcttcgttgaccgatcacatggaacagtcttcttgctagcacttttggctagtaattgatcgaaagtagggccggcttttactagccgaccatgtgcgtcatg

SEQ ID NO: 122991 - DNA, 513 bp, Zea Mays
cactggtctctgtctcaggcgatttccaccctcgccggcgatctcccctccccggcggcgatcctccggcgaccctgtacctgccctgcccttctctcggtgagcagtcccatttccccttcagctttcctccctctctgttctgttgagcagaggctcttcttcccaccttttgcgcaaatttcaaatctctatgaattccagtgaaatcatgtggtgaaatgtgttcctctgtgtgccttgaacatccctgcaggttcctagctccttcgggagggttttcccacctcaaatagccatttccctaaaaccctaaatcctcgcacaccacgtgttcggtgaaatgcccaaacccgccaaaaatgttccaattgaacccaaatttttcaggcactttcaccacacctccagtaacatattcgccaaatttcacgctcatccgatattccaggctttaatttcaccaaattccccgtttcgagcgatcgtttccgagccgagtgcccaaatctc

SEQ ID NO: 122992 - DNA, 295 bp, Zea Mays
catactacatttttgaaggtagatatacattgttgtctcactatttcaccgattattaagttatatacaatacaatcattgatatgtaggatactcatatgaggagctgtctgaagtatctccagatcacaggttcattgcatacacaatgtatgacaaagataaggactccttcactttaatggttagggacctagtaacaggcacacttcatgataaaccctgtgctgaccgggtgtcaaatatttcatgggctatggatgggaaagcattggtttatattgttacaaatgag

SEQ ID NO: 122993 - DNA, 825 bp, Zea Mays
actagggatctagtgcaggaatatttggcgaataggatgtttccaacctctagcggctgggggatgccaaagaaaaaggaagaggggaaaaagtatgaacttgttcggctcccctatcagttcaaatttgagaagcaattcaagaagccatgcaacgagtggttagaaatgatcaaaaccatgtgtaatgagattcttggcaattgtacgaagaaagaagaccatataatgattgttgctttgatacccggccaaaacgaaggctgaaccgggtaatggatgcattgaacttcgaatacatacattatgagaagcttgacgaaggggccgggggggtgaaagaaaacgagttgtcagtatcttaagtaggcaagatgtccggtccataaaagaagatgaaaaggccctgaagaaagtaaaaacagcgccatagccgaaggcaacagtttctaagaagcaaaagcttgatcaggtaccctctactgaaccgaaggttgatgaagcaacagagaaaacccctccgtcaacgtctgctgccgacgtagtcaaaattttgaaggtaatgactgaatctccgccattcatgctactaagtccttgggattggaactgacgaaacttttacagaggaaggaaacgccttcgggtacagaagagaagattgaagggcaaaagaaacggtgaattgtgaatgtaatgcaagcaattgagcaaatgccgccttcagcttcggtgacgaaagcagcaattcttgcggatgccgaagatgctgagaaagccgaagctggagaacttgaagccacaatgtcagaaattgacaggctt

SEQ ID NO: 122994 - DNA, 327 bp, Zea Mays
ggggaacaaagcgagctcgcatctcctcttttaacgcattccatgtttgtggtgcagcacgtgtgttaactagttcattccaccaaatgatagcaaaatctctaaattcactagtggcttgtctaaccctatgctgctcaggaacaagatgggaattaaatttttgttctatcgtcatctcccagtctaagtaagcttcagcatcataagaacccatgaacggtggaatagagaacttaatcttagcaaatggatcatggtttggttgaggattatgatgacgacgtctaccattacctcacataccttgtcgattacgtgcgaagc

SEQ ID NO: 122995 - DNA, 621 bp, Zea Mays
agcactctcgtaagggctactttattttaggtgggattaaacaaacgaggcgtaaggtaagtgtgtgacccctctccacacatttcaatgacatcactaccaataatgtcacggttacgaaatgattgttaatcaggtacacttctcagtattgataaaaaactgactcctttgcagaatggagtgggcacttggatgttggtctgacgacgactttacttgaaacaaatactttcgttccatgaccaatcgttctggcctgtcgtggttatatataattgagtttgccggtgtacctaccaaatccattgtttactactcggcaacgagtaccttatggcaagataagcatcagtacgtatattatggttgagttgtacctaatttgcattcctcattaacaagtcaaaaactgttgaggttgactttgtactggtgaacaaacaagggtgagtcagacgcaacaacatatggcccggacaaaaccacctctatatgagtggtagcaggataaatttttgctcacgaagatcacacttctttgtctccgatcctgttgacgattattccctacttgaaggatgcctagcttgcactcactctcgcgtacctggagaggtt

SEQ ID NO: 122996 - DNA, 804 bp, Zea Mays
gtgtgtaacagaaacaatcaaatatctcgccgactaataatatatgaagtggtttaggatttgatggagttgttttctatcaaagagccttgttcgattataatgacaacgatatgtcgtaaccctatgcacagtatcacatattatactcacccactgacacttgtctcgtccacagcaaaagttttcattgctccttgcatcctatcaaaactggtactcttccaaacgaaatcaacactgaatccaacgtttagctcagtaggcaccccctgaaattcaaggaaattgttaaaataggctgagtggatgctaaaaaggaacatgagaaaaatcatactgccttatacggttatacctgacttgcacgaagctcaagtgccacctcctcttgtgcagtgagcttaatctgaaagaacaaatgtccttagcatagccacaaagataaaactggcccaattaagattatcagcaggtttctaattaccacatgtcccacagattgccatgtgggatgtgagctatcaccaggatatctcaagcgtagctcatctccaggcacaagcctcaactcattgtcttcctaaaatacataattgtttcccgtgttagacaatagagtatcacgaagcaataccgaacatcatcaacaacagataactatacaattatggtattaattcactaatcccatatatttcacttcttgaacagacctttggaaagacaaagtaagctacacgcttcttgttcaacccaatatcccaccggacagttacattatccttgctctgtgactctttc

SEQ ID NO: 122997 - DNA, 513 bp, Zea Mays
aagtcatcaaggaaatgatcaaacaaaaggtgggaaaatagaaatgattctgtcagaacagcaaaggaatcctatggtttggagaccgattggttgttcccaagaaccctgagctcagaaagaagatactggatgaagctcacctttccaaattctccatgcaccccggcagtaacaagatgtaccacgatctcaagtccttgtattggtggaccagaatgaagagggaaattgctaagtatatatctgaatgtgacacctgccagagagtcaaggccagtcatttgaaggtggcaggcactttacagccccttcccataccatcttggaaatgggaggatatctgcatggattttatcgtgggattgcccaatacctcccgacatcatgattccatttgggttattgtggacagattgactaagacagctcatttcttgccggtacacaccacccacaggacggaaaagtatgctgaaatttacattgaccagataattcgcttgcatggaa

SEQ ID NO: 122998 - DNA, 496 bp, Zea Mays
gcttatctatggactaacaattagttcacaaatctgtgctaaagtgggctaatttttcatggaccccatggaaagaaatctgtgctaaagtgggctaattagttctatgcaaaagatgacactggttgttggttctaaccatttgaccagctatgtctaactaacacattctattttcatttctctaaatgttggcagctgctctccaatacgcattacatggttgcctcatggtctatgtaaggaaaacttgaacctgaatgcgcacaactttaattgctctacctgtttttagaggaatcatatttagatgggttgaatattgtcataatatatgtccatatgtaagtaatgtagaaatcatgccacaacatattccccataacatataagataagagggccatgtttgtgagctaaaataattttgatagataagagggtcatatttgtgagctaaaataattttgatagccacaactcgccatctccttttt

SEQ ID NO: 122999 - DNA, 293 bp, Zea Mays
gaccactataccttactaacgggacaatcgactcaagtcagcgatggcttaagtcagcatgatacgatcacatctacttatcttagggcgaccactatgccttgccagccaggcgatcggcttaagttagcaaaaatatcaaaaccaacacgccacatttactttcacaattgttcagggtgactgttataccctaacagcaaaacaattagtactccaggaaaaaagaacgttgtacttgtcggcaccaaggacacgttttggtgccctgtccacaaaatatttgaacacaa

SEQ ID NO: 123000 - DNA, 378 bp, Zea Mays
tagaaaacttactacataacatttataatcaccaagaagtgattatatatttaactaaatcaaacaatacagttttctaaatctgttctgacagtggacagaatatagcaatcctcttataaaattcataactctcaaactatcaggtttattgtcatgaaaatttaacacaagtaagataagaacattatctacaactttcttataattgacaaggactgattctaaactgaacttaagcaaacaatgcgacctctgaaatctgtacaggaattggacagattcagttactaaacttgcgaaaagcataacttctaaaagatcacacttatgactgtcaatttttaacacaagtaagataataatgttatctacaac

SEQ ID NO: 123001 - DNA, 327 bp, Zea Mays
ctggaggtgttgggcagtcccacgataaagtccatgcaaatgtcctcccatttccaagacggtatgggaaggggttgcaaagggcctgctgccttcaaatgactggctttaatcctttggtaggtgtcacactcagatatgtacttggcaatttccctcttcattctggtccaccagtataagggtctgagatcatggtacatcttgttgctgcccgggtgcatggagaattttgaaaggtgagcttcatccaatatctttttttctgagcttagggtccttgggaacaactaatcgatctccaaaccatagaattcccttgctgtc

SEQ ID NO: 123002 - DNA, 437 bp, Zea Mays
ccgtcgtccgtgggttttctctccgcaaggagtttccaacgtaaatccatgtgtcttcacttggtgtggtattttacttgtcgtatttgttgtttgttcatcatattgcttgctattggagccatatgcccatatctcaagtttatgttatatggtcatgttgacatgaggggcatatatgtgttctttgatatattagtgatcagttgatggggttgatgttgtagtgagctgattgttgtgcatatagtgttgttgtactgttggacagtttgtggttgcttaatttgaagcttcggtgcttctattcggttcacacacaaggtgctcgatgaattgctattgacaacttagcttgctggtttctggcccgcttccgctacgtccggccctcagatgtaaaaatcatatgagatagttctttttagataaaaaat

SEQ ID NO: 123003 - DNA, 811 bp, Zea Mays
actagtggcttgtctaaccctatgctgctcaaaaacaagatgggaattaaatttttgttctaccgtcatctcccagtctaagtaagcttcagcatcataagaatccatgaacggtggaatagagaacttaatcttagcaaatggatcatggtctggttcaggattatgatgacgatgtctaccattacctcccataccttgtcgattacgtgcgtgacattgtcgcagtggtgcataaacatcatcgtcatcgtcgtcgtccacaggagagtgagctggggctgaagttggtggtgggggacgagcctccagtacgtccatgcatgtaacaagttcagcaactcgtcgatcaagctgctcataggatgtcgccgtagagtcctggtattttttaaaagcttcagtcatcgcgcgcatcatctccttcaattctagctgagagacacactcatcgtcgttaagcttaggccccttgtccttgtccatttgattctttggtcatgtcattgttagcacaaaacagagacaaaaaggcaacaaacaatgtgaacactacatctatctctcagggtggttttggtggtggaatacaaattataaagcgtattaccccgctcttacaacgttcttaccagcactgcaggtggcaaacggtgactggtgtgaccgtccaacgagcgtgggtgtgattgcaaaggagtacctattttgctcgagagaaagctggagttctgggaaggctgactaaatatatatatatatatgtggcacacaagtcagtaacatatagcaatgttgaataagtgttcca

SEQ ID NO: 123004 - DNA, 563 bp, Zea Mays
ttcctagccttatatacacaaccaatgggagctatccccgcacaagtgataaacataatccattcgcctatctccctgtttgtagcagaccgtctccctacatatctagaatcttcctcaatcgtccgttcgagttaccactgggagtttagcctatcaggtgatcgcaaccgctctgcccgatatgctcgtgctcccgtagcgcttaactcgggtgttggtcttcgccggcttagattgggcttgcttggcctagttgcactcggctgacccatccgtaggatgacctaggaggagacctgctagggcctagggcgcgttttagtgtgcgtgaggacccgggggatatccattccccacaggtcataattgcatgcgtcctcgagaagtgatcaaatgtcaataagtcaaatgtgtatatgatattaattctgggtatatccacatttacatcaggtataagcattcaaaccaatatggttactcctcaatgatttctggcaaactccatacacacaggagtacacacttattgttattattaccaaatacacagttgtgtt

SEQ ID NO: 123005 - DNA, 909 bp, Zea Mays
atcataacaacttcggatattatagttttctgtatcggtctgatgtgaggtgttgtgccgacgtttcggaaaaaatggtcgggctcatggatgaagcaatggttttatgttaagaatgatctgagtgagagggaggatgtgaagggtgtaatccagcgccccattcgttcacgcttcggcatcaggagacgttcaattgcgggtgggtacgaagcacgagcatgtttgatggccttcaacaaagtgtgcacctacattggcactagagatttggttcaggagcacattgcttataaggtatggcctcttgttaatgattaggtgatgtcgaaggagaccgctgctggttccagtgaaggtggcctggtttacctgaactatagctatttctacaaaagtaagtttggcgagcaaaatgatgaatggcttgaagtcgttgaggcgaccagtgatgagctgctgggagattatacgaaggcagaggacgaagccatgaacactgccttcggcgctcgaggcaaaaggagactgaatagagttttgatgtgactagatttatttatcctgattactgctttcccgctcggaaataaggagcaaagagggaaattgcaactacgacctcttccgccgcgtcgaagccaaaaagagctaaagttttgactcgtaggccgaagctgcactctttagagaagactgctgcagtgcctgctatagagaagatggaaattgtcgaatatgccaaagctacccccttggcttcagagataatacatgttgtgactgcaaaagctattgtcgctctggtagaagaaatagaagcaaagagctcaaaggcagagaagcatctgaagttgcagagtcccccaaccatgacagagttgtcaaagttagcatctgctccagcag

SEQ ID NO: 123006 - DNA, 419 bp, Zea Mays
gctgtgcattcagttttgcccccagatccgggtgtgacagaagtggtatcaaagctatgctgactctaggtcgttagactagttagaaatggaaagcctagtctgttcaaaacatgctaattttgttcttacaaaattattttattaaccttacctctttaaaattgaactaagttgacattttctcttgtagatggttcgtacaatccaaaccacccggaccaacaccaactacatccctccgccacggcaagttcccatctacctagtggtagtcgaggaaatccctgtggatctcccttgcattcgtgtggagaacggagtcattctggaagatagctcggaggagtccctgcctacgcccaccccgttggcagaatcactagccttcgcagttggatcgtcatcttcgacaccgc

SEQ ID NO: 123007 - DNA, 572 bp, Zea Mays
ctatataatttagagttcctcaggtaggtagtgaaatacgcaaaaaagtaaaagagcaaagaatgtacttgaaaagaagacaagaaagaaaaagaaaaattctcgagaaaaaggtacttattaccgcatgaactgtatttttttaccatctcatgttttattattttttgcatatataattcagatttaaatgatgtgctttgtatttgtgaattttaggagaagaaccaagtaacaaaggagagaatagtagcgctaatatgtgggtcaacttgacggccaatgtgcctaattgcacgtaaggtgaggtggatatacaagtcttttgcttggtcttgatcaagacatctcagctgcacggaaattatattttgatgaaaaaacagataatgcaacatatgagaaatagagaagtttagttatcattatagtccatcctagaatttttcttatgtttgcacatgtcgacgagagcatgagctacgggaatagtagagaagtttagttatcattatagtccatcctagaagtttagttatcattatacaagtcgacgagagcatgagctacgg

SEQ ID NO: 123008 - DNA, 452 bp, Zea Mays
atttccccgagcgaggcaaccaaggcgttaacttcttcagcagagggtcgcactctaaggcccaaactgccatcagcaacaggcggatttgaaacaaaatgagtgaaggctttggaaggaggcaagttccaggctgagtatgccattggggcaccaacgtttgataccttgcctctaagaatcatctcaagtcggttcaccaagtctacggaaggaattcttctgttggtaacccgagttgagtcagctaggcctcggtacaaataagtcgggtgagccttgtccttcaacggcttaatgttcttaaaaaaaaaatcagcaaccacagcctctgcagtcagacccctctccttcagcagtccaacttcagctagcagagcccctgcctcagtcacctcctgatcagtgggggattcggtccaacttggagtgcgaacatccggctgtcttcc

SEQ ID NO: 123009 - DNA, 482 bp, Zea Mays
ctcatactccataccaaaaccttcaagcaatttcttggactggtacatgtctttgggcatcttgtgacctgtacgaagagcctcgctaatcaaatccacaagctccttgtaacaattaattgagaatgcaaacttggacttgattgacatcagccgggtcacgaattcaaggacggtcacgttagtgtgcccatgaagaggctcttctaacgctctgagtaggtcgaagaacttctgaacctccggtgtaggttaatcatgatgatctggtgccagtttaggctgcaaatcctcaagcatctagtccatcctatcaacatcatcttcaccgtcatcaacttctacttctgctgctcgttcaaggcgtgactcctgtggagatactagaccttatagcctggcacaaaaccatgcgagcgcaggtgtagtgtgacctgcctcttggtgtggctcgtcatatttctacatttattgcatggaca

SEQ ID NO: 123010 - DNA, 589 bp, Zea Mays
catggtaagaagaatcctaataacatgccacaaacttgggatgcattgaaatgggtcatgcgggctagatttgttgcttcttattatgcacgcgatatgttaaacaagttgcaacaattgaaacagggtactaaaagtgtagaagaatattatcaggaattacaaatgggtatgttgcgttgtaacatagaggagggtgaggaatctgctatggctagatttttgggcgggttaaatagggaaattaggacatccttgcttataaagattatgctaacgtaacccgattgtttcatattgcttgcaaagctgaaagggaagtgcagggacgacatgctagtgcaaggtctaatgtttctgcaggaaaatctacaccatggcagcagcgcacgactacgtccatgaccggccgtacaccagcaccaactcccttgcagagtcgaccagcaccaccaccttcctccggtgacaaaccacgtgcatcttccacaaattcagcaaccaaatctgccaagaaaccagcaggtagtgcctcttcagtagcctccacgggtagaacaagagatgttctatgttatcgatgcaaggg

SEQ ID NO: 123011 - DNA, 544 bp, Zea Mays
gaaattcagacttacagtgtaataaagccatctttggggttgaattcaaccatgatctagttatcaaatgagctcagtcactatagtcgatttgtagctggtatgtagcccctataactttggtgctgaaagcttgctcggttactacacaaaattgggagtaaataaccctgcaaatcacgctgtcaggtcggctgatgatctttgccatggtacagtgacaaaagatctgcggtgccgtgtattcaccgtcggtgactcgccgccgcgattcgtgtcgccgccggtggtcgatctcgtgctacgattcgtgcatcgggtacaacggataaacttgaccgggtaaaaatccgaggcaggattgagctacggctaagaccgccgcacttcaccgccccagctcaccatcggttgaatgacctcgtcaccgataagctaccgccgtcgcgcaccacgtgtctcagcgcggaacctcctcgcggtgactcaccgattgcatgcccggcgatcaccggagtcactgccacggtgaaagccacttttc

SEQ ID NO: 123012 - DNA, 500 bp, Zea Mays
ggggtggcaggggcctcaatcagccggtctccttgccatcagtttcggatgcgcagaatttggctggggtagctgctccctccactgaccttttggctcaagcagtggcgctgttgagccaggctattaacccaccgacgcctcagagttcctcggctgctgcttccgtggtgcctggtcagtcacatttttcttgggaagataaaggaaaaggagtgtcggatgagcatcttgtagccaagcctcctgggacagtgaaaccagcagcgaaggagggcaaggcaccatactgctacaggtgccttactaaggggcatgtcatgaaggtttgcacagccaaactctattgtgacatatgtcgatctgaagcacataatactgagagatgtccgcagtttcggggagataaaccatctgcattaacgtgtggttacgctgtggatggtttgggttttttctacatcccttttgttcatcagcagattcagaaggtcgaagct

SEQ ID NO: 123013 - DNA, 392 bp, Zea Mays
gacttcgaaagttttggattacctttccttaatatttgtgttatatgtattttttatcatctttagttttgttgattttttttcattttgcactcactagccatttattaagttggtatttgctctcatatctgctacttatttaacactgtgaagacagaagtagcatggtcaactaaaaaactaaggtaaagctatcttccatgaatcagtcaaataaagactttattccaactatgcagttcctcatgcacttgatgctttgctcctggaaaatttgcaagtttgtcttgtgattttctcattttattgatcatttatatttcctagtttgtcaaattcagattaaagtgttgggatacgaactgcctttcaatgtcacaatgaaaaaa

SEQ ID NO: 123014 - DNA, 595 bp, Zea Mays
gcgacctcagctgagcagacattccgtcaaccaaagcctgtggtcgaagacaaatgagtatgggaaagataatttaccaagaagaacgataaaaggcaagtagctgactcacctgaagattggagaggaatgatggtaaacccaagtcagggggagctatatcatggcttgacggaggaagattaatcagaacaatttgaagaacgttgtcaggggtgagctcagccccactagcggataccagacttctcgcaactagctcaccgacatccaaggcgacttgcttgtttgaagccgtagaagcatgcatcatcgtcgcctcatcgaatcgaggtggagatgacccaacatggacatccatgtaggtgtgggaaggagagctcacctggacaccctcgggggctaggttgcagcttgcgctacccaccagagctgaatcactaccggcgacaccctcgggggctgggttgcagcttgcgctacctaccagagccggatcactactggtgacatcctcgggggctgggtaactggcaacaccaccctggggggctgggttttctacagcagccacctctaaggctgaaggctcccc

SEQ ID NO: 123015 - DNA, 473 bp, Zea Mays
gaaagggccacataatcagcatgacatgaggggaataaggcatccaatgggcccgaccaaaaaagtgcaaagagagcccacataacaaataatcgaacctctagccatcaaaattaaccatttcatgtagcaaagagtcgttgactccaacagagttaattgtatcaaacaggaaataaaccacgattccatcagagtacgtttcagaaaaagcaaaaagcgccacatgcgcgccagctccaaccgttaaccaacaaaatagttgccaaccagtgtacagaaaataccaaacgacccaaaagggggaggccaaagccttacaacctcgccgaggtattgtcttcatcatcattgtcatcattgaagtgagggtcccccacctgttcatcagacaagtcggattcctcatccttgctgtcgatggaagcagccggcccctgaatggcagtaccagtggccttggatctgttcaa

SEQ ID NO: 123016 - DNA, 413 bp, Zea Mays
ctaaggaacaataaagtattatatgttgacaggtttcctgctgcaatagctgcctaatttgaatagatcattcaagtactattttgtttggcataattctatgctgttagaaaggacagtggattgcatatactgaatacacttagcaaatcatgaatacttgtgcataaaatgcattttgatcaattacatgatacagatcgcatgctaatcatagtgcatgagaaggtggaagaggtgacaagtcacagaacccacaacaacaattgtagtatttaacacaaatctacgctggactggtaggaatattttttagttttcatggacagtccagagaaagtaatgtgttaaaaaaggtgaagatggtaacggagggttaatcatcataataccatagctagacaacacaagca

SEQ ID NO: 123017 - DNA, 372 bp, Zea Mays
caaataaagaaaatggttgtcgactacagtgcaagctagtttacctttcctctctcttcccatcctttttgcttacctcatttggttgtcctattggaaagagttttgtgctgctatagtagctcgtgggtagctattttagctttgcctggccatttggctgctctgttggagtcagtcttagaactcaacgactctcaggacattcatgcggtggaacttttgcgcatgcaggatgggtgtaatgtatctatggagaatcctaggaaatcttgctttaggtgcttctccccataccatttggccagagaatgccatgttgagatcagatgctggtattgctttttcccaagtcatattgaaatcaaatgt

SEQ ID NO: 123018 - DNA, 342 bp, Zea Mays
gggaagagattggtatggatttcattactggattgcctcgcacccagaaaggatatgattatatgggtgattgtagagagattgactaaagtttgtttcattccggtcaagactacttataaggatctcaattggtagagttatatatggctcggattgtgtctctacacggtgtaccgaagaagattatttcggatagaggatcacaatttaccttcaaattttgaaaaagttttcgtgagaatatggatacgaagttggattttagttcggcctaccaacctcagactgatggacaaactgaaaggactaatcaagaattggaagacatgttgagagctt

SEQ ID NO: 123019 - DNA, 641 bp, Zea Mays
gcagcgtgagtttgtgatgaaagacttaggccatctacaccactttctcagggtcatcatggagcactgctcctagggcctctttcgtcactagcactagtacaccattgatgttctagagtggtctgccatgtccaactataagcctttatccatgcttgttgacactcaggcaaaggtctccgacgatgacggtgccccactaggcgatgtgatggcccatagaagcctagatgaggttctacaatacctcaccttcacctagtcagacattgcctatgcgatccaacaggtgtgcttcacatgcacaccccgcaggagccccacctcactgctgtcaagtgaatttttatctacctccatggcaccattgactatggcctacttctttggccctctccaacttctgagctgatcgtttacacctacactgattgaaccagctggccccaacatgcactgatccacctctagctacattgtgttcctaggtgctaacttatcttctaatcctagaagcagttgcatgtcctacctatatcagctacttcaagagcttcatagccccctcatgcgtgtcaccctcgtctactatcccatgcagcactggctcacaaagcacaaggagatcgagctccact

SEQ ID NO: 123020 - DNA, 389 bp, Zea Mays
ttttcgagcttcgtcttaaagacgagtttgttccgtgttcgaagagatgtctgaggagaagaagatatccgaggaggagaagatgtatgaggagaagaaggttgaagattcttttattgctgggttttacgaatccatggcaaaaacaaatacggagaaaatcacaaaggagataatggcagatttatctgaagattctgatgatagtgatgaatttgctatggagagtggagatgaagattctgaggaccggccctggcgaccaagagataccatcttcggaaatttgacaattaagcaaagtcatgttgacactatgaggggaagatactttcgtgacatgtctattatgagagttggaggagacagcactgcccccgctcctaaag

SEQ ID NO: 123021 - DNA, 317 bp, Zea Mays
ttttggtcgatttggctttgccgtaatgatgtggtgtttaatcataaacctataccgtcaattatacagactatcttcaagggcacacactggttcagattttggagactattgcagaaggaagaaacgcaacaacaaatcctcgtcatgtaccagtctttggaggtggtggccatggagttcttcacgagtcacgggtggcggttccattcaagaattgaagcagcttagtgcacgtgttttattttcctccatatcatgatttagttgaagttcatttgaactacaaattgctgcaggatgatgtaataattgag

SEQ ID NO: 123022 - DNA, 589 bp, Zea Mays
gttcattgcatgtgctccatcttccacttctctcatcccagatgtggaattagtatatatcttgctaccccattggccataggcctttgctctgcctaccttctactacgtacatcgccaactccaactaccaccacaaacctactagtattactcttttcatcgaaaatacaaaataattaccacagttcctaaccatgcatggcatcttcgtcggtccatcccagctgcattagctagcagccaaaaacgacccatgtgtttcggaggccacaggccaagggactaagggagacccccagaagagagcaactctggttggccttggaggccaatgattgaggccatcagagttattagccaaagcatccatccacaccataccatacggtacagactacagtgcagggacaagagaccccatgtggggctgcggcctgcggaccttgcaagatgggagcgagagaggagaggagaggagagttcggtaggaaagggcgaactagcatccgagacccgaaccaccgcatggttgtcaccgtcacatggagatgggggaccccaacgcaacgatggcgcccacccgaac

SEQ ID NO: 123023 - DNA, 831 bp, Zea Mays
tgcctgatgaggataagcatattcatatcttgatatgatggcctgccagtgactctgagattgaggccactctcagcatgctggccggggagtcttctgagtcgacgtgacttgtgtcggggtgtggagcccccaagcagttgagtgctagcgggaggagggaagataacctcatgaatctgtggcatgagcggtcctgtcagccagatgccctagctaaggccctagaggttaataagaaaagaaaacttcgacattcatcgaacatgcagccagtgattgcctaggctgagtcgagcgacgatgatgatgtggtggatgctggtttagtggatgatgtggaaggtggaggcgtggtgaagacagccaggtatgttgtggaggcaatggaggaggaggagaaggtgctccccttggtctagcgcgagcaacattctaaggctcagagtgatacttcatgtcttgttgcctcaacgaggatggtggacatctaaggtttgtctatgtcgactattgactgtatactagaggaggccattctggaggtgtttcaacatgagttacgtgaaatgaatgttatcgatgttcacatagttcactcggatgaagcatcctctgctggtttgttggttgggccagaggtaagcattctagtcccccggggagctcctgcattagtcggtcatgtcgccgtccaacagaaccttcttgacctggctttcttggatcacaagatcgacatgtagagggtacttgctgggatgatcaaagttaagccattgattggctcgactgaatgtgatggagtgctccaaccactgatatggcgtt

SEQ ID NO: 123024 - DNA, 421 bp, Zea Mays
agagggttctctcggcgtagccttgcacctagcttggcttgctctcgttctcggtcctgagcttgtcggcgatcgcggtggtgagagtttcgcctgtctcggtgtactcgctcatcaagagtttctcccacttctaaagcttcatcacgagatacgggctgcaccagatcctattcaccagcttcatgatgtcgccgtatgtttaggcgtctgttcctccgtcgccgtgcctcacactagggaggttcctccccttgcatagtaggctcatcattgaagatgagtgctgactcaaatctccctcgatgaagaggatgtaggggtagaaaggagctggtgcaatggcgctcttctttccgtcctcctttgagggtgaaggtgtcggaaagatggctcggcgtgttatcgtcccctgactcga

SEQ ID NO: 123025 - DNA, 272 bp, Zea Mays
cttgagatgaatctattcagcgatgcaagcctgcctaccaacctttgggcaccttttctggactttggcggttccatccgaagtattgtttctattttgcttgagttagccttaattcccttggttgaaactagacagccaaagaatttccccttctttacctcgaaaatgcattttttcgggtttaacttatgactcgcctttctgatgtttgcaaaggtctcttgtaaatccaaaatatggtcttcttgcttcgtacttctaactataat

SEQ ID NO: 123026 - DNA, 384 bp, Zea Mays
acgggacagccgacaggcgacacatatcaagcgctaaactgcactatttttctctgtgctctattttaatttaccccttgtaaatgttttgcgcgttttatttgatttaccactgcgccagtaactttgtgcacgtttgacttactatccttgttcaggcacgtgctgcatcaacagcaaggctctgaacatgcagatgcaaaacgagctcattttagacacacagtaaacttagacttgccacggttactagatggccctataaaatcttcgttccccaccatagcagtcttcagatcaatcaactagcaagtcgccttcttcccattcctctcctccccatcaagcaaaagacactgtgaaccgaaaggcagcaacgaccgg

SEQ ID NO: 123027 - DNA, 367 bp, Zea Mays
cctaaaaacttaccagccgacactccaaaagcacatttacgtgggttcattttcaaaccataccgacgcatcttatcaaaggctttgcgcaaatcagctaaatgagaactaaactcagtcgattttactacaatatcatcaatgtagacttccacaatgtttcccaacagctcatgaaagatcaaattcatagccctctgataagtagtaccggcatttttcaaaccaaatgtcatgacaacccactcaaataaaaccaatgaagcctggacatataaaggtcgttttagacgcatcttcttcggtcatgaaaatctgatgatatccggcattaccatcaagaaagctaataattctatttcctgat

SEQ ID NO: 123028 - DNA, 607 bp, Zea Mays
aggtttatttgcgcgtggaaagtaataatgtgtttaatacttagaacttttagtcgatagtagaaattgttttgacttatatagagaggtggtgacatgccaaagtagtcgtcgccttctctatattcataagtcgagtcgtgatgatgcgtgttatgcgttcgttaaattatgcttcgcatatagtgtatgattgtgctcacggtttcgagtagacacttcaaataagtcaagtaggtttgtaatgaaagatgtgtgatgaagttagtttgttttaggatatttattgaaatgctccattcatgtgatagacatgtgtggttaattcaattcgagtcggtgtgtgtgacgatgatattcatgaattgaatagatgtcctaaaattgtgtagtgaagcttaggttgagtttcaaacaaggtgggaatgttttggtaaagatgtaggtgaattgtgaacgagtcatttaacgtattagacatgtcgtgtagtggtagtttgaaaaatgggttaggaatcgatcggctaaatgccaagttcggttagagttattttgttacttgggattgtggggtgaagtgatggcatgactacgtagccgtcacgtc

SEQ ID NO: 123029 - DNA, 452 bp, Zea Mays
tgttctcttgtctttgcactaactatggcaggaccctcggggttaaagaggatgagaacaccatgccacaatcccctcgtaacaagggcatcatacaacattttgagcgacaaatgcgcctgtaacttgatggcctcgctgaagacattcacatcactaacgagcgccttggcccgcttgaaacgacacaattcgaagctggtacggtgctccaggaattacgaacagcccaagccaccaccaacaccaccctcgataccatcatgacacggctggagtagttttcccagcagcttggtgagctacagggtgacactgattatggtggcgacatcgagtacgacgatcagccccgtcgtcgctagcacagacctcgtcgtgttgtacgtaaccagaatgatttttcctctaagcttaaactcactatgcctaaattcaatggaacatataat

SEQ ID NO: 123030 - DNA, 288 bp, Zea Mays
cgacgctgtcagagacgctgcggttcacgtattcagagacccttgggaagtggccgatcggcgaccttgccttcgggatcagtttcctcctcaagagacaggttggtggctcacactttgttggtaatcttgtcccgtttgaactagttctgattcttggaggttgaaagccaatgtggagtgctgtacatttaagctaggcagtggatatagtttggtccttcacatttcgctcataccgtgctcatgtcatcctttaaagccttcctctgtaaaaatacataacca

SEQ ID NO: 123031 - DNA, 2732 bp, Zea Mays
gaacaggaagtgatcctctgaaaggtttgagtagtcctacgtggaaaacatcatggatgcgggctcctttaggcaattccagacagtatgccactgagccgatgcgttccagaacttggaagggccctgcataccttggtttcagtttcccttttggtcggctgaccagtgactatgcctgtcagtgtaacaggcgcccaccttaaactccagatcttggtgatggccatcataaaaccgcctagcatgttcctggccctgtaggagtctgtctccgacctccgcgagaaagcagtcccgttcgtgaaacatttcttctatagttggtgtagctgctgctccttgctggtatgggatgagtggaggggggtctctgtcatagaccactttaaacggggttgtcttcagggctaagtgataagaggtattgtagcaatattcagcccaagcaatccagtcaacccaggccctcggacgatcccctgtgatgcagcgcagatacatggcgatagttttattgaccacttcggattgcccatcagtctgtggatgaaaggctgtgctcatccttagtttgacgccggctagcttgaaaaggtccctccaaatgtgtcccgtgaacactgggtctcagtcactgactatagagcttgggaacccatgcagtcggacaatctcatcaaagaatgcccttgctactgtggctgctgtatatggatgactcaatggaatgaagtgggcatatttggagaatgatcgacgactgtaagaatgactgatttgccatatacctttggtagggcttcgatgaaatccattgagatgtctgaccaaatctgagctggtacctccaagggttgcaatagtcttgctggatggagtgtttctgttttgttttgctgcaaactgcacaagaacgaacccaatctctaactagtgccctgtccccgtgaacaaagaaatatgtcctcaacttttgcagggttttctggatgctgccgtggcctgcggagtgggctgtgtgcaggatagcaggaagtatgttggaggattgtggtacaaaaatctgattgccatgcattatgagtccctatctgatctgccatgcattatgagtccctatctgatctgccatggcgcaccctgctgccctatactgatctgattgtgcaggagctgaaactcttggttgcttgcacagtcttgctggaggtctttgtagagttgaaaggttggtgttgagatcgtatagaccgatccactggtggtttccctgcgcgaaagagcgtctgctactgtatttagccggccagccctatattccaccttgaagtcgaaaccaaatagcttactaatccactgatgctgaggtacagttgagagccgttgatcgagcatatacttgaggctgaaatggtctgtacgtaccacaaacttgctgccccacaagtatggacgccaatggtgtactgaatgtaccagtccaatgagttctctctcgtatgcagcgagcttgacatgtcgggctgcaaaggggcggctggaaaaggcaattggtccctcatcttgatgcagtacgatgccaaaacccgagccggacgcatcacagtcaacaatgaatgagttggcaaaatttgggagttgcaagacaggggctatagagagagctcttttcagtgcctcaaatgctttgtttgccttcgggctccactggaaaccctctttttttaggagttttgttagtggtgcaactattactccaaaacccttgataaacttgcgatagtagcctgccaaccctagaaatcctcgcagtcctcgtggtgcctgtggcctggaagtgacagcctccaccttggcactatccatggcgactccctctgcagaaatcacatgtcccagataggtgacggttgtggttccaaaggaacacttagactgcttggcgaacaacttgttggctttcaaagactccaaaaccgccttgacatgtattaggtggtcagaccatgatgcactgtaaatgataatgtcataaaaaatacgagcacaaatcgccgaaggaactgtcccaacacttcattcatgagggtctggaatgttgccggggcattggagagaccaaatggcatgaccaagaattcaaaatgaccatgatgtgtccggaaggctgttttgtgcacatcatcggggtgaacacggacctgttgataacctgaatgcatatccaatttggtgtgttgataacctgaatgcatatccaatttggtgaagaatcttgcaccctgaagttcatccaacaattcatccactacatgtataggatatttatccttgagtgtcttctcattcaaggctctgtagtcgatgcaaaagcgccaagaattgtcacttttctttactaacaatactggggccgagaaagccgatgtgttgtggcggatgatgccttgttggagcatggccttacactgcgcttcaagttcatctttctggagctgtggatatctgtaaggccgtactgctactggtgctgtccctgggaggagatgaatctggtgatcacaacacctagctgggggaaggccactaggtgtctcaaacacttcgtgaagttgctgtagcagacattccatcataggtttgggctctgctttgagtgaccggactgcaggtctcatggaaatgtcccagcgctgtgaacccagtcccgtctagagaatacactgttg

SEQ ID NO: 123032 - DNA, 645 bp, Zea Mays
tagaggcctacaactcgcacggtcgtcaccctcactcgtcgctactgtcttgtagttgttgtaggtcgatggtgggtgccagtacaaagacactctgtagtctgtagatggccatgcagcagcagcagcacgccgccccgtagttgagcgcgaagcccgctattttggctcagcgtttaccagagctgtatgtattctacatatatgtctactgttgatatttgattttctaaaggtgtcgaaaacaagttaagtatttggaccttcgtcctttgatttaatgcgtaggatgaaggttcttaaaggagatggaaataaaaacgataacatgccatataagccaaaaagataatatgtcatacaatttaatgaagagagatataagagagtttaacgagagatgtgagagtacgataaaaccctccaataaaaattgccttagaccgtctccagcaggcgagaaaaaatagtgaatacgaaactgtagatgacattgtttacagagtgaagtttaaaataagaaataaaattgtggaggatactgtttacaaagtgaagtttaaaataaggaatgaaatagaaaatctgctggagatatccttagtaacagctattgacagagacgtaggagtgtgcaactgtcag

SEQ ID NO: 123033 - DNA, 583 bp, Zea Mays
gcaaagcaccactggtctaaatattagtatagataattagtagtagtagtagtagaataatgtagtagagtaatgtaatgtaatgtagtaaaaagggggaagaaggccgactcataatgagtcagcttttgcgtttgtgtaaccccctcccaatattaatgaaaaactttagttgcttcaagtgactattgccttttgttgctttctctgtttacgcgcttgatagttcacccatatgcctaatgctcccggtgttttttagaggtaaccgccgagtaatgcttgatactgccggtgttttagaggtaaccgcctagtaatgcctgatactgccggcgttttagaggtaactgccgagtaatgcctgatactaccggaggtaacaaccgagtaatgcctgatactgtcggtgttttagaggtaactgccgagtaatgactgatactgccggcgttttagaggtaaccgccgagtgatgcctggaactttggtttcccgagtagtgacctagtactttagaaatagtacccgactcgggaaaccccatttatactcgcgccgacatgcttttttgattcctaag

SEQ ID NO: 123034 - DNA, 878 bp, Zea Mays
tacccaagaggacacgagacagaagacactcgacagaaggcaaccactcatgctcgaagagacctgaagaccgaagcctagcgtaggactccagttacgtagtcttttggaccacccacacataagagacttgggagcccttcctccctcttttgtttgcttgtaacccctactacgagcatcgagcaataaaggtgccggtagcgagagtcgttgaagactagatgtagggatgttctgcccaaaccagtataaaccttgctcccaccgagcacactgtctggagcccagaacgcgcacatagaaatttacttatcggagcgaaggttcgaaacatcgatagttggcgcgcgaggtaggggccttgtgcgttctcgacgaactctctaggctacggatggctaataacgatagtggcgtagtttggacccatggaatgaccatccgttttgagagtattgacttcatcatcaacgatggagggacaatgatcagggccatagaggccccagttccccaatgagtaactcgctcaacattatcggaagcctcagcagcctccggctcatacaactgcttgaggccccatgcccaaaccatcgctactcggtccgacacgcctacaaggactgcgggttgcttaggaagttcctaagcaaagaggcgtcgcccgaaaaatggcctaaatcctagagggacgaagagcaggagagaagggcccccattctctgacaaaaccgggtgcctactggtctttggcgggtacgactactacgcttcgaaaagacaccagaagctcgaatgacatgaggtattcaatgtttgacaagcggtcctggccttccttgactggtccgaccacaccatcaccttcgatc

SEQ ID NO: 123035 - DNA, 750 bp, Zea Mays
cctatgcctttattttctcccttttatttattcaaaagtccaggagcatgcgtgacgcaatctcttgcgtaaactttattttccgtatcactggcatatgggacatcctcgctagatgctaaccatcgacgtggatcccgggttcggttgtgaaccgtcgccgtctgggagcataaataccaaccgcccctcctcccttgaaccatagcaccaccgctacctcctctagcccgcaccatcgtatggccatgcagatacggcagcgtgccgtatgcatcttataggctgccaagctcgaggaactaccgatggaggcagtactgctcaccagggttgtagggatgtcacggagtcaccaagagcagacaggcgtcttcgtcatcttaaccgccggtacgcaacccctagaatgtttttctagtgctcaactgtgcctagcgttcatcgggtctggggtactaggccgggggcgtggtttcatggatagccggtaaagctcctttgttggtccggctgcccgacctactaggtaacgatcctaccgcgaaggccacgtggatcttcgccaacgttgggggcagtgcagtgctgttccatttgcttagtgtgtcttctcgctcgtcgctgcgtgatcatgcaacatgaggtcacggctggcgtgccaccgcagcggagagagaaagagaggcagtaggttgaagatatacgctgaccatcggatcagcatcgaagggcgaggatagattaagc

SEQ ID NO: 123036 - DNA, 342 bp, Zea Mays
ctttgttagctgtagttgctttcattcgctgggaatgacaatgattcgcagcaccgccgtccctgacaccttcgtccaagattgatgcattattccctttccatttgtttttctctctcaactcaacgcaagctaccttccgtagagcggtccttcttctctttcatcgctcgtgtgaaatcagtaaatcactaccgtagaaaggatcaaaaactgactagaagtggtggggccataatcctccatgtggggtccaccaaccgcacaaggccacaatggtcgggcggctaccctgtcagcccctcttacctcctgttttctcagctgagatttgacaatccc

SEQ ID NO: 123037 - DNA, 1916 bp, Zea Mays
actcatagtctgctgcccgtcttcggcggcggcgttcctcgtgggcagtggagtggagatccacacgggcgttggttggttttctgtccatttttgttggtaagaaatcctaagctcacttggataggaatactcttgtcataagaattgggttgtctcttattcaaaccaagtagtgatttctatccaccccattcttagttgtggatttgtgtgctgcgcaagtggttgggttagcttatttggttaagttcctattcagcgtatgaggtcgtcattggtttactccataggacttcttggtacatggcagttaaatcgcaggtgcgtttatagtttattttccaacaccaacaccttttggggttcagctgaatccccattccccaaccaagtgcccctgcactggaacaaggtagtatacacagtgacatagagagttctcaacaggaacacatctggaacttccattagtttattttatcctctaaatagcttgtctgcagcaactatatgtccataacaatttggttggggttggtaaggggtgcatgaatgggagagaaggtacaatgttaggatagcttaacatacattcgaagtttcctgttctgtagttggctgatacctaaatgttttatgctgttgtcataatgaaaacaaaccctattgagctggcatggctccatccttgcttagcgctgtgatgacatcctagtggaaaaagtgttggccttgtgacaagcaaggccagttgctatagttgtatccacaatccacttatctcccaagtattctttcactaatctgacctctgctagcaattataatattaaattgataaagtgactaactaaccagacatactgcactccgattttcagtaattataatcacatccttacatgtgacagttaaaatgaccaaccagaatactgcattccaattttcagatatgattgtcacacccttacaccttatagttggttattttgaaatcaatctatttttgcagtgcttttgagatagcacctagaaatcctgtgcagtttgcccaccaacacaaaaaaaatcctgagcagttatatcgacatttcttcattcacatgaaatgtcacttcttagtagattcttctacaagaggcctcctgatggactactggagtttcttgacaggatctatggtatgcatggagaattttactatattgattgccttcttagatcaatgtaacttattttatgacagctcaactaatcacatcttttggcattgtacagtttttgattcatgcttcagcactgaagttttgcctcagggaatgtacccagtgtatttaattgggattcttacagagttgcatgaagagcatgtagaatcctcatttctggcaattaacttcagagatggagataagagaagccagcttgctgatatactacgtgaatacaacattccagtcattgattacccccgtcattttgagggttgtcctgtgcttcctttatctcttattcagcatttccttcgtgtatgtgagcactggttatccagtgggaccaatcagaacattatattactccattgtgaaagaggggcgtggcctttgttggcttttcttttatcttgtcttctcatctacaagaaactgaacagtgctgagcataaaactctggacattatttaccgtgaggcacctaaagggttcctacagcttttttctgcccttaatccaatgccatctcaactccgttacatgcagtatgtagccagaagaaatatatctccacagtggcctccaatggaaagatcactctctttggattgcctgattcttcgagctattccaagttttgattctgataacggatgcaggccattagtccgcatttttggtcgaaatcttcttggcaag

SEQ ID NO: 123038 - DNA, 1307 bp, Zea Mays
gcaggcacacgtgaggatggctcgcacgaccacgacacatggtggaggaggtggtgccggctatggtgaaaacattctcggggtttatcgatgctcggggaggacgtagatgtcttggcgatgacagcgacgtcacatgatggtggtgagaccggcgggaatggcgcaggcgaactcaatgtgggagatagatatcccatgggtcactaaagcacatatgcactctgtgggccgtcggagaggcccccaatatgtcatccagtagagcgtactaatgggcctcgttcacgcggcataaaagccaactgaagcaacaaagcattggataagcggagaccccaaagaatattgcacgagtgtaacatccatgcatgtataatacggaaggatcaccagagttctgaagattcgtcccacaagcgaccagacgacgaattactcagaagataactcggagaaggcaaccgaacactagaagattaggcacacttgtagggaaaggaagtaggcttgagtaagactcaaagatctgtaaaggatatctctctagtcggctatataaggctgcagaggtacccctacaaaaaaactctccctagatggctcaccattagattaattggagacctcatcttccacctcccacaaaccatatgttatctgtgaactcaaggcaattcaatactcagcaccacacatgacgtaggccggatattacgcattcacgtggcccaaacctatataaatgtcttgtgttcaaacgtgccccagcacgtaccatcgagctgcgatcgacgtcgtcgttctcccaaaagcgctacgtgggtaccctatagtgcgcagtcggggctaaacaccgccaatagctggtgtgctaggttggggatgcgacgtcgattcatgacagtgttcaacaccacgatcgtcttcaacacaagagaggttttccacttcagaccaaatgggagtcctacaccgtgttgcaaacatgagaatggaagcctcaaggaaccacaccatcgtctcggctaagaaggagttctctccaaagccaaaggcgacccaagttgcgaacgtggaccggccctgtccaactacggcacggatcgagtcgacaaacaccaagattcaggggattcgatatgtccacatccggcgacagcccaacgcagcaccgcccgcggctagaaccatgcatgcacctacgcccggactgactgatactgctgcaccggtgcgggggcctccactgtctacttgacccacccgggtatggacccggatcactcggaagaagaaagaagaag

SEQ ID NO: 123039 - DNA, 332 bp, Zea Mays
caaagtctgtgtgcgcgcgtagtaaacctgagacactgtcgtgtggggccgctaccagccacacgagccgctcgccagctccttcgttcacctgcgcccgcatacactaacaagtgggaccctcgtgtcaccgtgttcctcctaatcttcacagcagccgcgcaaaccataataatctccctgacgttcgcagaattcttttgcaaccaccattgctgagacatgtgccaccgtgaaaaggagagatagaatgtcgccgccatcaaccatggtccccggccacgctgcgtcctcggagggtggtcctatagcttctctagtgctccccatgc

SEQ ID NO: 123040 - DNA, 288 bp, Zea Mays
agcccactacactctcattggggaagtactatacagaaggggcgcaacgggagtcctcatgaagtgcattcttttggctactgggaagcaactactagatgagatccacgccgggtaatgcgggatacacacagcgtccaggactctggttgggaaggtcttcaggtctggtttctactggccaacagcaaagagtgatgcaaccgagttagtccagaggtgtgaagcttgccaatacttatcaaaatagcagcatttaccagcacagcaactgcaaaccatacccgt

SEQ ID NO: 123041 - DNA, 1208 bp, Zea Mays
cacagcttgatgaaactcatgctttgtctctgtgtttacagttagttctggagttgtagtcgcagtggttgagctgcatagtggaacttccccattttctccaacaatcttatagctgccaagacacagatcttgtccaaaagtagcttttggatgtaaatagtactgtccattatttggcatgtcatgtttgctgttgattactgactcagttaccacattaggtagatcaatgcccttgaatgtttctgataatataacatgatccccttcaggtctgtcgacgaccttacatgccactgtatcatcttcatctgcgagggtgagtggagttatccagcaaggatcatccgattgcttggatgaaaccggtgaagagatactaccatctgaaactacttgctgttctatgtactcggctctttcatcgtccaacgcatatacatcagattcattgatttcctccatatcttccacattcacctgctccgtgtaaatgctgacttctttcaagtcctcacacttatcagatgtattctcagaaatggcttctgtatgaatgtccacatccacttccttgtcaagatcttccccaaacctctcttgagcatgttccaaaacatggttgagcactgccatagatgaattctcatgcagtgcagtacttgtacatccttctccctcttgggaactggaagatgtgatgatgcctaccaagtaggccatgttggagtcctgaaacccatttccttcatcaggggccgaatcatgtggactgtcagtaggtggaacatcatgctcctgcccatggttaatttcttcctgcgggcattttcctaaacccgcatcatcatagggtgaacctgacagaattttgtgcacagcatcactctccttagcttcaacagcatggtcagaaatttcctggtacttgacatcacgtcccacgccgtctgcttcaacgtcatataattcgctgtcttgagtgccatcatacctcagttcaaggagttgcttcgccatgtaccggagggaaccagagaaaggggcatgcttctcggagagctcccttggcagaatgccaacttttgaagcagtgagctccatgctgccaacatacttggacctcttgcttgctattttcttggagttctccttgacttccttggtcttcttagtaatatctcgtgtgccatttgatacagcac

SEQ ID NO: 123042 - DNA, 1079 bp, Zea Mays
ggtgtatctaatgctaaagtcctaatgggtgtcgcgcttagcctgtgtgatccgggtccttcaacgcttgtccctgctcagacttcgacttctgctaatatcattgcctctaggagcacctcagcagttccaggtttgggatttcccttgttcttatcgaatttacaggtattgtatgtcccgtgctacattgcctttaccaatgggtgttctgcttgctgacttctgcattcacagagtgtcctggacctgatggcttctcaactggaggcgcatggagttttggtgcctgagcaaatatcttccttgtcgcggtggaatcctctttctcttcagaagcaagtggtcgatctgaagtctgctaacgctggtgagctttcttgctgttgtttctcgccgactttcttgtttttgtttgcattattgatggtcgctaaatgcttcttcaacttttactcaatggttcttagatactaaggagaagtgtgcccgaaatcaagcggagcttgatcaggtaaccaggttgcttgatggtgcctgtgccatgaactccttgctacagtcaaactttgacttggagaagaaaacccacaaggtaactcgccaggagcttcaggttacttagagcatctccaagagtgggacttaaaattgggccttaaaaaatgaaataaggccggatagaaatgtgtataggacccaacaattgtgttagctccaacagtgagtcctatacaacgtcatttagttaaatctggtttatctattggttttggcggaagatttcccgccacaccgtacttgttttgcacgccggttgctatgctttgttggacggccggagacctaagcatttggcaacacatcttccttcaccctgtagatacaggaggttggcgcacctttcatcacgtgtgttcgcagggacaggccgacggccagagagaatactgcagctttcatcacgcctggtatgctttgattttcatcacgcctggtatgctattcacgcctaggagtacttcatccacacattcacgttactctcttcctctaattgaattggacgtgatgctatt

SEQ ID NO: 123043 - DNA, 276 bp, Zea Mays
tactggagcaacgcattcattcattactgcatcatgggtagaagcacataatcttccaataactaccatgtcaacccccattcaaattgacttagccggtggtagaattcgagccgatagcatttgtttgaatgtaagggtggaaataaggggaatagcatttcctgctaatctcatagtaatgggtactcagggaatagatgtcatcctatggatgaattggttagataagtatgaggcagttatcagttgtgataagaggacaattaagttggt

SEQ ID NO: 123044 - DNA, 516 bp, Zea Mays
gataagtcccatgatgccatggctcaatctcttgtagatttcatcaagacaatatgatgttgtcaccttacctagtagatcttggactaatcgttgtggttggcaagatctgctagttatcttgtgtagtatcaatttatttcatgctgagcttaatgttattagattgatcttgcatgaccaaacatgtatctcttgtacaattgctacaatccacaacatgagaatgcaacatgtgtatgtagcaactcgagagtttgatatgcatatggcatcttaccttacattctttagtcacattgtttattctggatgaactttttttgaggtccttatctatgtttgcttgcatgaccatcaatataccgactacaaatgttcctagggtaattggcatgatacataatatagattggatctaggatgttcctatgaatgatttactatttatttggccctagatttggttgatagtgtgtttaatcctggtgtcttcttagcctattgttgcgctcg

SEQ ID NO: 123045 - DNA, 856 bp, Zea Mays
ctaacaccctcggatctctcaccctcggatctctcaccctcgcccactgcatgggtaattcctgacgctgataatagcgctccctgtcccctagtcctataatcatttggaataagaccttgtgcgaccccgttccctataggtgtcctatgtggcccatacgccatactctgatagtatggctgttgtaagttaaagttcattatagaatccccactcgtctctctaacatcctagttcacatgattaggtacatcagctctgttacatataggcgtatatgaaggattttcaacgcgtttaccttgtaattcccctgaacctactgaactatagatcggatctgtctaggcatattattgctcatatcttgcttaaactcggatctaaatgtgttaaaagaattacacactccctcataaatcatacgtgctattttcgtgacattagacccatatttgctagccacgacagtatcaatcatgtgagtcagttcttcgcatgtgacagatgaagttaccttctcgctggatgtgcctgccccaccggtttgtttgattgcaccattctttgtcttccagaaataagccaatttctcgttccgcttctcctccatctcccgcgcaatttcctcttcaagttccttcctgtccgcctccataaggtcctccatcgtgaccttgatcacgttcagaggatggacatcggatttgtccggcgctgtcttctttgcagtctgttctttcatgaccccattcatgattggcgataagatctccaaccgccaacaatttgtagttgtaaaacgattgaaaaattgttccccaccggagtcgccatatctgttgctatgaat

SEQ ID NO: 123046 - DNA, 618 bp, Zea Mays
ccctagggtcgcctggttgtctcgtatttactatggcggacggcgtggagctgcgtgggtcccgggtgctatcattcaggctatgttgacccaggcctttgtagctaggggctcggcacggctcggcgagttgtgccttactagtggtctgtgcagtcagacctagccccgataggtcatgagtgcgtcataggctgaggtacgtgtggaccataaacgcgccatagtccgaggggttcgtaggtcatgaacgttatgcggcccatggtgttcgtaggtcatgagtgggaagtggaccgacgcctgcgctatggcttggtgccaggcgtagttaatgcggctggttatttacgacgggttagtcctaggtcaagtgtgggatccacttgagtggtttccctccaacatgctcgccccctattaggttctgctatgcccgacccctggctcggtgccgcgaggttcgaccaggggcggattctttcaaggttgacgtatccatttcttttagctcaccaacgggccctagcgaccatgggctttttcctcggtgcgctctctgtctgacgggtccaagggattggggatcaattccctgacacctctcttccacctttg

SEQ ID NO: 123047 - DNA, 280 bp, Zea Mays
gtgagttctggcttgatgaagtaccattccttgggcatatcatctccaatggtggaatcttagtggatccggttaaagtaagggagatagtaggatggaagataccgagttcagtcatggagatccagagtttcctaggactcgcgggttattaccggcgttttattgaaggattctcgaagatagcgaagcctacgacctcactattagagaaggggaaagagtttaagtggactcatgaatgccaagagagtttcaatcaactgaggtttaaattgat

SEQ ID NO: 123048 - DNA, 350 bp, Zea Mays
gtgtctactggttgcgccttgggcagttgttagcatagtggcctagctcaccgcacttgaagcagccattgggttggacaggtgcgttgttgcttctagcctgcgtgttactggcgccaccttgatgattctgtgaatttccaccagacctctggttggtctgagagttactcctttgttggttctgactctgattatttctctggctttgctgtctagaacgttgcacttgataattgtttccaccttgatttccagagcggaactacgaaccttgagcgttgttcgggtgggtgttcctgcttgactgaccttggaattttcttttgtggtcagatagctcctttctt

SEQ ID NO: 123049 - DNA, 370 bp, Zea Mays
ccaaccccgaaggtatactagtggctagggttcgagtacaaagttgtattatgttctaacagtggtaccagagcatggtgggtttgaatgtgtgtatggagtcaaatccctagttttgcataattttagcttttttacttttaaattgctcggatcaatatggctaggtattataacaagttggtttggcttaacttgttgtaataacaagctaggagacttgctcgactcagctcattaggcaactcgagccagctcgattagcttgcgaggtagaccaaaagtgcacctagtggcattataaatcaatatatcatctctttgtctatcaaatattgatgtataaaatttcactacacattgtatattt

SEQ ID NO: 123050 - DNA, 2386 bp, Zea Mays
aaaggctttttggtgttccacagtccaaataaacaacacattcttctttaacagatcaatcagaggacgggatatcatgccaaaatgccttacaaacttacgatagaaacccgcgaggcctagaaaattgcgtaactctttgctatttgctggagtaggccattgttgcacaacagttatcttgtcgggatctgttgagacaccctgtgcactgattatatggccgaggtaggaaatactggtttgagcaaattcacatttggacaactttactttccactgatctttccgcaacaagtgaaatatcgaggacaaatgagtcaaatgagaatcaaaagtggggctatatattagaatgtcatcgaagaataccagggcacatttacgtaagactagtgctaaagtggtattcatggcctccagaaaagtgttgggagctccagtgagtccgaaagccatcacccgaaactcaaattgtcccaaatgcgtttgaaaggctgtttttggttcttcgcctggtctcaaacggatttgatgataaccagccttcaagtctagcttgctgaaccacttagcttgagtgagttcgtcgattaactgatcaaataccgggactggatattttcctttcactgtgatagcattgagataacggtagtcgacacaaaatctccatgtccgatcctttttcttcactaataaaactggggatgagaacagactatgacttttctgaattactccttggtccagcatttgtttcacctgcgtctcaatctcgtccttgagcgctggtggataacgatacggacgcacaacaaaaggattggcgcctggcaacaatggaatgacatgatcacactgtcgagtaggaggcaagccaaccgggtcatcaaaaacttctgtgaattgtgagagcactgcctgcaccctgtcgtcggcatggatttgttgctggtcgctggttggtgttggagagtcagaaaacagctgcagttcaatcactgctcccactggtaacatcgaccgcattccttgaagacagactgaggttccctgataaggaatagtaatccacttgtgataccaatcaatatgcatgggactataatgctgaagccaatccatgcccaccactaaatccactgagggaagaggtaaaaatacgaagtctgaaatgaactagaaagtagccatagaccaagtggcatgtggtagatgttgagaacaagtaatgagttgtccattagccactctgaccgccattggacgttgcaatgggtgtctgcccgtcaacaatgacaaaaatcggtcgctaataaatgaatgggtcgacccagaatcaataagtatcatcaaaggctgctgttgaatagtgccctgaaaacgcaatgtggagactgcatctttccctgtccacgctgcatcagacagtgtcatcagcaattgaggttgactgtcttgcacggcttcactgtcctctggctcatccagcaaatcccaaacctcctcaataacttgtagttgcacagtattggggcatttgtgtcctctgaaccacttttctgcacagcgatcacagaggcctcgggcgcgacgataacttttcaatgaagcgacacgatcggttgatgaacccagccggcgggcgtccgtcaccggcttgtcaactcctggagtcacgccatcagcacgatcatgatcagtcgtcattgcggtattaggccaagccatccggttggaaataggctcgacccgtcggcgtcttgtggattccaacgcctcttcctgcacaagagctagagcgcaggcagcatcgaggtttggggggcgctgaaccataattacagccttaatgtcatgcctaagaccatcaatgaaacacatagtataatacaatggatcggtgcgagattcatatgctgctaactcatcaactagtgacacaaattgttctacatactcggacacaggacctagctgcctgatatgaaacagctgtctaatcagtgattcatgttgctccctaccaaatctctcatgaatgagctcacaaaattcttcccatgacataaaacgtaaacgacgctctacggactgcaaccagcgatgagcctttccctcaaagtgcattgacgctaccttgacccacatgtggtattctgtttcgtacatctcaaagtaattctcagcttgaactcgccacagttgttggtgtgaaccgtcaaagcgaggaaagctaatctgaggcaaacgaccaggcgtcgggcgtcctatgtcgcgtcccgattcatacggataatactgctcaggcatgaatccagagaggcgattaggatggggaggatgcgtacccttgaccgggccgtgagatggggtaaattca

SEQ ID NO: 123051 - DNA, 373 bp, Zea Mays
gtccaagcatgatagtcgccgaagccgcctcttcttcttctttttctcctcaacaggcgcagttggacagctaacctggcgaggacgttttgggcgagtaccctcagactgttttgttaacctcttgtccaaccgtaacagccatcggttcaacacgggccgagtcaaaagattctccagccaacatattgagtacaacatctatttctgcatcatccggacttgtcggcatctcaaagtgaacttgcctctcatcattgggaagatcacaaagaggagcaaccagagccttaatgtcttcaggagagggtcgtactctaagacctagaccactatcactggcagttgggttggacacgaaattgaaaaatga

SEQ ID NO: 123052 - DNA, 275 bp, Zea Mays
ctttagcaatgaaactacaatccttgataaagatgacattactctaacaagatggattgatttgtagtagcatacttcatgagaatcttattctcatacttgagactaaatgagattaccaagataaagtgttagtctcaacatgatcaagatatagaaatagactccccctaaagatatgcatcaagaatttgaatgagatgaatagatgcattcattttagagacgtgtagggagaagcattatacatcttgatcaaggcttataagatttgc

SEQ ID NO: 123053 - DNA, 427 bp, Zea Mays
gtgtgttgtctatgttgctgatgaaaacgatggggaggaagaagatgaggtccctttgactcggaagaacagtcggcaatatgtcgccagtggggaaagtagtggagttccttctcctgctctgtctgccctcattggtctacaagaattgtccctggcaaactttgatcaaactcttgaagatatggttccagaagacctgttatcagagccagcggatgatggtgtgatggaggtttgtgctgatgtgctcgacgtcgggttggggtcatcctgggcagcgtcccgcgccacatcgaccttagagcgcagtcttgagggtcaggaaactgacttggatcgtcttgctcccatggaagtaactgagggaccctcagccttagaggtggctactacagagaacttggtcctcaaggatggtgctggc

SEQ ID NO: 123054 - DNA, 632 bp, Zea Mays
cccgcctgttctgaaagcgtgtgcggcgcttggcgaggttgagcaggggagaaaggttcaagagaacgtggagacggacattgcccggggcattgcaaagggcaacgtgtttgtgcagtgcgcgcttgtggacatgtttgccaagtgtgggtgcttaggtgaggcgaggaatatgtttgagagcatgggagtgagggacttggcttcgtggactgcgatgattggaggagccgtccgcggaggagactggcttgaggtgatgacgttgcttaagcgcatgaagtcagaagggtttcggcctgattcaatgatttttgctactgttattccagcatgtggtaaggtgaaagagctgaggactggaatggcattgcatggatatgcagtaaaatgcggagtaggtgatgatatctgtgttcctaatgctttggttgatatgtattgcaaatgtgctaggctggatatggctgcttctctgttttggtctatcgatcacaaggatgtgttctcttggagtaccataattgcagggcattcacagaatagaatatataatgtgagtgtcagtttgtttactgaaatggttgcttcaggcataaaaccaaattctactaccatagcaagcatacttc

SEQ ID NO: 123055 - DNA, 345 bp, Zea Mays
gcaggatgcaagggcctttatcggcatcggcaacgatgatgctcctggtgccggtacaggtataggctcaactagccccactgctgctgatggaagcagtattggtactagtactagtggtagcatgggtgccaatgcctcaaggaagatatccaaagtctggaatgactttgaggagctgactaatctcgtcaatggtaagagggtaaggtatggtgccctttgcaaatactgtaagcagaccttcagtgctaaatctagttgtgggactcgccatttgcttcggcataattgcactgctaaaaaggaacaacaacgtagtggcattgttcagtctcttcttaa

SEQ ID NO: 123056 - DNA, 340 bp, Zea Mays
ccaagacacagagcacagtaaggctggactgcgggttggttacttgataaccgaggggtcaatgtgcaaatctgcgcccgtgaaggggtatggcgaatcctgggcctccagatctaaatcctacggacgcgattagatcaatcataacacgaagcgatatctacgtgcactggtccttggatagaaaacatgcggtcgggattaacccgcaccagtgaccactgtctgacccttggattcaaaatcgacgttctggattcaaaagacccgaaaggattcctatgcctcggatctaaatcggacggtatattacttgcacccgaagagatactttggcttc

SEQ ID NO: 123057 - DNA, 368 bp, Zea Mays
ctgaacaaaactaacccgggtccatgtcacagcattaaggcccctcggtttcatctcttttgcaaactcccatccacgacattgccgtgctcagccccagtaaaccggcaccagaccagccatgacagtgtgacctagtcaacggcgacggcaacatcgcgaccaccaagcaacggtggactcagacctgttttcaatcgacagtggggatgctaagacataactaccgacggcggcggtggcaaactcagtccggtgggctcaattctatggccaccgcatggtagagcttcaaactccgacgcagggagcaatagggacctaccacgactacagtgcttgcatgaaaccggccaagaacgacacaa

SEQ ID NO: 123058 - DNA, 923 bp, Zea Mays
tattaattatatcaagaatttttagagaaaccaattcatccatccttttgagcatcatgaaccttttagatggaagccttcaaccctagtttcttccttctgatgaggtctttgaaggcctattgtctatatcatgaaccctttatatgcattccttctgacgagcacagactggattccagaataagctaacacgggcagcaaaccatcctgtggagcgaatgtaaatttccatccaggctaggtaacataacaagggtagtcactcaccagtgcatgctaccaacgacagggacacagacagcattcaaaggccatatttccaactgtccaggtaacagacgactccatacatatagcagtattaaacttgagttgtccaggtttcagctccaaaattgcatggtaaaagcatagtccacgcctccacggtgcaagtggtgcggggtacagctccacctccgcactagtatatcataagctaacgttaaacattgtcgtgaccctggtaatccagaattaacttgatcggtagccatgctctgtaaccagcacaacagaccttttccacagtgtgtacaggacgataacccacccaccccaggcacctccgtatctacatccgcacggttccagtgagacataaagtgacagcctaacacttgagacataatgctacccagactcagggttcggttcaaccatctaggaaacctgcttcaccgtctgccagtccacatcatcaggtgtccccatacaggaaggcgtcggggacggaagcagggtcaagctcgtagaagccacggagcccaccacctccctctcccgccagccggaaataaggtatctggtgggagaacctcgtcctctccgtggcaggcacctccaacactcccctctgctcgtcaggcctgaacacggac

SEQ ID NO: 123059 - DNA, 619 bp, Zea Mays
cttatttatagaggggcttttcacattcctaaactacccctagatacatagatattatccaatcaacctgggacaaaatgagccaactcataacatgatgatctgatggccacactccctttacaaagttggtttgccttgacacactctccatgatggctctacatgtcgtcttcgattccctctagaatctcaatatcaggttttgaggccaaatccgtgaacttttgctagacaattttgaggctcaaccaccaaacttttgtaggtagcacactccatacgcgtcccccacgtcctggacatgtatcccgctagtcctcagacacattggcaacatgattcgcacgacatgtcctcgcacatgctgatgtacctaggtgttatccattgttgccagtcacccaacttcttcagtctctcagtaaagacctagtgctcatccttcaccgatcttaatccataaacacaaacccatatgacctttcaccttcaccattgacactagctctaggcttcacacctatgcatcagaagctaagagacatgttgcacacacactcatgtcctagttagttcacacgactcaaccaagaagttactctgttgacaatcactc

SEQ ID NO: 123060 - DNA, 517 bp, Zea Mays
ctcagattagtgttccgtggtgcgcttaatcgctcgccggagtgtgcgccgccgtggggaattctgcgccaccgcgactcgggttggtgggggatgatgcacttttagcctttggatggagagtgaacggatcagattatatcaagggccccccttcaatgcattgaatccatgccactagatctttggcaaacggccaagatttgatctccgcacgattgagtcagtacagttagatcgtgttggacagctgtgattagagtcaacatacccttctgctgttttaaactcgagtcgttgtatgtcgatcagatggattggagtgggtaccaatttagtaaaagggtaggtctaatctcgtccctttccgtgattggacgattcagttcccacgataccattccaacctggcgcattttctaaagagcccctggctttattccgaaccaacctgtagtccactcatgcacagaaaaaccttacatgtaagcccagtttttaacaaaatagcccctgc

SEQ ID NO: 123061 - DNA, 701 bp, Zea Mays
cgcctgaggtcccctcttcatggaatggcggcttccgcctcgcccgagcctgtctcggattggaggatagccccgagcgtagcctcaatcaaaggtcacgggaagcgtggatacatgcacatttaatgtgacgattcgaatacctaccccacatgacgtcgtagtcaaacagggagcgatgggaccacggtcccatccactttcaccaactacgatgatgcacgcccagaaataacggccactattcccacatgccgactactttgctcaaacaaacttcggatgggacgtgcgcacttctaagcatggtctcacccttgggagggaactccgccttgctcaaagtcagcctcagcctcgggagaaagttctgtctcgcccgagcttggctttggccaactgccccggcaacaactcctcacgattcgtaggaggctactccgacgactgaactaacccctccttgtacgactacatgccctgaggcaggctcgacctaggccttgggaggaacctccatctcgctcgagcctagcctcggcgtagataacatcgaccaaaggacgccaccaactcctccatgaaggctgctgacaacgggatggctacatgaccgacgtcaagtttgctttacgccatacggggacaattgccatgcgctttttaccatacttatcactgtttcaacaactacgactcgg

SEQ ID NO: 123062 - DNA, 1102 bp, Zea Mays
gaacagcagaacccccatgaaaaggaatcacttcagctgatcatatttgcaatgctgatcacctgagtaagatgtcatccctgcatctcaaaatccactattccctctggaaatacaaggcatattttgttttgttagggtaaatcttcgactgacaaataatctattaatgccactaacatgacataaaatcagtagtaactttcaatatgaatctgatagcattcttacttttattgcgaagattaggctatctcgagcagcttatccatcctcatgcccatatttaagcttcactgtgttcactctatgaatagtgtcatgtacagcgcactgctagacatggtcttatggagtaattgttggtcaaagctgtccaaataaaactaaatatgtttgtagagagctaaccgagtcactgggtggcacataaatcagatccaaatttcgacaagtcacaaaatttcgagagctggcgacatagatgataacatttggcaataataaaatcattcacagctccatttgatttattagcacaaacttaaaccacaaaaactgaggtcaaatcacattgcatttaggacaatacaacaaaacacagtgaaagacaagcttctaggcagagatcactcaaaataaatggaaatattttatcaggggcattctcctactgccaagccttcataagccttatgtccacataaggattccccagagctcacttagccagcttggttgtggccaacgagacaagacagacagacagacagatgagccccaagaaagcagtagtactggtactagcagtagcagcaggccatcaaccagagcggccaagcagacttcaatgggagaaatacactcggatttccattcttgatgcaaaaaacatcataatcatcaggctggtataccagaattcatgcccccataacaaaaccaaaagactactagtactagcctcaagaaatcagaacttttttcaaggacttctgcatttctggaaacgtaataatgaaagacttttttttctgaaagcacaatgcaacataattatatttgtcattgaagtatatgatctatcacagcagccaagcaa

SEQ ID NO: 123063 - DNA, 463 bp, Zea Mays
gaaattcaaaggtttcgagctgcatcatagctacagacgcttcaacgttgaggctgacgagctttcaaccatcgcgtcaggatgaaagaccgtcccggacgggattttcgcctccgacctctacaagccctctgtgaagatcaagcaggcgaatggagaactggatgaccaaggcaacgaacgagtagctccggctgctcacaccggtgaggtggtggtgatgaccgatcagctggactggcgtcagcccctcatcggccggctaactgacgaggccctacccgaagacacaaccgcagccaggcggctctcccgaaaagcgaaatccttcatgattatcgatgggatgctctacaagaagagcgcctctgggatcaaacagaagtgcatcgcgcttgaagaaggacgacagctgctcaccgaagtacacggaggaacatgcagacaccacgcggccccacgg

SEQ ID NO: 123064 - DNA, 731 bp, Zea Mays
gccagacatcaagtcacatgggacgaatttaaattggcactgcatgagcactacattccagaaggagtgctccatatgaagcaagaagaattcatgaaactcaagcaaggaggagatattgttatgcagtatctcaacaaattcaatcatttgtccagtacgcaattgaccaggtcaatactgacctaagaaagaggaattgttttatgagaggcctcaatgaccggctacaacgaaagatggccacctgcctcgatctctcctacaacagggctgtcagcacagcactggcagttgaagctaagtatgcaggtccaggcaaatcaaagggaattggaggtgacaggtccaaccaagggcctgaaaagcgacaaaggttggtaatccgacctttcaatcaaaaccgttcttcacctcgtccaccctcctaccccttcaaacaacctatattcatccgccctaccacttcccccacttcaacaactcagccgagtgcccctggtactcgattccccgccctcccaagctcatcaactggctgcttcaattgtgggaagtctggacatttcatcaaagactgcccatatccgaagcagaacaactccaataatcatcagaacccagggagttctagtcaaggaaagggaaacatggcaaataatgcagcaggcaagaatatgaagaaggctgggcgaatctactatacacaagtggccactacattggaggga

SEQ ID NO: 123065 - DNA, 497 bp, Zea Mays
aacacgccgttcgatggtgtcgcagcggccggcgaacttctcagagagccgcgcttccatcaggcgcatttcctcgagcacctgacggttgctggcgtcggtgtactccattgctgcaattgtggcacgagtacgccgaggaccgatgttgccgggatccagagtgcctgagtctgataccagattgttaacacgtgtggggaaggaagtagtagaagcagggatcggaggtagaagaaagctattgaggagacggcggcggccaaacagccagcccccagggtattcgtgttgtctgtctgttcattcatacctctccccgttcgagtcccaggttatatatttcttattacaagcagcccatcaggcctacacgacccactccggcccaaatacttttacactacgacgctttactcgttgtggacgcggcgctgctccctcctcagactcgccatctgcatctctgtccactgctctgctgtcctggacgccgg

SEQ ID NO: 123066 - DNA, 340 bp, Zea Mays
taacttttgagattttattaaatttatgcaatagtttatcacctgtaagtgtgtaagttgttgttaaaaataccagagtagataaaaaattatacataccagggtcacttaatgaaaaactaagcatcacttagatatcgtagttgagattgaatataaactaacatgagttgagttggctagtgggtggaagcttaggtattttgctcaaggcatccagggttcgattcctgagcctagcagcaatttttttgctgcgacaataacggacggggagggcagaacgagggaggggcagaacggggtggcagcctacccccttacattcttcatagtagta

SEQ ID NO: 123067 - DNA, 515 bp, Zea Mays
atctctctgagctggtagccaagactccactggcacatgacgaaagtggcaaactttggtggcagtggccctctgaaggtcaaacagtcgagggtccttaggaagtggccacacctctatctcgtctcgctctcgaaaacaaggtggaggaactggtagagtggcagagggagcgggagcgggtggaagcaggtgtggtggaggctgtaggcatagcaggtgtggtggtaggctcaagagtggcagaagctggcatagtggaggaaggtggagtggtagtggtgacaggagccaaggggtcaaaccgaacaggtgtagtgtgagttcggcacgagaggcgacagatccagaaggcgatctgatcagagacaatcctcaactgtcctccctcctctgctctatcaactgttgctgctactatttgagagcacctagagggggtgaataggtgatcctgtagaattcaacactaaattccaacaaccttgattataaaaatattagtgcgggttaat

SEQ ID NO: 123068 - DNA, 467 bp, Zea Mays
cacttgtccaggttcagctttgtgcgggttgcccgcatcttgtcgaagaccagggttaagtcttccactaaggtcaaccctctcttagtcttgaccacgatgtcatcgacgtatacctccaccttgtccctaatcaggtccccgaaagtcttactcatcgcccgcacaaatgtcggcaaggcgtttttcggaccgtatggcattatgacatagcagtaaagcccatccaatgttacaaaagcggtatgcttcctatcttccctagacatctggatttgatggaaaccagagtaagcatctaagaaggacaagagatcgcacccgaaggtagaatccacaatttgatctatacgtggaagtggatacgggtccttgggacaagctttattaaggctggtgtagtcgatgcacatccaaagcttcccgtttgcctttgggacgatgactggattggccagccacactag

SEQ ID NO: 123069 - DNA, 570 bp, Zea Mays
ctctgagcggccaaaatattctgacgaatttcccgaaccttttcagaagtctgctgaacccaatcaggactaactagggatctctctcccaaggtctcccagcacagaggggagatacaccgcctgccatacaaagcctcaaatggtgccatcttggtgctagcctggtagctgttgttataagcaaactctgccaatgcaagatgatcttcccagctacccttccaagacagaacacaagcatgcaacatatcttccaaggtttggatcgttcgctccgacagaccatcagtctgaggatgaaaagcgacactaagagaaagcttggtgcccaatgcactgtgaagactctcctagaatttggatacaaatttggagtctcgatcagaaacaatggacttaggtaccccgtgaagcctgattacttccttcatatacaaggggaccaattctgaagctgaattggtggtcttcatgggaataagtgcatagacttagttaagcgatccattaccacccaaatagcatccctgccccgaggataacgaggtaagcccaccacaaaatcca

SEQ ID NO: 123070 - DNA, 648 bp, Zea Mays
gaagacatcatgtacatccgcaagatggtcgggtaattccagttgataggcaacttcccccacttgctttaggatcaagaagggtccaataaagcgaggggaccacttccctttaactttaaacctcctcataccccggattggtgacaccttcaaatacacgtgatcaccctcaaactctaatagtcgtctcctagtatctgcatagcttttctgtcttgactacgcagttctcaagttctcccttatcaaccggacttgttcttctgcctcttgtataatttttggcccaaagatctgcctttcaccagtttgatcccaatatagaggagtcctgcactttctgccatatagagcctcaaatggggacattttcaaactggcctggtagctattattgtaagagaactccgcatagggcaaactcttatcccaactgccaccatgtttaagagcacatgctcttaacatatcttccagtacttggttggttctctcggtctgcccatcagtttgaggatggtaggccgagctaaaattcaacagtgtgtccaagcactcatgtaatttctgccaaaactgagaagtaaactgtgatcctcggtctgacatgatcttcttaggcaatccgtgtagacaaactatccg

SEQ ID NO: 123071 - DNA, 731 bp, Zea Mays
agacaaactaggatggatgtaccctttttgttgcagctctgcaatctggagttttaattctgctaattctgtgggggccatgcggtatggtctctttgcgatgggcgcagtgccaggaatgagatctatatagaactccattcctctttcaggcggcattccaggcaactcttctggaaatacatccatgaattcttctattacggatatgttttctgctgccagattaaacatcattggatcgttggcgggcggttgggcctgacaggaaactgcttttccttggcggtcggtgagaaggatggtcttacttgcgcaacttatgatgcccttgtgcttagttagccaatccattcctaggatcacatcaatcccttgggatggcaagacggttaagtctgccaagaacactaccccacttaaaagaattctgacttgggagcatttgagctggcatagaaggtctgaccccggggttcgggtgacccaaagggattttctaggggtgtagaggggatgccatgtttttccacaaaactagtggctataaatgaatgggatgctcctgaatcaaaaagtacagtagcgagagtaaattcgacaaggaactcaccgagcactactcccggagcttgctgggcctcttgggcatcgacgtggttaactcgtgctctgccctggtactgggtcctgctctgttgactattggaggggagtgccttggaggcagg

SEQ ID NO: 123072 - DNA, 398 bp, Zea Mays
tagccaccaaattttgaaggtgtggtgctaaacgattagactttggataccaatttggcgaagctgtgaataagactaattggacggtaatctccagctgtcttggcatcaactttcttagggataagggttaggtacgcagatttcatcatccacaatttgcgcgtgttgccttggtgcagggtgataactgccgccatcagatcagccttaattacgtgccaacaagttttataaaaccttcccgtataaccgtctggccccggggctttgtccgagacaaggctagcaatagtggcccggacctcctcctctgtaatgggaaggtccaaggccccaagatcaacattagcactgtggcaagcctccaaatctagagtgaactcacgctgtttctc

SEQ ID NO: 123073 - DNA, 409 bp, Zea Mays
catcgctaagggtagaactttctgaggtgctcaatgttccatgagttccccacttctgtaccatccatctgagtaagccgatatgatcccggtcgtgtgacctctactacgatgaatggtccttcccatggtggagacaacttgtgtcgcccctcccccgttagaactcggcggaggaccaagtctcccactgcaaaggatcgatgtcgcacagctttgtcacggtagcgcctcaaggtctgctggtacctggacgactgaattaccgtgttcaatcattcctcctcaagtacatcaatgtcttccagcctggttgcctctgcctccgctatgctttcaaaggtcagcctaggcaccccgaatatcagatcggcaggcagcactgcctccgacccatacaccatgaaga

SEQ ID NO: 123074 - DNA, 333 bp, Zea Mays
gtaggagacatagggctagaaggagttgagctgtgtgtcggaccccgtcctgcaaaagagttagtatatgtcttcgatcgtcatccctgcacttcatgtttagctttgcaagcatattcaaacaatgtggtgatatgaaaataatccttataatcaagtatatcctgaatttccctattcaaagcaccatgaaaacgtgccatagcagcgtcatccgattctaccaaaccacaatgaatcatgcccttttgtaactcctgctaatattcctcaacagattgtgaaccttgttgaaaacgctgcattttgttaaccaaatcatgggcataatag

SEQ ID NO: 123075 - DNA, 648 bp, Zea Mays
tgcacaagtgtattggaatgttgcacaatagtatttatagcccccaaacccccaaatagtcattgttagaaatctgcaaaagctgctcttccctcgggggatcagaccagtccggtgcaccaccggacctccaacggtaacctcaatcgacgggattgcttttgactctgccttccgtggactcaccggaccagttcggtacaccaccagactccaccacgtgtcctgtcatgtcagctagccgttgaattgacttttgaaccttgaaatttgttgttggacccgactggtccaatgcacaccggactagtccgatgtaccaaggtactccaagcttcatctgcagacctctctagaaaagaggtccggtgtgccaccgatgcgccaggccttagataccctctgcagtcctcgctagtaaagtagtctagtgcaccaggccacttaagccttctgcagctgcctttggaaagaacatctgatcttcaactcttttatgcatatctttttccaaataatttgactaactttgacaactttcctatgccttaaacaaacttatttagagactatccatcaggtctaagccatagtacttgatttttttgaagactccaactcaaattcctgttctaggctcaaactcgg

SEQ ID NO: 123076 - DNA, 377 bp, Zea Mays
gccataatagaccagattcaatggatggatttttttggctaaaggctattgtcgtcctgagtcctgacggtgctgttcctttttatagttcacatagatgtgaattttaaatgttcaattataattttatacgctatagtaatttttttctacaatctggtcatttaagctcagcttttccttcggggtgaattctgagtgaagttccaaaaataataaaaattctttctcatccctgctctgaccatttagacacacattatgatcactactgagtactgagactgacatttctagatatgatatgctgatgaggaatattccctcgtgatgacatttctagatttgttttagttctaaatacaaaaggtgagcaa

SEQ ID NO: 123077 - DNA, 1476 bp, Zea Mays
gggacggcgtggattagcaggccagcggggaggttgtccacggcgctagtccgcggcgtcgcgaccttgttcctggtgattcacaacggtagagcttacgaactaagcactgtgagcttcactgttatagaaggattacggaacatgtcttactcgtgggtgggattgctccagctaccctggccacggtgaggtgagtcatcggtgaacgtggtcaccactgtcagctatcaactccagatcaggtgctggcaaagcagtagaagagctggggaatggttaaaggcttgatcaagctatggaggacaggtttgatatgctggagatgctaggaaaacagcaagagcacgacagggtcctcattaggctttatagcccatggcaagccatcccaaaccatgggtttgctggggccaggctgtaacttagcaggaggacaccatatcaacatgttccacactactcttgcatgaccaccacgtagagcagaggtcaatagacatgacagaggtggccaaggtcctagggacagcaagttacctagcagataagcagctgcacacaagagaccaggttcacccccccatccaccttgctgcgtgtattgcatgggtgccatgtacacctctcatagcacaatttgcccagctccccacatacccttatctcctttagaaggaactggagtctatagtggagggtgatatttttaggagatatttgcaactgcattgaattgctgttgctcactgaaccatggatattttagcaagaagcgaaacctctagtaccctcaactcgccactatagccttattcccatataagtttacaggtgagggtagcagggggtgatcttcttcagttctaactgaatcagtcatttcagcacagctgcaaacctccctgtttaagccttgatatttcccaaatacataaggcaacaaacctacctctcctaacataaaccactctccaacaatagctctaccaacttggtatagcactgatagcccaaaaactcacagaacagaaattgaggtaccccaaagttaagcaaatctcacaaaaactcagtttcagttcagctgacagcacaaactaagtctgacaggaggttttgcaactcctgtttctcccaattctatacagtaacaagcctaccctttgcatgaaacctgttgtccttgacatggtatttcatcttgctgtgccaaccctaacccaattctccttggatcaactaccacaaagctccaaagcatggcaaagacacacaacttcagacttggatattatgctaagtctgaactccaacatctggcagtccaattttgaatacactttactccactttttatgcaacaccaggtccctctcactttataaaacttgttcactttactatggtatccaatcttgttatagaaacttcagtctaaagcctgatggaatggtcacaaaagtactcccaaac

SEQ ID NO: 123078 - DNA, 428 bp, Zea Mays
ttggttttggaactgagcataactggacccataaatgtggtttatgggacctcccatatgttaagacattgattctgatgcataacattgacgttatgcatcaggaacgtaatgttggtgaaagcattctaagtacttgcatgaatctgggcgacaaagcaaaagacaatataaaggctagaaaagacttagcaaaactttgtaaccgaccaacccgggaactcgacaaaaatggaaaaagccacgtgctcgattttgtctaaacctaaacagaagaaagaagtaatggaatggttgaaaattttgaaattctcagatggttatgcggttgggtttaggagagctgtgaacttgaagacaaataaaataactggattgaagagccatgattatcacataatgatggaaagactcctccctataatgtt

SEQ ID NO: 123079 - DNA, 356 bp, Zea Mays
ttcggctttttgacccggaccgttggatccatattgtgcggatatgattagaccgtaggagagctattcggttaaatggattcgttccttcggatctcgatctaacggttggcgctgcgttacagttcacggtggtgttagagccattgatcttgatccaagggctgccagtccataccacgttaatgaagactcaatctgatctacgctgctgatcgccgatccaacgaccaacgtgtgccgataccccccttcggtggccgctttcctaaagagaccccgcatttttctcgaaataacccgcagtgcacactgagggttagatgagtctgggggatacttatgatttcgcccct

SEQ ID NO: 123080 - DNA, 511 bp, Zea Mays
caaaaagagcatgggccacaaacgaatcaactgagatcgtacctgtcaccacgtctccttgctccctgccatccgccgagggtagcacataagctctaaaaatacccgcagaagaggaagctctcgaagtgaagttaacagaagaaccccactgagccgtcgggtgaggcagacgcggagctcccaactgagacggcataggagtagtcagtgtaggagttggcgcagccagatactaaggaaaaccctgcatcgccacgaactgagaagtcccaggcacatagaactgctgcggagggagtggaactacaaactgctgctcagcgcttgacatcatgttgacagtgccctgagaagaggaggaagtcattggcttccatatgagcttctcattgggattcctcctacacaccacatccttgtgatcctaactgcagatagaacacctgccactccactgacacttagcacggcgatgcgcatcaccacaacagaaacacactagccccag

SEQ ID NO: 123081 - DNA, 592 bp, Zea Mays
ctccgattgtaccatcctttgcttgtatttcgtcagacacttgtaagagtttggtaagatacattagagtgtgttcctatgttccacctgagaggagcgtgtagtgagattattagggataaccatcatcgtttgtttcctgtttttgtgtttcgatggcaggcgacgacgaggaagcaaggatccctacagacttcaatgaatgtgttagccgccaagatcttgaggcaaacaacaagctcctgaaggagcaaatggaggagacggtccacaagtcagtgcatgatgccttcattgacatgaaccttggcaagacttacgagaggttggatcgacgattgtcccagattgtcgacagacttgatgtgttggagacacaacaacaagcaccgccgccaccaccacctcctcgtccatgtcttcccgatgatgctatgtttgatgaagaaggtaattatgatgaagcggccaccagagatttgtgcctatgtcgccttcttcatcaaaacacagaaggtatgccacaccaacaccgccagcaaggtaataacaatcgtgctcctgacgacccttatgctaagattaaattttc

SEQ ID NO: 123082 - DNA, 466 bp, Zea Mays
aaagtttatcatccttgttaataatcaagccatttttaatatagggacatgacctaatcgagtgtcccttttcaaagcaatcactacacttcttacttatcttagtatgaagtgtgacttgattattaccttggatgttaccttgtatggaggcatggttgaggcttttggaagaggtattgattttcttcttttgttccctcctcttggcaatcctcaagtccttgactttttctttaagggttttagtgcatgcctcagttgttcccgtctcaagcttcttcaccatgtgatcacggttatcttgagaaggttgagcaatgcacttccctttaagttgtgtcaagctcatctttagcctctcattttcttcttcgagcattagatatgtatcattgcttgttcctgcaaattctagctcaaaggaagatttgcttgtcgaaggacgacaggcattagcacaggg

SEQ ID NO: 123083 - DNA, 443 bp, Zea Mays
caggaagaaagtcttcaacaagaatgaaaatttcacaggaaagtggatcagagagttgtagtatgtggtttggagcctaagaactcaacctagtcgaactctgcatgggaatacccctttctttatggtctatggttcagaggcagtgctacctgccgaccttaggtttggggcaccaagattggttttcgaaaacatagctgaggcagaagctaccaggttggaggatattgatgtactagaagaagagcgattgaatacagtaattcagtcagctaggtaccagcaaaccttgaggcgctatcatgataaggctattcgacatcgatctttcacagtgggagacttggtccttcgccgaattctaacgggggaaggacggcacaaattgtcaccattatgggaagggccatttgtggtagtagaagtcacccggccaggat

SEQ ID NO: 123084 - DNA, 1588 bp, Zea Mays
attgtatctccatcaactatatgttaagaaaacatctattagagacatcatatccaccacaccacatcttattttgatgttatagtagaagatatgagagttattaaaagtaagatatggctgatgccacactaagccataatggctcctccaccgctgttgtccggcaaaccatcacattctgtgacgcgggacgtcgagcaactcctgacttggggcactctggtcccatatgacaaaatccaccattcccattcagccattcctatcgtgcaagccatcacacactccggacgttgggcccacattgcagactacggacgcccacatgacagccaccattagttttgcacacaccggacccacgtctgctcgcgcaaaaagttgcctcaatttgacattagcaggagcatttgaccatgattgctttctctaaagaaggaaggcttataagccgtagaagctatgttggctggccggtatggtcataaaaatgtgcaagccgtgatgacgacataggtcgcgtgggttgtgtttctttggtgcggcccaagtagctaccaggaggccgcacgcttcttaccctgacccagcttggctttagggtcagtctcccttgctttctctgcccagcgagccctcgccctctagctcttcctactagcgccgtctccgccccgtgctctcatgttcatcgtcgatctcagccatctcaggagcacccgctcactcccagacgctcgcacaaaggaatccccaccatctccctccaaactgcccactccctccacgatctccccctctagctcatgatccctccgcccgcccccaccccccgcctgccacgcccacgggcgcagcaagccaacaacccacactcggcccagctaccccgatccgtcgccataaatccgctacctcctcctcgagtcctgcttgatcgccccatgctcgaccggtcgaccggacggaagggcagccccgaccgtgaccacaacgcgatgtgcgacgagtgagggcagtggtgggggttgcgaccaacgacggagagccacacaaagaagctcgtcggcgatgttttcctcaaggttcgctcgctcattccttccttccttgtgctattggcgtgtaatcctagctagcgctctcttgatttcatccttatccacgtgaatcctggatcacactgcatgcagatcagattactggaaggccagaccagctgctcgcattcactggtgcacggtgtgggagctaagagctccgttcctatggccgggccccacctctcttgagcccttgtgcagatacgcagaggtagtgtcccctaatttatttgtcatgtctcctaatttgtttgtcagagctacttgaggatgtcaatgaggtatggctccgctggttcatcagtattcagtaattacaaggcattatgagttagcatgctccctcctgctaagctagctaaatgtggttatcaagtctcaataagtatccatttttaaaagtataaattgttatagccatacatgcgagtctttattttggaaataaccaaaggttctgaacctgcattgtgctaactcgt

SEQ ID NO: 123085 - DNA, 659 bp, Zea Mays
aaaaaatggctgctgcaagcaattgacaaaataagaagaaacttcctttggagaggtagcaatccactagcttgcagcgggggtcactgcctcatcaattggtccattacatgccttccaaagaacaagggggtctcggaattcttgatcttgatcgttttgcgaggggactaagactaagatggttgtggctacgatggaagagcaaagacaggccgtggaccgccttgagacttccgtgtgacaaaattgatgaagacctcttcaatgcctccacaactgttacggtaggcaatggaaagatagcggaattctggaattctagttggatccaaggccaagcccctagaaatattgcgccctcactgttcaagaaggcaaagaggaagaacatcacggtcgccaaagcgctcactaacaacacttggattcgattatgctccccattctcgggtgagggggagtttagtgagttcgtctccctttggcaggccattggtagcatgcaagagctcaacgggacaaaggacaacatttcttggagatggacggcagatgggcagtacagtgctagcagtgcatacaaaatacaattcgcttccaatttcaacagaatgaatctctgccccatttggaaggctaaagtggaaccgaagtgc

SEQ ID NO: 123086 - DNA, 564 bp, Zea Mays
gtagaaacatatagacaaggatttatagggactgtttgctttagcttttttcgggggagctttcgtagggagaatctgacggtggagaatatctgactatcgtggatattacgtgcagagaaagataattaaaagagtccatacggtttaagatgtagaaagtgacgatttcgcaacgactcacccgattctgtgtttacgttgatttttggaagatttttactaaagtgatttttataaaagcggactgaaaacttacgcatttgctcgtttacaacagcttctggtgggcagaagatgaaaaaaaagaaaacacaaatagggcgatattccaatgactctacttggctttggtatagaacaacggaaaacaagtatatttgggctaccaataagaaatgggcacattggatgaactactagtagtaggcacgtgccactccattgcactgttgcacccccattcgattttttatagaaggtcgtccttcgctagctatataatcaccatgcatcccccgtagagccttagcctcttgttgtctgtccgtcagcctatcccct

SEQ ID NO: 123087 - DNA, 345 bp, Zea Mays
ttattacccagatagagtcattccctttttgcgtccggggtagtccggttacaaatccatgcctatttcttcccacttccattcaggcactaggaggggttgcaatacgcctgcaggcttctggtgctcggccttcgttctttggcaggtgtcacaccgggccacatactgtgctatctctttcttcatccctctccaccagtatatggttttgaggtctaggtacatcttggtagtccctgggtggatggagtaggctgagttgtgagcttcctcgagcaggacttctcgtgcctccccttttgatacacacagacgattttttgaaccaaagggctccttgtt

SEQ ID NO: 123088 - DNA, 440 bp, Zea Mays
cttaagagctgaatgaatctgtcatggtactcgctgactaacatgctcccctgcttcagcaacaaaaattatttcttcttgatcttcatcagtctagcaggaatatgataatttctgaactgagtagcaaactctgcccaggtgatagtatcagtagcatcatgggcagcggtgtaagaatcccaccaatcagcagtaggaccagtaagacgacccgaagcatagagaaccttctcctggtcagggcattgagcaatgtttaacatcttcaacactgacttcaaccagtcatcggcgtgcaaaggatttggagagttggcaaaggtaggcggcttgtggctcatgaattcctggtgcttgtcccagggtggaagtggtggtggaggtggtggcagtggggcttgcttctgtcgccccatcctctcctaacacatctcttc

SEQ ID NO: 123089 - DNA, 1295 bp, Zea Mays
ttagggtctaggtagattgtaaaggtcaaagttgtctcccttgtttcaaagactagtaaggcagggtgtgtattgggtttttgtaggggtagacctcttgacgcctcccccatttttccatacagtttgaacagactgtttttcattcttgatgaaacaacacacaattctcctgcgttgttcaagaaaaaaaaatcctccatcagggttacgctgctagaaaaatcagaatgaaaccatgtttagcagggctaaagcatccttagctgcaatgatgaaacagttggcaatatcatagcagcatggcctctaaaaggctatagcatgctatttataacaatggaaaataccatgtctacacctccacgaatgtgaagtccacacaagtggtcccaaacaaaacaaagccaccgctagcagtccaccaatgcccattatggatttcatcattggccaccaaaaacaaagccgttatcctgctacgatatcatacatgcctttacaacctaaattgagcttagttacgatagctctcaaaggttacactaaacggcagcatgtactcccagcagatgcgcaaaaagcaagtggcggctcaagcagcaggagaatcattatcaattcccattagctgcatagttgcaggtgcactatgcatgctgctacttcattttgggttgtgaggagcaagcagacatggagccaaaatcaaaggttggcccatccatggcccgtttccgcctgttcttgagccgttctcacctggcttatcctcttccaccagttgtttagctgttcctccccgacttagctgttttcacctcttgtgacactgtgagctatgtggcacacgttcaccatccgacttagccgttttcacttcctatgagttatgtagcacacgttcgaaggcatgagtattgaagttgaatcttgatgatgctcgtccagtagaaatcggcatctcagagcagggcagacgatctaacagccacctacgagctatgtctcttgcctctcacttttttttgaaatgcctctcacttcgatctcccagcaacaagcaacaagttgttgtcatgtgttttttattagttccaacatgtttgatgcttatggagaggaaaatcagaagagagagaaaccaaggaatcacaatttttaccaatggagaaatggttctgagttgcagggtggggaaagcagatggggaagtgatgacatgttgggcccaatgaacaacaatgtctttaagtgaaacttatcagctagctgacagatgtggcctaaaagga

SEQ ID NO: 123090 - DNA, 376 bp, Zea Mays
ctcgatttcacttgcagggattagctttcgtgacatggtcaaccgagttgtgtcgattgataactagaggacacgtggtgatgtgattgtggggttccaatctgtcaattagatgccggatcctgtgtgtctcgtgctggccaatcaagagttatctatcacctaatggatgttcaagcacccctgttttcatcattgtgcccttttgcatcagatgctctagtaactactccactatttgtactggcaaccataagatgactggattcaaatatgcttgtacggaagcgatatccattgatgtcataacttgcatagctttttgccagttacatttcaaatagatagctgatgtaagtcatcatttatatatctt

SEQ ID NO: 123091 - DNA, 393 bp, Zea Mays
tgtccttcttggcaaagtggacataaaatccaccaacatgcatagtacgcggggtattatgacgctccaacttttgtgtaaatctatctgcttgtaccaccatcgaactcttttcctatgcaaggcagcatgctcctcattgctgctacagtaagagacactgggggtgcggccttggaccattcctagagtagatgatatggtatcacatagggacctaatttaggctacaaaacaccttaggctccgttcgtttcggctggttagcctccttccaggtggaaagaaataatctggattggaattcagcccggattgaagcaaccgttcgtttgaacttggatcaaaaacagaagccaccaggtttggagattgtccgttgttcacggcccg

SEQ ID NO: 123092 - DNA, 483 bp, Zea Mays
tggtgattggctcaccgacattgaatcctcaagtggttcttcttcaagtgaagaagaagatgaagaaaaggtcgccgccatcgctggggatttcccttcaccaccatcatcaccttcatctagttcacacctatgcatcgtggctaaagtgaacggaaggtacaaaatgaaaatgtcattgttgattattgtgatagtgatagtgatgatgtatatgcttctcctacttatgatgaattagcagacttgcttaaagaatgtactcaaatcattagaaagtccaaagctaaatgtgacaagctaaaatatgaaaatgagttcttaactgctaagtatgacatagttgttaaagctagtgaggaaatgaaggaagaaaacaaaactatgtcatccaccaaaaatgagctcaagacctcctttaaagatgctaaagaaaaatgtgaaaaattaaatgaagcaaatagggagctaaatcataggatt

SEQ ID NO: 123093 - DNA, 521 bp, Zea Mays
aggtattgataggggttgcaaggcactggctgattttaagtggcttgtctttatcttctgacatgtgtcacattccgatacatattgggttatctccctattcattctagtccaccagtacaggggcttcagatcatggtacatcttagtgcttcttgggtgcatggagaatttgaagagatgagcatcatccaagattctctccttgagatccctatttttgggaaccactaatctgtcttcaaaccatagcactcccttgatgtcttggcgaaagcacttatacttctccaccttctgactaagtttctccttgatgatttgcactcccttgtcacctagttgggccataataatctggtctgacaaggttggctcgacggagatgtgagacaaggaaccagaaggaatcacttcgatcctcatcatgttcaactcatcacacagggcattgatgcgagaatccatcaccatacagttgcattgcgactttcgacttagggcatctgctaccacattag

SEQ ID NO: 123094 - DNA, 404 bp, Zea Mays
atccacttctttcatgtgtcttccttccattcctgatttttcatctgaaccatcatcttccacatccacacctgatgttcttattcccataacaccaccttccatctccacgccatcttactcttccaaaccacctatcacccaaacctacattcgtcgttcctgctctattcctatggctggtcctgatactgatcctgtacctgattcttgtactaacaatactgagtctaatgatgtttttaatcagggatatcgtcttcgtgaccgtagtaccattgaacctccagatcgctatggttttccacgcgctggtgtggcaattgttgaaccaactacttatcaggaggcttctgggattcttgagtggcagcttgctatgattgatgaattggctgctcttg

SEQ ID NO: 123095 - DNA, 596 bp, Zea Mays
gaggggtgttccggtgatgagactcaggtaaactccaattggtcggctccgagagcaacagggggctacaaacaagcaagaactcgaatcaattgggtatgcactaacccgaggagtgctgatcacggtagagttcctcgcggcggagtaagaacagagagaaaggggatttgtggactgcgttagttctgcggcgtactcgattcgagtgcttagttgttgaggtgcgggatgtgatgaagaagcggagtctgggctcaatttacaggctatcgaccggagttggagaagaagtgcggatttcagatgtgctggcaagctttccgcgcggcggattccggtgatggcacgggggttcgccatttaaccggagcctgccacctcagtgaccttctgccaccacgccgaggatatttaccgcggccaccgatgaccatcccacgctgtggtggcgttcttatcgccggcgacgagcgtctaagctggcattctgatcccctttggtctactgtaccatcgcgagctgtcattagtgcacctgacagtcaatgtttgggctcaattttctctcaaatttcaatggcaacctatccgag

SEQ ID NO: 123096 - DNA, 669 bp, Zea Mays
cagtgctctcccctctctccggccgccagcgcgccattctatattcacgagccaccaccctcgggccctataaattgagcgtgccattacctccgctaggtagtcacgcatccagcgcacccactcatgtctcggattgtccaccagagagatctaatttgggatttcccccaaatctgtcaagaacaccgcgtgtgtgagctcgccgtggccagttccccataggtccaatcatgtcctcctcgctcttgttttagcattcctgtgtgctcttgatgctcatcggcccaatcaattgcactaaacctgagtagatcaccgggaacactctgaattgtccccgatatgcgccatcaccatggacagtgtgattgtgagccagaaccttgcaattgagtgaggaattagtgttgccgagggtagaattaggtattgtgcgacggagaatcttagtcgttgtgtttttcggccggtcttggcttgccggagtcacttctccgccgtccgcggtcggggatctcaggttgtgaagaaatagaaaggggagggacctttgtgcagatgtcagtgagacagagaaacagtggagaggactctttacgggtttttcaaacgactagggatctctatgcaaaatggacaccgcgggcgtgttctgcctgtagtggg

SEQ ID NO: 123097 - DNA, 295 bp, Zea Mays
taattcataatccttgatcagctcgagccatcgcctttgtctcatgttcaactctgactgggtgaagatatacttcaagcttttatgatctgtataaatgtgacagatattacctagtagataatgacgccagatcttcagggcatgaaccactgcagctagctccagatcatgagtaggataatgctcctcatgccgatacaactgccttgaagcatatgcgattactcggccttcttgcattaatacgcagccgagaccactgcctgatgcgtcacaatacacatcaaagggc

SEQ ID NO: 123098 - DNA, 427 bp, Zea Mays
ctcaagtagaggcaaagaaagctgaagaagctcctgatcgtgcattgattataggtacctttatttaacgcccttttgctttattattcgtttctagcttcgaactctaatcatcatataccttggtacagccagcctttcgccaccactagagccattcaatcctgaggctgaccccgtcataaaagaagccttggatgtgatggaggtcgccaatacaaccgttgatgaagttgttgacaggctactgaatgaagttgccgatagaatactaaaagaagactagatccttgttaactaggaaatgtaatatttatgtatgggtcaaacataagatatttgaatatatatgaatatactaagtttctttgcaatgtatggaatttgtgtacataccactttcaagcctttgacaaaaaacaccttc

SEQ ID NO: 123099 - DNA, 430 bp, Zea Mays
cgccgtcacagcgagaggagggggcaccgttgaagccagtgtaaggttccaaacaacaggaggaaaagtaccaatgactcaccacgaaacggaccgaggcaaaaacacgctcgctactgagttagaacccagatcgcgatgacaagtttgtctcaggcggtgctctccggcggcatcgtgacgttctcggagttctgcccatagtgagacgaagagacgacccgtgtgatcactagatcagagaaaacgacgacgaacagcagcctaagcccaaactgtcccacgtggagcacaacagacatatgaagatttttctctgctcccagaaccgaaccacacatcaaccacttgagacaaaaatgcagcagcagccgactgaaccttccctactgacccccttcaatctatcaatttcctaaagtaacaggcc

SEQ ID NO: 123100 - DNA, 349 bp, Zea Mays
ctgcctcctcccaaagccttcaccctttttgtgtcaaatccacctgtgactgatggcaatttgggccttagagtgcgaccctctgctgaagaagtcagtactttggttgcttcgcttggggagattcctgatgacgaacggcagattcattttgaggtgcccctgaaccctagtgatgcggatataaatgccatgcttgatctgctagctgaggattcctctgatgctgctcctactggtacactggcagtggtgcccctcccagaggttgatacagctttggatgtccagaaacccgtcagtactcgcccgaggcgccctaaccgaaccagtcagcctgagctttctg

SEQ ID NO: 123101 - DNA, 300 bp, Zea Mays
ctcaagcctaaattggcgacttcgatcaactcggccaactcagccatataccaacgacctacacattcttgataaattgcctaatctgtctaaaaaaattaatctatctgttttacctacatattttcaatgatatacatcattgttttttccaagccctgcctaaaacaatgtcacccaactgaattttgacataacacactcaacttgcactaagctagagcttattcaatctaatgtgggtcacttaacaagttaacactagtaaaataaacttgatcctactcctataatcttgtt

SEQ ID NO: 123102 - DNA, 664 bp, Zea Mays
cgaggacataaacatagggagacgaaagacaatgataaatggtctctattgtatagaaagatcaaagatgaaggcactcaagagtcaagagtgccttagatattagtccacataacctctttgaagggtttcttaaccacatcaacatcgttgtcaacatggcatccatcaaagtgttgagatcagagggtacgtacatcgcaccagatggtcaggagcgaaagcattgttgcttgccgttgccgggacacagcactgatcaaatgcctgattgaccgctgggctggacgcttcttttgatttctatcttggtctcctcccctaccactactagcagcagcaggcaatgatgccatgtggtttgtttcagctctgcaggcgcctgcagaggtcgacggacaatgactatcagtgcatgatcagtatccagttattggtgggcacggattgtcacagttcagagaaaacagtagttgctgctgttgagaggaggagacagcgcaacgcttagactatccgcagccgttccccctatatttttccccctaaatcttactatgcagccacgtcagcaagattccctcccctaaatttactcgttccgcaaccgttccccctaaatattcccctacatatccctctactcattaaatatacatttccc

SEQ ID NO: 123103 - DNA, 892 bp, Zea Mays
aggtcccttcgccaaattcaggcactacggtcggttcaatatatcgtggctggtgggtcaggatcttcattttctaggccttcggcacaacagtggtggccgaagcggcagtttttctcttctttccttgccttcgcagtgggtagtgataatcaaggtatatgaagccaattgcatcaaataccctgttcaatcttttcttgcctcgacccccgaaggctgcggacaaggcatcatcttcggccttggaatatgtcccaagcagctcgtcactggtagcttcaatgcatttcaaccagtcatcatttggcttgtcaaacttctctctaaatctgaaggtatatttcaatcgaactaggccaccttcattggattcagcagtagtctccttcagcatatctcagctccccacaagtggccacactctgtaggctatgtgctcttgaattatatctcttgtgccaatgaaggcgcaaacattgctaaaggccttctagcatgcttcgatgtcactttcaatagcaaccttcggccttcgaaggctgaagcgagaccagatggggcgctggataatttccttgatatcttcccttttaatcagatcatttttaacataaaaccattcctccatccaggcttcgggccatcttttccggtatgtcggcaccgggtagcttgcattggggcgagcaataaatccataacaaccaaagttgttgtggtactgatctttgccagtagccttcgtctcgtataacagctcatgcatattgcagaagcacttcgcactcggctccagcccttggcttcttacagcccaaacaaacatccccatcctaattatagctttggggtaatctgatgaagaaagatctagaatatctttaacact

SEQ ID NO: 123104 - DNA, 382 bp, Zea Mays
atttctcatgacatattgcgcaaacaatcaatttatatccatcaaacttgatcaaaattttagtttttaagacacatttcgagaatccaagatatttagctcactcctaagaaagcaaaatctagtctcatcgagtggttttgtgaagatatcggctagttgattttctgtgtttacatgacataattcgatatctccttttgcttcgtggtccctcagaaaatggtgtcttatatatatgtgtttggttctagagtgttgcacgggatggttggctagtttaatggcgctctcattgtcacaaagtaatgggattcttttaaaatcacagccaaaatctctcaaggtttgcttcatccatagcaactgagcacaacaagca

SEQ ID NO: 123105 - DNA, 293 bp, Zea Mays
gtctggtccctgtatttgcatctttgactgcgtagagagccaaggccagagccgagggctcggtcacatacccgagcatacatgatgggaaaactgtcgaagtcatagtggttggataaatgacgagtatggcaaaaagctcatggtaatacgtcaactctgttgtttctggtgatgtcggaggccccttcattggtagtatcgagcctgaagctattatcgggcgaggcagaagtcttctcgaggcctttgggtttgatgtcgtgcaggacacaatcaaaggagtggcctag

SEQ ID NO: 123106 - DNA, 441 bp, Zea Mays
tgcttttctaatggatttttgttctcatcccgccctttcttatttccattacctcatatatctatgcttgggtcaaaagcaagttgggcatgtgaaatcatagttgggtattgccagagaaattctccatcggcttgaaattgcacaagacaatcatcctcttacacctgaggagctttggctttgttgtgaagctaaaaaacattgtttggtcgtggcttcccttgagcgtaccatagcccatctccgttctcgcattcgtttcttgaaggacggggatgctaatacctcactcttccatagtcaagcgaagtccagaaagcataaaaactatattcccaagctggtggtcgatgatcatgtctacatttctcaagatgagaagcaggaggtgatgtttgattattttgacggcctcctagggacagcccaccagcgttc

SEQ ID NO: 123107 - DNA, 438 bp, Zea Mays
ctttctacagatgtctgggaacagacgcagaggtgcatggcgtgctcagccggaacagcaggcaccccaagaagatgaagcccagcagcagcagttgccaccgccacccccgatgatagttgagtagatgttcatgatgcaaacttaggcagtccaagcaattggtcagaccctagcagcaatgcagcaggtgcagcagaagccacccccacctcatcccccagtgcaagtccagatgccacaggtgccctgagacaagcgggcagaattcatgaggggccatccccctgtctttgcccattatgttgatcccatggacgccgaagattggttgtgtaccatggaacgtgagttgcacactgcccagtgcaacgatcgtgagaaggtgttgtatggtcctcgacagctaacgagagcagcgcagtcttggtgggagtc

SEQ ID NO: 123108 - DNA, 465 bp, Zea Mays
agtggattgctcgctggagttcaacgagagcattcgtccgccccacgctcagttctgcgcgcacgtcgtcgtgatttccagtacgagcccctttcatagtttagaattgatcctcgctttgtttagatgggtcctgcgtagagaatcaagcaccgtatcaatgtctgggttgtcgccgacgatgttccgccatatggggacggcggcgccgccattcaaaccgaaacgggtgaggaagaacggtgtatgtcgttgatgagtgagcgaatggctgggattatcccgcgtgtacccgttcggcggtgtcaatccggaccgtccgtctctgatcgggtgcatgtgattcaccatgggcaacgcaagatctggacggttgaactaagatcctagggccagatatgtgtaccggttcacttaatgcgacatctaatcatggccctcggaatgagatccaatggccagaat

SEQ ID NO: 123109 - DNA, 553 bp, Zea Mays
aggtgaatccgatcgaaaaaatcgaaaacggtttctggaattccctagaaaggaatagtgactaagaacatggcccccctcctgcctgcatctggttttaatccaatgtggcactgatttatgccacatcatctggttttgtgccatatcactcaagttggactaaattctgcatcttctaccttatctcccatgtctgcctctattactttgatctgcaccccgagcgaactgttgtatgtggccacctagctgtacagctgctggctcattgagccataggctcggtgcaagagagcgcagttgcaactccaggcaacaagaggatagctttagtgtccttgttaatgcaggcagcggcagcgacgggcacatcattttcaccttgcagatcaactgctctttcattggcaacttgcagtggtgcagtgtcacagagcagagtgcagtgcacgtccctgtgcagttttgtgtggccatggacgattgagacatgtccatgaacctgatactgctcaccttgcatgaacatgccttcgcggcgttcgtactc

SEQ ID NO: 123110 - DNA, 539 bp, Zea Mays
gagaatgatgcctaccatcgatgaggacgtaggagcgactgcaccatcaagttccttcttagcgacgcttgcatagggtgacagcggggctgatgtcctaggtttgtttttcttgatgtttccaagcggccctttagcagttccgatgggtgcggttgatgctctcccttttttcttttttgaagtgagctcgggggtttcctttgtcgacattgtgtaggttgtagctctagggggatagcatccctccttgttcaaggggagcaccgaaccgtgctgccaggcctcagtggctggcctggcgtctagctcgctctagactgctctgcagactatgacaacccctggctctgtgtagggaattgaagagaatgatgcgattgagaagaagttgcggggtggccttgattggcttttgaccacatgccaaaagttaacggtaagccacacgcggatggcttagtgagggaaatgcccctcttgctaatcgactcgctgtctgattatcatgttttcaatagctagcagacacgctggcg

SEQ ID NO: 123111 - DNA, 417 bp, Zea Mays
gagacacgtggtcaaacgggtccaaatatacgagaaagaggggaggttccaagtatacgaggaagagggacacaagtatacgaggaagagggacacgggaaagagtctgttgaaccctcatctcccactttaggccttagtcccttgttggtaggtccatgtactcgggaacgggtcctagtactcgggaaagagacacgtggtcaaacgggttcaagtatacgagaaagagggttccaagtatacgagaaagagggacacgggaaagagtctgttgaaccctcatctcccactttaggccttagttccctgttggtaggtccatgtactcgggaacgggtcctagtactcgggaaagagacacgtggtcaaacgggtccaagtatacgagaaagagggttccaagtatacgagaaa

SEQ ID NO: 123112 - DNA, 383 bp, Zea Mays
gtggcggtggcggtgacattaacaaaggcgacgacgacgacggcgacgaaggatctgcaatttcttcaacttctactctatcttcttcttgattttgttgtcccacaatagtttcaaccggaggtgaggcatggttcaaagaagcattggtcgccttctttgttgctttctcaaaagggatcgtatgttttcgcttctcttcataattaaaaattctgaacaagaacactatcaattagcaaaacctccgagacaacagacaagtagaccatgagcaaaacagcaaacaaaaaaaatcaaaaccagtagatgacgaacctacgagggaccatgattatacctgataatctgatatacattgtagatgatataatctgatttag

SEQ ID NO: 123113 - DNA, 379 bp, Zea Mays
gggacgcttcagatctgaacttgacccatctgaaccctaattctatcctacaaatttctatcttcgtgcatctgtgtgaggcctacctcgggattcttccccattttgtcctctggaagtatttgtatcattgtcggcccgggatggctgggggctgcaccggctcgttggtggtgcaagtttggagatgcgtcatgggaggaagacagaataccttgacattcttctcaaggatagtattaaagggtgacgccttgagtggtttattgtggaaaaccactgctagtccctcccccttggtcggggaggcaaccagatgtacgtactccgagctgggttgagtctccaagtcctatggaggtaacggaggccagagttc

SEQ ID NO: 123114 - DNA, 740 bp, Zea Mays
cctgaattaaaatttcaatggtagatttagccatgttttcctataaaagaaagaggtattgatatgtggttatgccacaacttattaatgctaaagtggggatttaatagaacattttttttcttatggttaggttaattatatcggatagcattttgaggccatataaatcagtaaacacaaaaaaggagtggggacatcattctcagaattttacttctttcacttctcctttgcatcagtagaaagttgacaattatatggttggatgcatttttggcctctgaaatacagttgctgaatgttcttcagtaagcagaattagttgtaacatctgtcatatactaacctagacatgttcttgcaattgcataacccattaaagaaaatgcccatattttggaaacctgacgctgttatccattttagcaattaaaccaaaacatgaccttctccctactattgtcaattagggctggaaggagactgagcttgtgccacttggttatcaaatcgatctttgtgcttagtctcttgtactgccatgagtgcgagtcacctgcagtatgcagatcacaacgaagtgctagcttctacatgaccatctattccacgatacccatactatgtcccctttggagatatctggcatccatgatatctggccgcagcttgatgtcatttgtttgcttcatgcaaccaatcgatcaatgtattaaaaaatgtcatgtgtaaagaag

SEQ ID NO: 123115 - DNA, 558 bp, Zea Mays
tcgatgctatcaaggttgaagccacgctcgggtgagatggaagtcctcccgaggccatggtcgagcctgctctagggcatgtagtcgtgtagggaacagttgaaggagtggcctcattcgggattcgcagggagttgttgctggggcagttggctgaggccgatctcgggcgatccagagttttctacgaggctgacactgactttaggcgaggcggagttccctcccgagggagagaccgtgttctgtcgtatgcacatcccgtctggagttgcttgagtacaacagacgacgtgttcttgcatcgatgcatggcatcacgctccactcgttcccgctcatgctcatgggtgtggcgacgatcgcggcattgggaattgtggcgctcgcggagcgccctatcgtaaggagtcgctcccgtcttggatacctggtcccaagatacggggtgcgctggtcccattctccatcctcatgatgacatcaaacgttacggtgtctgtttcggcgttggcgtgccttgcgctgtggtgctcctcccccggtacagtggaccca

SEQ ID NO: 123116 - DNA, 357 bp, Zea Mays
ggggattttgccctaggtcaatatagaaaatttgtagatctatgttaggggtacaattttgattaaaagactaaacactgatgttgtatgaaaatgggagataattgggtccaatgttgggctgtcaatcattcgtgaagcctgaaccttggccaacagtggcatcagatgatcttggagatcgaattgaggggaatttagtggatgtttgtgcaagacctttgtaacaaagttgtagctggtacattgtacaacaactttactatagatggattggtgagttactacatagaaattggagaacaaagccctgtaattctctctgtcaggcgcactgaagagtgtttacgatggtac

SEQ ID NO: 123117 - DNA, 598 bp, Zea Mays
gcgaagtcaaaaggttgaaacatagaagctatgacttcacagtgatcgactgataattatacaagaagggaataacccaacccatgctcaaatgcatcacagaagtcgaaggcataaaactccttcgcgaggtccaaagaggaacatgcggatcacactcgggacctagggctctcgctgctaaggccatgtgataaggtttctacaggtcagccattgtgtgcgtagccaacagagtggtccgctcgtgcgaggcgtgccaaaaattctcacctcgaacgggtatccctcgtaatttacaaagctcatcgcacacacctggccactacatcgttggggcctcgatatcgtcggaccattgcccagagcaacctcaaatttgctttcgtcgtagtcgaatacttcactaagtggatcgaagccagagctgtgtcaacaataacatcgaagacaacgcataagtttttctaaacattgtatgtcgctctggagtttcgtccgagttgacagtagacaacaacaaacaattcgacgatcaagacttcagggaattctgcaactccatcggcacgaaggcagtgttcgcgtctgtctacca

SEQ ID NO: 123118 - DNA, 740 bp, Zea Mays
gcttcttttatcctgctctaggatagttgtagttttcatttatgccgaagccttttttgcgactgcatccttctgaacaaatgttttagctttcttcttcacatggctagaagatttctcttcagcctcattctttgcagccctcttccttttctatctagacccgacatggccgaaagatcttcataatctaggtattcaaaccctagggcatccataaccctattaaatcgaagcttccctcggcctccaaaggtagattacatatcttcgtgctctctagtatggtaattatcgcacatttcactgcatttctcttcaataaaattcagccacctagccaaaggagccttatatgaagactgttctttgaagtcaaaagctaatataacaagttcatctttacacttcatctccttgggcactttccatccaatctgagttggatataaattataatcaagcacctcttgaactagatcttgagatccaatcttcttaatgattgtactgaaggctttgaaacattcatcagcagctttgctcatctcacactttggcctctttaaagcaaagctcacgtccaaaggtctcctcagcatacccttaaaatcttcgtgttgtttggagtcaacatcggcatagaactattgttttgtccagtcgccataccacttggttcggtaggccagaactagaccacttgtatctttgcggtaagcaaagttataacacctgaa

SEQ ID NO: 123119 - DNA, 548 bp, Zea Mays
cttagatgacagaattgttaaggccatgctatctatatatgcggacgatgtggtccttgtcaagccgcaggaggaggatttaaggtgtgtcaagcttatcttggattgttttggtgcagcttcggggttggttgctaacatgcagaagagttgtgctattccgatcatttgcaggtcctcaattgcctaagacagttgcagtattttatagtgctttatgggttttttcccatgtaattatctgggactacctatctccaataagaagctcaggaagagtgatcttttgctttgggtagaaaagatagccgaccgacttcctagttggaaggcatctcttctcaaccttgctagtaggatggctcttgtttggtttgtcctatcagctatcccggtgtaccttattattgccatgaatgtgcctaagtgggtgatcaaatctattgataagttgcggcgggggtttctttggaaagaaaggaaagaagtggatgggggcagctatttagtgtcatggcacaaagttactaggccgctaaaactttttt

SEQ ID NO: 123120 - DNA, 693 bp, Zea Mays
gcgagcttgacgaggagcggagaaacggtcgcaggagctgccattttatagcgccagggggcaaaagaaatctactccgagcgccagcaaccaaccccggaatccccggcggcgatccaagcttaccggagtcgcgcgcacacatgggaagggcgactggagggttgggtccacaatccagagacaacgagccgatgagcagactgtccagcgggtccagttgtcggcgacggacattgtgtgtgcggttgtgtttagctgacctgacggacccaccagtcggcgcgagggtgtaggtgggctgcactgagggaaatggaagatgggttggattctgagttggcggcccagtgcaagcgttttccctttttctttttatatcctattttgtctttccttttaaatgttcaaattcataaattttcaatcccattcaaattcaaacgccttggtagatctgttttctcattaaatattcatcttaaacatagcacatgggtgaatttatctattttttatattgatttcatgttaactagtgtttcctttcttaaattctgaaattcaaacttgggcactaaaatatatttattcaccttattttcatgttgtcataaaaatgcacacacaataaagacttcggcatgatgcacaatttagtggcatgtcttttattaattatttgttttttta

SEQ ID NO: 123121 - DNA, 363 bp, Zea Mays
gggcggcgggggtgctgcacgggtgttagatgacttagatccgaggtttggctctgctatcctggttcgaacgtggctaaatcttcctgtacgaaacctagctgctcagcccgccgtcagataagctccagtccacagtcggatttcaactcaaattttggccgtccgacaacatatatgtttgctaaatcctttaacgccagtcagattctgactcgagtttcggccgtttgacaagatatgtaactgcgtactttgatgccaatgagcttgctcagtcctagtaccgtttaaacctgtgaaaccaatcactatgatgttggtaatttaattatcgcattttggtgatttaccccttgtttg

SEQ ID NO: 123122 - DNA, 1032 bp, Zea Mays
ttcacatgtagacatctttcacccgcataaactttttgcaaagtttgaggcaattctaccttgtttttgtggtccggcactgccgcgccccttgttctgcgcttttgactctaatttttggtaggcagttgggttgctctgtttctaggtttttggtgtgttcaaatgacaatgggttgaaatacagagttatctagttccttgggagtcccttgaggttttggggtaactttgggaatcaattcacaaggacagttcgcttagttcgagaatttgtagtggctcccattcacccactctggtcgcctcgccggtccttcagattgatacagtgaaatgaggtagttgtaccaatcactaatattagccaccatgtgaaggatatgcaccatgggataccaataggcacttgggtattcagtaagaggtctacaaaccccaactcagtctcgactgaggactcggactagcacatctagagtctcatatcaagggagagattgggtgacttgaagactattttatgcatataagactcttcataacaaacaacaccgagatataaggggttggtagttagatatagatgcagtaatctagatatacatatgtacatgttttccttgtaaccaaactcttccttctgttataaaaaaggaaggggaaggcacccccaagggggaggacaagtaatagaacatagccactggaaaaatggacataaggtattatctccctagaggtcccgaaccggtataaatcttatgtctcttccgattcaccttcagattattgatcatgtatgcgcccataagaaattcttcaaaaactatcgataattccttgatagttgacgtgctaggtaggggctacaccgatcataaccaatctaatggcatccatgaatcacacgcaagaaagccaaggcgatgatctgagctcgaagatagtggaattaaacccaaggacaatgatctcgattctagcggcatcacacacacaacgtgccatagatccataagagtgaaaatc

SEQ ID NO: 123123 - DNA, 525 bp, Zea Mays
gtcctcgctcggtctggtcattttcaaacgctaattagctcgcgatcttcttataactctcccaaatcccttcacacgatgtcttctttgtcatttactctttgattctcttacagcacttgagtggatttgatctcggattcgcgagatatgagggggcgaagttgggtttgtcgctcggctaaaaatcgagtctaaggtcaagtcaaaatgtgtcaaacggtttttgtttgagttcaaactttaccagagtatgttaaaggtaatttggcgccactttcatatttgggttttgtagatttgagttttggaaaacagagaacacgcctgaacttcatgaagaggtgaaaattcaattctgaattttctaaatttccattttgagattttagcttgaggggtctttttgggaattttgcaaagctccactgatcaaactttcttactacattttgtagtttatttagtgtgctttaactttgttatttggttctcatcatgattttgtgtttttcacaatctatt

SEQ ID NO: 123124 - DNA, 445 bp, Zea Mays
gtgagagttacacctttcttggtgcactcgttcgttagaagcttctcccacttctgaggcttcatctcgagatgcagtctgcatcagattccgttccccagcttcatgatgtcgccgtatgtttcgacgtctgttcctctgtcgtcgtgcttcacgctggggaggctcctcccctccgctggtgttgactccaatctcccctggatgaagaggacgtcggggtagaaaggagccggcgcgatggtgctcttcttcccgtcctcctttgagggcagaggtatcggaaaggtggttcgacgtattctcatcccctgactcggaatgtttgtttccttcttctgagtgattcgtgtccactcctttgtcggcgaggtgaacaacggagttcttcgggtaagcgggaccccgaccggtcgatctttctcctcctgagggctcccgatcc

SEQ ID NO: 123125 - DNA, 837 bp, Zea Mays
gtgaggtgtaccgaggtttctagcacgatagggttcaatccaaggccactacgagtaccagtaatatatcagacatacgatgctcacctaggtttgtgaggaggaggtatgggttggtcggtcgacatggacactgccttcagcggcgttcaccgaacgacatgatggtgcagttaatcctgtgcggtagagttcaaacgggcaagcgcatgagcttcaccatgatcgatagactgcaaaacacaagttaaacaactatgactaaccttagaaaaggctgaccacatggttgcactgctcggcggcgctggtgaccatcgaggggggaaaaccggtgttcttggctatcgaaggtggaacggcggaaacaaagggtggcttgggtgtgtaatgaagaggtgggactgagcgtaggctcaatttaaaggaagtcaccatgatggtgggtaatttgatcgatgactcacggcggcgatgatatcccgaggagctccacgttagcctcaacggtgtccacaggccagtaacgtggcggacttactgcgaaccctttacggcggttcaatacgcgagcctccaactagctgcatggatggccggagcgtccggtggctagctacggtggcggtggatgattcacagtgaggacatgtggtgttcgtggctagagcagtaattcgatcatcgaatccgagcctgagatctttttaccacacattgatccacgtctcggcggcaccaatcgtggcgcaagctcgaatcacggtggcgggacgtcgacggcgagcacacgacacataatctttttcagttcactgtaccatggcgatgttcgtt

SEQ ID NO: 123126 - DNA, 405 bp, Zea Mays
cccagattcctgctgcataaatcgaactaattaagttctaatctccttcctacgaaacataattccttttccctgtcgaataatcagagtcccttcccttatcgaatagtctgcaaagcaagtggatcccaggagcttctgcagatgataaagcccgacatccacatgggcaactctctctgagtctaaaatccctccccaataaataaagcgaaatattccctcaaattctctggacgaccagcatacagctcattgtatgcattgcgcgtatgcagctgcgacagaggccgcaacaactcagctttctttacgcgatccgattgctacttcccaaagagaagccgagagagtaaacactcaccagcctggcagtgcttaattcagctgagtgatgcaccaatc

SEQ ID NO: 123127 - DNA, 347 bp, Zea Mays
ggatcgtttattgcaggaagctcgaaagagggttggcgatggtaaaccccgggagttcaccattgatgagaatgatttggttcgtttcaggggtcgtctttgtgtgcctcagaaattagaggtgaagatggatatcttgagaggagctcataaaacgccttacaccgttcaccctggcgaaaccaaaatgtacagagatttgaatcaaaacatctggtggaagaggatgaaggttgacgtttctaagtatgtggtcgcctgtaaagtatgtcagcgcgtgaaggccgagcataagaggcctgcaggtttattgaagccattggaaattctggagtggaagtgggagc

SEQ ID NO: 123128 - DNA, 790 bp, Zea Mays
cggtccatataatgaaccggtatgcgatcgcggccacaggattctaaatctacggtcaacatttaatgggacgcgattcaataaggaccatccgatccgcccaacggctcggatcaaatcaccgaaagggtacactctgctcttaatcggagccactacttccccgatcaacggctcaaaatccaccatggaaccatctactcttagccctccgataatgatcctatggcacagaagccatcttctacttccagcgcgaggacatggcggcggccattgttcccgcgacggaccctcgccgtcgctcaaccagtgttccccgaacacgcgccacagattccccaatctgaatcccataatcgatggcacactacgaatctgttgaaggattcataccgagggtgcggatgacggcaaggctggccacgcagatggcggactggcgacggagaacccgcttcgatgagcaattcccggcaccacagcgactttcctcttgattaatcctttctacacctccgtcagggtctggactaccaccgaatagctttgttggcgatcgattgatattgtcagcgcacttccgcagtggcggcccttcctagcccgcgcacccacactctggttcgtcccccccgacggctggggtggtttgggatgatttacgatgcatcggctcggcgcgccacaacttttatgggggaaggggagatccgagttggtcgtgacggcaacggtggtgcgagaatgccgccgcggcaatttcggccaggttgttgaggtgcccgcg

SEQ ID NO: 123129 - DNA, 869 bp, Zea Mays
gatgaccattgcagtatattggaactcaataaagtaagagaattgatcagatttggagtttgaggttccaactgccaactagagcaaaaaggatgatgtgaagaggcaaaatgagttggaggaaagccaataagatgacttagaaggtatgtacacactcaaggaacatttatctaagtcatagaagtgcccaagaaaagagccaaactcaaacagagaagaaaataccaatatagacttagttcggcatacaacgaggcaccacatggttcgatggtgcaccagaccgttaacatagagaagtatttcttagggctttgatagttttggcacaatagaccagttcggatagcaccgatgggataccagaccaattgcgtagagaaggaagttttgggtctaccaaagtcaaacactaatggcacattggaccaagcaccagtggtaaactatacctttatagtttaatggctagtttcaaagttcaacggttacgctgatgtggcgctgacatggctcaatctagaggttcaccagactggtctgatgcatcctaacagctgataacttttcagaacgatcactaggaacaatagtctgacataagtctggtgcacctagtatctgcataatttgggtaacaactagtttgtcttgtgggcaacatacatcactcgtccatgcctccaacacatacaagcaagtgttcagaagtgattagcaagtggagaacccaatctagtgcatctctttatgagatcaagtgattagtatgtaatcaagtgatagagagtggtgtgtaaaatagggtgcttgttcttagagcaagagaattctgtaaagaactagaaagagctagagaaagttct

SEQ ID NO: 123130 - DNA, 653 bp, Zea Mays
tggcttcgaagggcccagaaaaatatgccaagcctaacaatggcgttaggggtcagctgatgaagatatatttcgaaattttttaggacttccccaatcatctcgttcagaggaaatcgcagtcctgctctgaagaagctcttaaaaaccactacttcatcattcttcggtgctggggtagtctcttctccggtaaatcggacaagtttgctttcaccttccccaaagtagcccaatttcatcttcaggggcatgtcatcttcggaaacagtagatttctcaaaatctaaatgactggtctttgttgggatcaaaatattgtaatcttcttcactttcatcaacattttcttcttcaacaatagtctgttcagtttcggcatcaggagcaccttcgtcaatagctcccactgtcacaactagacctaatcgttccatgacttctgaaattggtgctatcccagtgacctcggtttcttctccctcacgagacacccttgcagttgatcacactctagccatttcgatgggcttttacagtatgacgaaggtaactcgtctgatgaagctaacttaaaatgatgaagtgctcgcttgagagcgcagtgcagaaagctttggctatggtttaattttttaacagcacaatagtgc

SEQ ID NO: 123131 - DNA, 570 bp, Zea Mays
aacaaaaggagtttctaaggtcttctccagcatttcaaagctagcttcggctcatcgaccatcggtgccatcattctgcagaataacaaagtacaaggtaatcagaaatttgataagaaaaaaatcaaggtaaaaaacaaaggtaaagtcccatactatgttaagtagcctccgagcttcgtctccacccaattcacgcccgcccttagcccaaattggggtaataaacatgttccctatgcttcgggctttggttgggatgtcaaccagatccaatgatgaaagattgaaattcagcctattgacagctcttacgtgattgcatctagcttttatgaaggtggtagctgtaccacgagaaactaccagcccacaaaagtctccatggccggttataacttcatcaaggacatcaacctccttttcaatacattcgagtgccccgggtatatcttcggcggagaggctggtttcctcagatgcagctccaactgaattgaaaatgcttttcaaccgagcggtgcactggcttgcaaactcaaagcatctctccttcagaaccctcagcgc

SEQ ID NO: 123132 - DNA, 506 bp, Zea Mays
tccagcttgtgtaaggatatgatatataattaacaggactgctccctatatgtacctacgttcatcgcactgttgcttgcacttgaaccctagaaacttaaaattaggtaccagctggataggaactgctttgctctggacacgctagctgtttggactttgaaattttgaaactttttattcggagatgatgtaacatgacatttgtattatcagagtaatgcttcagtccattaggtgtttagattgtgacatttagctacacttttctgaggcttaatgatggaccattttctataacagatttatgtcttactttcacaaaattattttaaattaagtgaactcagttatccagtcgttgatcacatttctttggcttcctacttggacgtttcagcatttccaattttttgatgcttatgtgcagttagatgctgggtggtaccctctgatctaggtttcctgcctgctgcccagcctgtttagagcttagcaatttttac

SEQ ID NO: 123133 - DNA, 314 bp, Zea Mays
tgcccgtatcccgtgggtctctctgcttgcttcgattctcttcctccctccctctactcgccacccacttgcaggtgtctcgctgaattggttgcgccgtaccggtcacagagctgcgctccatctccacaagtgattcttggttcttgcactctgtgatgataaaaggactggtagctactttcaaaaacctctacaatttaaaagattcaacataactctttcatcaaggtaccagaaattgtttgaatttacattctcgtgtgatcgttctacttgtcgtaggttttggttgagaaaatggggcttcctgg

SEQ ID NO: 123134 - DNA, 461 bp, Zea Mays
ggagggccccaaagtgtgcctgccactaacgaggaatttttgactccacagcttcatgggggggtgtttaagaaacgcctaacaattcatgggggtggttaagacttaagagccagctcctgcttcttgggacctagtaaaaagaaatgttttctataaccaaaaacaaaaaagcgtggctttggttcagagctacttgaatcgactaaacagttggtgtgcccaggaaagctgtcctcgcccaacagcaggtgcctaatcttcttccaaagctagtagctatcaatggactgaaacacatggcggcagaacagaaagtggtccctctttaaggttttgttgtttataaaaactgggagcggtttaaaagcaccattagtttcccttttgctttaatcctccaactgtcttcttcaagtgagtagtaagaactaagaaccaagcatatattgctgaagcac

SEQ ID NO: 123135 - DNA, 797 bp, Zea Mays
cttgcatactcttatttttatatatgcttacctttatatcccaatatctgtttgagacatttcagttaacatgcccttgaccacccttgtttcttaatgatccatgagcggtcattctactttgcatatccttggtgatctcgttgtctccttgtaactccactcggtaatgaatctttacttcaacccttctgttggaaccttacctatcttacccttgattgttttctccactttgtcgtttcgcgagtcttgccttaactatatcctttgttatgcttttaattattatcatatgcacccttgacgcctctatattctacattgatgtttgtctcatacctgccctttaaaatcacccctcttccgtctcataccttctttctcttggtcgtattctcttctttggctcgcgagtttgtaacctcatcctttgttgtgcttttgtttcttattgcctttacccttctcatctctcaatcttaccttgctgattacgctatgttcgttatctaaaacctccaatctcccaccttagttcaagcgtggtctcttacttatctcacccgtggttatagcctatactttaccacttgcaagacttatcttaactctattcttggttgtacctagattcctggttttttatgcacattaacctcttcctttatatccttgcctattatcacctttgacccttgacctctctccatatttaccatgatgtttaccttttttttgcctcacttattccatttcaatccgagagtgttgttttccctatcccgctcttgttt

SEQ ID NO: 123136 - DNA, 361 bp, Zea Mays
cataatcttcactttccacatcataactatcgctgttactagtatcttccaataaaccttctagtgtctccataacaatcttctctgtgtttgtctttgccatcgattcaataaatccaacaatataaggatccgcatccttcttcttttcaaatagcttcgactcttcagtcacttttgtctccgcaacaaccttcttctccttggtcatattttcctcagacatggtgaaaacacaactttaaaccgaagctcaaaaaccttgaaaatctagtgaaggctagtaagcaagagctaaaagcttgagaaaaataatccaaatggcagaaacagtgtatcaaacgataccagtgcgagttcg

SEQ ID NO: 123137 - DNA, 684 bp, Zea Mays
aatcaatataagagcgctttcacctacaacgacacagagataacagattagcagatcttattatatgcccccaaattctaagaagcccaaagttaaatgtgtcaaatggacagttttctcaaattaaaaacaaataaccaccataggaggtcgttaaaattacttgatttctttggggtgtggccgctgttgccatcggatggtaggtgcctcggctccatgacagaagactgcgagctcgaggcccacatcaaacccagttttttgctgcctgaaccacatcttccttttagataaaccaggcgagcattgcccgtcctctttccgaatctagagttcttcgcactgcaccagtgggattgcgaaaatgctagcgcgtggtgagagatagccccagccattctaatccaagaaaaagaaaagcagttagtaactggttctactggtaatgagttctaggaagaggctgaacaattattcgctcgctaactttataattgaacatgctcaattcgaccatttagccatagagcaaaactgatccaagaaaccaacataagattgatgaactcttctagtgaaaacattcctccctttattccacaaaatggcagagcagtaaaatggaatacatgaccaacaaaaatgaacaagtcctcaacgaagcgcacctcaagaactcag

SEQ ID NO: 123138 - DNA, 279 bp, Zea Mays
cacaagcctgccacgctattgccttgttaccacgtcgccgttggtcgcaataggtagcatgcctgtcctctgagtcgacgcgccagtgaatgccatggtaacccgtgtcagtgaatatcccctctctccggccgccagcacgcttccttcaaattggatgccaccgccgatggaatctataaattgctgcccgagtgagctccactaggttattacgcatccaaagcaccagctctcgcctctgatcgtccactagagcctcccaatttcccatttccc

SEQ ID NO: 123139 - DNA, 477 bp, Zea Mays
atgttgatgtatagctgcattcaaattcgatggtgtgaaatcgtaatgttgattgcatctatgacttgctttgagcttcattgcatgttgtttcatgctgcatatcaggttgtgtagtttccttagacaattagtacgaggtagaagttcttgtgttaattaagaccaataatggacccatgttttgaatggtggtgctatatggggtaccttgggtgctttgcttggagtggtcgaattcgaggacgaattctttttaaggggggtagagtgtgatatcccaattttctgaaaagaagttaaatttctttttctcctttctttcatgttctgtggcattggggtttggagtttcaggaggcattccttagggaaatagtagatcttttggcatttttttccactggggtcgggagcttagatgggagagcgtgtccgggcctttgatctcgatccgatggatgggagccccgctcc

SEQ ID NO: 123140 - DNA, 341 bp, Zea Mays
aaataataatagtacaaaaattagtaggattaatatccatattaggatgatatttaatatttggaaatctaaaaaaattaaactatcgcccacattggccctccagaaggacccgcttgtcagccacgaaggacccgcttgtcagccattctctcctccgcgttgcacgcttgggccactgtagtcgggtcccacttgtctagtctccttccccgttgaaatgaacaccgaagcttatggatcggagaccgcggcttcagtgggtagttggggacctccgattctcatgttgccccttgccccgcgtgcatataagcctatcgcccacattggccctccag

SEQ ID NO: 123141 - DNA, 426 bp, Zea Mays
agttaaagtgcagttacctggagcattgttcaacacaaccttgttcacctcttcactgttagtagcaagaaatttcaagatctcaatgaaattgcccctgttgctagactctttgctttcatcatgtccacggaatgccaacccttgatgcaaaagatatttcaaacatctaattgaataagtaagtcttatcttatacaaacaaaggtccccatcactccacttctcaatttggttatcaattgatgcattaggattcatatagccaatgtatttctcttgagctgtcttgtgtgccatagaacccgcatgtttcaaaagtgatttgcttcctatattccaatttctccatccacccacagtaaatgcatctgtgcccttacccttacttttcttatttttgaataaatagcacacaaaacaaaa

SEQ ID NO: 123142 - DNA, 432 bp, Zea Mays
atacttcatgaataggtttatatgggtaaatatgagtgaagtgtgtgcttggtttgaatttaggcgaagaaaatggaatttgggcactcggctcggaaacgatcgctcaaaacagggaaatgtgtgaaattgaagcctggtatatcggattggcgtgaactttggcgaacatgttactggaggtattttgaaggtgcctgaaaaatttgggttcaattggagcatttttggctggtttgggcatttcaccgaacacgtggtatgtggtgagttaggtttttggagatatggccattttgggctgtgaaaccctcccgaaggagctaggaacctgcaggtgattcaatgggacacaaaggaaccacatccaacactttgattcatagaaaattcacagatttgatatagggaatcaaaggtggggaagaggtg

SEQ ID NO: 123143 - DNA, 597 bp, Zea Mays
atcctcttatctcgttatttaaacagtagtttatatagggtaggtcacaagatcgaaagatgaaggtaaagacgcgagagacatgaagatttatataggttcaacctcttaatgtaagataataccctacacattatatgttgtggatctattattgtatgttctaatgatcaaggggttccccaccccccttttatatcctaaggagggacgacagttacatggtaggcatcaagtcggttgccaagtttgtgatggaattgagtcagtactgagttgtatataattccaactctatgtttataagcttatctatttatttgttgagatctttgtcatatatactcttctacaatcctcctgaccatggattccctcttggtcttattgttgagtccttagactagtagccgagcccatgggttcttcttcttcatgaagcttgatttaggtactcatggtacatattattcatagtagccactaagtcccattttgccaagtcattgattcaagcaaacgagactcttcttgtatacgttctagaatgtcttgaattatcatgtctgtgtcgatctgtccatggctaagtcccta

SEQ ID NO: 123144 - DNA, 822 bp, Zea Mays
atcgaagtgacaagtgatgaactgcttggatcatattccaaggcagaagataatgcattgtccacagcctttggaagtcgaggaaaaaagagattgaacagagtttttgacgctattggcttcgtctatcccgactaccgttacccgctgcgggggcaagggaagaaaaggaaggctactgctgtggccgcctcggccgaacctgtgccgaaggctacaagcaaaaagatgaaggtacttacccaccgaccacgttatattgaaccggccgtggtgcctgagtttggcggggaggcttcttcagctgttgaaccaagagaacccgttcctcccacatagaagactgaagaaccggttataatgccgaaggtaccctcagccgagctagctgagttgaagattgataaagataaagctgaaaagccaaatattgaagaaacaaaagcgctggaaatcttaagccctacatcagaagtaatagtgccgaaagcataaaaaagttctgcagcaactcccaagaggagaaggatggcaaatgtattagatgtgttagaaacagtgaagaccttgagctctactccttcaaggaaaattgtcgaggcttcaaaagcgcaaaccaaagctgaaacaaagccgaccgaaattgaagctgcagtaatccaagctgataccgaagctgggccttcagagcccgcttagaaaaaaccttcggaaattgaagaaagggcaacagaagaaaaggacacagagcaaatttcgcctgaaaaggttgccactcctgctcccgaagctttaaaagagagcattgattacatcatccgc

SEQ ID NO: 123145 - DNA, 444 bp, Zea Mays
gagagagcgaaggacatcgagacatgaagactccggaggtggcagcgaaggctacgaggcgacgagcctgttgttggtccaccagaggacacttctgcgaggccgacctgtcaatgtaatgtatgtgtgtattatttagtgtgtgtcgcctatagggatcacggtgctgtaattaccctattacatggaatattcctcggatgtagttggtgagcaagggtaggaccatactctggaccacctactcccgaacggccctataaataccactcccttgtagttggatgggacacacataacgatatgctatagttccctaccaaacgtcttgtgcacctgagcgcatccctttcgtctttgagtgttttggcccacctgaccacgtgttagtacccaacattttgtgcccaccatttatgcgatgaagacaaaacacacgatgcc

SEQ ID NO: 123146 - DNA, 607 bp, Zea Mays
cacatgcaatgccttcagggcccacgaaaaatgtgactcgaggatggcggtctgactcaacgggagcgatccgattaagcgagagcgtgatatagcaatcacatgacgtagccaagttcgaacggcacaaatattgtgtcgtgttgccacggcgcagtcaatattcagctaatgccataactcagccgataataacatagcttgatcaatatgttcgagtacccactataatatttaatcgctcggcgtgaatcagaaactcaacgcaccacaaatatttagagcgatttaaaaatacgcaacatagccttcacatgcaatttaattattttctattaattatttgcagctagaaataattattaatacagaaaaattaaataccaaaattaatgcatgagcattgccacctaaggagcaaaaggcatttccccattattaaacgtgtattttgtactaattatttactgccagaaataattaattacgctagaaactgcaacatgtttagtctttttgttatttgcaacgggaaatatagaacaaataatatgtagtatgcatataaatttatataaattcaacagaaacttatatatatattgtg

SEQ ID NO: 123147 - DNA, 657 bp, Zea Mays
aaaacactaagttcaccccttaagagcataggaagcaccaaacataagtgatcaaggaagcttatcaaatcgcctaatcacaaggtggaccattaacaaaagttgtagttcactaaacacttaacaaaagttattgaggtttggacaccaaaaaggcttgtcaaagatccctaatcatgtcaaatgtgtgtaagagagggaaaatcaggaaattcattaactcaaaatcaatcctacaacaaagaccacacatgttcactaagttataagccttaaaccaaagtgatccaattacaaaaagtgtgtcaaaatatctcaagtataccctacaaaaaatttcaacccaaggtgccaccgtttggcaatgccatgacattagatttccctcgggatggagcagctggatagatcagcctttcccctcccatatcttacacaccaatgaatcaaatctctcagcccccatacaaaagagttatcttaggatgtgaagaagacgccatgtacaaaaatcttgccgagatcaagcttggatttgtgacagcacacgtgagaaaacgagctcaagcaaatcggccatgtgtttgacactggctggcatgccagtgcgcagccaaaccagtgccccgtcgtgcaagcacctcgcgcgcctctaaa

SEQ ID NO: 123148 - DNA, 337 bp, Zea Mays
gcaattgagatagatggggtggggatgccaaagtttgcttgaaccaagatgtggactaagtttgctagacccaacaacatgtcaaggatgaaacgacatgttagtgttgctaatactaggtgtacaagatagagggacccaaccatcatgtgagatactagcaaagaacgaagttcttaatgatggttatggtacataaacgatagagtagaatgtgtcgacacggcccatggttattggagtagacgaagaaggtggagaagaaacaacagcgtttaagatgtggttgtgctggatgatgaagaagctatgtggaggtggaaatgtctaactcgaa

SEQ ID NO: 123149 - DNA, 935 bp, Zea Mays
tgaatataggagacgaggagatgcctactgcagtaaatataggagaggaggagatgcttactacagtgaacatggaagaggaggcgatgcctattgcaatggaccataatttggaggtacatgatagaggatttacatgggcagaagtacctgaatatggggaaacaattggagggccaccaatacttgaggaggaggaggaggagcatttcagaactattgggtgtgatcctgatggagacgagcctgtaggagtagatgaagagtggaggtactttaaacgtacggaacatgtagtcattgatccagtcgatgtacacaaaagaaagagggctgctctagaattcagagactttgatactgaagttgtaaagaagttacaaaaaagattggagaaacactactatattcagttgtcatactttaaagtgtggtctggaaggaagtctgcaatggaggatcttcatggtacttgggaggacagttttgaaatgttatggaggttcaaagcagcactagaagaatcatgtccaggaagcattgctgagattgattgcaagaaaattaatgggaagatgcatttctctagaatgtttgtagcagttagagcatgtgttgatggatttttagctggctgtagaccttaccttggggttgattccacccatctaactgggaagtataaaggacagttagctacagcaacttcaattgatgggcacaactggatgtatccagttgcatatgggatatttggcaaagagacaaaatccaattgggcctggttcatggcacaactaaaaagagcagttgggactccctgtggactaacaattcacaccgatgcttgtaaaggattagcttatgctgtcaataaggtattcaaaggtgatgcagagcatcgtgagtgttttaggcacctcatggccaatttt

SEQ ID NO: 123150 - DNA, 317 bp, Zea Mays
ctgcaagaagctcaaccaattcccacgtagaattcttttgaaggctctcaaattcatcattcatatcaactaaccggttagatgaattattacatgagctagcttccgaataagaagaaggatgcatcactagtttcttgagcagcaatgagagcataatgagccatactaccagtgccatgatatcgatgtggaaaaataatattcctgtgggtctatctttagcaatagagtgattgttgctaataggaggtacataagttgaaactgactgtgtaataggagtaacaaaatcaataataacaagtacatctacc

SEQ ID NO: 123151 - DNA, 485 bp, Zea Mays
attcactagtggtcataagccaggtaaataaggactgggattgctcgactgattccatgggcaagtactgtacaaccgtccaaaaattagaagacaagtttgaagggttggaattccatcacgtggaaagagaccgcaacgcagcagcagacgcgttgtcgaaactatgatccagtcgggcctaggtcccacctagaatttcgtccaggaagtatcacgcccaagtattccctcggattagacagaagaatgcaacaccttaagccaaccagaatcgaaccctaatgactagagagagcctatcatcaggtacataaagaatgaggaggaaccggatgataaggctgcagcagaacgcatcccaagacagtcggcccactacaccctcataggggcgcactgtacacaaggggtgcgacgggagtcctcatgaattgcatttcctcaactactgggaagcagccattggatgaaatccatgctgg

SEQ ID NO: 123152 - DNA, 579 bp, Zea Mays
gagatagctaccataattattggtgattactcatcttctcagtacacatacgatgtccttgttcatgctaagaaccatggtctcaaacgtgtttcacatttgcatccgtgttatatggctctgcaatatccactcctttttccctatggtgaacatggattccatcttggcattaggtatgcggatgatgacgtgaacgaacgaacaaaacgtagatacacgatgatgcttgagtttgttagataccacacacactataggttgcgtgatgcaaacccgtacacttgctatggtaggctcagtgatcagattggtgtcgatgcgtattctacaatcgaagcctctagattacaatttatagctgaccaccagaaagatttgcgatacgaaacagtgcagggtgtctgatgccattgataagggtttggttagtgctgattctgttggaagcaggatggtcgttccttcgtcgtttactggtggtagaaggtatcatgtcatgaactaccaagatgctatggcaatatgtagagtctttggccctcctgacttgtttgtgaccttcacgtgcaacactaa

SEQ ID NO: 123153 - DNA, 511 bp, Zea Mays
tctagttccatgcaatgaaataaaattggaatcaatcttgtgtgatatctagcaacaaccaaagatagtgtttaagtggcacagactgcatcagcacactgttagaaacaagttcctcctatgcatacaattacatcaaggagggacctcatagtatattactgtttgtggtccatatggaaaaatgagatgaacgaaaaggaaacagaatcatcagacagcaagcttacatagctaggattgtagcagggaagcaataccaagcaaaacacaaacccaaaagagaagatacaattagaaacaatattatttcacttagctgctcctagaacttgaggtcagatcagaatggcacaaatcagtatcaaaaaatgcagtatcaaaatacagaaatgaatgcatttcaaacattgaaaacagtacagcagaagcagctaacatcacagtcaaaaaaatcaagtattaccagtccaaatacaggaagagaaatcttacacagaggaatgccaag

SEQ ID NO: 123154 - DNA, 516 bp, Zea Mays
agcagggccaactctcagaccaggtggacatcagctaccaccagtaggaggacaacaggttccaccaatctcacccatgttgggttccatgtcgagtgggtctacaggagttttgccatctagaggtgtggagagtgatcttccgggaagaagagggtggttgccgaagtgggattttccagagtttgagggggaagatgctagaatttggttggacaagtgtgaagcatacttttcattgtgcaaaattctagaaagggttcagggtgaacgcggcttcattgcattttaagggtgtagcagctcattggtaccaagcatgtatagaagcaattagactgatggactggtctatgttcaaaacagctattagggaagagttcgatgtgtcaacccattcagacaagatgtaggagttgttgactcttaaacaatgagggtcggtgttggagtacaaaaaccagttcgagaaattggtgtatcacatcagactgtttgataaggccatcagtgaga

SEQ ID NO: 123155 - DNA, 457 bp, Zea Mays
tgtacaaggactcacaatcattgaccttgtccctaatgttttgatcaaaattgccatggttgaaaggctatagtttcttctggtccatgtctaagattagagaataaaatattattttgtattttgtacatcatagtaatagtgatgtttattgttctgtgtctatgttttatactcttttttaactctcgtagcaacgcacagacaagtaactattagtgtattacttgagagcctaactcattttgtttctaagaatatatgaatttaaaaaagagcctacaacgaaaagattagattggatttatgctcagaatatttggaacatccaggttttttcctatatttctgttgggttttaagtatagtctatcccaacttgtttagattgagactaaaatacgttgatgttgtttcacgcttatatggttgttgggttgttccaatttagtatact

SEQ ID NO: 123156 - DNA, 665 bp, Zea Mays
ctctttggtgttgctaccaccaagcaagtctgcctgtcacaatccctgtacatggctatccaacctctacatgtgatgaaacaatagcataggctaggtgtggtaagcaagccaaacgaaagataacatagccatcacgagtgaggagacacttatgccacacttgagatcgcaggtcactgccgtgaaggccaagcatgccagccaagcacaatattgactgggacagatcttgattaaatgcccaaaacatctaagactaatgctgtggcattaggctcagcccaacagcagtacctagacatgtgaggctaatatgatccttttatttgttcggatccaaatgcatggacattcaactagtaggttctgctacgaccactgcttctatacagactactccataccaaattgtgtatagaacaggtactgaacatgttccaagttccaactaaacaataggtaatctgagtcagacttttcatgtttatttaacaaaatgtaacactaaggaaatggaagctacaaatttcaaaaacaaaatgaattgtttaagactgtctacacacaacctgactaactccatcacgaattcatgatgctccagttactacttagtaacgcagatatagcaaaacagaagtaaccctgaacatgagctcgtt

SEQ ID NO: 123157 - DNA, 434 bp, Zea Mays
cccgaatactatgttagagcgtgttcttggtactgaatgctgtttttgtttttctgttgtttgaattcaacagttgttatgattgcagaagtaaatgcagtatgttagtttcgaaacttcttcctattttttgtgaggcatagagatcgccctaagatgagtgatcgtaagcatgtttatactaggtcgaatagacgtgagtatgtggcatcgccttaagtcactgccgacttaagtcgattgctccgttagtagggtatagtgatcaccctaagtttaagtaagcgtgagcatgtcgcaccgtcttaagtcactgccgacttaagccgattgctccgttagtagggtatagtggtcaccctaagttaagtaagcgtgagcatgtcgcaccgtcttaagtcactgccgacttaagccgattgctccgttagtag

SEQ ID NO: 123158 - DNA, 445 bp, Zea Mays
ctcgaagtcccaaacaaatcgtgagaaagatacagagagagaagcaatcataaattatggcgattccatgctcaaacattgttctagcaccgttccaatggcccaatggtatctgaagcccatgcagagcgatatcagtaaaccagaaggggaaaaactcaaaatatagaaaagacggcccgtagattcaagataagcccaagtaaccatgtttcggatgtggcccgataaatggggcaaacagcgttgaatttccaaagttggcccatgagttactctaggtcaaagactttcagctcggatagagttaatcatgcgattggtcctcagacgttggatcagcgtaacaaggtgttcaccttagatcgcgccgcctccgatcctccgcgactttcattctagtggcattttacgtctgcgatgccatgttgcggtgtcgtgcgat

SEQ ID NO: 123159 - DNA, 507 bp, Zea Mays
gtttgtcttgacaatacttgccatacttatctcaagggatcttgcaagactatgtacatgaggcacatgcgattcctcatgaaagggcataggtaccaaagagctacaataaataggtacttcgacaacaatgacgagtcacaacttgatgagccggagaagaccaagtacggagaaaaagtgtttgagatggtaagagtacttaggacaatatattgtctaactgatgttactttaatatctcaaatagacatatctaaagcaccaagtaattgtctagcattttcagcatcagtgaaagtaacattaacagcacacaaatgactaagaattttattaaagcgtgcaaaaaactcatctaatgattcaccaggtttcatgtcaaagcatataaatgtttttaagcatatcttgatgctcttcttttattgtattagaaccttcatgataattacaaagtgctttccatactcatatgcagacttgagatgcaccattcaataaagt

SEQ ID NO: 123160 - DNA, 410 bp, Zea Mays
ctcatgtgtttggaaacctgtacatgttcacgcacattccctatgttagctcatttctgtgacaaaaaagtttctgtcgtcattggaataactttacaaatagctgatcatcatgctcataaattcaataattcactaagtcactaaaatgtttggatacctgaacttaaatcaacaattcacccacaatcactaaaatgtttggatacctaactgaaactcaacaattcaccacgttcactatgtttggatacttgaactgaaatgttttaataatattaacatgtgtagcacacaacccctcccctgttcccagcgcattaagtaatagaacatggtgactcatgaaagtgctcatagtgctatccaaattttttattttagcaatcagttcagtaaaaggacacaat

SEQ ID NO: 123161 - DNA, 466 bp, Zea Mays
cccgaggcctggatggaggaatggttttatgttaaaaataatttgattgagagggaggacgttaaggaaattatccaacaccccatctggtctcgcttcgtccttcgaaggccgagggtggtgattgaaaatgatgccgaagtgtgtcaaaaggctttcagcaatgtctatgcttttattggcacaagagacataatccaagagcacatagcctatagagtgtggccagttgttgatagttgggagatgccaaaggagaatgctgctgggtccagcaaaggtggattagttcgattgaaatataccttcagattcatagaaaagttcgccgaaccgaatgatgactggttgaaatgcattgaggctactagcgacgagttgcttggggcatatactagggccgaagatgatgctttgtcctcagcctttaggggtcggagcaagaaaagattgaacatggtttttg

SEQ ID NO: 123162 - DNA, 639 bp, Zea Mays
caagaagatccctctcggtagataccccatggatcttaatcaccaaaactagccttaaacgtttcggaaacggggcggaaaatataaaacagggatcagggcgggaaagtagtagcatgtttggttagtggaataaccttgttcagaaccaagtgatccagcatggactcactccttgcaggttcggataggaggaatgagttggttcgcctattttgcgagaaattggtagcttctagattttagttttagatcgaagagtggatgacagatgagatgaatccataacggtaaccaaacgctgggttcggatgactccggaccattggatgcctctaaccaaatacatggtagatgcctcccccggccccaccccattgccatccttattcacaaatcagaccatcttgctcttcatccaaacattctgtaatagtaacagttaaattggtgttagaactcttccggacggcagtacacaaattttcacatcctttgtttcattttcctatctcgctcttgtaacagtaacagttacaaaactgatgatagaagtcgttaaaactatccagatggtagtggtagtactcgaattataaccaagtgctacctgaaaaaattacgattctagcacaatat

SEQ ID NO: 123163 - DNA, 391 bp, Zea Mays
atgaatgagagtggtggccatgaacaaaatgtagatgctagaaaggtaataatggtattagagtgaatgtgagactgcataatattatatgctgaaaaacaattgtacttttgaactgcagaaactggattttgctatcgatggaataagcttggcaagaccaaataacgcaaaaccaaagggaagaacaatcaaggggagtgaacaaaaggttattaaattgggcgcaaaaggtacaaagaaaatgaataggaaatgccaaaagtttggtattgccgatggtcacaatagtagaacatgtttgtcatttgaggagaatagagttcggttagctagccttgctggacataagagaggacgactacaccatgacacaaaattagcgtcaaac

SEQ ID NO: 123164 - DNA, 417 bp, Zea Mays
aatagatgggtttgggtaagctcgtagtcacgatgaattgctggttgtcgtctaaatgcgtatggttatgacacggataaaaagtattagtgctcatgtgatgtctaagttaaaatgcaaattattgggtgaaaagcgcttcgatattgattttcgtagagaatgcgttgttaattgagtatagaaattctaggcacgaaatgacttggataaagtaagttgatttgttgatcctaatttgattaatttaactctaacaaatggtaaagcgttagaataattcaagtctctagaacgcggcaattcttgaattatatagaagctgaaatgtattgattgctgttttgggctgcacgcgctgtttctgtcgtgctgtatgtttgatgaactaaattgtattttctgtagatatgtgct

SEQ ID NO: 123165 - DNA, 423 bp, Zea Mays
gttagtttagttggtggaagggcccaaacgaatagattttaccctagtgcaaaggttcaaataagggggatagagttccccgctgatttaatagttatgggtaaccaggatacaactatagatgtcatcctaaggatgaattggttaaccaagtatcaagccagtcttagctatgacaagagaacagtgaagttagtgtccttatcaggagaagaagtgttagtggagttagtcttgtcaggaccgaggaaagggagttgtcaccaagtcaccgcttatattgaggagattaaaccattagaggctatcggtgtagtatcagaattcccagatgtgtttcccgaggagttaccaggtatgccacctgaaaggaaggttgaatttgccatagagcttattccaggcaccgcccctatttccaag

SEQ ID NO: 123166 - DNA, 595 bp, Zea Mays
tcacctctcttctactctacgtcatctggaggcatcttagatggcctgccgatcctaagacagaccctaggatctctcctccctgatggggtcccttccggggggcgatatacaggtgccattgtgaacgttgccacactacgcacacgcagactgtccagccaccaagcgtgaaccgtcctgatcagcataggaaaccccactcctacttctaggttacggaccgtccgaccctaggaccaacacactttttggcgacttcgcttgggataaggcagttagatccattgaatcgacccctaatgaccagtcgtatggaccactccaatatttcccctagtaatatcatagagccaactatggaggcactttcagctaatgaacaacaggaattcgaggagcacatggagcaactgatcaaggcggccacgacgaattacttggccaatttcaaggtgggcaggaaccagaaagtcgttcgtatatgggagactaacttggcgtcaatccgacctgctgcgacaacccccattgtaagtaacataggcaacacccaagcactttgatcttacatagatgaacaacggggtcgaat

SEQ ID NO: 123167 - DNA, 427 bp, Zea Mays
atgtcaagctcgcacttagacaatgctatcatgttcctgcataaaaatcatggcatgcatgaattccagaatgaacctttgggaagtttcttccatcacgcacagtgaaaagcctactcctttgctgaatatagctaggagggctattcgtgcagctgtttatccgacggctgtttgttgaattaaccagaagtaaaggggtcgatggtgctgatattagggctgtaaggcctaaataccaacattcagcttgatctctatctttgcagacctggattaaatcatccccaaataaaaggttatgtaagttaaataagtaaagaaattacaaaatttaaacaacactgggctactccatagtcaataccaagtcaagcgaggattcaccattcttgtatataattgacaaggagtgagattccttttc

SEQ ID NO: 123168 - DNA, 640 bp, Zea Mays
ggcagaggcagtcagattgtcactttcaacacttgtctctttctctctcacactccacacgccaaaggtgattcttgtcgtttgtgagcggacggtgaaccaaaattgcgcacggactgtccgggagattgtttggagttcatcaaccatgtcttcatctcggtatttcaaaatctcatggaatttgtctgatttattcaaatttggggtttcatagggttttctctctgatctagaattaggcagtggaaatacaattttgattggtggaattgctcgtgttactcattgtgaatatggtgcaaaaatttgaatggatttggatggttattttctgtcaaatcgatgattagatggatggggcgactagggttctagaaatcgcctctggacggtcgcggaccgtccgccaggatggcgtggacagtccggccccctagcgcagacagtccggtcgctgacagaaacttacactttctttctctatgttgtgacatcatcaactattaaccagtggatattactcatatatattgcagtggtctgggtgatcttaagaagaagcttgcaggtcgttttcagtcaaagcgccgtcgtgcagatgatgcagattataatccagctacagactctgaggccc

SEQ ID NO: 123169 - DNA, 563 bp, Zea Mays
caattattgcaaaacataagaattagatgttggggcttgcctggaatccaacactaggttagtgtttttgttagatggtgctcgcttgacggacatctacttgaccagtccatcgtcttcgggataagtcatccacatcttcttggggagtagttccaatgacatgtccttcatatccacgtgctcaatatccatcataccaaaacgaggtgcacgatacatatgtttgagcataatgaaaagtaacacaataccatatgatgtcacacgatagttaagtaagcactaaacaacaagacaccgtgaacatctactcgcaagcactagctatttatatggcattagacacaggaatataacaccactaaaagatatgggatacataactctatacttaaccaacacaatcaagacatcacaattaaggaaaattttgtttgtagtttggctgtaaactcagctcgctgcagtccgcccctagataaatgccatgtgtgcactcatggacatcgacgatggagaaacaaagtagccaaaactaagacgatcggctcggaagcgtc

SEQ ID NO: 123170 - DNA, 453 bp, Zea Mays
ggagaacccaaggatgttgaaacaagatagcagggggcatgaacagacctaggattcactgaccacgctgagggctcaacgcacggtgttcttggttgatttgggggaaatcccaaattggagagctctggtggacgatcagaggtgagagctggtttactggatgcacaattacatagcggagcaggtgggggcgacaatttataggttccaacagcggtggcgtccaatttcacgaagacgcgctggcggccggagatgaaaggggttactggcgctcgggattagtggaatttaccttggcaacctcaccggcgatgaccagacgtgctagagcgagtcactacgacgaagtactgcgtctaggcacgtgtcatccgagcggcagacggctaactccggtgaacttatccacagcggccgtggcacgctcgtgtacggtggccggagtag

SEQ ID NO: 123171 - DNA, 1264 bp, Zea Mays
ctcggcaggagcagttggatgactggccgggcgaaggcgctttgggcgagcaccatcagatttttgagcagtcaaggtcttttcaggctcggggacagttgcaatagctatggtttcagcagggacgaaattagatgaatcctcagccaacatgtccggcatagcacttatctctgcatcactcgggtttataggcatctcaaagtgaacttgcctttcatcattggggagatcaccaagtgaagcaaccagagcctcgacttcttcgggggagggtcgcattctaagacccaggccactatcgctagcaggaggattggacacaaaactgaaaaaaaagtcttggaaggtggcagattccaggcagaatatgcaacaggagcaccaatatttgacactttgcctctaagaatcatctccagttggctcaccaaatccatagcaggaatcatcttgttggtaacccgggtagaatcagtgacaccactatacaaataagccgagtatgctctatccttcaatggctgaatattcttgaaaacaaagtctgcaactaccgcttcagcagtcagacctctctccttcaacaagccaatttcagcaagcagaaccctggcttcggttatctccaagtctgtgggggattcagtccaacttggagcacgaacatccggctgtctccccgaccgaggggggagggacttgccatgattctctacaataaaccactccaagcgccatcctttgatgctgtccttgagtgggatgtcgaggtactctgtcttcctcccacggcgcatctccaaactcgcaccacccacgagctggtgctgcccccggccattccaggccgacaatgatataagtactttcacaagccaaaatgaggcagacttccaagataggcttcacacaagtgaacaaaaacagaaacttgcagaatagagttgggattcagatgagtcagattcagatgatagaaatcaaggagaccgtgaaagaaaggagaaataggaagagcaaggccgcggatgagaaaaggaatgtaaataacggactcgtgggtatcctcagtcgggacagtaaccccacgacagatccgcccagagcaaagctcctttggggaagaactccgacagaaacaagatggagaaggtccgactcggaaacaacagacatgtgattacctgtgaaaggcaattgactgttgggatcgatgggaggaataatcgcagcggcggaattctagctctttcgcttgggc

SEQ ID NO: 123172 - DNA, 1141 bp, Zea Mays
ggattggaacacataagccaagcagaattcagatcctatgcaatgcgagggcctggacgaaattgagtagcatctaacatcctattgcagtacttgagtgttgccatccacaaatagtaacaacaccaaacatcataattcctgtaatcattcagtcagccgagggataaggattaaagagctcacgacctgccggggtggccactggacataacatcacacacatgttggttttttgtgattgtaaaagatcaatctcagtaaaacacagccatgtttattactatatatctgattgcaacaacttcaaaagaaaatctgattgagttagggaagcttcaatgtgaaatgattcatgaatattaacatttttgctagagcacactactcagtttgacccagccatgtcatatttgctgccttttttgcttgtcctcctcaccaaaatcccaagctctccctcaccaaatttatatatgtacatctaacacactgatgtctcctaacctattagctcaaacttgatgtctctattcatggaagatatagagtttttatggggccaattaaataccttagcaatcccggcgctattattcatcccatgttatcagttaaccttttcattctacaaaaggaattagaatactttaaccaaatgcaataatgaggagaataatgtcttgttaagtgaagtgatgaacttacacaacttgaaggccatgcaattggattattgtctacttgtccaagaaccttgaagttgttatatggccttattagtggttcatcatgcacagatactagactaacacgcaccatccaaaattctttgcctaaagcatcatctccaactttggttttggggtcctggctaagtactctgcctaaggcaaccttcctgtttggatatcttgtgctctttaagaaaatatctgtggaaacctacaagtgaattttggatgttagtggttagcaagtagctataaatatgcaggatgcataaaaatttttactaataaatagttacttgatggttcttatttggtgcataattagaggatttccgagacgtgtagactacactgagtttcaaaaggaccacattgatcaccttggctgcattagtactgttgttttt

SEQ ID NO: 123173 - DNA, 536 bp, Zea Mays
cagcaatctccccttaatttgtttccttggcatacttgtatcttcatttcacacggcctggtattctattgcccttgcaaacttggaccagcaccgagacttagaagcaagctgaactcttcttcatattgccgaacatgaacttgtatcaggatggactgatggagaactcacctaatcaacatcctggacttagtctctcttgatggagaaggagaacaaacctaatcgacaccaagagctcactttgtctagatggggaacacagctaatcaacgtcttgaacttccaatcttaggatggagaactcaacttattgacatcctagacatattccctctcagaattgagagctcaactaatcaacaccccaaattaaacaaactcaacttaggacagtgtacacatcttctcaatatcaatgaccaaatgttttggacaccggtcgcctgagcatgtagtttaccgatgacagctacctcgtatgcctaggaaccctcaacatcatcggacttgaggaaggggtcggcgactgc

SEQ ID NO: 123174 - DNA, 658 bp, Zea Mays
taaccttctgcttttgatattgccagttgatgccattgttgttgaggaagtagattacgcctgtggtgctcttgcgggtgtcgatgtcccctgcaagatcgctgtcactgaacccaacaacatgtgcgttcagcttcttcctcgagtaaaaacagccgtagtctagtgtccttgcaatatactggagcactcttttcacggccgccagatgctcagtcgttggcttctccatgaactgtatgactatgacataccccatagagtaagctaaatcgggcttggagtttaccaaataataaagagagccgacaatactccggtatgccgtttcgttgactgctggtgcagagctcatcttgtttaatttcagacgtggctccatgggaatgcaactgacattgcatccctccagaccgacgttttgaaggatcttcgttgcatagcacttcggccaagacagatcccatcggccatttgagtcacctccaatccgaggtagtagtgtagctagtccaagatcgctcgtgtgaaacatgctcttcatttgcatcttgaactcgttgatgtgggctgaatcccctccactgatcactaggtcatccacataaacgcccacaagcagacgttgcttgtcttctccatgcatgtacacggcatg

SEQ ID NO: 123175 - DNA, 590 bp, Zea Mays
ctttatttccaagagtccctatggaatgttagtggaataattaaaagaacttaagaaatagctaacaaagttacaggagtcggggtatattcatcttggttcctcaccttggagagcgccagttttgtttgttcagaagaaggatggttcacagaggatgtgtgtggattatcggtctttaatgatgtcaccattaaaaataaatatgccttgccacgtattgaagacttgtttgatcaaatgagaggttcctagcttttgatgaagttcttagtgatagaggagatttttgtgccttcgtcggtgcccgaggagccatctcactccttgaaaaagctggcagcgagcatgcaaaggctgtaattcagccagaattctcagtttcagtgaatgatattaaggagccttcggctgaagctactgcccttgacggaaaattttactctgaagtgtggatgaacggtggaagggagatagcaaacgaagctatcaaacaaaatgaagaagaaacccaccgagcttcagaggaggcgaggagagctgcagaagctgtagagcaggaaaggcgtataggtatgtttaagtcacac

SEQ ID NO: 123176 - DNA, 551 bp, Zea Mays
agtcaatgtatccaaaatattgatcgggtactccacgtaagtcaaatcatcctgaacactaagctcttccattggtaactgttcctcggggacacggagacacttcttaagctgagacacgtgaaatacattatgcacatcagatagactattaggtagctcgagttggtaggccatctctccaacttgcctaaaaactcagaacggtccaatatagcgaggggacaatttacccttgactttgaatctcctcattccacgaagtggtgacatcttgaggtacacatgatcaccttcctcaaattccagtggtcttcttctattatttgcatagctcttttacctggtttgagctaccctcaattcttctgaattatacggacttgttcttctgcttcttgtataagttcaggcccaaagaactctcttcctctagtctggtcctaatatagaggagtcatgaacttcctgctatatagagcctcgaacggtgacatcttcagactggcctgttatctattatatgagaactcagcataaggtagactctt

SEQ ID NO: 123177 - DNA, 368 bp, Zea Mays
gtcaagttacttattcaaaataattcatattgtatctttgtcaattttttctgtaaaataaagaatcaatcaaattttggatcagatgcgggtcgcctatgggatggaatagaaacacgcacctatgaaacttttggtcacatacgattgcacccacagatcaaaatcatcacccataccattcctgttgagtatccgtcagatttcaggtatgcggtcctgttcgcgagaccattaacctgtggttccgtgggttgcgagatctcactcgatcggatggcgagttggaaacctcagggtagcccacgagtgttgaaaaccacaaaacgagcagttggtagcggattattgttctgatcagccttgat

SEQ ID NO: 123178 - DNA, 463 bp, Zea Mays
ctttggtaccaagttggagaatggaaaccctaaccctaactagggttaggagtgcatatatagagatagtcaagtgggccaaagcccattacaaagggccaaacatgtagctcttacatagtactctaacaatttaatgccatggagtggcatgaaaatgaactagtttccaatttttcaatattttgagtggcatgtttccaactgaccctaaaaattaatatctactaaaccgagtgtcaaaatcgaaagttggtttcaccgtcgtgttcgtcgtgatgaaagcatcaaaactaaatctaacttggcatatttatctcaaagtcaatttttctcagggtcggtcattatagttattagtgtcagtcattctatcttttggcctcggtcattcatgaggattactcacataacagtcatttagtgagtaagtaattctaaaaaactgacattacattaaaag

SEQ ID NO: 123179 - DNA, 415 bp, Zea Mays
ctggttgttggggtcaattaggggaatgaagggtattgtattcccccgcttcttcttcctgggcgccatgggacctcgctgatgaaaggaatcaaacgcaaacttgagggcaagcaggaatttcaggaaagtgtttacgacagagaaaagcagagttagggtttgttcgctaggaaactacaagcaaggatgtatatgcatgcaataagtagggtgcatcacgacagacgaagtaactcgaaccaaacctcaattgagtggagtaagttggatggatttgttagtcagatctatcaaatgaattcatcaaacagagttatgagccggatctaccagtaaggcttgtcagtcggaattgtcagttgggttaattctattggatttatcaggcgaaacataagtcgaacagaatgag

SEQ ID NO: 123180 - DNA, 565 bp, Zea Mays
ggaggattttgtgtcgcgggctggtctttcagtgtagaggttgggtcacccaattctggttagatctgctaatggctccattagtagctgttcagtttgtcaggggtgttctgtcattcttgctgatgaggtcttctcggccaatctggtggtgatttccttgagggcattcgatgttatcttgggtatggattggttatcccagtatcgcgcggttatatcctgtttttggaagatagtgttattgcaggcgccgtcgggtaaggaggtggtattcttgggaagttccccgaagttcacgttatccttgttggcgcaattgcttcctgatcgccggtcaaggaagtcggggatctttttctccatggtggtggagggtgaggctgccttgcgggtgcaggacatctgggtggtgcgtgactttgctgacgtgttttcggcagagcttccgggcattcctccagagcgcgatgcagcttttgagattaagctgattccgggtacacagcctattcataaggccccgtatcgaatggccccaaaggagcaaattgaattgaagcgg

SEQ ID NO: 123181 - DNA, 600 bp, Zea Mays
acagcacaactaaaacagtgcgtgcagcccaaaacagaaattaataaatttcagctcctatacaattcaagaattgccatgttctaaagacttgaattattctaacactttgacacttgttagagttaaaacaactaagtgagaactaacatgtagacttactaatatttatacaagttatttcgcgcactaaaagcaccatactcaattaacaatgcattctctataacaatcaatatcgaagcgcttttcaccaatagtttgcattttaatttagacatcacctgagcactactacttttcatccgtgaccataaccatacatatttagactacaacaagtaattcatcataactacgagcttaaccaaagccacctaacaagttgattaaccaagggatggtatagcccgccatacgacatacacgtcggcttgcctattattaacgcagtccgagacaccacatgtatatatatcacaatcacttacgccatcgactcttacttaacatgagttggctaacgccatataagacttagcaaaccattttagacattgtaactcgaaacatgggttgaagcaggttaatcagcttttc

SEQ ID NO: 123182 - DNA, 659 bp, Zea Mays
gcggggcttcctcctttcggtcagtctggcatccttggctcttgaaccgctttcggatcttcttgatgggggtgagcttctttaacttcttagcatagtccatcttcagagtctggtatgcctcacgagtgttggcttcttcgccttccgccatctcgagactaccttgaagagacgccttttcttccttcagttccttgatttgttgctctaggctttccacccaggaatttaggtgggtgcagtgggagaaaaggtcatcatagtggttgtcaagggtgtggagatatctggccaagtagactatggtagggtcatcttcattaggatctctccctggcaaggcctgaagttttttcctccagggaggagtatttttgttgctaggtggaaagtagcgaagaggtgtctcagagacttccctactgtagttttggcatagctggcggagggcttttgggcagcattctagcaagtgtctgagaagcggtgtccaatggcggtgatttggaagggagggtgatttgggtagtttcggctttctcccaggtagactgccatagagaatttctcaatcccgttctcgcggtattctttccaaacgtactccggcttcttgcggatccccatgcgaagcactcaactccgaaggaggtgag

SEQ ID NO: 123183 - DNA, 335 bp, Zea Mays
accttgtcatggcgtcatggactgggaacacgacattaagcttgcttaagtcacatggaaaatggttctggaaatggataaggttttagtataggtacagcctttaggaaatgtatgccttttaatttattatgtgcatgggtatacccatgtttcatgtcattactttttaaaggaagaagtgctacgatgctgccacatgttatttagcatgtcaatgttaagtttgtacgtcagtagtgcaggcagtcaggcactaaaaagaatgtagttctccatgatagatgtgtttattgtctgagtacatggttgactttaaattttatcatttatgt

SEQ ID NO: 123184 - DNA, 475 bp, Zea Mays
gggaagattgcttccctgatggatcattgcatgccttacaagatggatgtcctatctgatgatgattgttggattttgtttaagagaagagcctttgttcctggaagggatgatcctaggatagaagtgattggaagggatatagtgaagaaatgcaatggtgtgcctttgtctgcacaagctttgggtttcatgatgcggttcaaggaaggggtggctgcatgggaagcagtgagggacagtgaaatatgggagatagaagatcagaatattatgccatctttgaagcttagttattgtctcatgccttgtcacctgaagttgtgctttgcatactgtgtagttttctccaaaggagctgccatagacaaggacatgctgatacagcagtggattgcacttggattcattcaacccactagtggaagcttgacacatgtaaagcgcggtgaggagtacatccgtgaactagtga

SEQ ID NO: 123185 - DNA, 430 bp, Zea Mays
ggtaaaagatctagcgggggtggatttgttcgcgggcaggagcttatcagttgtactcgattgtcgtgcgacgtggccgagcggtcgatgttgtcgtgggacaccggcgatctcaattgtgccatgctgtggtcctttcaccaggtaactataattgtggcaagcctagagttactatccttgagttgttatgccaacgagcgccacgacaaactcaccagtgcaaactcttgtcaccgccatgatccaaatctccttcaaattcgggacaaccgtggccagcctctataaattgagtgcttcccttgctctgcccccttatcacgaacccaatgcaactctaaccacggcctgccatccaccatagcccgagcaattgcgatttcccccaaataagttctctgcgccaccgcgaacaccacctccgtcg

SEQ ID NO: 123186 - DNA, 477 bp, Zea Mays
tgattgatgaaggagggagtacaggcgcacatatttatagagggacagaggggtaggagatctcaggtttatagaaacagtaccctgagatctcctggaatggaaggaaactatctctgcccctaaatgggaggattgaatccatatcttcctatatgcggccgtagcttcctatatgcggctgtagctagaaaggcaagaatgcctgcacatgtatggtagggtatcctgcgcttatatggcaggagacacatgtctgatatatcagctaacagttatcacaagatagatataaatatgaacataaatacagtgggataacaatcaaattgaacaatcaagggaatgggcacaatgatttatcttgatccggtcaagtgaatgatcacaatgatctatcatcgatgtttagttacttgtcggcaaccaatgtccttgtggtgacaagtctaaagtagttgtttcatgtgctaattg

SEQ ID NO: 123187 - DNA, 511 bp, Zea Mays
caggagcaaagttgggagttgttcctggtatggcagctcctggaagggagcaagcgacggaggtagggagctggaggtttgggggatgagggcgagcgggcggcggcggcaccggagatgggagaggtgggaagggataggaacaggaacgctcaaaggtgaattgtatgaagaattcgggtctgtgagttatccgtaccgagttgttctatgttctaatattaaatattactagcaacacatattaaatgttgccatatcctagttaatcaatacattccgctagcaatgcatattaagtgttgtcatattctatttaaataacagatggtgctagcaacatatattaagcattgccactactgtaataacttgacggatgttgcttgcaacgcatattaagcgttgcccgctaatttcttacaacgcataaaaccatgtgttgctgcagatacgttgctataggggggtttgtgttgttgtgaggaagagactccttcaacaccttctg

SEQ ID NO: 123188 - DNA, 372 bp, Zea Mays
cttatattcaaagggcagggagaggggctgggcatggttacgtaccaattcccttaggtagacaatcggggaagttcgaacgtagaaattcctcagtctcccaagtagcctcttcctctgagtgattactccattggatcttatacatcttgattgatttagccagagttgatctttctttgcaatctagaagtctagagatttaaagctcttaggtaagtaatggaaaaggaaatgtgtcacaactttatttcctattttctctcacaaggcagggggtgggtgtgtgagtctctactagttttacaaatttttttacaaaacttagggtctacaagaagctaaaacctcaggaaaaatgttgttctaaat

SEQ ID NO: 123189 - DNA, 378 bp, Zea Mays
tgagcgagttggacatctaactacgactcacgagatctgatccaccctcgagagattccatgagggcaatgatcatgtaaagaccaaactctttgagacgtattggcgagagtatgagaactttgttcagtcggctagacacaccattgacatgatgttttcttggttctagtccatcgtgaaaaagatgtgtgctaacaaggcatagcttccctatggcgataatgagagagcgttgaaattattacaagctctagatcagagggtttgggaggtgaaggtctcgacgatcatcgagtcgcccaactatgagacactcaccgtggatgagcttttcaacaagctcaagtacatcgagattgaccaccaaactcggac

SEQ ID NO: 123190 - DNA, 409 bp, Zea Mays
ctttgattcacatgaaataatggttcttggtttggctttttaaagagaaaccctaggtgacactggggtgtcacaaacaccgtcataatgtcaaaatagcgaaaaaacgtgtgttagagcagtaccattttggtgagtcatggcttcagattactattccagcaaaggcagatgatgggcgtatcataatgtcaaatatctcatgcgacgactagtatacaagcagaaactaggtgtaaccttgcaaacgagcaccatgagcctttagatggagatccaaccgtagaaaaagcttttacacttaaatccctccaccagcacacaaaccattacgaaaccctccctgctttccttacctgctacactggcaccacccttcccctccgtagaaaaagcttttgcacttaaa

SEQ ID NO: 123191 - DNA, 479 bp, Zea Mays
cagctataatcctgtcaattttcgacattgtggttccaaaagggcctccgctatttttagctttagtggccatttcatcgcctttggcatcggcggggcatcaattttctctgtcacgaccggaggtggggtcttatggatggccctcatcacaaccatcatacgttgtttcttctgaccaccctcattctctccggtcgccaaaaagtcttcttctcgtcttcaacacctttttcaagccccttatcctttgactgcaataagctagtcagatctaaccccaaatgacttagcatagcaaacaggaagggttcagtcattaccttcagaattctgttacgccgatagaagaggacgaagaggttccagcaatcttctctggtgaatcttgcaccttcgtcccgataggggccagggttgaagattttcgctttttgggagccaaaagcttcgactgcgctgaaattttctgttttttc

SEQ ID NO: 123192 - DNA, 323 bp, Zea Mays
gtggaaacccatgaatcatgatgcagacaataaggctatgaatgttttgttctcatgtctctcactctatgaattcgatagagttggacaccttggtacgaatcatgagatctagactaacttagagaaattacatgtgggtaacgattatgtcaaaaccagactctttaaaacctatcgtcgagagtacgagaactttgtacagctggctaaagaaaccattaattccatgaggctaggaagacagttcgtcgctgccgcctcgtctgtactatagaaggtggcatcagtgtgtcagtgtgtgttttcagtatcctgtaatg

SEQ ID NO: 123193 - DNA, 537 bp, Zea Mays
ttctcctgtcgtcatgagcccttcgtcacatgtcagcgtgcataggcatacactcagtatggtgcgctgtttcgtccttccaatgtatgtgccactgtagagaccccggtgcccattcgacgtgttgtgtgtatgttcgaacgtggcttggtggtgacgcatcctgtcgtaactgatatggtggatcagttgtgttggactcagatctttggctcgccgggttgctcgacggtgggttggtcagccggagctgattggtggagagttggtcattggagttggtcatcgaggagttggtcagccggtccgcctcacggagttggtcaacggagttggtcattggagttggttattgaagagttggtcaaccggtccacctcgtagagttggtcggtggagttggttatcagagagttggtgagctggtccgcctcgtagacttggtcgacagagttggttatcggagagttggtcagccggcccgcctcgcagagttggtcgacagagttggttatcggagagttggtcagccggtcc

SEQ ID NO: 123194 - DNA, 409 bp, Zea Mays
gtaattagctatgattttcattatcaagtatttgtgttggggtgctgtctaatctcgaaggttacaatgatatgaagggttcttttcttgttcactatactatgtatatttattatgaatttatgattccactgcttttgaaatcaccctgccatctcccctgtatgactttttggagtgagtgatggcaataaagctctatttggcctctacttaatttataaatggttgcattcactagataaaaggtttagtaatatggtgttatgtatccccaaccatgccaattagacattattagtaatatgatataactatataagctgcatagacatgattcctgctgatatgtcttgctgataggattggctcagctctctctatatctgacaaaatatggtttcttaca

SEQ ID NO: 123195 - DNA, 533 bp, Zea Mays
gtcggacgtaggttcttaacgcgtgcagcacttcatgcagcaggttggggaagtgccccgtctcgaacattgatatgtaatgttcgacgacaggcccaaaccccatgaagtagtcctgctaggcgtagttggcctcctcgttgacatgttcctcgtcatcttcgtcgtcgtcgtcatcctcatcatcatcgtccccagagtcgtctggatcgtcacctccaggtgcaggagcttgaacggctggtgcaggcggtgctgaggttggtgacctagctgcgaaggccagtgactctaccaatggggtgggtgttggcagaaattcctccgagatgtcttccaggatgacttcatgctccacccgaatgcgagggagatccaccagaacttcctcaaccaccactgggtagacaaggatttgacgtggcggaggggcatagctagtgttaacccgggtggtttgaagggtacaaaccatctacaagagaaagtgtcaactcagttgaattttaaagaggtaaggctgataaaataat

SEQ ID NO: 123196 - DNA, 356 bp, Zea Mays
cacaattccccgtttctagcgatcgattccgagccgagtgcccaaatttcattttcttcgcctaaaatcaaaccaagtgcacacttcactcatatttacccacataaacctattcgtgaagtatcggcttaattccacgtcgtttcatgcctcatttccaatttcaaacctcctatggcactatttcacgttcaaacgctgttttcgcgaagtttgacctctcgattgccatatctctcgatttctgtgccataacaccctatgtatgtatttattcacatacttatgactatgtgactaatacgtgctcacctcttctatcatttcagtgacctcgcctggccgtgagccatctc

SEQ ID NO: 123197 - DNA, 388 bp, Zea Mays
taagaagttgcagtttgtggatgaaggagttcaggtgaaattgattggtgatgaagtgcaagaagttacttctgtgcctagggtatctgtgttgcaggtacagaaatggattaagggcaatgatgtgtgggcatttgtgctattggaatcggctgctgctaacaaggaaggttctcaacattctgatatccaacttctagttgaggagttcagtgatatatttgccacacctactcaacttcctcctgttagggtttatgatcatcacatatcacgtgttactggagctgttccagtcaactctaaaccctacaggtattccccattgcataagaatgagattgagaaacaggtggttgcattattagaggctggatttattactcct

SEQ ID NO: 123198 - DNA, 316 bp, Zea Mays
tgggtgcacttaaagacaagttttatcttgcattcttccctatatctcgtatcgtctctctgccaagggcagccctcggctttgagcaacacaagaaggagtctacaggtgtagcctaggccaagtttttagttttaatacactccggcccagacttatctttacctgatagcgtgttattgcaactcttttgtttgggtctcaacatagaagttgcccaatacctcaacatggccatcggacggtcatttacacacaaacctatgacagaacaaaagaaaatccttgatcacattctagaaaagcaaacttcttc

SEQ ID NO: 123199 - DNA, 426 bp, Zea Mays
ctctccaactcttctaaagatcaggaatggtccaatataacgaggggacaatttgcccttgactttaaatctcctcattccacgaagtggtgacaccttgagatacacataatctccttcttcgaattccagtggtctccttctattatcagcatagctcttttgtctggtttgagctatcctcaaattctctcgaattatacggacttgttcttctgcctcttgaataagttcaggtccaaagaactgtcttcccctagtctaatccaatgtagaggagtcatgcacttcctgccatatagagtctcgaacggtgacatattcagactggcctggtaactattattatatgagaactcagcataaggtagactcttgtcccaactactaccatgctgaagggcacaagctctcaacatgtcctca

SEQ ID NO: 123200 - DNA, 830 bp, Zea Mays
ctattactcaagagccttcgcatatgcaaggttgaggcacaccgtaagccaagggacccttcacacccacaaggttgaggcacagcgtaaaccaagggacccttcatacccaggaagctccaaaacatggtcgcgaacgtcctttatcgcaaacccaaatccacaatattcaacagctcgaacacacccatcacaattatgaccaaaattactagtcatcaagaggtgatagaccacccaggagcaggggacttggatgtggtccacctcgcaagtacaagccctactgcatttttcttgactagtcactcaaccagagactgacgcgcatggaaaaagggatctcccagagcagccagcgaaggccatagcccacatattccaaccacaattccaacactctcagcaagaagcatacaaccattaccaacagtaccaaccaaattaccaaccactgccatcacacctagaaaggctacaactaccacccccctccgcatccaaaccaccaaagacagttaccccctccccaccaaaggaagaagagtgctaccctcagctactggtccatgacataataaatgtaattaacggaagctccaatatagacttcgacacgaaaagacaaagaagagagtactatcgaagtgtcaaccatgtcgctgccaacggggcagtcgtctagaccaagtggttgcatatccccctttttgaaacgagcgatgccagcctcctcaatgccccacacaccgatgccattgtcatcagctgcaacatgacaggatgggaaatttgcaaggccctcgtcgataacggcagtcagaccgaca

SEQ ID NO: 123201 - DNA, 480 bp, Zea Mays
gtcggtgggtcagaaccttcacttttttgcccttcggcacaactgtggtggccgaagcggcagtctttctctttttttccttgccctcgtagcgggtagcgataatcagggtatacgaagccaatcgcatcaaataccctgttcaatcttttcttcccccgacccccaaaggctgtggatagggcatcatcttcggcccgggaatatgtcccaagcagctcgtcactggtagcttcaatacatttcaaccagtcatcatttggctcatcaaacttctccctaaatctgaaggtatactttaatcgaaccagaccaccttcactggattcagcaacagtatcctttggcatttcccaattctccacaagtggccataccctgaaggctatatgctcttgaattaaatcccttgtgccaatgaaggcacacacagtactaaaggccttctgacatgcttcaacattgtcatcaatatccacc

SEQ ID NO: 123202 - DNA, 440 bp, Zea Mays
ggcttgttttatacagcgaggatcatgaattagtggtcgataattccacatatgttcgggttggtgcaatgttaacacctacattgcctccatggaaaactggcaataacagcacgcaaccgacaaccacgcaaacaatggagcaactgctgaccaagctaaagaacagaggaacaaaggcagctggtttgggtgatcgattcattaaacgattaccagctggttccaaagatcatccagttttggcacgaactgaatactttagcacaccagcgcagcttgcatttaccttaaaaaacaattgcgctattttgctattcccaaataccaaatgcagaacccaagaatggttgtttctccatcctcctacaaaagaaaaggcaaaagaaaagggaaaggaaaaggaggagggaagacaacagccacaggcccaccacgag

SEQ ID NO: 123203 - DNA, 869 bp, Zea Mays
ctgccaagaacactaccccacttaaaagaatcctgacttgggagcatttgaggtggcataaaaggtctgaccctggggttcgggtgaccaagggaatttctatatgtgcagtgggaatgccatgcttttccacaaaaccagtggctatgaatgaatgagatgctcctgaatcaaaaagtacagcagcgggagtaaattcaactaggaactcaccgagcactactcccggggcttgctgagcctcttgagcgtcgacgtggtttactcgtgccctgccatgatactgggtcttgcttagctggccgttggaggatggtgccttggaggtgggtgctagggcactcttggggccattcaccaagttggagtaggtaggcacgaaagtcttcaaccgaggacaattattcttgtagtgaccagggtctccacagtgccaataggcattggctggaggttggttgcttgcaacggagggggcctggagggaacaaagaccctgctgactgaaacgtgacggagtggacccgactggcttgttgaagcttggtcccttgggtggaaacccaaaagatcgaactctctggtgcctgtcctactgctgagctcggaggacctgaaacttcctcttgaggtgacccttttcttcttctctagccctttccacttgtatggccttgtttgagaggtgcgagaagctgataaaatcttggctgacgaggatagtcttgagttctggtcttagccctttcaagaaacaagccatctttttggcttctgtgctgacatcatcaggcgcacatcgatccaattctgtgaacttgtggacgtattcactgacagatctccctccttgagttaattcccgaaat

SEQ ID NO: 123204 - DNA, 423 bp, Zea Mays
tagaaagatgccgccacgcacaaggcttacggcacgcaagtcaactggaccaattggagtgcctcggcatcaactggcccctcgacatgaaagcagcagcagtgggagtaatgaccccataggagatcttgaagctcgagtgagtcgacttcaagcagcgctgcaacacaggaccgatgcttgggtcgcagacggagatagaatcaatgaactaagaagggacatccgtcacctgcaggatcagcttgctgatcgagacttagcacttgactgggcagtacagtctcgtttgctggcatgtgctaaggaagcaagggctcaggcccgaataaaggaacttagctcaactgtcgacaacctgcaggtgtattgcaatacgttgcatgaggaagtccatgtgttgtactcgcaattacaccctag

SEQ ID NO: 123205 - DNA, 297 bp, Zea Mays
gttcaaataaaaatgtctttgttgcattcgaggacatgtggttaatgatgaaccttcagagactcgactgcaacttataaccatatgtgtgttgtaagtgtcactcatactccacatatatgtgttattattagtgagttgtataaattttcaatatctgacatgcacgtgtgcgttgcagaatgcaacatgatcagcaggagatcctttatggtaccaatctcaatgctagtgccagtaaaagggttgggtatctcaacctaataaagatatgcgaggatagccacacttttagaa

SEQ ID NO: 123206 - DNA, 636 bp, Zea Mays
aagcgtgtcaaataatataatcaaggacttcggaagacgcttcgggagcaggagtggcagtcttttcaggcaaaatctgttctatacccccttcttctgctgccttttctccaatctccgatgatttctccttggcgggcactgaaggcccggcttcggcgtcagcctggctcgatatagcttcggtttcggtcagctttgtctcggtttcaatctgtattttcgaagccttggtaatttttcctggagtagagcttgaagtttttatcgtctctagcacatctaatacattaatcatcctttttctcttgggggtcgccgccagatctttctgtgtcttcggtgcctccgcttctgccgaaaggcttagagcttctgatgttttcgttccttcggctatcggttcttcaattttgtcagccttcggcattgcagccgactcttcaatcttctgcgtaagggcaggtccattggcttcaatagccgaagaggtttcaccgccagattcaggcactatggccggttcaatgtagcgtggtcggtgagtaagaaccttcacctttttcctcttcggcgcaggctcgcttgaggcggctgaagcaacatccttctcagaagctgcaccttttcttttct

SEQ ID NO: 123207 - DNA, 465 bp, Zea Mays
gctgaccgcgacgagctcacacacacggttgttcttgaccgatttgtgggaaatcccaaattggtgagctctggtggactatttgaggcacgagttggtgtattgggtgcgtgactacctagtggagccaatggcacactcaatttatagggcctgagggcggtggcccgtgaatttgagatggcgcggtggcggccaaagagaggggagagcactgtcgcaaggaattggtggctttcacggtggcgagctcaccggcgatcaacggacatgcgtaatacgagttactgcgacgtggtaaggcacctaggcacgtggcgcgcggttgataggtggccaactccagcgatcttatatgaaccggccgtgagtcaggcggacacggcggccggggttgaacagtggcctaagttcatcctcaaggcgatatttactaccccgagcaactatcagtactttgttgag

SEQ ID NO: 123208 - DNA, 352 bp, Zea Mays
cattgtcgcccttcgtccccctccccatgggcgacaaccttcttccccctgaagagcaggcatgccaggagaaagaggaggccgacctccttcaagcctggattgccctggaaaatcagttcctcgggaactaggagacgcaggctcttcatcttaacgcccagttctgcaacttcattcaaggagatctatcgatcagacagtactgccgcaagatgaaaggcaacttcgttcaaggagatctatcgatcagagagtactaccgtaagatgaaaggctttttctgatgctcttgctgatctcaacactccggtcaatgatcggatccttgtccttgcacttctccatggcc

SEQ ID NO: 123209 - DNA, 423 bp, Zea Mays
ccccttgaggaaaggaaaaaagaggaaaactgccgcttcggccaccaccgctgtgccgaagggcaagaaaatgaaggttttgacgcaccggcctcgatatattgaaacggtcgtagtacctgaatttgatgagagcacctcctccactgccgaagcagaacaagccgctcccgccgctcggagcgctgaagggtctattgtagtgtcgaaggtgcctacagtcgggccaaccgaagccaaaggtgatgcggccaaagagccaaaattggaaaaaacagtgataatgccagaaattatgagcccaccagtagagacagaattgtcgaaagtgctaaaggctcctgccgcaactcccaagagaaggaggatggccagcgtgctagatgctgtcatggagaccacaaaagccttgacccctgctcc

SEQ ID NO: 123210 - DNA, 544 bp, Zea Mays
gtgaccttcaagaatctgggggtcttcatctctcttgggttgaactgggttgtatgaggcgggctcttggatccgcagggctctacgttggttgtgggtgaccaagtaggcctccatcaacttctggacgtgctcatccttggcctgcttcagggcttcaacagcaatgacttcacaactttccaatgtagttgcacgggcttgagctgtggtgagatccacatggagcttacggttgtgcttctctgcatcttctgctcgggcaatcatctgacggtggtgccgagccaagaaatcatactgggcatctagggtgagcaggtatgcagtgaggtacacgactgaggggtcgtcctcaagcagctgctgcccttccaatgcacgcatcctggccatccagactggacgatctctctaaaagggcggaaagaatctgagcggggtgtcggccacttcttcttcatagatctgacacagggcccttaatgccttgcgagcgacaacttggcaggtgtctttgaatctgtgcccagcagcagtgaca

SEQ ID NO: 123211 - DNA, 338 bp, Zea Mays
gtgcctgctaccttcaaatgactggccttgactctctggcaagtgtcgcattcagatatatacttagcaattttccttttcattctggtccaccagtacaaggatctgagatcatgatacatgttgttactgctggggtgcatggaaaatttggaaaggtgagcctcatccattattttctttctgagctcggggttcttaggaacaaccaatcggtctccaaaccatataattcctttgttgtcctgacggaagcatttgtatttgtccaccttttgttcgatcatttccttaatgacttgaacacccttgtcaccaatttgtgccatgattatttg

SEQ ID NO: 123212 - DNA, 819 bp, Zea Mays
gtaaatcttcagagacaatatatttaattatttctttgcgtgctgcctgtgggttgtaaacccatgtacttacagtgtcgtcggccgcaaagttgagttgagtttgaacacctcctccttgagtttgtcctagccttgccaagcaggctttgtagtgtcgattcaaacgtccagtgccaccagttggagctgcagtcaactcagatttacaatagttacacatagcaacataacgagttataccgttctcaacagttttttcttctgcatatgcttccaacactctgctttagaaattccaccacttggtgctattggtacattgttatcagcaggtccatctgctacatccccatgaccatgaacaggctccatatcagtagttggggttgagacattgccaaccaatacaacatcttcaaacaactcatgttcaccatctatatcacgatcatccatgccaaaatctcccatgcttggggatagttggcgagggtcgatgtaggcatcatcacgactaggatttggttgaatggacctggattctgcacaacgtttccttgctgctggttttttctttcttatcatactgtatggtgctcagatcagggtgatttggctcggagttgggctctggttttaggtgttgtgggataaataaatgctgaatttatatgaactttgggcaccaactagctacagttcgatgaatgtatttatatccaatagataacatcatttaattatagcatcaacaaaagcaagaagaggaccttaggaagtggatcaacgtacttggatttcttgaaaacatagaac

SEQ ID NO: 123213 - DNA, 387 bp, Zea Mays
atgatgtgggaacaatagcattaccaatattgctaatagtcatacctataccattggcagcaatgatctgatccgtgacggggtacttgtcatgcatcgtcaaacgatcgagatctccagtgatatgatccgtcgctccggtgtccgtgtaccaaggaacattggagccattttgatgagcgacagaattcgccgagcgctgatccggcacagttctcatcgaacatgtaccagcaatttagggccgtatggccaactcttgagcaaacttggcatcgtggccttgaggaggtatctgcatctgtagcgccagaagaaatgttgcctcgcccggacgactagaaaccaccccgagagggacccctgccgcggcctcggccacgagag

SEQ ID NO: 123214 - DNA, 746 bp, Zea Mays
gaggagagtgccttggaggcaggtgccgaggtattcttggggccattcaccgagttagagtaggtaggtcctggtgctttcaactgggggcagttattcttgaagtgactggggtctccgcagtgccaacaggcatttgctggtggttggttgcttgtgaccgagagggcctgaaaggagctctgactctgtcggctgaaacgtgacggagtgggtctagctggtctattgaagcttggtcccttgggtggaaacccgaaggatcgagctctctggtgccggtcttgctgctgagctcggagaacttggaatttcctcttgaggtgacctttttcttcttcctttgccctttccacttgtatggctttattggagaggtgcgagaagctgaggaaatcttggctggcaaggatggtcttgagttctggtcttagtcctttcagaaaacgggccatcctcttggcttctgggctgacatcgtcaggcgcgcagcgagccaattctgtgaatttgtgcacatactcactgacagatcctcctccttgagttagttaccaaaattcatcttccttgagctgaacgatcccctagggtacatggtgctcacggaaagcagtttcaaattctgcccaggtagcatctctgacggtagtgctgaaggtatcccaccatgctagggccatcccggaaagttgatgagcagccaattgaacacgttgattttctgggcacccgatggcttctaa

SEQ ID NO: 123215 - DNA, 503 bp, Zea Mays
taggggacctcaccagctggattaccagaggaagaaggtttgctcacaccagtagatatagccagaatgttagcaacgatgtcctcaagcactagaacaccaggtcttttcatcaggattcgcccagcactaacaactttgtccatcgctttgtcacacattgctttcatgacaacacggtcatcctctaaggccttaatgttgggacaagcaatttccaactcctgcgagacaagtttcttcgaggcgcgcaactccttgatgacaaaatcttttgaagatagtagcttattaggtcatgaaactccagtctgggaggccctcaactcatccctatgatggtcaagctctgacatagtaaagcgatgactcctctccaagatagtaatggaattactggcatcgcggtacagtctatccagactatcacgagaatcaagaagggttagcctctcctcctactggcaagaagagcactgagcatcgaagtaaaggcgtgaaac

SEQ ID NO: 123216 - DNA, 657 bp, Zea Mays
tgccattgcactgttgtgctgttaaaaaattcaaccatagccgaagctttttcgctgcattctcgagcgaaccatcactttgaattagcttcgtcaaaagagggagcttcgtcaaaactgtaaaaaacatcatcttcgtaaaaatagcaaaagattcaccattagatggctagagtacactcgactgcgagggtgacccgtgaaggagaagagactgaggctatcgagacaactccgatttccgaagtgatgagacaatcggggttagttgtgatggagggagccattgaacaaggtgcacctgctgtcgaagctgaacaagctgatgttgaggaagaaaatgctgatgaagaagaagaagaatatatcattctgatcccataaaaacccagccacttggattttgaaaaatctactgtgtctgaagcagatatgcccatgatgataaaactgggctacttcggggaggctgagaagaagcttattcgttttgccggagaagaaaccactccgaagctgaaggatgacgaagtagtggtattcaaaagctttttcagggcaggattgcggtttcccttgaacgagatgattggagaagttttggataattttgtgatttttcttcagtagctgactcctaacgccatcgttaggctc

SEQ ID NO: 123217 - DNA, 811 bp, Zea Mays
ctcaaattcagaaaagggcagggactctggcgcaaataaatcccagacacaggcgaccctgacataggactgcgggttcaatctaaaataacaaggggtctcttttgtaagattagcgccgcaaaagggtattctctattatcgtccgtaggatctagatcttgtggcttggattagattgcccactcttcgaaccggtacgcgatacccgccctcggattcgcaatacacgaccaggatttaattacgcaaatacaactcggacccctcgatcccgatcgaacggtctagcacactttccaccctattagcgcacgggatctaatctaagccgtcctagggcatcaacggtcacgacccatctccctaccccgacgctgccagggcagagccaccggaatcccctcggccgtggagctcaccggtgcacccaaagtcagcgacccagacctctaagttcaaatcgggcaaagccacgcgaaggagatggaaaaatagagctgtgaagtggttaatcacctcggtacgaccagtcgagaccccagcccacagagcagtgcgatggcgtggcggtgctgcaattccggtgaggaattaccatcaatcgagtggtcccttcttgtcgcgaagacgaccgacaacccctggaagacgaagcatagctccctgccccagcccaaggaacacgacgcggacgccaacgagaattcacagtggcggcggaaaacctccgttcccaggcgaggcgcgtatggcgacagtttataggaagggaaaaacaaagggtgacgacgtacgcatccatatatag

SEQ ID NO: 123218 - DNA, 557 bp, Zea Mays
cgccaacagcttcggcggcctcaggcacctccatcgtgtggagcagtgaggagagggagagagattaggaatgtcctgtgcggttcttcctcaagcgcgatgactaggggaatcgcctgcgcgtatgggtgctcgtcgtggcatcgttgatgggaaagatccttggcgtcaccgcaatttctccccggagttatgggcgccgccgcggatcgcacttccctatgggccgctgtcgtggtccctggctttctacggcatttggagtgttgggcacggtcattgctgttcgcctggtcttggggaagctagctccaccgccaatttgatgaacaaccggtggaaactcgggcaattgctcaccggagcatagccccgccgctcacctgcgcctcaccgtggtccggcctctgcgcgtcatttctgtcggtaggtattcctcccactaactccccataactctgtagtagtgtagcgcgcgtaaactcgagggagctcgacttgaatcatgaaatggtgtttctccgacgatggcgctgccgtgcagggactctgcgccg

SEQ ID NO: 123219 - DNA, 420 bp, Zea Mays
ttggaatgtcataatgttcttcatcctcttcctttcataggccctcaaagcctgtgtcatctctggatcaccaattgcttcacatccttcccagttgatatatctctgatgcaggataggttgatgcttcttgggaagaatcacagagttataaaaatcgacatgttgaagggtccagaaccgattaccatcgatcctagcatcatgaatacgtaatgtagggttttggaatcggatgtcctggagaagggcggaccctccgctggcagtgaaatctgtgagaagctcatttgtagatcgacgagcctctgccttgtgaagaaccaacccccggataatgggtgcgttggcagaggggatgtcaacttcatcatccttgcctctgttatcatcgctagttggctcccatgcctgtggatt

SEQ ID NO: 123220 - DNA, 572 bp, Zea Mays
acatttagcaattcagtgttcaacgaagtatagtaggaaataattcatccattaaatgtttagagaaccaaatttgtcaccacgaaaaagatattgatgggtcgaggtcgaggtcgagagtttgttgctgtggtggatgagtgaaggcacaatagtgaagaattatggacgttgggtggtgcgggtcggcgtggcggtgggttgggccgaactggagtagagttattgaattgtagatgggttgtggtggctccaatggcagataagaagaggaactacgggcaagagggacgtgtttgtgcgaaacacgtcgataatcggttggatgggcttgtgcaggtgatggacctctagttaaatgttattcatcgcctagggtgattgatcccatggtccataaactagatcagaagtctaattagaccagcccatcaagacaccaaccacaccagaaaattagctggaccagggcgcaccagccaaccagaagttaaaacgggccctcgtgcacttaatggggctgatccacctgccgctcgtggaacgaacaacaaattttcatccattcaagg

SEQ ID NO: 123221 - DNA, 365 bp, Zea Mays
cctgagtgtgccgtgctgatttcgagttgagtccgtcctaggtcagttgttgatcaagaacttgtatgccttggaaaatggaagctttattgataatgaaaccttctgcttacaaagtacaactcgtcctcaagagttttgaggcattgctaggggtagaatttccctgagctgctcaatattccatgaatttcccacttcggtgccatccatctgagtgagacgataggatcccggtcatgtgacctccatgatgatgaatggtccttcccacgatggtgatagtttgtgccgcccctcccccgttagcactcaacggagttccaaatctcccactacgaaggatcaatgttgcactgctttgt

SEQ ID NO: 123222 - DNA, 650 bp, Zea Mays
tctgtgcacgactaggagttagcatgtaggcatcaagagaggttcaaaccataatgtgtgtaataccctacgttatattgatactcattgattgatgaacacaaaggagaaacaaaccataagatcaaagactagtgagcatcaagactttctagttccccctcatcttatggtttgtggtgggagttctaatgtaatgttattaatccacccaaccttctaggtgaagagtgtggcatggtaagctttgttgcatctaactaaaccacttgggccatattaaattgaattccctaggctagagtcaaatatccttaaatgttgctcacactctccattttatagtccaaaggaagagaaaggttacacgaacctcggatcccaccagctaagacacaattatttgttttttatattattcttggagatgtactaaggtccatcccatggtcatggtgttgtatcagagacatccttctcgaggtgattgccatacctaccatagaggtaggtatgatgagttgtgtctctcggtgtcacggcctgtgccgcttgccacaagatagttggtagtcggtgttgtgttttatacttgattatatttcatggtacactctaagtgctcgtgtctgtctatagggtgaatgcac

SEQ ID NO: 123223 - DNA, 423 bp, Zea Mays
cgcgtggccgtcagattgaaaacctaggagttggtcaattttgcccctagcggagtgaatagactctatgtaaatagaggtagttcagaaaatagaaataaccctatcaaaatagaggggatggctggttagttcagttcctcttggctgccatttgtttagtctctcttgtttagaactcctagttttcctctctagatagtcacctcttgtgctaggagatctgcaacgattttgtctatcgactgtgtctgtgagttgtattgtttcatttgaggaagggttgccggataggcccacaactttcggttggcttcaatttcagtttgtgcccttgttgaagttttggagtcttttgctcttgagttcttctcgtcccttccctttgtgatcttgtgaataaccatcaagttcttgtctttc

SEQ ID NO: 123224 - DNA, 408 bp, Zea Mays
ctagagctgaccccagtgggtgtgttgttcgtattgttgatgaggatgaggaagaagaggaggaaatccccttaattcagaaaaacagtcgacgctacctagtcagtggggagagtagtgatatcccttctccagctttgtctcctctcattggtctgcaagagttgtccatagcaaattttgatcaggctctcgaggatatggttcctgaagatctgctgtccgagccaacagatggtggtatgatggacgtttgtactgacattctggatgtggggttagagttatcccgagcagcgtctcgtgcctcgtcgaccttggagtgcggtcttcagagtcaagaagctggtctaggttgctccattcccatggaggtgactgagaatccttcagccttagaggtggctg

SEQ ID NO: 123225 - DNA, 355 bp, Zea Mays
cctggtagcactaagaagtattaggatttgaagcaaaagtactagtggtacgagctgaaaagagatgttgctgcacatgtggctaagtgtgatgtgtgtcaaagagtcaaggccgaacatcaaagaccagctggactactgcacccgcttaagatacccgagtggaaatgggaataaattggcatggatttcattgttggactaccccacactcctgcagggtatgactctatttgggtgattgtggacagactgacgaaagtggcttacttcatacctgtgagaactaactacacgagagccaagctagcagaattgtatatgactcggatagtttgtctacatggggtgccta

SEQ ID NO: 123226 - DNA, 381 bp, Zea Mays
ttcgtacttgaggattgattagtccaaaccaccatgtctttgcttagacttggaatgaaagcgacgtcatcaggagacaactgcaaaaaattatattagcggttgtcatgttctatcagggaaaaccacaaatacacaaacccaagttactggtacacaatacactatctatctgatctgtctctcttgcgttgccatccggtagatcttaagccgctaaaccatctcgttttccagaatcaagcatcgtcatttatcccttgataacaattttgcccatgcggcagtgaaggacgacgggggaggtggtaacacggcacctggtccaagtggaccaagtcgtgcttccaacatttttctacgtcaaaaccgagtatgagc

SEQ ID NO: 123227 - DNA, 369 bp, Zea Mays
cacaacagccacttgtttcatttctcttccatgaacaaagcctataaatacagactcgtgctttaagccttgtgggaataataaactaatatgttttgttgctcttaacagaaattaccatcactaccagaatcgaagagattaacgactgaccaaaaaaccctgcaagcacaactaagtgtttcttacagggcacctgcccaaacatcgtaggctgcaaccagctataagcagacgatttggttcgttgacatctcaaaatctggtaatactaggtttttaaagtagtgcttctatcttcaatcaatgtagtattttggcatatggacacttattttctattttaagtcgcaggtgctaatgtctccg

SEQ ID NO: 123228 - DNA, 292 bp, Zea Mays
tgatgaggaaggaaccttgtggatgaccaatgaggtttttgatgtgggcgtaaaggtggtgggtgataaatcctccacccaggcaaacccatcaacctcaagtcatccaaggcttgaagaaggtcatcaaccccaaaggatgccaaccgtggtagaagatgaacatgaaagtgttgatggtgaagtgcctcttgatcaagtggatgatgaggaggagcaaattcaaagacaaccatcagtgccttatcctcgagtccaccataccattcaaagagaccatcatatggacaac

SEQ ID NO: 123229 - DNA, 484 bp, Zea Mays
tcaccaatcgaatccctaggtctttcttgtactacctaattatagtttgatggatacaacattcacatcaacatttgtaacaatagcatatctaccctctctaagaaaacacagacacgtatagatgggggacatatgggaacaacaatgaaggagacctgattgatcctataaatatgatacaaatcgatgtctctatcggacgactaaaacaaccattttttctgaccaaaaggtcatcccactaaatgaaccttagttgactcgatggactctcttggagagggtctgcatctgccctagcatgccatgtgcgcccaactgaccagatgacaaatttttttgtctaaccaacatgtcgtcccactaaatgaaccaagactgactcgacgaacttgattgggggcttaggggtttgcgttcatcctaacgcgccaagtgtgtcccaccatctagacgaccaaaccttctgtctggccaagag

SEQ ID NO: 123230 - DNA, 660 bp, Zea Mays
catggtgcacgagtcagctggctattgggaggggactggaattgtagaaaaagggaaaaaaagcataatattaatcataaaaaggagttgatggtaattaaaacactataaactaacctcgccttcaatgctggcagatgctgtggggaatcagtcacacttgggaatccatcatttgcaagatatcatcaacacttcggaatgccccacgtaaatcagaaggtgctgccagggggaagaataaaaaatataaataaataatgggaataatcaagatgagagaaaacattttttaagcatggaagacataggtaggcttacttttattcaaatttccctcttgtagatcaatgtcatgaccacacgatggggttctcataaaatctctgctgtcatcaagatctccgccactgcgatccaactggatttcttcactatcacctcctccagattggtcttccggtgcatttgaagtagttcctgatcctgcatacaaatttaaaaaagtgattgaaagcacagagtgatgtgtatgggcaaaattgcaacttgtatggtggatggttgcaacaataatattatgttgtatgcaacaaaaaatacctgctcctgctctagtgtcaattgcaacggggctccgtataatttcttcactatcac

SEQ ID NO: 123231 - DNA, 854 bp, Zea Mays
gaatgagaagctagattactagaacatggaaacttcatagcatgaactagattatccatagatgatgttaagctcaattttaactcataaaacaagcataaataatcctttgagattataggaataaatctaattcatgatttgaaaagcgataaatgtgaaagaatcatatccaatttgagcaagtagaaatacatcataaaacattggattgatttttcttttcatgttagattacacgcttccaaagagaaacttattctctacaagtgagactacttgggttacttaaataaaatcaatagtctcactattctagttatagagagagttttccttttataagtgtcctaaggatttgaatttcttgcataacaccttgttcttttaggaacttgaaatatctctctatatctagaaacatggcaataatagaataacttagcgaaaaacatgccatggttcttccaataatttaaagcatgtagattgccataggatgaaaatgaggagtatgcaatctaccatatgataggaaattcttcaaagaatggtaatataaatttaaaggcatttgaagtgcttcaatttttctatgtgactacacaagacacataagaaatgatattctaaaatacttgcacttaaaagataagtgttaccatcttttggctttcctccatgttgtaggccttgatttttgcacaggatatctcttcacttcctacaacatataatatcttcctcgagatgatatgagtttaagacatagtaatttgaaaaataaccttgggtcaatcacggatatagatcattgaagattgatagcttgagtttataagaattgaatggac

SEQ ID NO: 123232 - DNA, 499 bp, Zea Mays
ttgggtttccatgaacagtggatcaatatcattatgaagtgtatgactactgtttcttatcaaattaatatcaatggtaatttaactgatgccattcagccacaacgtgggctcagacagggggatccactatccccttatctttttctcctctgcgctgaaggtttttcagccttattccatgatgcggaagcgaagggtctgttggggggcatctgtatttgcaataatgcaccgagtgttaaccatttattatttgctgatgattctctacttctgatcaaagctgatgaacacagtgtgcatcacctgcaaaatattctttcactgtatgaggtttgctcggggcaaatgataaacaaggaaaagtcatgcatcatgtttagtaagaataccaagcagagtatcaggaaaggggtgatgaggaaattgaatataaagactgaagccatgaatgataaatatttgggactgccagtttatatggggagatctaaag

SEQ ID NO: 123233 - DNA, 893 bp, Zea Mays
ggacattgagcagcaatgtgcccgcgaccatggcacttatggcatacgatttctcttgtacgggtagaagaagtagcgactgaagcttcagttgggtctgatgtactagcagcagaccgctccttatttgcagggaatgaacctatagaagccgccatctttgatgtaccattggatggagaagacctagatgaatttccttgggatcgtcctccaccaaaagaagcactggattgctgtttgcgccacagaacaacattataatgacttgcataagattttccacgtgactcttgttgaatttttctctctgtacgcattgcttgatcaacgagatattgcaaggtacgacatgggaacatctcaacaaatccagaaatctcttcattgagtccgcctaaaaatcttgccatggttgactcaggatcttctttgattccagttcacactaacaacaacatctctttaaaatattcatcaatggatttctttccttgctttaataattgcaatcgattttgaagatcacgttgatagctagaaggaacaaatcgcctcttcatcactcgcttcatatcctcccatgtattaatatgtcttagtcccaatctaagttgatgttcttgtagttgattccaccaagtaagagcataaccagaaaacttgactgaggccaagttcactcggtgttgatctgaaaaattgtgaactctgaaaatttgatcacattgctcagcccaattaagatattcatctacactttctttcctagtaaatttagaaatatccaacttgactcggccaatattgtatggatcatttctatgacgacgcccatgataatggtctctattttcaaaatcagcatgttggtgatgatgtcgccgaccaaa

SEQ ID NO: 123234 - DNA, 389 bp, Zea Mays
cgggaggtctggtcaacgtgagggcgctctcgggggtgttctacggtggcgatgcgatgttcttgatgccctgctgcagtggtgttcaatcggtcgagccggtgagcttcactagctctagaggatgctaaaacatggctcatagggacacgatataacctgagaagggctagccatggcgaggtgtctcacagcgacgttttggctgattccggggaaatccagaattcaccagctatggttgttgatcgagagtgaggggtggtgcgcttggtgcgtaacgagagggtagagcaaggaggtgcatcaatttatagggatcgatcaccggtgccacgactttgagatgagattgaactctttggcggcgagaccttttactagtctag

SEQ ID NO: 123235 - DNA, 568 bp, Zea Mays
gctgctaggaaaataagccccttagcccctgccatctcccacaaccttcgctcttctccaacctgctccagaacagcagcaacactcggattgccgccctcgaagacacacactgattacagtgtttccataaggttcatgcaccaagcaaaacaagggagttaatccccaccttcatttgtccagctgccatttcacttattgtcctccaccagtccagcaaactatcattttctggttgaggggacagagtatgcagtccaaattgtctcaacaaaaggaaccagcactcccttgtgaaaacacaagagaccagtagatggtctattgtttcactttcttgttcacaaagagggcaactatcagggtgatccaatcctctttttgcaagacgatcagctgtccaacaccttttttgtgcaactaaccacagaaaaaaccgacatttaggaggcgcccaggttttctatatcctctcatacggttcaaaaggaagcgagccaatgaaaaccccctcgtaggcagatttcgctgaatattttccattggcagccagcctaaaaatgtg

SEQ ID NO: 123236 - DNA, 319 bp, Zea Mays
gcttctgggtcagtcaatggacctattaagaaggggctcaattctctcattgccttgggggcatggatcatttggaatcatcgaaacaaatgtatctttgatggctggacccccaatgtttctctagctcttaggttagctagggaagaaagattgatgtgggagatggctggggccaagggcctctcttacctggcggcctctatccctgaggcttagttctaggtttttttggatagttgtgtggtttctggtttgttttagatggaccttatcaggtttctgagttttcgacctccgtaaggaagtccttgtaccc

SEQ ID NO: 123237 - DNA, 553 bp, Zea Mays
tatggttcgaagaccgacttgttgttcccaaggatccagaattcagaaagaaatttttgaacgaggctcatctctccaaattttccatgcatgccggaagcaacaaaatgtatcatgaccttaggtccttgtattggtggaccaggatgaagagagaaattactaagtacgtatctaagtgcgacacttgctaaagaatcaaagcaagtcatttgaagataacaggtaccttacagccactccctataccatcttggaaatgggaggacattagcatggactttattatgggattgcccaacacctcccgacaccatgattccatatgggtcattgtggataggctaaccaagacagctcatttcttgccagtgcataccacccacagggcagaaaggtacgcagagatctatattgaccaaatagtgcgcttgcatggaataccaaggaccattatctcagatagaggaacaccattcgtagcacgtttctgggaacaactacagaagtcgcttagaacaaccgtgattagaagctcagcatatcatcctca

SEQ ID NO: 123238 - DNA, 440 bp, Zea Mays
gtgcgacaaggccatggataaggctgttcgcgccgggcggatcttgatgaggaggcctggctcgcggtgcctggagacattattgctgatgttgttgtcgcgcctgatgtcgtaagccgaccatcttcttccgctactcctgcagtcgaggcttcctgcaagaatgctccagcagaatgatttgcttgaaaaaaacacttgttcattgagttagtactttttagagaaaaagtgtggcatgagttcttgtgtgtatgtaattgtactatgtttggactgatcattctgttagcagggtgatgaaaacactcttgacaatgcgagcgtgttatttttcttcgaagcactcccgattcgagtaggctattttgctactagggtatagtgatcaccctcacttgtgtacgcaaaagcaagctgcaccgacttaagtgtttccg

SEQ ID NO: 123239 - DNA, 414 bp, Zea Mays
caacatgtcttccagaatctgatttactctttctgtctgaccatcggtttgaggatggtatgctgagctccttattacctaagttcccagtgactcttgcagctgctcccaaaaacgtgctacgaacggtgctcctctgtctgacacgatagtccttggtattccatgcaaacgcactatctggtcaatatagatttctgcatacttttctgccctgtgggtggtatgtactggcaagaaatgagctgtcttagttagcctgtccacaatgacccaaatagaatcatggtgtcaggaggtgttgggcaaacccacaataaaatccatgctgaggtcctcccatttccaagatggtatgagaagaggctgtaaggtacccgctaccttcaaatggctagccttgattctttggca

SEQ ID NO: 123240 - DNA, 369 bp, Zea Mays
ccggtaccgtgggaggcggagaccggactccgtgttcgagtgcaagccccagacctctaaccgttaccatttataaatactcccgctcggcttggtcgtcatcggtcgccgccggtggcttggtgagcgccatggagaggcgctgatcgctcgagaggtgggcactaggcaggtaggaaatcgagcggtgactttgtggacttagagagcgtggcgtgattgaggcgttaggcggacacgatggccgaatatatatagatgcacgcggcggatgcgggggtcggtaccgtgggaggcggagaccgaactccgtgttcgagtgcaagccccggacctctaaccgttaccatttataaatactcccgctcg

SEQ ID NO: 123241 - DNA, 438 bp, Zea Mays
ctgaacttgagaaaatttgtagatgttcaaacttcatttagacactgtttaaaaatagcaggaaccccagtattgaaaaatgtgatgtagatattcatttaaagctattttgcccaaaactgaggaaaaatcagaaaggcattagaaactaatgaacagtgaaggaaattatttttcctagtttgcttaagtagcaaggaacctaggaaaaataaagagacctttagtccagatcagttttaaattaaaatgttttatctagccttatttgaactgaaaattaattattagaattacaaaactatacccaaaatggataataaaaatccagtggacttataaccacgagaaccccactacaaaaatgatgaacacctcagcccaacatattaagtaaggaaaataaatatagaatgataaggaggtaatttccaaata

SEQ ID NO: 123242 - DNA, 429 bp, Zea Mays
ttgaaaatcggccgtggaggcctagtcatgttgtttttggaaactcatctattaagcaaggcagatcgaagcgatgaaaggcagatactttcgtgatatttctattgtgagggccggaggggagaatatcgttcctcttcctgaagctaatgaggtggcagttttcagaagcttcatgaagctggtcgtttcccactgcataagatgttggtcgaagttctgaaaatttttgaaatataccttcatcaacttatccccgaggctcttatcaaagtaggagttttcatatgggccatgaggagccaagggttagaaccagatgccaggtgcttctgtaatattcatgaattatcctatcagacgaaagtgactgggaaagaacaataccacaacaacttcggctgctacagcttcgtgccccgctctgag

SEQ ID NO: 123243 - DNA, 609 bp, Zea Mays
taccaatccaaatacttttctaaaaactagtcttcagaccattacccacaacagttttacaaaatttgtaaaaattatcatgcagactcaggattttttttcagaaatgagaatcaccttgtttttacttgatcaaaataaggggttttcccttaatatatttactggtaataattttttgccataagccattcgaagtttctatattccaaagccatttagacaataaggaatcattcataaaatcaagattcagaacacccaaacctccctgacttttgggagagcacaccgacaaccaatccactaaatgaaattttttggactgacgacccccttgccagagaagacgcctcctaagaatattaatttttttaataaccgacttaggggcaggataaatcgagagcatatataaaggaacattggataagcatctgtttaaaagagtaagtcttccccctagactcaggaatcttccctgccatccagcaagccctttttccaatttctcaatcatgggcacccaaagacttttatttatcttattattatcaattggcaccccaagatacttcataggaagactaccaataggacaagtgaaga

SEQ ID NO: 123244 - DNA, 504 bp, Zea Mays
gggatatcaattatatctgacgccaaaagattaaaagttggcttgttaaccaccttcacgtgagtacatcccgccttcataaacgcagcacccatcccgcaagaagctaccaaggcatagaaatctccgtgcccgcttataacttcgtcgagggcttcaacttcgttttcaatatgtttgaaggccctggggatgtctttgaccaatgtggtgatctcttcggtagtagctcggtttacacaccgggtggcaaaatccacgcacttgtttcgaaggtctttcaaagactcatgccgcttcgtatttttctcagcttcggcttcagcttttgcttgcagttcttttatctcttggtcgaagtgctctgattttttgttcaaatttttttgagtattgtcaagttcctcgcttaacttagtgttttgagattgtgcttccacgagggagccttcgaccgcttgcagcaagaaatccttcttctccagagaagcttcaagatctttt

SEQ ID NO: 123245 - DNA, 916 bp, Zea Mays
ggccgaggtggccgagagtcgagagagtccgtcgtggccagggtggccaagacggcggtgccaagtggaggtaggaacaatggaggcaagggcgtagggtgtggtaacatgggcggaggaaggtgggacgaggaggcaaatggaatataatgggccggagctatcgcatcgagcaaccacaacacgagtggtggaagatcccaaatggtgagcccccagggatcgaacttcatagaacaacggtcgtcggtggtgaagcgacgaaccgagagaaggttctggatgatgttggaggcaacaagaattgttgaggtacaaggaccaggaaagaccgtgtcacctactgaggtgacaggtagagtcgacccattaccgacaatgatggaggaagggaatgtggggctaggaggatgaggtaaagagacaactctggggtcagaagtggtatggaacgagtcgttggagtcggaaatccagtcggtgggtggaggcggtggcgatgatatagggaaggatgagagagcctgcgggggcacccccacagagccaccgtgaggagtgttggggtcggcagttgtgagcatgctgacatcaatcatggatggggaagaagacaaaggcctcgatcgtcatggagacaatcatgccgctaggaaacacacacaacttggtagtgtggtggctcgcctgagggtggagctcaacgcagtcacggagaacagggtttgtgacacgatcaaaggccacaaatgttccccagagaagatggccgatgtgaaggaagacacgcacacactagggaggcacgagaaccgaggtcgcgagatggggagttgctcgcaatcgcgggcggtgggaaggcaacagtgatcagctgtggctcactagaggcgcaggagcaggggttgcacctaag

SEQ ID NO: 123246 - DNA, 643 bp, Zea Mays
gtcccaatttttaccatagtgcagcacataggctcgcaacatgtctttgaggatttggttcactctttctgtctgaccatctgtctgcggatggtatgctgagcttcttattgcacgggtcccaagtgattcttggagctgctcccaaaagcgtgccacaaacagtgctcccctgtcagacacaatggtcttcgaaattccatgcaaatgcactatttgctcaatatagatttatgcgtacttctctgtcttatgggtggtatgtactggcaagaaatgcactgttttggtcaacctatccacaatgacccaaatagaatcatggtgccgggaggtattgggcaatcccatgataaaatccatgcaaatatcctcccatttctaagatggtatgcggaggggttgtaaggtgcctgctaccttcagatggctggccttgactctctggcaggtgtcgcatttggatatatacttagcaatttccctcttcattctagtccaccagtacaaagatctgaggtcatgatacatcttgttactgccggggtgcatggaaaatttttaaaggtgagcttcatccaatattttctttctaagctcggggttcttgggaacaacccattggtctccaaaccatagaatc

SEQ ID NO: 123247 - DNA, 329 bp, Zea Mays
gtccatctccactttcagtccatttaaccatgttcttaatttgttggcgacggcgatcaccagggctactatgctgcgcagcgcactggatagactgcagagtgcatggtaaccgatctgtagctgttctagtaggagcttggaacctggaaaggtcgcgccgcgtgttggttcttggcctaggtgggttgttttgataaggccagtccaattaggaatgcaaaggagccccgctccctatcagctcatcgtcttgtcatgcacaaaaccacgtgtttagcggattggaaagtaccacaccgactaatcaaccattagaaacgagggcg

SEQ ID NO: 123248 - DNA, 360 bp, Zea Mays
gcaatgtaggagtccttcagaggaacaacaggagcaggtagagtcgagcatggagcctgtgttgtacaagcacgtgcccgcctcctcacttcaattcgacggtgtctattggaggtggaagcctctctagggaaatgcaacaacgatctaggatctatgttttaccaggccacaacaaggaggagagcataagaatgagcgcgcgatgcatcataatcccaatatatgtacatgatacgtacgaggtcttagtggaaatgtcgaccaaatagggatgcactgttggttaagcaaggatgtctgagtggtcatgttcgatggagacaatacaagtatgtctgtggcaaccattggttaaga

SEQ ID NO: 123249 - DNA, 568 bp, Zea Mays
acccaaatggagaaaaccttaagcttaagaaaaatagtcataaaatgttactaagaagggtcttacattacattcacaccctcgaaataccaaaaaccctaaaaaggaccctggaaaaaccctaaccctaaacccctagggggctaagtgcaaaattagtgcacttttcattaaagtgcaaaaactatgaagctaaagcatcttaaatcatatggttcacaataatgaagatttgcaagctaaaccctgaattttggacctatttgcaaaaagaccctattttagttctaaccctaagtctgaaattcagtgatattggctcaactttggagctctatatcttccaaactattgagaatttaccataggtcaccacatcaatattatagaactatcaaaggtgaacaactttgcttaaggggttcaacatggttgtcatgaaaaatatgaagaaaaatgcacccaaagtcgggctgtcaggctgccttcagtctgaaaccagtctgacagtgtaaccgagccatctttggactaagattcaaccttgatcaagtgagaatttggcttg

SEQ ID NO: 123250 - DNA, 612 bp, Zea Mays
cctgagtcgaagcacatctactaagagcctaaggggatgaagcaagaaaccgaagtcacaaaagaaagtccaaggacttattgtaattttgatgtctgctttccctttcttttatttttttcgcaagaaacaccaagagaatatacccgtagatagtttgtatatgtaaatccgaggttacataatcgagtttaacaaaaatatggaaaaactccaaagtcattcctaagggaatgcagagctcaaatgaaacacctagtaaaggtggaaaatctccaaagtcgtttctaagggaatgcagagctcgaatgaaacacctagcaaaggtagaaaaactccaaagtcattcctaagggaatacatggctcgaaagaaacacctagtaaaggtggaaagactccaagtcgttcccaagggaatacagagccagattcaaaaaaccttcaaacgaaggcacatatgctttttcacctctaacaccatttgcatcatacattatgcatcatatcatcatccatcatcatagcctacataccattttaaagggcagagaaggaaaagtgtccttctctccttgcaatattgggcaaagaagggaaagtatccttcttg

SEQ ID NO: 123251 - DNA, 329 bp, Zea Mays
tgaataccatattttacccataggcatctagtggataccagaaatatcaattcacctagtgtatggcccatattcaaaaatcagaatgaggctcatcaactgaagccccaaaaaccctaagcctatcaactgaagctccacgtccccagttcgatccccactcctagccactagggaatgcacctcacaccccgccttagttcttgttcgttgcacaaggatataagaggattgaatgagattaaatccccttctattcaattttgactataaagggctttaaacaattgttgtagccaagagcaagggagaaagtgagccaagagcaa

SEQ ID NO: 123252 - DNA, 466 bp, Zea Mays
ggggtatgaaggttccatggctagaccacacatgcccctcttatctgaaatatccttctccattcttaggtatccattctcgccccaagtcgttccccatgagttcttcatcagccagtacttagtaccatcgctagtctttccataaccaatggcagcaatcccatggtctaagtcagtaccgcatgagccagtcatcacaccaccagagtagaatcgaaacgtcatgtctccaccgtccactgccaccgacacaggctggtttgccatggccttcatcaaggcagcctcatcatttgccggcacatcctcatagccctttatggttgcggcactatttgatccactattgcacttgccatctgcagcagtgtaaggatagctggactccgtggttaggccgccgttcttgatgatgaacttgaaagcatcgtccatcaaaccaccctcacaaccttgatcctcg

SEQ ID NO: 123253 - DNA, 412 bp, Zea Mays
gaagaaggtccacaccacatcccttgagaaggagaggaagaagaaacttcacaatgccagcactgggaagaacatgcaaagggatgatgacgaggagggggaggaatatgagtaactctgctactaaggtgaaaagcaaggtgtccagccaattatgtaaggagacgaatgagaaaaagatgaacaaaacataccaggggaagaagatgcagaatgctgacagcaagatgaaatatgacagtggagtaaagaaggttgggtactgaattccacagaaaaataaaaagttgatgcctcaccttagatgggatgcgtggaactgttgtgtctacgactggtcaccttcaaagcattaattctgcaaagataactatgaaccgggtaagtgcttgggaataagtggcattagaaa

SEQ ID NO: 123254 - DNA, 1039 bp, Zea Mays
cacagaaaatgagtgaattggcgatatagaggtcaaacgacgcgaaaacgtcgtttgaacgaggaatagtgccataggaggtttgaaattggaattgaagcatgaaatgacttggaatggagccgatactttatgaataggtttatgtgggtaaatatgagtgaagtgtgcgcttggtttgattttaggcgaagaaagtggaatttgggcactcggctcagaatcgatcgctagaaatggggatttgtggaaatttggagcctcggatatcggattagcgtgagattttgcgattatgttactggaggtatcatgaaggtgcctgaaaaatttgggatcgattggaccaaatttggctggtttgggcatttcaccgagcacgtggcgtgtagaggtttagggtttcggtgaaaaggctatttgaggtggtgaaaccctccctaaggagctaggaacctgcaggggtattcaaaaagcatataggaacctattcatgcacttggattcacaaatttccacaaggatttgaatcaagctcaagaggtggagagaagggggggtgtgaggcattgtctgcacacagagaaaaagaaaggcagagaggtgctaggtgctcactagagagaggggcaagcactagcaggagcagcaccaccgaagcacggcgtcgatgatcactgccggtgaacagagggggaaccgccaggagtgaagagtgctagagagcgaagagaaagagtgggcctctggcttggtctcaggctggaggccgttttttaaaacgagttatgggcgcaccggacagtctacagtgcctgtccagtgcacaccgaacagcgcacaataggtgtccgatggttcaccggacagcgctcggcagaaaggggatctgcgcgcgcatggccggtgcaccggacagtgcacagtgttgtgtccggtgcacaccagactgtccggtgagcccagacagagggaattttgaaatttttcaaattttctatctagtttttaaccaaaccaaatctcaacttataatcac

SEQ ID NO: 123255 - DNA, 526 bp, Zea Mays
agatgttgctaaagccaatctccaggagttccaagactgagttcgaggactaggcaagtgatcacgaccagttagttgcttgtggaggctcaagttatcttagtttatgtttccaagactgagttcaagcattgtgtaatggtatgacaattatgtagtcgttgtgtaggcagcgtgagcatgagcgcagatcaaaatatagacaagcgtgagcatgtgcggtgaaaagttgggcgctgtaatcataaaccattaaaccccatcggccaggatcgagggtcgacaggagttattaagtccccgcgtgagcggatgcgtgtgtcggagatattttggcgggcccacgctaatccccgtcggctaggctccacggcctatgggagttatttttatcccgtcggtgttttttgaggccgacgacaattattttatcttcgccggttatcatctgagccaacgagaattaacttaacttccatcgagtcttttatgggcgacgttatttaatttatcgcgtcggcttttt

SEQ ID NO: 123256 - DNA, 344 bp, Zea Mays
ggggggcagattccggtcgcgccgccactatttttggtcttggctacgggaggaggaagaagcgttgtgagccgctgatgtgtaaatggatggttcagatcaaaactgggcgcactacttcagcttggcgcgtggtggccgttagatcagcgtcatcggtccagatttggggaccctcataccgatttggtggattcgatcgttgtcgtagatcttctatccgagggttctgggcagatcaggcaaacataaaatcgggatcttaatccgatggcctgatgtgcgtaccagttcgcagggctcagatttaatctgagcgcttaaactaggatcggacgaccgaa

SEQ ID NO: 123257 - DNA, 628 bp, Zea Mays
gaacggacctgtagacgtctggccacggcgagctcattcatggcggcgcggagaactgaattgggggaaatgagaaattgaggggctctagtggatgatgtgaggcaaggactagtgcgttggatgcgtaaatacctagcggaacacacgggggcagcaatttatagagttctatggcggtggcgtccaatttgaaggaagagtggtggcggccggaaagatgagaagtcactggtgcaagtgcaatcgtggcttttaccggggcagtggcttaggcgatgaacaagctacctagagcggtctattgcgacgtggtaaggcgtcgaggcacatagcctggccggataacggcgaacttcggtgatgctagcgcgattaaccatggcgggacacgacggccggtccggttagagaccggattcaccccacagtggatattttcatcacgccccgacgttatctactcttcccgtggcacgaatctcccaggcgagcgcgaattgtggcggcggatcactggcgtcgagcacacggcaccggagatctttatggtcattgtaccatggcgatcatgttcagtcgttctgacagcgcgatttgaggagctttgttctccattttccatgtg

SEQ ID NO: 123258 - DNA, 1522 bp, Zea Mays
caaacacccttgacttaatctggtagtttaaatatccaagtaaacccataaaaagcacaatcttcaccaccaatagtttcactgttctatttcccaaactgaattgaatacaaccgagctctgtttgtttgtttgttcatttgttttttcacaacgacgaatcagaatttcaattcgttaacacgggtaatgttgatgaaatcaaagaatcagaagttgtaacgatttagtgcccaacctcaaatgtcattgttcatgtcattgtgtttcaccttcttgtgcatgtcatcgtcatcatcttcgtcatcatgcatgtacttcattcatccaaacactgataaccaattggattctttacgttgtccatgaataatatagtatgtttgatagagtcaattgatattatctgcttacaattttgttttctcagagttaattccaagcagtgtagactcccaagcattagggttgccttttcttcttctgcccataggtatggagcatctatttttacaaccttgtgttgcttctagtttattgtctttccatgaattatgtctagctttgaacttgggaaaattgcgggtatttgttgtatataaatgtagcactcatacaacttaatgagcacctaatggtaatagggtgtccacttaaatgaaaactatccacttaacaaggtatatattgtcggattcccttgcaagttaaagtgtataaccaaacttgacatgctgatgcatctttctgcatgttgattatgaacagcttgggtagactacagaaataccaaaaaagattgtcccctagcttctgaattcttcaatcatatagcctctaaaacaacaaagccaggggtagctaaataggatactaatcatgtaaacctgacagcatcaaaacaaggctaactttattagggtctgtcgacagagcagaactacaagaaaccaaaagtttggactctgaaatataagttgtttgttattccccataagaagtcgtaactatggaggtgaatgatttaaggtgaatgatttaatatattcttctaaagcagcagaacccagacccaaacatgtggcaagaaagaatggaaagatatcttacgtaaaatcactgcctttaggaaaaactgccaaccaaaggggtccttcctaaaaaataaacattagaataaaagttgaaggtaaactatacatagaaaatggttttttatttctcattacatgtatctaggtaaagaacatattccaaaatataaagaatggtgtctggggatcatttaaatgttgaacacacattagttgaataattgttgacatacatcatattctatagaactacgacatattgtttccaagtcattatttaacaaatactaaatattatataatggggaattttatggcacaaaaaataagaaataatgctacataacttgaacatacaagcagatatatagtggactaagaaattattccctttttctaaataaaataaatagtatgagataattaac

SEQ ID NO: 123259 - DNA, 273 bp, Zea Mays
caagatgaggagtagagggctcgggagctcgaacaagagatcacacttatgcaaggcgaaggccagtacaacctgtagcgcggaccgcccgtaccgccagcgcctctacagcagtacgtacaagccggagacccattcataccacagcgcggcccccttattccactcaccgcatctttccaggggatcaactacctcgacgagcgaagccccctggctccacaactccaagcatcaccctggcccaccaacttctcggctggtacctacccg

SEQ ID NO: 123260 - DNA, 781 bp, Zea Mays
actagaacaaatgaccagagagcttgaaccaacctgaaacaagctagccagggcgaggatgctttcacagtggcggaaaccgaattggggagaatgggaaattggagagttctaggggatgattcgaggcacgggttgctttactgattacacaatttacatagcgtagtaggcgggggaagcaatttatagactccatcagtggtggcgcgtgaatttgagttagcgcagtggcgactggagagtgaaaagagtactgtcgcgagagctcagtggcatctactgtggcgacctcaccggcgacgaacaattgctaccaggcggtttctagtgactcaccgcgacgaggtaaagtgttgaggcacgtagcccagccggataacggcaaacgccggtgatgccagcacgactaactacggcgagacacgacagtggtgagaacagtggtcggagtttatctccagtgtgatactttatactgaggagtgcttatctgagttcggtctggcgtgaatcgcgacgccggcgcgaatccaaacgcacaggtcaccggcggcgaggttctctgaacctgatccatcctgttcactgtaccatggcgcagcttattcagttggcctgaccgagcatatttggtaccaatttgctctagattttgtataaggactgaatcaacactctgtatcaaagtgatagcctaatgaaccagctacaatcttgctagggtaaccatgctcaaacacttactggatcatcttcgaaaagactcccaaagttcatc

SEQ ID NO: 123261 - DNA, 1281 bp, Zea Mays
taagacagtataaaatagttaatctttaatcatatgcaagcttgccacttgatatcatataagaaaatgtatttttatgatatgttcactgagaaaaaggttcttcagagatttaccggacattggaaaaaatggaattgcaacttgcataaatatcattcgaattcccaagcttactcagttatgttggttccgtaaagcaacctttttccatgtgacttgtaggtgtcaagtggaaaaggcaggccctttgtaaagcgaaaagttagactgatgtttacttgtacatgaactatccctctctgcgtcaattctccgttattcattgctagcaagatgtgttttttctacaagagcaaccaactaagcttggatgttaacgctacccatggtccacctcccatttcatgaagacgccatcattttcataacttgccagccaagtatctaatgccatcacctatggactatggtgtggtgcagtagacagcatgattgatcaagcaaggatagcaatctcagtataaccattggcccagaatctcttcgcccaacatcttcacaatgaagccattacacatccttccaggaaaaaggtaccttggacaatgattgaactaatctaaacatttaggtttttttgtagcactagtgtataaaaatacagttattccatcatcaacgctattgcatagagataaatccttctcgccagctaaattgaagcagcatttacagagatttcgatgccgttaactattcacatgtaccgatgtgagattccactaaatagtatgacagatagtgcccctagaaaaacactcagaaacaaattaacatcattttacaaaagtacaaagtgctggtaccaactaaccgcactacttatggatagaaaggggttggttacaaaagattaaaaaaaggggcatagtcaggacgatttgtcttttcctgaacaattctactgtcaaattttatatacttgtcaaccatttcactatcgaaatatcaatttcatactaaaaggtcgcctccctgtttgtcaggttgttacggtgtaggtaagcacaaatagcctcactccagaattatcttatcttcacccctgtccctccaatccaagcaaagcataaaggttttcactttaatgtgaagatcagttagcctaacaactcctacagcctacttcacggatagaaagaacaaccaagtaaccaacaaaggaacaatgatgtgggacatacaatttcaactgaaaaaaaatgtgttcaaacaaat

SEQ ID NO: 123262 - DNA, 547 bp, Zea Mays
cttcatctacatcttcttcaccttcttgagatgtattcattgtattcacaaacatagtcctagaattctttttgatgtaatcatccatctctttagtaactattctaggactgcttggacatgctaatgcatcaccataatgtaggggaataggtacactacacactagcatatgtacaacgtttagccaagataacatgcgagtagagaatcatggattgttaccactagatgcacaagaaatggaagaagaacatgatgatgtaatggaagtagtcatttgtcctcgtgtaccaccttcaacaacatgttcacatgtgctcctcatgttcattgctggtcaacatcacatcaacaataataacgtgtccatggtatccacatatgcggggataaaacaccatgacgcttgtgagctagcaccacacatgcaatgagagaaatagcaggagtaccttgggcacccacaaccctagggagagaaacgacgatgacgactagagcgagtctctagcatgttatgcctttcatatatgtagacctcttc

SEQ ID NO: 123263 - DNA, 456 bp, Zea Mays
caagcaccatttcaggtcgacgcacaaagagcacgagctcgcctgaagttccgcgagcggagagcacgtaggtgatagatgatgatccatatacacacaatctactgagtgacattatgccggctgatcttgagttgtcacctactgacaagcatatctttattgaggaggtatttgacactaggttacgcactcctctctctatttcagttcaagctttgaacttacccaaaatattttcaatgcagttgcttctgaatgcattgaataagcaagttaggcatggtctgagtggttttataataaggtagctattcaatatttagcttcaaagaaccttccttcagaataatgattctgtactgacatttttatttcttaggtaatgtcaaatttactgtattattatggcatgtgtaatgtcgtgaaggatattttgttgcaatgctactttag

SEQ ID NO: 123264 - DNA, 590 bp, Zea Mays
ctcattcttggaacaggacaagaaaccttagctggaagctgaagcctaatatcggcaaatctgagcagcatgagggtgttttgtcccctcatcctggggagggaactcaaccaggtaacccttctgtctcccctgtacctttgaagaaagatctagatcttgttcgccctgcgttctgtcagaaatgtggtgtcgaaggacatcatgccagaaattgctttaacgctttgtggtgtgatatttgccgtaaggagacacatgttacttctcgctgtgttcttcctaagcaaaacaaacccaccatgcccattgttggtttggctgctgatggattagggttttatctgtctcatttcgctaaacctttgaccaaaaaaccaaaaagggtttttatcggtctggttaaagtgattgagggattagtctcggctgaagatcttgagagagatttcggttttcacttcccatggaataagatgtggaaagctactaagtgccattcagggtttctgatgcagtttccctctcaagaacgtcttgaggaaatgataagcttcccggagcttaaaatgaagatgtctggggccaag

SEQ ID NO: 123265 - DNA, 517 bp, Zea Mays
tttgaatttaggcgaagaaatagggtttggggcactcggctcggaaacgatcgcgcaaaacgggaattttggtgaaatttaagcctgggatctcggattggcgtgaaatttggcaagtaggttactggaagtgttgtgaaggtgcctgaaaaatttgggtttaatttgagcatttttggctggtttgggcatttcaccgagcatgtggcgtgcggggagctagggctttaggaatatggccatttgaggtgagaatgccctcccgaaggagctaaaagtttgcagggatacacaatggaggtacatgaactcattccatcaattggattcacaggaaatcacagatttggaagaggtgtgagaaggagtggagaaggggcaaacttaacacagggaactgagagggagaagaacaggagatggggggaagacctgctcaccgagggagggaaggagagagacgaggtcgccggagaaggtggccggagatggaggccatcggtgagatcgccggcgg

SEQ ID NO: 123266 - DNA, 1593 bp, Zea Mays
ttcgagaaggggaaatccgtctcatcgaagataacacgacgggagatcatgagacattgagtggtgaagtcatgacatcggtacccattgtggtcgagtagtaatcaaggaagacgcgtcagatggagcgaagaacaagcttatgaggagcgatggcagaaaggttggggtaacacgcacacctaaaaacgcaaagatggtcataggagggagtggtgccaaaaagagcaaagcggggtgtgggggcgctaatcgtcgtagtagggagttgattaaggaggtgagtagcagtgtgaatgctcttagcccagtaacaagtaggaacaaatgcctaaaagagcaaagagcgcaatatgttgtcgctagtgcgaatcatgcactcagtcttgtccttctaagaagtataggggtatgacatctggagctagacatcatgaggggaggaaaagaactggaaggagttatcaaactcacagtccttgtcatactagacggtcttaatagtacaaccgaactgagtggaaacccaagcgaataagtgcagaagagataaaagtatcagacttggaacgcaaggaaaaagtccacgaataatgagagcaatcatcaagaaccaccagataatatttataacctgaaacactgataataggagagatctagatcacagtgtatgaggtcaaaattatgcacaacctgagagaagctagggagggggtcgaacatgatggcctaactgacaggcatggcataaatgctcagtggccctaatataagaaatgattgaactactacacaacttggacaacacatgagggctaggatgactgagtcgacaatgtcaagtgctagatatagtgaaagtagccagtgtgtgcaactgcggcgaaggtgtagcgaaagcatgatgttaaggggtaaacgcaggcgagaaggctctaggtagcgagatccttcacggacaagccaaaaggatcaaactcaatagagcaagaattgtcaatgggaatctaacgaatagataaaagattttgaatgatatgcggatgacaagacaattgtgaagataaaagggcccaagaaggaccgaatcacctacagaggtgaccaagaaaaatttcttgttgctcacaatgatagatggagtggacggtagagaggggtgggaagaagagagtatacccgcatctagagtggtgtggtaagaggcaccagaatcaacaatccagctagtgacagcaggagtcagggccatcgtgctgaaggagctagcgagtaactactgatcccacccaccgcgccaggggttctaggacgaaacaaagtggggtgggagaagcaggagtgacagcagaggtgtcaggggcgcaaaggggagggagccgaggtgataccctggatcaggcattatcagatgagtcggctagggaggaggcagacacttgaagggtccacctagggacgggccgagccatgtggagatgcagtcaatccatgggttgtagagaaagggccaaggagcatccccctagccacccccaccaccacggccaccctcgctccgagcctccgacggcaaccaccaccccagac

SEQ ID NO: 123267 - DNA, 659 bp, Zea Mays
ctcctgagtaggttatcttcacaggtataaagtgtgccactttagtcaacctttccactataacccatattgaatcatagtcgtcccgagtacggggtagtccaattatgaaatccatactgatttcttcccatttccattccggtatcttgagaggttgtagtaatcctgctggtctttggtgttcggctttaactcgttgacacacgtcacatagtgcaacatgagtaggcacatctcttttcaaattgtaccaccaatacttttcctttaggtcctggtacatcttagtacttccagtgcgaatagagtaagctgaatcatgggcttctcttaaaataagttggcgtaagtgctcaatttctggtacatagattctctttttaaaccatactgtgccttgttcatcttctatgaaatctggggctttactcaaactaatttgtgctttaatttccttgattttctcatcagattcttgtcctttacaaatctcttgttccaaagtagattcaacttccataactgttgcttccatattatatagcataccaaggttgagttgttccatttcccagcacaattcctatgacatcaaatgtgtagtgatgttgttcacttgacctttacggctcaaagcatctgccactacatttgct

SEQ ID NO: 123268 - DNA, 564 bp, Zea Mays
acagtgttggcagcgtagggcccgagcaccatcattcaagctacgtcgacccttggtattcgtagcctgggcctcggtgcggcttgtccagttgtgcccatcaagcggtctacccacaggcctagtcccaatagaacatgagtgcgtcgcagaccaggggcataagggccataaatgcgctgcaatccaaggggttcataggttatgagtgcgctgcagcgcaaggggttcggaggccatgagtgggaagtggacagatgcaactgccgtggctcgactccaggtgtagttaatgcgtctggtcacttatggcgggtcggtcttgggccgagcgagggatccacttgattggtttcccttcggctcacatgaccccctgtctagctctgccatgcccgaccccaggctctatgtcacgggattcatctgggggccgatacttctagggaagacgtttcctttctccaccagctgaccgatggccctagtcgccagaggcttttccccagcgcgctcgctgactgatgggccctagtcaccataggcttttccctagcatgctcg

SEQ ID NO: 123269 - DNA, 316 bp, Zea Mays
tgggatgcataacgggtttggataaaggcaaagtaatgatccaaatgaccaacacctcaaacatataaataacaactctaatttataaataacaaaatgatcaacaccttaagcatgcaaagttctgagccctgaaagagaaattattatttttagaatcactgctcctgatgagccccatgaaccatcacaaaacaaattccaaatagcttcgtcttagaccaagaccaagccaggctcctcgtcatttagagtccaatcaacaacgaaatctgctaatgattaagattgggtggttgatcagtgcacaaaatca

SEQ ID NO: 123270 - DNA, 573 bp, Zea Mays
atttcaacacattatcattgtttttatatttctataaaatattacgtgttggacgatgttacaaaacttgatgaatggagggagtaacaattaaaaagcccataattcatttactaaaataggcacgacaaaactgtggctgcaagctaaatggttaattgtgtggctgcaagttgaatggttaattggtctttcatataatgcaacaattgtttttatgaactttatctagaattggagttgttccttttgtggattttcagtaggactacacagatgaagcattattggttgatgtcatacttgtaactgattgagtcagattcgagccaaacaacccaatggctgctcctcgaaacaacccagggcgagataggggataaattgagaggtgtgtccgctcaatggctccatttccttactcgcatacctaacattgacttgaataaaactacatccatttccctgctcgctgcaacctgaaaaccacactcctccacatcgacttgaatagcaccctccaaagctcccaacttcagtttgcatccggttcaccacaattcctaattctgc

SEQ ID NO: 123271 - DNA, 283 bp, Zea Mays
ccgagcttagtacgaagttcactgcaccgctcatgtctccgggcctttgtcaaattgtagccagctgcttaacagtcccaatggactcaactgtgaccctgttctccttgatgaattcttgaaaaaatgatatctaacatcaatcttgctacgatcatagaaaacagggttgtactcagcttcgcatgatgacggggctaccaccttctgcttttgagactgccaggttatgatgttgctgctgaggaagaacaggacactagaggtactcttccttgtatca

SEQ ID NO: 123272 - DNA, 479 bp, Zea Mays
tcttcccactcactcttccatttattaattttagtctgaaactccttcacattttcatatagatattcacaatctatctctcttcatgtaggcaatgttggtacctgtatttaagataactatattatttaccttaaaccatataagaagtataatacaatatatgcacgaaaccaacttttgatttaccttgtttttgagtctcaataatggccgccctaaagtaagagttgtccacctttctaccaggaatgctaatggcatggcaagccttaacccaagccccaccaagaatctctcttgaactcctacctttactcgtccatggactagtgtctatcctctgttgacaccaagattctaatctcctctagaacttgtgatcaggtccttgcaaacatcttaggcagtggacgagatccttgcagtgcctgctgacttgacctagatccaccacccctatcataccgtgcaccagc

SEQ ID NO: 123273 - DNA, 295 bp, Zea Mays
ggaggataagggacacacgacaaggacgtgccaagtcacgatctaaaagcaggagatcgccgaagccgaagcgcagcaaaatcagccgaagcaggtcttgcacaccgcttcatgctattcgccatatatccctgaatatgtgggcaatcagcaacccacgacatcggttgcttcggcaagtcattctaaagctgcttgggctcaactaccaccaccaccattggcaccttcgttggcccataatcagcagccagaagggcatcgctaggcgcagcaacaacgcgatactcgggag

SEQ ID NO: 123274 - DNA, 433 bp, Zea Mays
atcaatgcttttgggtcgaactggcgagtgtgtccactctaacaaataactcgtccatggtaagagtctcataattgggcgactcagtaattgccgagaccttcgcctcccaaaccttatgacctagagcatgtaacaacttcagttctctttcatatcatcataaggaagctgccttgttggtgcacatcttgtctataatcgactgaaacccagaaaacatagtctctatggtctctccattatgtctcaaacagtctgatctttacatgatcgttaccctcatgtaatctcttgagggtggactacatttggtgattcatagccaaatgtccaactcgctcgaacttagcaagtgagagacaagagaacaaagtgtttcgagctttattgttcaaatcatggaacttcatctgaatcgaagtgatccaag

SEQ ID NO: 123275 - DNA, 407 bp, Zea Mays
cgtacatgcttgttgtcgacattattattctgatcatgttttcttttgtggtaaactaatcgcggcttgttgtccatattggtcgtcgtctcaagttagacgtgtatatggccatggtacgtagctagggtacacaggatggatgcgcccaaaatgtttggtgccatcgatggccgacaggcgacagctagtagctaacacacgttgttcaatgatttaatggacggagcttcggtcacaagctaggagtccgatggatggatgatcagtggtcgccatcacctgctgcagtcccctaattacaataaaagctgccttgctacgtgcacttgtgcctctatagctgcccccaggtatctttccatcagaccatcacatatgtcaagagacagttatacaagtacctg

SEQ ID NO: 123276 - DNA, 577 bp, Zea Mays
acgcactccaccaccccgcgacgagtaccctagtaattggaagccgtgacccagagggtccagacacatgggtcggcttcccagtctaaatcctacaggtcctgttgcgtaaatgaaaggataaaggataccagttaatgggtcctatgagtgcactattgaaactccctagctaaggttgtgtgcatgtccgggtcccagtcgaaattccctcctagggaccaggtcgccacttctttcttaaatatactggcatccagcctcgacaagtcaagcccgcatcccaggggggccaagtaccagggaaggagttgacaacgacgcacacagcaaagggaaagtagcatgcagataagttgtaatgttgcttgacaagtagtacttaaaagtactttacaaaatcaaaatataataagccgcttcccagcagaacccttgctttctctccacagatccgactactcatcatcagcaggatcccgctggaagcgtttggccatcgtatcaacagtgtcttgtaggctccccgggcggcgtcttcggtatcggccaccggaccggcgatcatcggccccaa

SEQ ID NO: 123277 - DNA, 422 bp, Zea Mays
gctgtgcaacctgagcagcggattaggagcgacgcgtggatgctgttggatctacgtaggatggacaggattagatcatggggtgatggcatatttgccttagatcccagtgtatacggttgtgattagatctcaagtcaccccttcgtcattttaaatcggaaccatggatcagtaatcgtacggtctggtatgggtagtggcctggtgcgaccctcggtcgtccgatgtgattgtgcgcgttggattgggcctcagtatttaaaatctctaccgcagatctcacaatcaacggttgataacgcataccgactcactcagaataatggtctaatctgagccaatgatttagatctgagcggcccacattagatcataccccttcgctgagccagacatacaaaaaagaccctggaaaatca

SEQ ID NO: 123278 - DNA, 471 bp, Zea Mays
gaaatgccgaaggagactgtcaccaagtctggcgaaggtgagctggttcgactgaaatacaccttcagatatggagataaatttgatgaaccgaatgatgactggctgaaatgtatcgaaactacaagtgatgaactgcttgggccatattccaaagcggaagataatgccttatccacatccttcgtgggccggggaaaaaagagattaaacagagtttttgatgccattgattttatttaccccgactactgctatccgctgcgaggacggggaaggaagaggaaaactgctgcttcggccactccagatgagcctgcaccgaagagcaaaaagttgaaagtccttacccaccggccacgttatattgagcaggccgtggtgcctgagtttggcggggagacttcttcagctactgaaccaaaggagcccattcctcctatgcagaaggctgaaaaaccgactacaatg

SEQ ID NO: 123279 - DNA, 679 bp, Zea Mays
gcggaatcttctctggatgataggagtttataccgtgccatgttcgaaccataggaccatagtaattgctcgccgtcgcgtgtgtccccgccgtggattggactgcaccatgggtcgggggtctacgctgttttgcggctgaaattgatgggcaacataggttcgggccgtcgtaaatctcacgagggctgagcgaattagagtttggggctcggggatttggatggacggtggagattagtttggggtgtaccgctttaggcgattggatccgtgctgtcggatcgttatcctgcggattagaacagatcatgtttcattaagttgtagccgtcgatctctgatctagcggccaccagcgataccggttcatgtataggaatggtctaatccgcgccactgattctaatcatgcggcccatatataaccataccccttcgctgaagccattttacaaaagagaccccatgaatagacataataaaccctccgtccagtggaactattctctgtgtctaggttatcttgcgcagagacccttgagcttaccagaaattgaggcccagtccagagtagattaaaaacagtgaaataattatggaaatttgtttttaatacaaaaacaaatctagaaacttgtaaaatgcatagaaaaatcattttagcttccaattgggc

SEQ ID NO: 123280 - DNA, 427 bp, Zea Mays
agcctaggatttctgatgttcatcattggctaccaacaacatctagaaattatatagcaagatcagcttacaaacgcttcctggttggttcagttgcttttgaatcggtggatcaaatttggaaaagttgggcactcccatgttgtaaggtttttatctcgcttgcttctcttaacatgttatagatggctgacccattggaacgaagggggcttgatcacccagagaaatgcatactgtgtgaccaggaggaagaaatagcccaacatattttactgtcttgtgtttttgctagagacatttggtgcaaagtgctaagtacagtggggctgcaatttttgacaccagggatatgtgactctatccaacaagagtggttgagtgcagcagtgagccaagtgccaaaagttcaaaagggcctcaattc

SEQ ID NO: 123281 - DNA, 420 bp, Zea Mays
gcgaggggtagaagatgattggccgcctgtgtaagcagcctctggtaaccttccgtgtctagggttcgcgggagtccgtcggctatatgcgccagtactcctccaacttcactcggcgtgtttagtgctcgagcaaaatcggggtataggtttcgagcgaggagagggttctctcgctggagcctagcatcttgttcggctagctctcgctcccgatcctgagcctatcggtgatcaaagcggcgggagttacgtctttctcagtgtactcattcgtcaggagtttctcccacttctgaggcttagtcccaagacacgggctacgccagatcccgttccccggcttcatgatgtcgccgcacatttcggcgtctgtttctttgtcaccgggcatcatgatggggaggttcctccactttc

SEQ ID NO: 123282 - DNA, 458 bp, Zea Mays
ttcggcggaaaattcaacccaagacatgtcagaaccatacacaatccaactcaaaacaaaagacaaaagcaatcacactcagggacaacagagctaatcccactctacaggaacccaacaacaacaacaatcacaaaaaagcttcagatcaccagctccaagaggtggaagaagaggaaggagttttggaggaaggtttatttatcaatcaaggaagatgttctatcttttctatggagaggacaagggacacatgacaaggacttgcctagtaacaatcctaaagcagaaggaaattgccaaagctgaggcacgacaaaaccacccaaaacaagtcttttaaacctcttcatactactccccatacatcccagagtatgttcataaccaatagccaaacccacaaccctttggatctattgcttcggcaagtcacttttcggctcgttggatcgtgc

SEQ ID NO: 123283 - DNA, 595 bp, Zea Mays
acattgaggtatcatgatgccaaagtagggactcgcagcaatctccaaatttttgagattgagggcaagactgtcggagcatccacggaatatcatcctgagcgtgaagaaaagttggacgctttgctctatatgtatgaaaatatggatgagatgaccccatatttcaagtaagatgaaatttaatttgtcatttgtgtatctatatagtaattgtgttccgcacctcatttgtttacttgttgtaacagagaattccaatcacaacttaatgagaaattgtcctcgaggcagtatgaaaacgcgcttcgaggaagacatgggaagcccaatttcattaattggttgcgagcttatgtaaataacctaacactcttgttctactttatatttttttagaaatctaatttcaccatctgattggcagtgtgacaaaattccaaatttagacgaggacttgcttcagatgtcttacgcaatcgtaaaagtcagaagctacggtcgttacgacattaaggggtttcgttttcgttcgaccaaatttgaatgtactcgtccatttgcggcgacaaaaaatactggagttgtatgcagg

SEQ ID NO: 123284 - DNA, 308 bp, Zea Mays
tatttacgctcaaatttgagaattttatgatcgcgaatacaacgtcacagagatatccacgtctccatgttggcttggaatttatagtaactaatagtcacctggattcttggatgtctgttacgttggggtcatacgtgacatctcgtcgactattgtaacaacatttacgttatatctatcactatttacactaaaaatgaggatttctatgctcaaaatggggggctctcactggtgtcctccatgccatattttccgcatgcgcaatgaaagtggaatccattgatttatgatgtctataacta

SEQ ID NO: 123285 - DNA, 541 bp, Zea Mays
gctgagtcgaacctccatctcctcgtcatcaccatcatcattgttatcgtcgctagacgagtccagagacacctcccatggcagtccccccttctcctgcactcggcaccgcttctctacctcaccgtgaacctccctcttctcgtgagcttgcttcctctcctcatccttcttcttctactgttcttctgcggagaacctatacatcgcctggctcgccgcgtcctccaggaccggaggctcgacggatctgtaacccatcagcccgagggaacaaacggaaaacccggatgatcaggtcgaaacatagaaaatggggataaagcggaggcaagctcttcgacttaccaaagacacataaccctagtcagggctcatcgggacctgagtaaggatgtcataatcggccttacccactatgcccttgacccgcttggggaggtcgtcagtggtgagggtggccgatgacatctgagagctatccacctcggtctcgggcgtcatctcatacatgcgcaaccgttgctccaataacgacaac

SEQ ID NO: 123286 - DNA, 391 bp, Zea Mays
tggtggagagctctgccacggctattaatcaaaggctaagttgtaggcgagtagtggccacggcgttcatcgcccaaccaagtgcattgttcatcttcttccttgcatccatgaccgtgtgagtgagggacaacgagttcctaggcaaggttagggccaacactcgagatggcgttgtgagaggacctaggctacgtcttcggtagctccaaacccccagtgagttccccttctgctgcaagaaatctctactaagcaaaatcacaaggcttgtggatggtttattccaccctgtgtgtgttcaaaaacaaggaaacaagggtaggcctcccggttctttaccacaacgaagtacgagggtggctggggttggcccctgttaacagattag

SEQ ID NO: 123287 - DNA, 421 bp, Zea Mays
attagcagtacccactaccgcaaaagaggtggaggacaaaggttgtcgaaataaatcaaacgacctctgagaataagacagcagatttgcagctctctgcagatatgacggacagtccggctattaaagccagaccgtccgtggatgttactgaaagttgcctagaggggggtgaataggcaagttaaaactttttcaacaaaaactagaagcaaactgggtaaaactgaattgatctcgaaattcacccagttaactttggaagtgagatgttctaaatgatccacagggttcaaagtagtagatctgagaaggacacttctcaaaatccacacaccaaaaggatataaacaattcttccacgaaatggtgagagaacgaagaacatgaataagcacaatgaacaagaatacaagagaca

SEQ ID NO: 123288 - DNA, 599 bp, Zea Mays
ctcaccaacgccccgtccacattccaaagcttgatgaatgatatcctcaactcattcatatgcaagtttgtgctagtatttttcgatgacatcctgatttatagcaagacgtgggcagctcacctccaacacgtcaagtaagtgttccaaacactgagaacacataagttggcattgaagcgctccaagtgtttttatggggttactagtgtgtcatatttgggccatataatctcggcatatggtgtggctatggatcctgagaaggtagcaacattagagacttagtcgcagcccagaactttaagggtgctacgtggtttccttgggcttacaggatattaccggaagttcattgcaagctatggcgaaatcgcagcaccattaactgtcctattgaagaaggaatcatttcagtggtcggaggcatcaacaaaggcattcctcgcactcaaacaggcacacatgaccgtctccttgctgcagatgcctgacttgagcaagagttttgtggttgttccgacgcgtcaggttccaggtttggggcagttctccaccaaggtgcacgagcgtgtggcatattttagtaaagcggtggc

SEQ ID NO: 123289 - DNA, 885 bp, Zea Mays
gaaaagatagctttcctggggcatatcttgactgcagaagggatagaagtagacccatccaaggtagaagccgtttcaaaatggaagcagccatccaacgtcagtgaagtacgaagctttctgggaatggcagggtactacagccgctttatcaaggggttctccagcatagcaaaacctatgaccgaacttctcaaaaaggacaataagattgtgtggactcccaaatgtgaggaaagtttccagatcatcaaggaaaagcttacaactgcgccagttttgacactgccagatatacaccaggatttcgtcatcttctgtgatgcttcaaggcaaggcttagggtgtgtcttgatgcaaaatgagaaagttattgcctatgcatcccgcctactcaagccacacgagcagaactaccctacccacgacttggaattggcagccatcgtgcacgccctaaagatatggaggcattatctgatcgggaacaaatgccacatcttgactgatcacaagagtctgaagtacatcttcacgcaaccggacctcaacctccatcaaagaagatggcttgaattgatcaaggattatgacctcgaaatccactaccaccctgggaaggccaacgtggtaacagacgccctcaaccgaaaacctttcgggattaaagggaccaactttttagaagattggaagaaagaatcagctcagctaaatgcatgtctgggagacaacggtagcctggaagtcaagcccaatctagaagatctcatatgcaaggctcaacacctggacgcagagacaaccagacttatggaaagagctcgcaaggagcaacttccggaccttaggatagatgagcaaggagtcctctggttcaagaac

SEQ ID NO: 123290 - DNA, 637 bp, Zea Mays
gttaaatcacaaaagttatggactaaggaagttttagagctatttaatattaattttatactgagatataagttctaggggtttatctgttagttctagggacttaagtgcgaagtctccctacggtggagggacaacaggtttaatatgcgaaagtgcatagtctcttttaaaaacaaactcagcgaaggggtattagctcattctagccgatggatcaccaacagacggttcatattagatcttaggttatacccaaccgatatgcactcaacgccactggatcagggatccacggcctgcgaggccaccacgccagcagctaccgccagacgtccgatcgaatctgacgtgtaggatttaattacatgaaggggtattcgggtttctaatccaatccgtttgctacaagatcaacgacaccggtcgcatctccttccatctccttcctctcaacgaacagtgccgccggcgcctcctgcccgtgacgacgctcttgccggtggagccaagctcgaatctactcgatgcaagagaaataggacaggaaagcaaatgttatggcacacttcttaatgaagaatatggcgatgaccatgctgcccacgaactgaagcggtcccatggcgacttcccc

SEQ ID NO: 123291 - DNA, 488 bp, Zea Mays
tgtaatgatcccattaaggggaatattacgggaatgtagcaggtaaccgggggtataacagtacttgggaccccactacccctcgcggttacctataaatacccctacactgtacacgaatggggcacacataacaagacgctgcagttatctacctattgtcttgttgtgcacataagctctcttgtctctcgagtgttgggcccacatgttcacgtgttagagggaaccaacatttggcgcccaccgcttgtgctatgaaagaacaaacctgcgatgcccccccaagaaagtgacaaacagagccagcacatcattggacgacgctacgaaggcgaccctcgtcgaaaagaaaggcaaagcggccctcgccgatgacgccctcagggcgcaccgacaatgattgagcaataaacaacaaacatccccgaacagaaaacacacccattctcgaaggcaccgttcgcacgtgcaattctgaagatctc

SEQ ID NO: 123292 - DNA, 544 bp, Zea Mays
aatggtggggtcatcctcggtggggtctctccctaacagagcctgaagtcttttcctccaggtgggggtatttttgttgctgggtgggaaataacgaaggggttcttagagatctcttggctgtagttttggcatagctgtttaagggcttttcgggcaacactttggcaagtatctgggaagcggtgcccggtgaagttgacttggaagggagggtggtttgggtagcttcggctttctcctaggtagactgccatagagcacttttctactccattttcgtggtattccttccagacatattcgggcttcttgcggatccccatgcgtagcgtgcaactccgtaagaggtgagggaatccttcttcccctgagcaataggatgtcctaataacccaggagtcttccatctggtagaagaaaagaagggtctgttaatatcggggaaaggagagagagtgtttcttgggggtaagaggtgttttcttgttaaggcaacttttaaggtcagggctgcggtctacggccagtcctatagctctga

SEQ ID NO: 123293 - DNA, 610 bp, Zea Mays
cacgatccaaattgggctatcttattccctatcttcctcttctgccaatgcaagcaataatttttggcgaagacctccacggacggctgcccgtcataggaagtaactgcccaggcatacttcgcaagcgccaccactgcgttaggtgtcaactggtggacttgcacctcaaaccttcgcaacacctccaccatgaatcgatgtgtcgggaggcgaagaccgacagcaaaaaacgtctcaaaaactatcaactcaccttcaggctcggggacctcctctgcacccagggcccgcccgacactgttaccaaagtaaccaaatcgttgcatctctagtacgcggcccgagaaaatcctcgaggtaccaaattccacggtgtggctgggctgcaaatcaatcaacgccaaatcactcaaggtctcctcggacgacggtgcggccgatgatgcgctcgttgcagacgaggaagaagacattgcaacataccgtcggtggcagcgcacggtctgcttgatgcgggccagatttccggtgcagagcgagcaaggagggcaagcgagcaactgtaaaaagctagggtttctgcagtgcaaatgcaaataggaaacgg

SEQ ID NO: 123294 - DNA, 489 bp, Zea Mays
ccacaagaagccggagtacatctggaaagaatgctgcaagaacgggattgagaaattctctatggcagtctacctgggagaaagccaaaactacccaaatcaccctcccttccaagtcaccgccactggacaccgtttcccaaacacctgccagaatgctgcccaaaaagccctctgccagctatgccaaaactacagtagggaagtctcttagacaccccttcgctacttaccacccagcaacaaaaatactcctgcttggacgaaaagactccaggccttgtcaggaagagatcctaatgaagatgaccctaccatagtctacatggccgggtatctccacacccttgacaaccactatgacaaccttttctcccactgcacccacctaaactcccgggtggaaagcctagagcaacagatcatggaactgaaggaagaaaaggtgtctcttcaagacagtctcgagatggcagaaggcgaagaagc

SEQ ID NO: 123295 - DNA, 448 bp, Zea Mays
aaaaagtgagcacaccatctgtcatgtgttcaaactccaggtttgtcgaggctacaaacaacaaatacaagaatgtgagtataaaagctccataaatacatgtgtcatgttccatctaccaaaaaaattggcatatgaaatcttcaaattcacaagtaccagatatctaatgtccttattatctatccatatgactatgaggtacctcaagtaaactgttttctaaaatttacactattcttggctttgacatgaatgtggtcaaacttcctcgcctcttaatgaaaggtaaagagttgtgtaactcacgttgaaggtggctgaagaaaggattaagccaaaaaacagcaaccatcacaaagtacaccccctgttgacatgagaatatagattagttcataagccctacttaaaatggtaaccaacacatgagatgaagaaaaatggt

SEQ ID NO: 123296 - DNA, 1039 bp, Zea Mays
ctggagccttgatgggaatgtggtgtcaacacgcaactgcccctacctggcgtgccaactgttaatgttttgaaccgagggtcctaaccaactagtgtatttgtgctacgtttcccggtccagatgggtgatacaagaagacacaagatttatccttgttcgggcagtagaaggccctacttctagcgagggggattagacttatattatcttgcacctaagtgctcgtagtagggggtacaagctggtcgatggagggagtggatcccaagtctctgtgagtgatggaggctagtatcaaaagtggagggcgaacgatcaagtcttgtcccctgtcctctggaggccttggactcctccttttatagccgcaaggagggagtctatgagtataatggttgtcatagtgtttgagtgggggtgaacccgagcccctgtagcggtatggccgctgggatggcccttgtcctggttgttgcctttgatcaggaggaggatgtccagctcctgtatttcgaccaagagccgaggccagggttggggctcggatgcgtacctgagcccatcttttggacgagacatctaagtcgtagtggttgaaatagcgataagtatagcaaaaagtgcatggtaatctggcccatgtgtcatgcggaatggtgtaaagcggacttgacaccagccctatggtttctgtagccatcccgttgttagcggtttttgcgggagggttggcggcgtcgggtgttcttctgttgatgttgttggccgaggccatgcttggacgagatggagacttctcacgaggccaaggtcggtctgcgcatgggcacaaagtcgtgctgggtgtggttagaatagaagtcctagtggtctcctactggattcgtggggagttggtggtatttaatgcgccattgctggggcagtttggcctagattgcgctcgggtgtgacagagtttcctcttgaggctgacgccgacctcgggcgaggcggagtttcctcccgaggctgagactgtgcctagatgtcgtat

SEQ ID NO: 123297 - DNA, 579 bp, Zea Mays
aattttacaattattaatcactattggatgacgaccaatattttagaaaagctcaaggtgcttggtgtaatattttggacctagttataattaattttgaactgttctagacagcgggtttattactgtaaagattaggggatctttttgctatgtgctggccggaagggtatcgggacatcctagccgtagaattagaattatgtgcccttattagatctcctgttacccgaaccggtacacgatggcaaccattggattttagatccacgactcggatttaaagcaacaaataggtataacattttctaactctagccgcacatcgcaagatcaatggtcagagaccgctcttcttcctcccaacccaaaacatggcggcactggcttgtatatggcctcgttcttgtcggggcaagccattacggagacctggtggctatttccttcattcgaaaacccgtaatgcggagaggagcacatggcgtacatggctatgccatttcccacccaagattgtatcgcgacgatttttgtccacagagccgtgcggtccgcggtggcaccatgtaccccgac

SEQ ID NO: 123298 - DNA, 328 bp, Zea Mays
gagaaggtttgctgcaagcacgcaaagactatagtttagctagaattttcggacctagccaatgacattaagaacccttcagctgaagcagccgcactcagtggaaaaattatattccaaagtctagttgaaaggtggccgagagatggctgacgaagctattagaaaggatgagaacgaatctcatgctgccttggaagaggccagtaaagctgaagaagctgcggaacgtgcaagacttataggtatatttattgttatctagcttcgtaaattattttagcttcggaactaacaaacacttatactatggtgcagctgaactctc

SEQ ID NO: 123299 - DNA, 744 bp, Zea Mays
tgcccccaaaaccaaaagactgagttggcccctcgtctctcctgtggcccctttccattcttgttccgttcttctaccaccaaacgccaacataaccctaggtacatggctggcgcgcggcggcggtggctgattagcacttcaaccacaaaatcccctcaaaaacagacaggatcagaagtgagcggcgatggagatgaacagcttcaacaagatgatgggggatgatcccatctttcagcgcgggtggggaagggcacagacacagcatgggaggcggtacaatggtcggcaatgggatcacaggtctcagcttgatggaaattacagcgcgcattcgtagagtgagttccacatcttaatcccaatgttgagtctggttttgtagttcatccatagagtgatgggttctaattttttgttaatattccttggttggtacgcgtaggaaagagcacatgttcagcctgcgcgctgcaattccagcttatacggctattcttgaagacgggcggtaaggttgagatggagggtaaaaaccatgttttgtcagtgaatgttgtgggtggctacttagtcaaacatttaatggatgatcttgcaagcagaacagtttgggggggaattgtcaagagacgatatgctggttttgggatcatcgagaaaataagtacctacaacagattatcgcaaacactgatcttgacaacgtatttcagatgcattggacaagtaaagtgctaa

SEQ ID NO: 123300 - DNA, 473 bp, Zea Mays
gcgaagcgtttcttgggattagcccacattttggactgtggaaaaatctctactattgtaagctggggatgacaagtgggcaacatcaagtggttggaggggctagcctggtgcttcgtcgaggcaagaaagctaaatacttggatattcccctgaaagataacatcaaagggtggttattcgaatggtttaccatggggaaccacaataactccctcctcgttctcgaaggtagccagatgtgagagtgcccagctggatagaggacccaactgatgctaaagtgaatgaggccaaggttttgctagttgagatcgccagtttgaaagatagagattcactagggccctggatcatgaacgtggagcttctagtctcaatgatctactggaacgccggtgattgctcatcggagttcctctgtcactgtcaccgcgggaccgcccctcgttgtggatggagctcactactgc

SEQ ID NO: 123301 - DNA, 776 bp, Zea Mays
gcgcaaaagcccttgtcggttcaaacatctgagaaggagtcctcggctggtttttaatgggtcattgacacttgcaaataaacccccgcgcttctattccttcacaccccgaggtccacgacggggagcggcggagaaccgagctccggtgaactcataccagtcacgatacttaatgatcggtgctctaatttggctaagacctaattcaacacctaacaagcatttccccccaatcaatttcactagcggagctctaaatcgtccagtccatagagacagcgcagacaatggatgaacaaaagtgttcccagtgatctagggcagtctagctcaattgaatggatcgaggagcatcaggagaaccaaaggacactgaaacaggagagcagagagcacgaacaaacctggaacaggctagccacggcgagggttctttcacggtggcagaaattagatttggggagaaagagaaattagagaactatggtggctaatcggaggcaggagcgggtgctctagcttcgtgattacctaacggagctagcggtgtgcttaatttatagtgttcaagagcggtggccttcaattttggaatggcgcgctggcggtcggagaggaagaagatcactggtggcgcaatcgtggtgttcaccggtgcagtggtttagagagggtaagcctaagtgtgctacggttactaccgcgtagtgaagagtcacgacgtggcataaatgaggtcgccggagtgtccacgacgacaccggcggtccggc

SEQ ID NO: 123302 - DNA, 462 bp, Zea Mays
tttagaatctatggcactactaagagtagaacttttggagatgttcaatgttccatgagttcctagtcgaagtaccgcccatctaagatagccgatgtgaacctagccgagtaaccgtgacaatgtagggtcctgcctagggcgacaacagcttatgacatccttctcctgacagtattcagcgaagcaccagatcgccgactggaaatgatttgaagcgaactactctatcgtggtagcgcttaagggtttgctaatatctagccgattgaatcaccatgttcaaccattcttcctccagtgtgtcgatttcttcaagacgagttgctttttcttctgctacatccttgaacattagcctcgacgccccaaatgataaatccataggtaacactgcgtctgagccatacaccatgaagaatggagtgttgccctacaacgctcggctaggttgagttctaa

SEQ ID NO: 123303 - DNA, 373 bp, Zea Mays
gagtgtcttttagataaaagacttcgattaacacacttgttgtgctattccggctgcacccttaggcgacttttgtgcggagtgtcttttaaataaaagacttcgattaacgcacttgttgtgctattccggctgcacccttaggcaacttttgcgtggagtgtcttttaaataaaagacttcgattaactcacttgttgtgctattccggctgcacccttaggcgacttttgcacggagtgtcgcacgtgaggatagtctatgctgcctctcgcggtgactacggagtggtcgaatgccgaagaccgtcgatgcggtctttttcgacatgttgcatctgagtttttgtttttgcgggggcttttgcaggtat

SEQ ID NO: 123304 - DNA, 574 bp, Zea Mays
atggagtagaagttttccttgttgaggcttacagaagatctcaagactgagtatgcagcacaccaattgtaggggcccgctgggatgtggtggtctcatcatcgcaccgcctaccctaagaatgcccaaatcacttggcaacagttcactgcagccttcagacaaaactacattccacctagtctgatggcaatgaaggtgtctgaattcatgtgattgactcatggtaccaagtcagtgacagagtacgtacatgctttcaacaacttgtctcgctaacgaaagccaaaaagatcgccagtttcaagcggggtttgagccaagaatgatgaagagcatgagaatctcatctcatacctccttcaatgagtttatcaatgattgcttgactcaagagaacaacgacattctctacaccatatcgaaggggagtaagagagccttggagtctagatcatcgcaacctagaaccacagtgatggctcgaccaaattacaagctagtgttccctggtgcaagatttcgtcctcctccacagaagaagacccaacaacagggattcaagggtccgaag

SEQ ID NO: 123305 - DNA, 421 bp, Zea Mays
acggtcgatcgtacgtgtcgtctcttcgtttaatttttaacagattccaaaaacttctccatcatatgaatatatatactctatgttgcgatccggatagagagagaatataactgcaataaactccttgttgttgagatatgtatatgctgcttgctgctacacaattgctactacctaggcagtcgtacgttacaacaacaacaaacagcagcaaaacttgtgtgtgcaccatgaaacccccgtgttccatgatttttgggggcgcaggtttagcatggacactagctaggctaggctaggatatgttttgggtagggtccatatatatataccagctgctaacgagcgagtaacacacacgtacgcacgcacgcacgcattctagctcggccgataccgtacagacatgaaaaaaaag

SEQ ID NO: 123306 - DNA, 304 bp, Zea Mays
ttcagttaactgaaacaaatattcaaggagctgggttcattttgagcccatgcagtttctgttctgggtaatttcgacctaggattgttgaagcaacctgatagaactatgtttagagaataactttagaaagggagattggtctgttgccatataaaattgtgaggtccaaaggcttaaacagggaggtgtgcaatggggcagcagggctggtgcaagtgatcagtgttgatgtaggattctgaagtaggtccctatctccatgttctacttcatatggtagtataaattgagatagagttga

SEQ ID NO: 123307 - DNA, 491 bp, Zea Mays
gcataatgtaatgtaatgtagtggtaagggtagaagaggttgactcgtaatgagtcggcttcgagtttatattactcccctattatgaatcaaggatgatgttgctccagataatcactgtcgtttgcttttcatttgtgcgcttgaaaatttgtccgtgcacttgacaacgatagcattttagaggtaatgcgtgagtgacggttgcgatctttacttttccgagtggtgatctggcactttagaggtaatgcccgacctaaggagtccacttatactcatgtcgacgtgccttcttcagttccgaaccctaactctcactttttcatctgccacttctccgctttcctgaattcttgagcccgctcgttccgcccgagagattgtgatggctcccaagcggaagagacagagcgtcgttgcttcgatcattccacccatcgatcccaacagccagcttccgttcgctggtaatcacatgtccatcattt

SEQ ID NO: 123308 - DNA, 386 bp, Zea Mays
tagacactacttctacaaacatatcttaacctaaattaatgtcttaggccaactcggctaaacacgactacttagcctacttgaaaggtcgtctatccatcgatccaaacctaaaagtacaagtaaacactgtttgacctaccttgtgattcccaaccatgtagctatctaaaaccacctaaaccctagctggagacaccaagatcgaagaagagcaactttgtcaagggaggataagcgacaaccccgatctccggatgcatcaagatcctcgagccaggatggaagattttcttgccctaatctttctcacttcattctagactttctctaaccatatcctacctaataaatggctagatactgaaaagacccatggaagaact

SEQ ID NO: 123309 - DNA, 443 bp, Zea Mays
gagttgtagtcagttatcatacaattttccttacatgcctccgcattgcagggaactgacgatacctttacttattatgcagcttcaaaattttaatttcattatttgacgtccacttcaactaactgaggttctatatcctttttcgctttagttatttgtttgtaatgtactgcttaagtgtactgtccatgtatgttgtctgtgctcccatgtttcttctgcaagtttattttattacaaggcaccaacatattcacccttgcatggatactgtgatcaaataatttaaagtgcttaaacattggaaccaacaattattggtaaattgcaataacattgtggttcataactttgccacaaatgtttattacatttgtacccacatttgtttactaacttacattaacacttcaatttacgcaattagtaacggaactggc

SEQ ID NO: 123310 - DNA, 476 bp, Zea Mays
gtccggccttagcgatgtcgattgttttggacgaatcgaagaaatatatgaactcaattttcatggttccaaacctcttactctagtgatattcaaataaaaaatggtttgacccttaagtgacgagatggacacattctcatcttgggataatcgaaattcgataagatcccaccttaccaggaaacgatgtctatatcgtggcccaacaggccacacaagtgtattatctcccatatgcatgccaaacgaaagaacatcttaaaggttgggatgttgtgtatatggtaccgccgcacgatagattacctgttcctaatgatgaagattataacttagacccggacacatatgatggagagttcttccaagaagatgggctagaagggcgatttgagatagacttaatcgaagctatcagaatggaagtagatattgaaatggttgttgatgagaaggatgatgaggtgcaaaat

SEQ ID NO: 123311 - DNA, 518 bp, Zea Mays
gggatcagcttcagcaaaaactggcaccggcacttcctcagcagcaggagcagaaggaccgacatcctgatccaagcatgacactcggtgaagacgtctctttttctttttcttccccttagcaggagaagttggttgagtggctcggcgaggacgcttcgggcgaacactgtcagacctctgaatatccaaacctttgccagcctcggtaatgggcgctacagccagtattccagcaggagctgcatcagaggaatcttcagccaacatatccagcatggcacttatctctgcatcacttggattcaaaggtacctcgaaatgaacctgcctctcgtcgtcggggatttcaccaagtgaggcgaccaaagcactaacctcttcgggagagggtcgcactctaaggcccaaactgctatcaccagcaggaggatttgacataaaactggtaaaagccttggaaggaggcagattctaggctaagtatgcaataggagcaccgatgtttaacaccttgc

SEQ ID NO: 123312 - DNA, 592 bp, Zea Mays
caccaccgtaccgccccacctcgcggcaagctctcatctcgtcgtgatttgtcggtaagtcgcttccagatagttccttggtctcttggcatcatgttggtcgcttcagattggggattagcgcactggggtgctcgggtccatctcaccggtgtggctccaccttgggtacaacgccgccggcctggagatgtgtcggggaaagaagaagggtgggggagcttgcgatgtgaaaccgacgatagggattagagctgggtttgggtatctggtgagccattggatcttggtgtacgggtgagatcgaatccagccaaataggatcgacggtcgggataggatctcagttttcccctttcactatcttgatctggaccgtgcaagatcgatccggcgcactgcgttgatttagaatagccaccgtcgatattagatcttgcggccatggccgtctaccgattcaacctgatggggatctaatcctaacggccgggtgatgatcggacggtcgtggtcttaggataccccttcgactcaggaatcttactaaagagtccctgaacttcctaggaaccaacccgccatcccccac

SEQ ID NO: 123313 - DNA, 276 bp, Zea Mays
ttgtaacttcaatacacttcagccaatcatcatttggttcatcaaacttatctccaaacctgaaggtgtatttcagccggaccaaatcaccttcgctagaatcattgatggtttccttcggcatttcccagccttccgcaagcggccacactctaaatgctatatgctcttgaattaaatctcctgtatcaatgaagagcaaacagtaccaaatgccttctgacatgcttcggcagattcatcaatttcaaccttctgcttttggagaccgaagcg

SEQ ID NO: 123314 - DNA, 312 bp, Zea Mays
agcctagtatttccaaaacatgcttattttgttcttacaaaattattttactaatcttacctccttaaaattcaactaagttgacattttctcttgtagatggtacgtacaatccaaatcacccgaaccaacaccaactacatcccaccgtcacggcaagatcccgtctactcagtggtagtcgaggaaatccctgtggatttccctcacattcgtgtggaaaacggagttattctgtaggatagctcggaggagtttctacctatgcccaccccgttggcagaatccctagccttcacagctggatcgtca

SEQ ID NO: 123315 - DNA, 422 bp, Zea Mays
gtggcatactcagcctggaacttgcctcctcccaaggccttcactctttttgtgtcgaatccacctgtcactgatggcagtttgggccttagagtgcgaccctctactgaagaagttagcgtcttggttgcctcgctcgaggaaattcctgatgatgaacggcaggtccattttgaggtgcctttggatcctagtgacgcagaaataagtgctatgcttgatttgctggctgaggactcttctgatgctgctcctgctgggacattggtggtggcgcctctcccagaaactggtacaaccttgaatatccagaagcctgccggtactcgcctgagacgcccttaccgggccaatcaacttgatccttccgcagataagcagaaaaagaaaaagagacgcctccggcgagtatctagtttgga

SEQ ID NO: 123316 - DNA, 398 bp, Zea Mays
ggtgagtggaggtgctgacacacaccgagtcaatggcatacccggtcttctttgtaaggaacacttccttggcttggttgagtacgatagagtgatggtgccagcctactcgttcaaccactacgccattgcccccgatgctgaagatcgagtcggtagggtattcaacaacaaggcaaagcgggtgaagcaagagttgtgggtaagtctttcttgtcccatattgctcaatacattgcattcgttggacatttttgaaataatgaatggatgcatcatgtttgtatatataggatttcttcagatgtcaggagggatatgaggacagggcggatgtgttggctaccagatgttgtaaaaaactcgccgtagatatgcaccaccaggcgcgcatccag

SEQ ID NO: 123317 - DNA, 456 bp, Zea Mays
gaggatttaaacaaaaaatttgcggagattatcaatattccaggaatggtctaggtcttcgtcggatggcgttgttagcctatatgcgctgggggacgcctttgacttgacgatgaatggaccctcccactttggctccagcttgccccgtgactctatccgggtggttcggacgagtacgaggtctccttcgttgaattctcttgggatgactgcgtggtcgcgccaggacttcatttgagcttggtatttgttgagggcctgcagggtgaagacgcgatctccgtcgatgaggtctttggacattggttcgtctacatcggggacgactgatgcacttgttcgaggtgacccgtgctttatttcctgcggggtcatggcctctgatccatatagtagacgaaaaggagtgaatccaatcccccgattttcggtcgtgtttagtgcccagactgc

SEQ ID NO: 123318 - DNA, 325 bp, Zea Mays
cccccttcaaattttggaaatgacatccatggtatgggtaaattatacctccatctcctctatactacgccccaacctcctgattacgattcagattttgtcctccataccttcggttgggttcccgtggcgcaggtagcggcgctccactgcaaatccttacgcctagcactgactcctatgattccatatccctcgccatctactccagcctcagttccgccacctccttcctagtttgctccaactgctgcgcgagccgcaccctttcatccatcgccttctgcgccacgctcgccgccaatcccacctgcgcaagcagttg

SEQ ID NO: 123319 - DNA, 515 bp, Zea Mays
ctcattaagcttcatcactccattgatggtgttatcttgatgaggttgggttagctttgtcttgcagtttaccttggtcaagtccttagtgaggcaagccacttcttgcttgagtagctcattttcccttgcaatcttctttaatcatgtttctacaaacgcattcttatcacaaacttgtttgtaagggggtgagtttgtatcaatcaaatcaatgcaaaaagtagaggtgtccttttataaatttagttgtttcaattttaggtacttcaggggtgctacatgatagcttctagcttgttagttagctcatcattatgtttgctaggtatttccattttattaagcaaacttccataagcttcttaagagctagctaactttgcttttaggttatcatttttcttaattagttgttcattggtatgtgggcttgcactagcttctagttgatcaattttattagttagctcaactttaagatttgcaaatgttttatattgttcaagcaaatt

SEQ ID NO: 123320 - DNA, 392 bp, Zea Mays
ccggtctccagtctcaggtcaatgcatatatctctagctagtatctgaagagtcagttccacacgtacgtacgtagatgtagacgatgcgtgcgtatcggcaactgcagtctgcagtctcggtcttcttcttcagttgtttcatcgatcagtacgtgcgcacgtcaccaaactaggaaccatatgacgatcgcattgctgacacacatggtgatcctgttaccgcgggtgacaatgcatggaaatctcattgcattgcgcgcatgcatctacatctacatagacagagatgacgacagcagagtactcgcgatactactgatgcacgtgcgttcggcagcagatagattagattaaatgtctcgagtaaactgttggtgagcttaataacca

SEQ ID NO: 123321 - DNA, 779 bp, Zea Mays
acgagctgttggtaaacctccgttctttgatgggaccaactacccatactagaagattcgcatgtctgtgtatcttcagagcatcagttaccgggtttgggagatttgcctcgatgcgaattttgatgctacaagtgatcagatcactccaattcaaatggagttccatgattcgaacaacaaagcttgaaacgctttgttctcgtgtctcttgtttggtgagtttgagcgagtgggacatttgactacggctcatcagatctggtctacccttgagagattccatgagggcaacgatcatgtgaagaccagattgtttgagacgtacaggcgagagtacgagaacttcacacagttggctggagagaccatcgatactatgttctctaggttctagtcaattgtgaacaagatgtgtgccaacaaggcacaactttcctatgacgatcatgagagagcgctgaaattactacatgctctagatcggagggtttcagaggtgaaggtctcggcgatcatcgagtcgcccaactacgagactctcatcgtggatgagctcttcagcaagctcaagtccacagagattgaccaccagactcgggccaagattgataatcctggtgcacccaccatggttgtgtgggatggatatcccccgagtccccatgaacactaaaacgtgtcgtgggccgcctgacaagttttctcttgggccgtcctacgggacaggccaactaaatgcagccatgctaggcaggcccggtctgagccgacgaaaa

SEQ ID NO: 123322 - DNA, 392 bp, Zea Mays
cgtggaccagattgaggggctctcaatcggtcttgtactggaggcatcaacctagcaaagacagatgactggggtcccccaagcggagtattgtggtgtcccgaaaggatatggtggcataccccacatctgattcgggatatatggtggtggtggtatgtatgtataatgatatgacataggtgtgtatgggagtggaggtgtccatgtgtgtacgttaggtcttagttggacattataacctcccgtcctttccaattggtgaggtggtccaatcggcctaacctgctgttgctcctgggtgggtaagcgagaccgctttggtggctgatcactggggccgaccttctttttcacgtatttagacaataattgatcaaaggttgggctgg

SEQ ID NO: 123323 - DNA, 397 bp, Zea Mays
tcgaatcctgagctggtgataacctgacctcagatctatctttgagaacacgctggctcctctcagctggtcgaacagatcttctattctcggcaaggggtacttgttcttgattgtgacctcattcagagctcgataatcgatgcacatcctcctggtgccatctttcttctccacgaataggacaggggcggcccaaggtgaggtacttggcctgatgtaacctttctctgacagctcatctatttgcttcttgagttcaaccaactctggtccagataccctgtaagctcttttagaaatgggggcggtgctaggaagaagctctatggcaaactcgactttccgctcaggtggcatgcctggtaaatctttcgggaacacatccagaaactct

SEQ ID NO: 123324 - DNA, 432 bp, Zea Mays
ccttggctagacccagcagcagcctcctttggcatctcccacccacttgtgagtggccacactctataagcaatgtgctcctgaactaagtcccttgtgcctatgtaagtacatactgtattaaaagcagcctggcatgcttgtatatcattcccaagggcagtggatggcctcctaatgccgaagcgagaccatataggacgttgaataatccccttaatatcctctctttcaaccaggtcatttttcatgtagaaccactcctgcatccaggcctccagccatctcttccgaaatgtcggaactaggtagctcacctcagagtgaggtacaaagttgtagcaaccgaagttgttgtgatattgctcctttccgatagccttcgtctcataagacagctcatggatattacagaagcattttgcatttggt

SEQ ID NO: 123325 - DNA, 372 bp, Zea Mays
tcctcaagcacgattttgggtccgtccaaatgcctttcggattcttgattttggaataaaaatatccttatcgtcgcctccaaacctgaccgactcacgccaatgtcgcttgctgtcaaagatgaccgacccatttttacaacaaagtttggtgcttggtctaaccagtatagactcacttgcatcaaaggtggctccataggagcataatacatcagcaaccgaattagaagacctatgacatttagagattttacaacaagataaatcaaagttgattctagattaaatctctctaaatagcatccctagttaggcttgatcgcaactagcatatgtcagagccaaagccaagatttggcatcaattttc

SEQ ID NO: 123326 - DNA, 397 bp, Zea Mays
aacggattactttttaatgaaatggtgcttttcacaggccaaggtccaagggaaggcgaggcgacaaatgaagtgtggcgcacgagggctgggcggacgccgattgatccaatgcaattgcaatttgcaacccgatacgtgcgtcttcccatggcagggtctggactctggggtgaatactggtacggcggcgaggttaatcctaggttgcgtggcgtatcgcgccttctgctgccaagctttgagagttgaaacccactagcagctgtggtagagtattttgccaggaggatctcggtggcagtgcactttggacggtgggtttagagaactcgatttctcgtactcctgtgcttttcggcccactagtgtatgccgcgagccctgcgtacgtgct

SEQ ID NO: 123327 - DNA, 680 bp, Zea Mays
caagagtactgagccccgacatgtgggcccaggaacatagcggatgtagctactaatacttgctgctggagcgatcttcttgcgccctgacacccaagatttgtatagcctcggcgtgcatggggaagcttctcgtgcaagggatgagtacagtgcactgcacagcatgggcgcactattttggcaacggactggacaggcgcgccgtctgcagggtggccctggcgccacctaccagtggaatggacaggacgcaataaatgccgtgggggcacatcgctcgccagaagggtggacaggcagcatgtcctttccgcaataaatgcggaggccgcgcagcctagagcccttacgttatgctccacccgctggcctacatcacggacaataagccatgtggcagcattagaccctcgaccgagtggggagcggaggcgctccggatagagcctggacacgtgtcattaccgaacccatacctaggtcacgacacttcctctctcgggaccttgttatgggtggtccggagctcacttggtggggtccgaaccctatccaatggcttcgagctgctttacttcggcggtccgggttgtgcgtataggggtcttgtgcctcctgggtccgactgtgttgtctccgagaacgccaccttaactgctcacgagatgctcctgggg

SEQ ID NO: 123328 - DNA, 297 bp, Zea Mays
cactttctaacctatgattctacagtcgcttatccttgtatgtggcaatgaatccacctttcctaagcactacatgttgttgatggttgttgacctctggcgtcctgagatctgcatgctcctctgccctcattaaaatcttacaataggcagatgcctatttccctctttctcccattgagtaatttctgcctgagtctaagacccggtgttccctaccccacttcaattttgtgcaaggcgatgaaaatacatataccaatttaagaagagattccaaagccatgaagatcgcaa

SEQ ID NO: 123329 - DNA, 617 bp, Zea Mays
gcgagattgcttcatgaggggtctgagttttaagctgcagaagaaaatgactacatggtatgacctgacatttaacagagcagtcagtgtggcaattgcagtagaagacaaggggcgggtgcaccaaaatgctaaaaggatgtggaaaggatttgggtcttctcaggacctggcaaagcgtcaaaaggtaataatcagaacagccggctctcccaatactccctatcgccaagccgcttatcctgctaaaactcctatctacatccgtcccactaatatgcaacgccaatccctacccacaaatagccaagttccacgcttgcctgctcccactagcactaaatatccttgctacaactgtagaaaagcgagacatttcattaaagattgtccctatccccaccaaaataactccaatttccagagaccagcaggcaacagttctcaaaatcagaacaagagtactcttatcaacaatgcaaaagggaaggacaacaggaaaattggacgagtattctatactcaagttgatgtgacttcagaacgacatcctgagcttatgggtatgttctttgttgcccatcatcctgccaaagtactttttaacactggtgcat

SEQ ID NO: 123330 - DNA, 651 bp, Zea Mays
ttatttttaaaatatatgaggtctcttttgcaaaaatgctcgggcgaagggttatcggttaatatgagccgctcagatctagatcaatggccctgatttaacgcgtgaaggggtttgcagatatctaactcaattagaccgtttcgatctcgacgatctaggtttaatgaagacacaatctaatcttagccatccgcaaatagatcaacggtccagacctatccccgaactggtacttgaatgatctaatcttgtgcgttcaataaggatccgatggtcatagtgcaccaccacactcctctcacctttttgccgagtcagagcggtgttgtgacccatacccggcgacgccatggccggggtaacccatccgtggtactggtgccccgttccttcccctcgaatcgctcaatacatgtagaagaagatcacaaactcgaagaggctacttaccggtgacgaattacgatggctcgagctagccacggtagacgacggcttggtggctccggtgagaaatcatcggtgacctggtggtactcccctctcgtgaaggctacggacacgttaccgaagacgtggcaaagcttcctgtcctggccctaagaactcgacgccggcgcacgcatgaatcaacgacggagacggatt

SEQ ID NO: 123331 - DNA, 676 bp, Zea Mays
tcaattaattttagacataaaagttagaaaaagtatggtaaattaggcaccaaatcaaataaaccctttaatcttgtatatatataatagtaaatatatattatatatataactagttctaaaaatgtaggagggccatgatccactttgccctcatgtgggtccacccctggagccgagcgacgcggttttgggcgagtcccctcgaaagtccggaccagatccaagtggtttccaggcgtcgttgaaaaatccgctctcaacctaaagtacatctgcattcctggagtcagaaaaaggtgggcaacataaaaaaacaggtgttgatggctaaagaaattcttcataagctggaaattgcaagagattctagatctctatccccacaagaagagtggctaagacaacgattaaaacatcattctttggctttggtttcccttgagagaaccatagcccgtttgaggagtagactgctgtggatgaaagaaggtgatgccaacactaaatactttcaccagcacgccagatataggaaaaagaagaattttattagaaaaatccaggttcaaaacagattaatcgttgatcaaaaggagaagaaggaggctgtttgggatttttataattcgctgcttggaatggtccctcccagagcttcagccctaaatctgga

SEQ ID NO: 123332 - DNA, 811 bp, Zea Mays
caaacttcgatactgcttgtgctcttgcccaattgcaggaggaggtctcagaaccgtctcggtctgagcaacgcaagtatggatctatgccggccatcaagacttatcaatcagcattgcctctacctcgccctcctcatgccgacacgtcagctgctgatcagtccaggctgactaatgctcctcgcactcggcatactgatgataagttggcatctctgaaggcctaccgtcgtgctcgagggctttgcgacaagtgtgctgagaagtgggctcctgggcatcgttgtgcacctacagtacagcttcatgtcttggaagaaatgtgggagttgatggaggcgccgtctgaaacaacacctattaatgttgagtacactgcttcaggagaattgctgtccctgtctctctcagccgtctctggtaatccctctcgccacaccttacagttgttaggggagtgccagggccatattgtggtgatgctaattgattcgggcagttcccactcgtttgtcagttccaacttggcagcgaagatgataggagttactttactaccacaacctgtcatagttcacgtagctaatgggggcaaggttccttgtacacaagtgttcaaatcagctggctggtcagtgcagggctataaatttttcacagattttcgagtatttcccctgttaacttatgatgtggtgctcggaatggactggctggaacagttctgtcccatgaagattcattggagggagaagtggttgtctcttccttaccagggccgctcaatagtgcttcagggcaaatttca

SEQ ID NO: 123333 - DNA, 632 bp, Zea Mays
catctttaggagttgctttatttaaattgcgaaaatcaatgcatactctgagcttacctggctccttcttctccaccagcacaatattggagacccactctacgtatctgcaaggtctaataaaattagcttctagcagccggtgaatttcatccttgattcatgggagaaggtctagatgaaatattctagctttctgcttgaaagatctgaaatcggacttaatgggcagccgatgctctacgatctcacggcttaatcccggcatctcagtgtagctccaagcaaagcaatccgaatattctttcaatagaccgatcatttcatttttaggatcggtctccagggtcttgttcacaaaagttggccttggagttctgccatctcctatgtcgatctcctccaacggatcggccgatgtaaacccctgtcctaatttgtcgagatctctgaattcctctatcatgtcccccacagagaaattagatgatctttgtgtgatggcggactctccggtctcaggggccggatcatccgtgatattgattttatgttgtggtagatgttcggtcttaaagaccgaactgttttgtgacaaaccagaccatccggttttagaagccgaactatcc

SEQ ID NO: 123334 - DNA, 386 bp, Zea Mays
tgagttctgtaaacaaggaccaagggttaatgcccgaccacatgaacaagggtgtttctcaaaaacattcaagtgatgaaggatatgaaacgcctatcgacccctgtcctagcatagatcgggccgctcggcgtcaattgcatcgtgacccagattatcatccacaagagtgtgaggtaaagtacacatcttagtttcatatgtgtatacctaattagttgatttcacaatgtctattacacatgaataggaggtcttgtctcaatatcgtgcgatacttgatgaagtcgtggcacattaccaagacgcaccggggacgaaccaagacgaagacgcatcggtaccgaccgatacaaccaccgagaggtcaaagaaaaggacacaga

SEQ ID NO: 123335 - DNA, 391 bp, Zea Mays
gaccaccagagggctctgtttagtataaaaatacaccaccaagcttctcacctaaaccttttcaaatgtgctaattcttcaaatgtcccataggatagcaacatctttagtatcgacttagtattttcaaaacattttgcaaaggcttttcgcttgcatctcacacaactttattctaatgcataagcaaagttagatggcacatgtggcactagataactcgtatgcaaaaacaattttgtctcttaatagtatagctatctaattatgaccacttctctaaacatcttacactagtgaaaataaatgccctatattttatatcttttcctacaatttcactataacttggacttgattctcacaaacaattagtccaatatcattctct

SEQ ID NO: 123336 - DNA, 910 bp, Zea Mays
agactctccggtgtgcccataaccggtttttaaaaaaatcttcctcgcccgaatagctcccatgctcttcttttccacccactgttctctgtctgtccgagctctaggcggttttctcctctcatctccggtggcggtcgccggctgatcggctccagtgagcaactctctgggtagtgctcctccctctccattatccggtgagctaaccttgtcttcctccctccctctattctttagttgtatgcagtgaagcctatctctcccacctctttgtattcacatcaaaattcactccaaatttgtgaatcatttctaatgtgtgtgtgcctagccccctattgagttcctttgcaggtcttgagctccctagggagggtttcatcttctcaaacagctatttcaccgctattcgcaattcccgcacaccaagtgctcggtgaaatgcaccaaccactcaaacttgatcaaatcgaccctagttttttccatcaccctcatgccacctccagtaacactcacaccaaatttcacgcctattccatatcccaaacatcgaatacaccattgttctccatttatagcgatcgtttatgagatgagtgcctaaaatttattttcttcgcaaaacttcaaaccaagcacacacttcactcattttcactcatatatacctactcgtgaagtatcagatcaattctaagtcatttcatgcctcatttcatatttcaaacctcctatggcataattcatcgttcaaacgtcgttctcacgtcgtttgacccctggttatccaaatcactcagtttttgtgtcttaactctctgtgtatgtatttattcacatttcatatacttatgactatgtgactaatatgttctcacctcttctgtcatttcagtgatctcac

SEQ ID NO: 123337 - DNA, 287 bp, Zea Mays
cggggttgtacggctctggtagtggtgaaaggccggctgcaataaagaatatgatggtgaatttcgaagctagaaacgaacaacgaagcaaaaactttaaaagtacctataatcatggcgcattcaacaacttcttcagcttgtttagcctcctcacgaccgcccttcatccaaacattagagtaaaaccttccgtctagtaaagaagcttcaggcgaggggtccttggtgtcgctagctgaaaaaatatattctgtctgggctgcggccttaacatgttcacaacc

SEQ ID NO: 123338 - DNA, 335 bp, Zea Mays
taactctagcgaaggtggtttggtccggctgaagtatacattcaggtttggggataagtttgatgaaccaaatgatgattggctgaagtgtattgaagctactagtgacgagttacttggggcgtattccaaaaccgaggacaatgccttgtccgtagccttcgagggtcggaataagaaaaggttgaatagggtattcgatgctattggctttgtataccctgactattgttacccactgcgagggcaaggggtaaaaagaaagattgctgcttctggaaaggttgccgcttcggccatcacagctgagctgaagggcaagaagatgaaggttc

SEQ ID NO: 123339 - DNA, 590 bp, Zea Mays
atttgcttttcctgggtgatattgtatttccaaatcgtagtctttgatcaactcaagccatcttctctgtcttaatttgagttctttctgagtgaatatatattccaagcttttgtgatccgtgaagattttgcacctgtttccaatcatatagtgtctccaaatcatcaaagcatgcactacggtagctagatccaaatcatgcgtaggataattcttctcatgcttcctcaactatcttgaggcataagctattacttttccttcttgcattagtacacatccaagtccaaggtgtgatgcatcgcaatacacatcaaatcccttgtgaatgtctggcattaccaatattggtgtagtggttaatcttttcttgagttcctcaaaacaattctgtcatgcttcatcccacttgaattctttacctttctctagtagagaggtaagaggtttcactaacttggaaaaaccttcaataaatcttctgtagtatcctgtcaatccaagaaaacttctgatcttgggtgcatcctttggttgcttccaatttagtatttcacttatctttcttggatctactttaattccac

SEQ ID NO: 123340 - DNA, 297 bp, Zea Mays
gagcatctttgcagggaacctctccagcgggattaccaaaggaagaaggtttgctcacaccagcataaccagcgagaacatcagcaacgatgttctcaggcaccacaacactaggtcttctcatcaggattcacccggtgcaaacagccttgtccattgcattgtcacacattgctttcataacgacacgatcatcctataaggccttgatgttgtgacgagtgacttccaactcttgcgtgacaagattcttcgaggcgcgcaactccttgatgacagaatctttcaaagacacta

SEQ ID NO: 123341 - DNA, 847 bp, Zea Mays
ccaactggcgccgcggtgggggtggccgcaacgccggcaacttttcgcttgtggccgctgaggtattttatgctggcagttcttcaatagcacttgcaagtcctcaacctcacattctctgcagttaactaattatgccttgctatctcgcccttgtcagacaacagtatgaaatttgttcagttgctaatgtgaacctgcgagcatttgtttagcttagttttaggttggtttcaacgtagtaagtgtgtgaattcggaaagcagcataagctctagccactgagtattagttcagttgctacatgtccataggttcatgctcagcgagtcagcctttatcattgacattgtgtcaagaaatcttcgtatttggtgcacaccatgtgccaataatcctccctgcttaaaaattccgaagctgtcttgatctttatttggttttacatgattgcatgagtttaatatgtagttgaaaagtttggttcagttcagaatgattatatgtagattgcttgattagtgtgccatcttagttgttgtggttcgtcagcaactacttacctaagttatatattgattgccacctagatcttgcaacggaggcaaggtataacttctggcggattgacgataaaggaggtcaatgatgcacttgatcgtctagctacaactgagaacaggtagctgcagcagctatttgaatttgtctatgatagaactgtcaggagttccttttcatcttgataggtctgagaaggctttaatactttccaatctgatcaagaaaaccaatgcccttgaaatgaagtggcttctgatgataattcttaaaggtgtgatacgtg

SEQ ID NO: 123342 - DNA, 341 bp, Zea Mays
ttagcttgcatgccggttagtgcattttgtgtttgtaggatccatcgcgagtgcactggggacctttgggctatggagtatagatcacgattaaacattccttcagggcatcctaataataactttaaatgtcaaagcgggctaaataattttactgcaattcagaaatacaaggtttcgttgattggctgacttgtgcagcttttcgtattattgactatatcggatcatccaacattacgtttacagaccacttgtgatgctactgccactaaggtgctgtttggttctgagaatatagacggtaatccatttacagtgataaagaataccattgttta

SEQ ID NO: 123343 - DNA, 282 bp, Zea Mays
ttgggctatgcctatagtgctagaagagagtacaatagacttagtccttggcatgaactggttgaaacagtggaatgcattaatacattgtgctagaggaacagtagaactttctagtcctgatggggatagatttgaagtaacagttgcaccacccacatctaacacacatgatcaatggtaaatttgtgggagatcacatcgaaattgttagagaattcccagatgtcttttccgaggagttacccagaatgccaccagatagggaagttgagtttgtta

SEQ ID NO: 123344 - DNA, 314 bp, Zea Mays
catagtagtaattatttctcccctctggcagatggcctcggataaaaccacgcctaccaccttaggggttggagcaaggtctcccctaggtgctgaaggagaagtcgttggagaagggagtgaaacacacctccccgcacctccggagatgccattagacttagcccaagttctggccaaccaaacccgactcattgaggtcctcaccagaagccttgagaaccagcgcccaaatggtggaagacctcaggacagaatgggagattttctaaggctcaagcctcccacattcgccggatccagcaatccgctcg

SEQ ID NO: 123345 - DNA, 533 bp, Zea Mays
gtttgctgtgaggatagtttttaaaatgccgattatgttgtgagaaatgcatcgatggaaatttatgtgatgagtaagctggaaatacaagttatgtgaggattgaattagtacacgtatgtgtgtctgtgtcgtggtgtattataatagtggtggtgtaagataattgattgaggtgtgagggtatatgccgtaatatggttatactcgcaacgaagggagatgtatgtcttgtgtaacacaacgttagattgctgtcgtataaccgtgtgaaggatgcttccgatggtcatgtgactaaagggtgttgtagtggcaaagcgagaagtaagtctaatatttttttaaacgattagttgatagcacctatcggcttcatcatgatttttgttgtatggcggatcgaagccttgtcgtcgtagtctcggggaattttcggaaatatgctggtgttttactaatggggttgaatgtacttgtgatgtattagaataactgcgtatcgtacgagtatccgaaaatggtgaaagttg

SEQ ID NO: 123346 - DNA, 630 bp, Zea Mays
acgaactggaaaagatagcctcgggacaaaccacggttcccccaaacatcttttctagggatatttacaaatcctctgtggtattaaaagaggcgtcctgacctgctcccgaaaccaacgtgcccctagccggcgagcccgatgccatgcagatcgatagagagcagggcggggccactccagcctcagactggcgaaccacatacctagagtttatccttcgaggagaactccctcttggcaaggccgaggcctgatgcctggctcagcgggcgaagactttcgtactgcttgaagaagaaaaggagttgtaccaatgtagcccctcgggaatgctctagcggtgcatccccattagccagggacaagaattattacgcaaaatccactcaggggcttgcgggcaccacacagcaccctggaccctagttggaaacacctttaggcaagggttctactggccaactatgatcaccgacaccatcagtattgtgcgatcatgccgaggatgccagttctatgcaaggcagacgcacatgttagtccaagccctacaaacgatccctatcacttggcccttcgctgtgtgggggttagacctcattggccctctacagaaggcacccggag

SEQ ID NO: 123347 - DNA, 625 bp, Zea Mays
aaaagccaaaaacaatagggttgacagctaaaacattgacgaatttccatactggacagttcacagccgaatatgtggaagcattaaaaggtatgcacatattctctctcaaatgtaagagagaataaaattactacttcttaaaaatataaaatatgtaactaatacacaatcatttcactgcacagcctcatacccaaataggtcatactacggaacaccatattatgaatgctcttattgtcatgctgtgttctggtatgctgaaagggtcaggagtaatcaacaggattcatctatcagatataacaactgctgcaaaggtggaaaaatcaacattcctcccttcaagcctcgacctgagcctttagcatctcttgcaagttttgatggtgatgccacatcaagaaaattcattcgcaatattagacagtataattgtttgtttgcttttacatcaatgggagcacaaatagataactctgtcaatgatggtcgtggtccacctctctttaaaatttgcggccaagttcaccatcgtattggaactttgttgccagacgatggatctcctccaagattcattcaattgtatatttacgacaccacaaacgaagtccaaaac

SEQ ID NO: 123348 - DNA, 415 bp, Zea Mays
taccggactaccgagatgccttcatcgacatcgacacgatgaaccacatcaccatcaaatttgacgatggcttgaaggtcggaatcgaaggatccaatattatgttgttggagggcaagacctatgagcacttcatacttacaggggtgtacttcatcctgaggctgaccaccaacatcatcggtcttagccagctcgatgagggaggttgcaatgtccacaccaagcatgacatcattcgaacccatgttgacaaggggcgcttgatcacatgagtgctcggtgaacgtttgtacttgctacgcgtgaagattgtacgaccactctgtctgattgaacgttccaacaacaacacgtggttttacactataaaatttaaggattagattagattacaatagaactttatttttat

SEQ ID NO: 123349 - DNA, 595 bp, Zea Mays
tgtttgttctagtcatggatgttctcaataacctcttcatcaaagcagatgatagtggcctactgcagcccttagctggaagatctataaaccaaagagtctcaattttcgcggatgatgtggctatttttgttaaacctgatattgaagatcttgaagttgtcaaatgtcaaggccattttaaggggttttggaatagcctctagccttcaagctaatctgcataaaagctttttctatcccattcggtgtcacgatgattcagttgccttggctgcccagattttaggatgtgtggtgtgcctccaaaatttttcataccacttatcttggccgtcctttgagtttcaggaggctgtctattggcagtttgcagccttggatccagaaaattgctgataagcttcctcattggaaagctgaccttttgaatctgtctaggagagaatcaccttgtcaaggctgtgctctctgccatcccagtatatcttcttattcgctcaatgttcctaaatggagtatcaaggccattgacaaaatcaggaggaacttcttatggaaggaccgaagggaggcgagaggaggttgttgtctc

SEQ ID NO: 123350 - DNA, 913 bp, Zea Mays
gtgggaagtgccatctgcaatggtaacaagcaaggaagcagatgatggacttaaggaacgaagagaggtagaatcatgagtcatatgaaaagaagctcctgagtcaagaatctaagcacaaccaaacctgacgacgaggcacttgatggtggccctggtaggggcacacgagcgacaactgaggagaccatagaagaagctgacgaaataacacaaaggcactccatgcgtcgagtcaggtcgagggcccaatcgtgaagagactaaggcaaggcagtggcagcaggagtggggcacctccacgacgacgtggaggacaatgcctacatttcttgatggtgtgtgttgtcgccatggagtagtggcagaagacaactgcaacattgcccctagagcaagagggaccactgctggagccgaagtagtaggagctggggcaggcgacgcagttagagcaataagaactgtcgaggaaaacgatagcacaccacgaagacggatgtcctcacccgggctaaggtgaccgcctcaaccagggatgagagaggagaacgagcgaggagctgagcccaaagctgctcaaactccaaacgaagacgtcgaggaaactcatggatgcgaagaacaccggtgtgcccctgctggaggacacaatagggacaagtctgacagtacgatggctctagcgagtcgagctagcaccacacatcagtcaactcatggtagaaggcatcgacgaggagtcctgttgacgaatagagctagcaagctctagggtggagatgtagagagcagtgttgctcggctggtaaagagcctgtgcgcgctcccacatcgcctgagtggacggcaaagtagagagatccatagcaaatttcacctccatactgccaagaagaatctgagtcgcccg

SEQ ID NO: 123351 - DNA, 308 bp, Zea Mays
acttctggtggaagcggatgaaggttgacgtttctaagtatgtggccgcctgtgaagtatgtcacacccggttctaaggacaaaaccagatgttccactatacatgaaatcggatgagaatcacatgtatagcaatgtcacacaatggattatatcataacacattgattttttatatcaaaaccagtatttattagataaccactatgcaacagtatcattgacgactatcaatatttgtcaccgtgtgtataataatacatatattattatcaccgagatgatgcaatgtaaaccaaatagtcgac

SEQ ID NO: 123352 - DNA, 400 bp, Zea Mays
cgactcgcccaaggccaaccccagatgtgcagcacattttttactcgcccgagggcgtctcaggcgatgctccggaaggtgcccacattggccagccactctttgcgtctgtacgttcacctgccccgctaaaggtgccaaagtcaacaaaggacaacacgactacggtctaatctacctttaccgcccactacgacggtcagggcgcgaatatggggcatcgttcccccattctgacctctgtttcaaccactctgagcgtgactacatgtaacatctaatctcggcctctgcctccagagaaatcttcacctcacccgagctcgacctcagccaactgcccagtaggagagcacgcgcattaattgccacctactctcccgcgaacctcacaaaagac

SEQ ID NO: 123353 - DNA, 354 bp, Zea Mays
ttggtgacttagatcgactcgtccatacccaacaacttgacctacataataggttacataacctattcaaccaatctagaagcaaacaaccaaaccagattctgactaatctcatttaactcacaaccatctactaaactagctgctctacctatttgttacctataggtctatctcaacctcttgtcccaaacctagatggagacaccaaagttcaagaaggaagagatcaaccttgttgaggaagaacatgagtcaagctagatccccaatagaagctagattatgccatagtagactcattctatgccacctacccactaaccatctgtccttatctacaagtcaacttaa

SEQ ID NO: 123354 - DNA, 334 bp, Zea Mays
cgggggtcagcagcaagtggtcgcacctcagtctcgtcacgctccctgaagcgaggtggtggaataggcggagcagaaatgggagcgggagggggaacagtggaagctggagtggtggaggtggtgagtatagcggaagtggtggatggctctggagcgacaggagctggtgaagtggaaggtggagtagacacaattgcggaaggtgtggagggagcagtggagtgaggctaagatgcgaggcggcgaactctgtaggctatctgatcagaagaaatctgcaactgtcctccccgctctgcctgctctactgccgctatagctgcaagtgctg

SEQ ID NO: 123355 - DNA, 817 bp, Zea Mays
aactgaaaactgctgctcagcacttgacatcatgttgatagtgccctgagaagaggagaaagtcactggctcccatctgagcttcccattaggattcctcctacacaccacatccttgtggtcctgactgcagatagaacacctgccactccactggcactctgcacggcgatgcacatcaccacaacggaaacacaccagccccagcccgggcttaggaacagcccgaaacctctaagtacttcctcccgaagtacccgagtcagaagatttgccacggtacggatggtggcgctgatgctgagacttgcccctcttgtgggctggacctcccatgttgcccctcctcgcgtcctggccacgaggctgatcaacatccgaagacttctgtgactccatggtatactggtgttgcatctctacacccagtgcctgctccactgtagtacggaagtccaccaacggaaaggctcctagtgcatgcctgatagaaggttttagaccctgacggaactggctcgccttctccatctcattataagccacatgagggacaaagcggaccatcttgttgaagcccacttcatactctgtgacagacttcttctcctgcttgtaggactgcaaatcaatcttcattttctccaggaaggtgaccgggtagaatctcctttcaaactgcctgatgaagacatcccaagacaggactcctggtgaggaggagtgcgcttcctgcacgcctctccaccaaatttgagcctctcccttcagcagctgtgtgccaaagcgaacccgatctccatacacaatctcgaag

SEQ ID NO: 123356 - DNA, 539 bp, Zea Mays
taatgatcccataggggatctagaggtcagagttgaacgtctaacgatggaactatgccatggaaacagggagcatgctcgtgatagccgtcgcatcactgagttgtcagcagaggttgaccgtttgcaacaggagattatggagcgggatagggcttttgactgggcggtaaattcatgatctatagcctgggattgcgaggcgactgtccgagcccgggtggaagagctaagcgtagccctggaaaatctgcaagcgtataataatactttgcacgaggaagtgcacgtgttgtatgaccaattacatccaaacgtgccactggaggttgcaacaatgggagctagtgcattaggagcagctggtggaggaccttatggggagatggatctctttggagcccctccttccatgaacatcgtggatgatcattctcctgaagctagcagtggagcgggagcagccaaggacacggatcactagattagtgtagtagtacgtggtttccttgtgtaatattaataaggaaaagtgagtt

SEQ ID NO: 123357 - DNA, 730 bp, Zea Mays
gacccatgaaactgggggcccgggttggccgcatcgctcgccctcatttaggaccagccctggtgcacactatggttgagaaacggtgacactcatggaggttatgatggaggcaacagaaggatcaagtgttcaattcttgaaaaggaagaaagaggaaaacaaaatacgtggattcaaggcaaaggtataagttggggcattctatttttttggtcaagatataatagagtgcatgatcaaatttaggatagatagaagatagatgtctattatgaggggaactcaaaattcaaagcatttatctaagtgacatttggtggatcaattacttgcatgtgggttagacctagtcgttacacatgaaaaatcatttgggaaattattgtgaaaaatgctaactcacgtgtacaagtgttgaaacacatttgaagttagcaagttcaaaaaagggatgcaaaatggagctagagatggtatttggggggcatcgaactaaagtaatggacaccagactagatggatgccaagtttggtgactagccctagctccacgatgtctgagtcacaccaatctatgggaattggcctaacagtctcggtcgggcagcattggaccaaatggtagcactattcatcgagtaggccccacctatcagtgcatatgcctattttaaaggaggcatcaaaccatggtcattggtacaatcgtggcattggcctagtttga

SEQ ID NO: 123358 - DNA, 341 bp, Zea Mays
actatacatgcaggaatttttcagcttgcaagcacaagaacacttaactcaatcatcaagcacaatcagggagagttactacaaattctcatttccacattgcaatgatttggttatcgagcacaactatcacatgcttatgttatgtaagttggttaccatgaaagatacactttaataatgtaaattagcaggtgacgataagttaattctaaactctttacctctcgcaacacatgatcattttaatgtcatcaaggtaccacaacatcatacgaggacatatgcatactagtttccagttttacatctacaacttctttactagttattttcaacca

SEQ ID NO: 123359 - DNA, 538 bp, Zea Mays
acaccacgatagtgtagcagtaacaagaaggcaacaggtagaggaggtagaggaagacgcgaggaggaagtagaacactatcagattattacaaaaatgttcctagctttctccaccctcctgtccacgcatataacaggcttcagatagtccactacaacccgatgacgcgtgggttcggccttcgtgcgcgaacgtccgtcctcggcccattaccattgtcaacctccggcccatcacttggtaatgattggctcgtctcctgtagaccacctagcacctcctcctgatcacctgatgctgcatccggtactgaagaaggcctgctggtgacattgacaccaagctacagcttagttcggcttaccaccttcaaaacaatggacacacggagcgtgtcaatcaatgccttgagatgtttttacggtgttcagtgcatgctaccccgaaaaagtgggtcaagtgactttctttggcggaattctggtataagaccacctctaacagattactcatagcttattaaaaacactatttt

SEQ ID NO: 123360 - DNA, 489 bp, Zea Mays
gatgaagtaagtagattggaggtataggttttaatcgataagaagtttgatcggtgtggttagattgtttgggcatatgtagtgtagtggtggtataaaaaaatgggttagaaattgatcggctaaatggcaagtgcggttagagttgttttgttacttgggattgtgtggtgaagtgatggcatgactacgtagccatcacgtcatctattgtgtgactatgcttaagtgtgccttgatataaattagagggtttatggttatgccatgatagtctagagctaaacgcttgtggtactcatcataatcttgcttggtagtcaaattaagtcttgtttgctcccgagctgaaattgctgcatgtatgctctctgttgtggtgatgattcagtaaatcaagttatcttttaggaatatgtgttctatataaaagatgtagttgacttcaatatctagcttgtactaaaatgtcatgaccttagaattaat

SEQ ID NO: 123361 - DNA, 399 bp, Zea Mays
atcgtggacagattgaccaaagtggctccagtcatttcaatcaaggttacttataaaggttctcagttggcagagttaaatatggctcgaattgtgtgtttacatggtgtaccaaagaagattgtttctaatagaggatcacagtttacctcaagattttggaaaagctttcatgagaacatggataagaagttgagtttcagtttggcctatcatcctcaaactgacggccaaactgagagaactaaccaagtactggagaatatgttaagagattgtgcccttaagcatggaggcagttgggacaagagtctaccatatgctgagttctcttataataatagttaccaggccagtctgaagatgtcaccatttgaagctttatatggcagaaagtgc

SEQ ID NO: 123362 - DNA, 556 bp, Zea Mays
gcacgaggcaccgcagagagaggtcgtgttcaagaacgaattggctccaaatctttaagattatggccatgatcccgttgagagatctcttcccctgacattcctttgtcgtttgtgtgtggaggcttgcagatttcgctgactggatcaagagatatggaggggtgaagttgggtttgtctcactgccgagcatagggagaagatcccaggtttgatgtgtccaggtcacgcgtcccaatgccatcttctggtatgaggtagaggggttagttagacacatttttgtcaatgggagcttagagttttgagatagagatcaaggtgaacgcgctcggttttggttcaaaggctgaaaattcagaaatctgaatttcagatttccccattaaacctccacttgaatggcttgcttggagtttttaataaactattttggccaaacttttataatatttattgtagcttagttagtgtatttcatgttttataattggcttatgccatgatttcatgtttttcatggtctttcacccttttttccctttctacttaag

SEQ ID NO: 123363 - DNA, 638 bp, Zea Mays
cgaatgatgaagtagtggtggtgctatctttctcttgctcttgggcagccatagttttcttcgaagccaaagttttcttcgcaattgtacttttctgaacagaaattttgacattcttctttgccaggcctcaaggtggctctacatcattcttggactcatcatcatcctctatttcagcatcgacagtcttctttgaccttttgtctgcacctttagcagcccttttcttttctctccagcctcgacgttgtttgaaggattttcatgatctgagtattcaaaccctagggcattcataactctgtaaagccaaagtttcccttggctctcgaagatagatttcatatattcatgctccctaacaagataatttccgtagacctggttacacttcttctcaatcaattttagccacctaaccgacggagatttatatgaagattgctctttaaagtaaaaaagccagcataacaagttcttcatctttcgacttcacctccttcgggagtttccacccagtccgagttggatagatattataagcaagcacctcttgaaccaaatctcgagatccaatctttttgataactgtattaaaggctttataacactcatcaatagcttcgttcatctcg

SEQ ID NO: 123364 - DNA, 397 bp, Zea Mays
tgccactcatcggtgacttaatggtctgattcctctagatgtatgcgaagactagcgacctcatcatcagcagtgtcgagagccgcgtgggcggtaaccaggctctctcggaggtctgttggcatttgcgatcgaagagttgggggctcaccttgacgaaaggacatcccagaatccttctgctgacccatcaagaccactcacctatgaaaggagcaaaaggtaaggagcaagatagaaaatataagaccccctgacgatgaatagattcataccccgaggaaggaagttaaacctcttccagtggagggggcgaagcacggtagaacaaggttacacacaaatcctacttataagagcaaactcaaagcattagaacgacacaactccaaaccat

SEQ ID NO: 123365 - DNA, 895 bp, Zea Mays
gggatatcatgtaaatgttccaggtggttcttttttattttttcttgtcttgcatagtattttaataggaattcataggttttaggatgcctgtaccagattgatttacttgactgcatctgactggctgtctctggttcccagactaagatgttagcggtgataggtgccaaccattggttgtattggttcgaatagttgaaatccattccatttacagttcaggttaataataactgtacctgccagccagcacgagcgatgattaggggcaaaccagctagctttgcttcttctttctttaatcaaactggtgaatgaattttgtaattcatggccagtcaatgtgtcaaaagaagcataagtgcgccttatttctgccaactctctgtaaacttaaatctttgtttcagtgtggacacacccgttattggcagtgtggtgcaacagttgtgcaactataattctgctaatagatagaaaggtaatgaacccaacaataataatcaaatgtcaacagttgtattattagacaatccaagcaatgttcttatctgttctaaggtaaattggtacatcagcatctatgtgtattagtaattttggctaaagacagtgttatgctcatgttgaagtcgaggggtgccctgttgctacaatgcttattcccattaaccaggtactgtatgaatcaaatgctagtaatattgaagaatcaatcaatatattaagttacaagttgtggagcaaatattcaagacacataacattacagttctgtgttgtttcactagttaactctcttgttgtatgttcaaacttgcttttagagctactgcagcaatctctacgcataagcaggctgcaggatgaagatactgatattctgtagaga

SEQ ID NO: 123366 - DNA, 272 bp, Zea Mays
caaattgttagtcgttctcattataataagagttatgttcatgctgcttataatgattcacatgctatgttttcctctagctccacttttattcatggtagaagtaggcctaagagaaatcatgttgtgtctcatgcgcctaggagaatgtgcaatgaaccttctaccatttatcatgcttgcaatacttcatttgtactttcatgtaagaacacaaaagtagttgctaagaagttgggatccaaatgcaagggagacaagacttgtatttg

SEQ ID NO: 123367 - DNA, 413 bp, Zea Mays
ctcgactgttatctctaaaacgcatacggggtcaagcataactcggctgttacctctaaaacgccgacatcatcaagcaccactcggctgattcctctaaaatgccgacagtgtctgccataactcggctgttatctctaaaacgccgacggggtcaagcataactcagctgttacctctaaaacgccaacaacatcaagcaccactcgactgttacctctaaaacgctgatagtgtctatgataacttggtcgtttatcgccggggtggtgcgacgaacttccacccttcttgttcttgcccatggtcagttggaagagaagagaaaagtgggaaaataagaaacaaacaatcagaagatgtgtgaagacaccagcgaggcagacggtctatttatagaggctgaaagcaac

SEQ ID NO: 123368 - DNA, 314 bp, Zea Mays
cgacgtggcccaatataactcagctgttatttctaaaacgctgacgttaccagtcttcactcggtcgttatttctaaaacaccgacgtggcctgttatcactcggctgttatttctaaaacaccgacgtcaccagtaatcactcggccgttattcctaaaacgacgacgtggctcaaaaggactcggctgttacctctaaaacgccggcgtcgcaaaaaagaaccactcggttactacctctgaaaatactaacagtaaatcagccgttttttctctacgaatatgcaggcagatctaaaatgcgactcgacga

SEQ ID NO: 123369 - DNA, 430 bp, Zea Mays
caaagactgggggatgacccctcatgaactctgcccgcttgtctttgggcacttgtggcatctggacttgcactggaggctaaggtggtggtggctgctgctgcacctgctgcatggctactaaggtctgaccaattgcctagactgcttgggtctacatcaagaacatctgctcgatagtcatcgggggtggcagtggcaaatgctgctgcggggctgcttcctcttggggtgcctgctgttcaggctgagcacgcctcacacctctgcgcctgttctcagacatctgtagaaatcacacacacatatatcaaatctgactctgtagtcttttagcataagaaaagatgtatagaagatcttaatagcactgaacaattgaccatcttcactgacaacttctcagataaagaggaaagtggaaataaag

SEQ ID NO: 123370 - DNA, 394 bp, Zea Mays
ggcttgcttagtcgcggctggatttattagagaggtgttacatcccgagtggttagccaatcctgttcttgtactcaaaaagaataaagtggattggcgcatgtgcgtcgactatacagatctcaacaaacactgtccaaaggatcccttcgggctccctaggatagatcaggtggtagattccaccgctggatgttctgtgctgtctttcttggattgctactctggatatcaccagattagcctggcaaaagaagatgaggaaaaaacagcgttcatcactccattcggtgctttctgctatacctccatgtcgttcagcctcaaaaacgctggagcgacttatcagagagttattcaaacatgcttagccgatcactggggcaagcgtgtg

SEQ ID NO: 123371 - DNA, 820 bp, Zea Mays
aacatcatgttctctcggttccagttaatagtgaacaagacgcgcgcaaacaaggcacaactgacctatgatgatcatgagagagcactcaagttactatatgctctagatcggagggttgggaggtaaaggtctcagtgatcatcaagtcgcccaattatgagactctcaccatggatgagctgttcagtaagctcaagtccactaagattgaccaccagactcgagccaagattgagaaccttcgtgcatccacaatggccctggtctctggaggtggttcttcttctaatccttcacccgctttgtttgctttatcttttttgttgaccatcatagaggagtaggtggagagccttaaggatgaggagctggtgcttgtggccagcaggttcacgtggtttcacaacaaccgctagaacatgtggtgtggcgagtacaaggatggatgttataactacggtgaccctgaccacttcatcactagtttccccaagaatggtaagccggaggctagacagtgcgaccaccactctggtcgacgcaagggaaagtgcaagtacaccaccaacgagcacaagtccaaggggaggttcgacaaggaggcactcaagaagaagtacctctagaaggccaagttgaaggagtgtgccttcctcgcctcccttagcaaccttgaccacgactccggtgactcatcttcttcctcgagcaacaaggagcttgagaggcaggtgtaacacccaaaatccaattttggtaatttatagtaattctaccaaaaagaaataaatgaaaatgtgttatagtaagaattttc

SEQ ID NO: 123372 - DNA, 378 bp, Zea Mays
agttcacccttttggctaaaaatggttggttaacactaaattaatatagacttgccatgactaagcttaataatgcatgtgtgtcatgctttatatgtttcttgctctagttgattgtgatataggagttccgtagttattgatgcctacgtcctctgttaaacttgtgcttgggatgcttttgtatgaccactagaagaactaatgaaaagtcatatcaaattaaataaatacttgtacccgtgatgttgtgtttgtggtagctatgtatatgatagtgtttgtcggtttcttagtagtgttaaattcgtaggtcaataacgtatggctaattagcacctacgtatgattgttggcgataccgtgtcttgcacctta

SEQ ID NO: 123373 - DNA, 585 bp, Zea Mays
atttttgtcgctgtcgaaaaggaccgttctttttccaagacattcggggtgttgcggatcgatgctgagcaaacatgcattatacagttgctgcttatgtaaattattttttgtcgcataggggttggaagtcgcatcaaagagcaatcttattgtcctgctttgtcattgcgcccagtagtggttgatcctttttgacgcaggcacagtgagtagctggtttgctgttcgtcgtagtttgtcggctcaccactcctaagattcagcttaccagaccatgatctacctcctgttctcgttgtggacctgctagttacagccaagaggttcagcaggaacaaaagattcccgaggaatttagtggttatcagcccacgacgaatcaacctcaactgagacggtgacagtattgtgatgctgaatttagaatgaccgaactttgacccccggcatttttttgttttgtttttgtcgtcttctttctctagagcctttcactgctgggatatgcctgagggatgctatgttatttgcattcagggtagaaaaattctggtacggtaccgtcgtagttgtctatttggg

SEQ ID NO: 123374 - DNA, 486 bp, Zea Mays
ttcgaattaactgacagttaacgtgccaagtagggggcttcgtgtgttctcgacaacttctctaagctccggatggccgaccacgacgtcgtcaaggcccccggaacgactgtccatactgagagcctcgacttcatcatcaacggtgaagagcagatggttagggacttggaagctcgacccttccgcctagcaatctcgacgccgtcgtcgaggctctcggcggcctccgtttctctccgtagaggcaacgtgaggatcgaagatcgactcgccctccgaggcaacaagataagccgatagatcgcgatccatatgtggctcgactccatcgttcgatgatctatgtgctttcttccgtgaccccaccgtgctgtcccccacttgcgtcgctgccacattcaacctatcccctcttttccacttgccgggatcatagcgttagcataggttatatgctagttattaataaggcttcactcatct

SEQ ID NO: 123375 - DNA, 561 bp, Zea Mays
ttgcagtcttcatagcctgttctaccatctctaccctggttccatccgcctggatccaactttatggccagtccccttgtttctgtacgacctatatatctttcctacatatgctctagcttgtgtcattgatatacatggtgcttgtctgaattgtattttcaggaaaaattgcgcaagcagcttggagcagggtaactacctacgtacctcaaataatccagcaaattaactagctagtaatatgtgatgttgatatatatatatatatatatatatatagggacgaggtaatggaagccctgggcttccattagtaccaggaagccccagccaggtattgccacgtcccgtaccagcatgcgtcccatcgggcacgggttcttactcgaacagattttagcgtaaaacgtaaaccaaaacagcgtaaatgattacaaattttagcgtaaatcgtagatttgtttcgaaacggtgaatgcgtcccgaaaattacggcgtaaaaatctcgcgcgtcccatcgtgagcgggttctgacttggacagattttagcgtaaaac

SEQ ID NO: 123376 - DNA, 414 bp, Zea Mays
agcaaagctcctttggggaagaactccgacagagacaagatgaagaaggtccgactcagaaacaacagacatgtgattacctacgaaaggcaattgactgttgggaacgatgggaggaataatcgcagcggcaaaattctggctctttcgcttgggcgccatctcaatctcgccggcgaactgagcggaagcgagatcaaagggaaacagaggaggtctggaagcgaaaagtaaggctagggctcagaaagcagaggcgtgcgacggcgcggtacgaatggggtttttccgggccaagcaccaattctaaaagtgcccagtcatcactcggttgttacttctaaaatgctgacgtggctcgatataactcagcggttatttctaaaacgctgacatcactagtcttcactcggc

SEQ ID NO: 123377 - DNA, 333 bp, Zea Mays
attgcaaacaacaccatcacatggttgctattatcataagtgtagtaatatgaaggtgtttatcgtctaacgtgaaatataacttattacaatatataaaaaaatctatagcagcatggtgatggatcctagttctccatagcagatcctcttgcggggaggggacaacgccatggcagggacttgaacttcagggggattccttccttctagttgagcttccagggctgcaatcctttcatgtgcatcctccagctccaagtgtaccctagagaggtccagggtagcactatccaggtcggtattaagacctgccaccacaccagctagggt

SEQ ID NO: 123378 - DNA, 490 bp, Zea Mays
gcatcatcaacctcatcatgaccgaagattggcgggccccaataaccctgttcctgcaaggatattaccatccatgtgacgtcaatgaggacaagcgcctcaaacaccaaagccgagacttcacacttattgagggccagctatacaagaagggggtcagtcaacccatgcttaaatgcgtcatcgaaaccgaaggcatcctgatcctgcgcgaagtccatagtggaacttgtggctctcactcggggcctagggctctcgccgccaaggtgatccgtcaagggttctactggcccgctataatctgagccgcgaatcgagtcacgaggtcgtgcgaagcctgctagaagttttctccccgctcggggcaacccttcgcagttcaccaagctgattgcccacacatgaccacttcaacgctgggggctggatattgtcgggccactacccacggctcaagggaacctcaagttcaccttcgtcgctgtcg

SEQ ID NO: 123379 - DNA, 395 bp, Zea Mays
gtacgatgaagttgtgtgccctcgctcgcctgtgcctgcggaggcgttgtgtactttgtctgttttgttatgctgtgctggtgtgattatagtcggtcttagcgcggacggactagttcggctgcgcctttaggcggcttctgcgtggatagtcttcgcggtagacttcgggctgtttcgcacctgttgtgctagtccggctgcacccttgggcgacttctgcgcggacagtcttcgcgatagacttcgggtttttttgcacttgttgtgctagtccggctgcacccttgggcgacttctgcgcggacagtcttcgcgatagacttcgtgtttgttcgcacttgttgtgctagtccggctgcacccttaggcgacttctgcgcggatttgtcgca

SEQ ID NO: 123380 - DNA, 418 bp, Zea Mays
ctcggggacggtctggagccatgtaattgcttagcctggtccagcaccctaagccaacacactccactgccctagaacagctgaccgagtacctcagaatgaatacttcaaggttcgtacatcatccaaactcaagagatgctccaaactaggatcggctacaataagcactactgttaaaggattaagtgattaattatatccacgccagaagcggagtccattttcaaaatgcattcatgaaacctagattatgtttcaactttaccacccaattttgggatcatcccttgggacgggtaaggcctaggtcgcgaagggttaagtctgaggggagaggagcacgttctcagtggtggtcccgagccgtgtaactgcttagcctggtccagcaccctagctcgcacactccaccatc

SEQ ID NO: 123381 - DNA, 630 bp, Zea Mays
aaaagatctctggctcggatttggtgatcgagttaccgctctagccacagacaccacgtgccctcaccgtgcttcatccaccaccgccgtgcaagccaccgaacgctttggccatccatggagctagttggaggctcttgtgttggaccgtcgtacagggttcgcggtaagtccgccaagttactggcatgtggacaccgttgaggctaacatggagctcctcgggcaatcaccgccgtcatgattcaacgttcaaatttgaccaccgtcatggtgactccctttaaattgagcctgctctcagtcccgcctctcctttacgcacccaagccactctttgtttcccatgttccaccgttggtacccaagaacaccagtttttcccccatcggtggtcactagtgccgccgagtggtgcaatcgcgtggtcaacctttcctaaggttagtcatagttgtttaactcatgttttgcagtctatagatcatggtgaagcttatgtgcttgcccgtttgaactctaccacacagggttaactggaacatcgtcgtgtcgttctgtgaacgccgctgagggcggtgtccacgtctatcggctgacccgtagctcctcggacaaacataggtgagc

SEQ ID NO: 123382 - DNA, 337 bp, Zea Mays
ccgcgtgccgaagggcctcttcgctcttatctcttttcttcactttaaattgtggaaaaaccacataatagtgcaaacacaagatagacgggggcatcccaggcaccccttcgatgtcctccggtgccacacaaaaccagaaatccaaccaattaccccacttgttcttggcacacgacacaatctcaacaacttcggtcaaagtcttcccagtcctcggcgtaaacgtgcatgacccaaattgggcaatcaacccagcaatcttctttttctgccaatgaagacagtaattcttggtgaagacctcaaccgacggttccccaccatacgaagtcac

SEQ ID NO: 123383 - DNA, 762 bp, Zea Mays
gaggacttcgctgataaagtaaatcggatgttgtactggatacgagcgccctatttctgcccgctcgactaccaacgtagtgcttaccatgtgagtcgtgcaggatatatatagtagcaggtctttagccggttgatcgaatgtagctcggcgtggtggcttgagtactggtggtgtggtcagaaacttctttagtgcttccaaggcttcctgagcttctgtggtccactagaatttatccacctttttgagcagtttatagaatggcatccctttctcatcaagccttgatatgaatctactaagtgttgacatgcatccagtgagcctttgtactttcttctgtgatcgcggtggctccatcctcataatggcttcaatcttctctagatttacctctattcctcgatggctgatgataaaccctagtagctttccagctggtaccccgaacatgcacttctctgggttcagtttccatcggtagcgcctcaagctgttgaagacatattttaaatccttgatgaagttgtctgagtcttctgtcttgattactacatcatcaacataggcctctactcgcttgccccagtggttagctaagcatgtttggatagccctctagtaagttgctctagtgtttttgaggccaaacggcatggaggtatagtagaaggctccaaacgacatgatgaatgcagtcttctcctcgtcttcctttgccagactgatctgatgatatacagagtagcaatctaggaa

SEQ ID NO: 123384 - DNA, 523 bp, Zea Mays
ctttcattttattcaccaatgaaattaaaatcttgtctttctccaaaccttcatttctcagcttaattacctctgagcgaaggttgttgagagctattgtgtatccttcgtcttcggcgctcttttgtgccctcaaggcattgctaagaattaagccctgcaagaaaaagaaagaattaagcataacaatgaaatacttcatttccaactttaaagttaacttctatacctttatgctgttgtacgcaaggctatcagcaagatcatccttcaacatggccgaaaggccttcctcaagcttcggaaatcccatacttttagctatctcccggcaaacggatatttctttgttgtccgggagacagtacaggaaatcatcttcgttagtgccattgaaaactaaggcccccttcggatattttagtttctgggcgtagtgtctggcttctaagatttcttcgttagataattttttccccgaagcatgtcgaataatgtaatcaacatcttcgatcggagcttt

SEQ ID NO: 123385 - DNA, 370 bp, Zea Mays
cttaggatttaagtggttttttcttaggtatttctgtctgcaaaagtgcccattgcactgttgaacattctagattggaagtgtcacccatttgtatgagtgcagacatgaggtgcctaggccgtttctttatatgtgtgtgatggcatgctatgacggactttatgctacttgtttatgtattagcgtactaaacttgatatggtgaccttgatgtaaaccattttatgctatcggataaaccatttggtagcaatgaatgaagtcacatcgaaactatggagaaacaataattctatgagccgagataccatatcatcatttcttatgtgtttttagcatttatattatatgacactttcatgacaaa

SEQ ID NO: 123386 - DNA, 568 bp, Zea Mays
tggttgtaaatgctttattcttaacaagaaaatcaagagctcaaagtttgctcctagagtggacgagggattcttgcttggttatgcatcaaaggcgcatggatatcgtgttttcaacaatgccaccggtcttgttgaaatagcaatagacgtgacatttgatgagtctaatggctcgcaagggcatgtttctaatgacattgcaggaaatgaagaaccaccttgtgaggccataaagaagcttgcaataggtgaagtgagacctcaagaaaaggatgatgaggaaggaaccttgtggatgactaatgaggtttttgatgtgggcgcaaaggtggtgggtgataaatcctccacccaagtaaacccatcaacctcaagtcatccaagtcttgaagaaggtcatcaaccccaaaagatgccaaccctggtggaagatgaacctgaaagtgttgatgatgaagtgcctcttgatcaagtggatgatgaggaggagcaaattcaaagacaaccatcagtgccccatcctcgagtccaccataccatccaaagagatcatctagtggacaac

SEQ ID NO: 123387 - DNA, 723 bp, Zea Mays
cttccacatatggattgaatgaattctttagacgatggttcgaggctatgtccatgggcatgtctggatagcgcttgcaaagttgaactatttcttctgccagctttgtgcaaaagagttatctcgaactgtgattgcagacttggaatgattgacacctgtgttatcatataagctggagaagatctttccacctggcttcttcaatccgatgcagcatttgattcttcatctcctatatgaggcacgaatgggtgggcgtgcaggagtctttacctagtgttatggagaccttacacccaggcttggcgaggtcgagtattatggaagaatagaagaaatatatgaactcgatgttcatggttccaaacctcttactccagtgatattcaaatgtcattggtttgactctgaagtgacgagacatacacattctaatcttaggctagtcgaaatttgacaggattgcacttaccatgagacgatgtctatatcatggcccaacaggccacacaagtgtattatctcccatatgtgtgccaaatgaaagaacatcttaagggttgggatgttgtgtataaggtatcaccgcacgataaattacatgttccaaacaatgaagattataacttatacccagacacatatgacgaagagttcttcaaataagatgggcaagaagggcaatttgagatagaattaatcgaagcgatcagaatggaa

SEQ ID NO: 123388 - DNA, 299 bp, Zea Mays
gttggatcccatgtcagtaatgatgctatttggtatcccaaacctgaatattatgtcttgtatgaattccactgccttggctgaggtcaaagaggcaatgggcttgtactctatccattttgtaaatttttcactggcaaccagtacatgagtatagcctccctgagctttcttgaaaggtccgatcatgtccagcccccagcatgcaaatggccatgttacaggaatggtctgcagctgctgtgcgggtatatgttgttgctttgataagaattggcaagcttcacatctctggacta

SEQ ID NO: 123389 - DNA, 357 bp, Zea Mays
catgcacctactcccccactcacactgcatgcaagcatgcaagtatgcaactatgcaagctacggtgccccctcatccactcatgctacatgcaagcatgcaactagcctccgaagctaggccccgtggctcccttcgctcacgctgcatgcgttcttgtcgagacaaatttttgcatgtgttcttaattaaaattctctactaactattaagaaggtaacgtaggccaaaacgtgcccccgctcaccttatcacgtggcatgcacctactcccccactcacactgcatgcaagcatgcaactatgcaagctacggtgccccctcatccactcatgctacatgcaagcatgcaacta

SEQ ID NO: 123390 - DNA, 485 bp, Zea Mays
gaaacatccaaatttaaacaagagtactacatggtgaggattgaagaaagacacatgactcaaatgtaaaagatgttattatatgatgctttatttttttcacttattaaacaggagcttacacaagtaccttaagtttcatgaaattacaataaaggaggtagagagaatacaacttcgtaaggaggtagagagtatacaacttcgtaaggaggtaccccgaaagggttgatcagtgaagtcctcttgcttcagtgggggtggtggtggtaacagttgatttggatgttgtggtgctggtggaggcgatagagctaggatttcttggtgttgctggtatatatcgtggttttgttggtgaggatggaagtgttcattgtggaattggtgttggttgtactgatggggatggtaggtgtgggcgacaactctttggttgtcagccagttggtttctggccattcgatcttttgttgctttggttt

SEQ ID NO: 123391 - DNA, 324 bp, Zea Mays
tctattctatagcaagcaccattgtccagtactctatacacagatcacagatcacagatcagttactctattctacagcaagcaccattgtccagtactctatacacaaatcacagatcacagattactctattcagttaaacaaattactctatacacagatcacatatcatagattactctattcagttaaacaagttattaagaaaggttacaaatcagttaaacaaattattgagcaccggttccaaagctgttactactacacaaatcagttactctattcagttaaactcaagctgtcaagcaccattgtccactcat

SEQ ID NO: 123392 - DNA, 382 bp, Zea Mays
actggtccacattgttcaagaatcgtaaatggaccaatgtattggggtgcaagctttccttttacaccaaaacgagtcacacccttcattggtcatactttcaggtacacataatctttgacttgaaattacaagggttggcgtcgtttgtctgcataactcttttgtcgagcttgtgcttctttcaaattatgtatgattcgttgaacttttcttccatctctttcaccatatcaggcctgaaaaaccaccttctcctggttcagaccaattcaagggggtacaggaccgtcgtccatataatgcttcaaatggtgccatcttaatactttcttgataactgttgttatatgaaaactctgccaatggtaaacattcatcc

SEQ ID NO: 123393 - DNA, 290 bp, Zea Mays
gaaaatggttatttgcagttttgcacgatgtatcacgatcgcttcagtaccactgatgtgtcacctcgggttttgtcagatttaggatgcgcttaaaacccactcgtagatctaggatgcccctaaaacccactcgtatatctaggatgcccctaaaacccactcgtagattcacacatgcagtcttggtgttaaatgatttagggtgcagtgtgtagatcagtagatgttcaatccacttgtctactgcaagttgcatgagcaagctctggtcgctcacagcgtgtttg

SEQ ID NO: 123394 - DNA, 730 bp, Zea Mays
gctggatctcgctgagctggtaataacaactccactggcacgtgacggaaacgtcaaactctggcagcagtggttcgctgaaaatcaaacagccaagggtccgcagcaagaggtagcacctcaatcttgtcacactcttggaaccgaggtggaggaactggtggagtggaagagggagcagtagcagtggaagcaggtgtggtggaggctataataggtgtggtggtaggctcaagagaggcggaagctggcatagtggaggaaggatgagtggtagtagtgactggggctaaggggccgaagcgagcaggagtggagtgagtccgagacaagaggcgacatacccgaaaagcaatctgatcagaggctatcctcagctaaccttcgtgctctacccgatctgctactgctgctgctgctcgagtagctctgtccaacttcctcttctttttgcctccctgctgctcaaggtacaaatccttgcccttgtcctgtctgaaaggacgaggaggttcctggtcatctcctcccccttacggtgtgacattcttcgtactcaccatcctgcactgactactgacacactgcatgagaaatagagaagataagcaagagcagcaaagcagtagataagtatataaataggaaagatttgctacccgggcacatctctcgagagaaaagctaggtaggaggggagtcgcaagcgggcacgcaggcacactgaaat

SEQ ID NO: 123395 - DNA, 473 bp, Zea Mays
ctgtgttgacagccctgctgtaggagagatcgaggtaggtggccatctttcgttgtagccggtcattgaggcctctcataaaacaattcctctttttcaggtcagtattgacctggtcaattgtgtattgggacaaatgattgaatttgttgagatactgtataacaatatctcctccttgcttgagcctcatgaattcttcctgcttcatatgcagcactccttctgggatgtagtgctcatgaaacaccaatttaaattcgtcccatgtgacttgatgtccggcaggctgaatggccacataatttccccaccaggtactggcagggcctcttaactgctgagccacaaacaatggcttctgggtctccgtgcatcggatgagtccaaacttctgctcaatgacccatacccattcgttggcttcgaggggatcctcagctttgacaaaaagtgggggacaggtttccgag

SEQ ID NO: 123396 - DNA, 344 bp, Zea Mays
gccagaccatccacgagagggtttacaaatgacaactctctctgctagactctagtctgtctagccttagggtccgggaccgaccgcaacctgatctaaattcatgggtgtatcaatcattgttcacttgtgacttagccgattttccatcggctctaacattatatgagtgaagcctttcctgcatacacttacgaaccgataatctgaaaaatcgactcctgttaaacattttgcagtttcataagtccaaagcataggggcagcggccatagcaatgcaagtcgttgcgtctacatgcacggtttctacttcattgcctacccattgaagtaacatttgat

SEQ ID NO: 123397 - DNA, 378 bp, Zea Mays
gatgggtaaggaccttcaacttttagcccttcggcgcaggatcgactggagtggccgaagcagcagttttactcttctttccctgacctcgtagtggataacagtagtcggggtagacaaagccaatagcgtcaaaaactctgttcaatctctttcttctttgacctctgaaggctgtggataatgcattatcttctgccttggagtatgatccaagcagttcatcactggtagcatcgatgcagtttagccagttatcgtttggttcattgaatttatctccgtatctgaaggtgtatttcagtcgaaccaggtcaccttcgctagactcggtgacagtttctttcggcatttcccagttctctacaagcggccata

SEQ ID NO: 123398 - DNA, 584 bp, Zea Mays
agttagtgtatttatttgatgattagtggagctgaccccaatacatttgatgtctggctttgcccctcagcaaatcagtgccactttaaagataatgttgcttgtacatctatttgccatcatatttagtaaagaaacaatttttatttaatgtgcagaagtgccactaacagaatatgacaaattgagagccgagaatttgatgaggaataaccaaaagttgcaaagattcgatgttactaaactagcgtcaatactaaccatacttctgcaaagagcaaaggtgacactcgtgaaaaatctggatctttgtatgaggtctatgaaggtgaaggttctgaagatgaggaagtcaatcaggtactatccctcatcgcatttagatattttttctatataatttccttatacatttcagcatgcaaatttgctaatttagttcatattttttccacaagtgtgcaacaagacaaagaaacaaattaaagagggtcttggcacatgtgcaacaagatgaacctacaagagtgactaggtagaatacaagggatttggctttaactttcagtccagaactgcaacaa

SEQ ID NO: 123399 - DNA, 754 bp, Zea Mays
cctcgggggctgggctatagtttgcgctacccactcgagccggatcatctccggcagtaccctcgggggctgggcagtggcttgcgtttcctacccaagccgagtcatccccggcaacatcctcgggggctgggcaagtgtcagcaccatccttgaggaccaagttctctacagtagtcgcctctaaggctgagggtccctcaattacttccatgggagcaagacgacccaagtcagtctcctgaccctcaagaccgtgctctaaggtcaatgaggcgtgggatgaccccaaccaagcgtcaagcacatcagtacaaacctccatcacaccatcatccgctggctccgataacagatcctttggaaccatatcttcaagagtctgatcaaagttcgccagggacaattcttgtagaccaatgagggcagacaaagcaggagaaggaactccactactttccccactggcgacatagtgccgactgttcttccgagtcaaagggacctcatctttttcctcacagtcgtcttcatcagcaacacagacaacacacccattggggtcagcaacaggtggagcacccccattggggtcagcagcagaaggagcacccccattggggtcagcagcaggtagagcacccccatcgagttcggcgtcagtaaattcaggaacaggcacttcttcagcagcaggaaccgaaggaccaacatcccgatccaaactagatactcgccggagacgtctcttttt

SEQ ID NO: 123400 - DNA, 604 bp, Zea Mays
ggggggggtgccccagccttttgttgcctctttcgtgctgcagttgctctgaggaaagcagacggcgcagctatacacgaaattcacaagctttttcgtggccgtagcaggaggcgctccccggaaaacctgcctgcagcacggaagtgggtgtgggactgtgggtgcttgctcgctgcagcacccattgcattgctactcgccatcacacatcagtcctgcatgctgctgccagtcctttttctttcgtttcatacgtactccgttattattggagcgagcttccaaagctttcgatctacgctgccggtggattagggctaaaatatcgcccgcaatgattaacacacacaaaaaaaataacgataatatcgtctgccaacaattagatagataatgacgtttcccgtctcgttaattctggctccatggtagtgccctctccttgtccatctttttatttatttgttgattcgttgtccttgacgtagcatgcgtacggattcctatacctaattgcgacatcacgcactagtgatcaaacctccacatgtcatagctatgcacttgcacatattataatctaaaactctctctctctctc

SEQ ID NO: 123401 - DNA, 482 bp, Zea Mays
cttgaaatatacttggtaagctacacaaactactagaaaagtttggccaaaataattgttcaaaatcccccaaaaggccatgcaagtgggagctctctatagttgagatttctgaatttcagccctcacctagaactcaggcgcgttcaccttgatccctaactcaaaaccctaagctcccattgacaaagttgtgctaaattaacccctctacaacgtgtgtgaagatggcatcgagattcgtgccctagacatgtcaagtcaaggattttatcttggattcatgcagtgagacaaaccctactagagcgccccatatcttcggctccagtcaacaaaatccataggtcgccacacacaaacgacaaaggaaggtccgatgaatagatctctcaaaggaatcatggccataatcgcgaagatttggagccaatgggcgactaaaagtgaccactctcagcgctgccttgtgctcgatgccg

SEQ ID NO: 123402 - DNA, 502 bp, Zea Mays
gtatttagtagtgtagtgtaatgtaagtagtaaagtagtgtaatgtaatgtagtaaggagtgtggaaaaaggccgactcataatgagtcggctttgagtttgtgtagcccctccaatatgaatcaaggaattagttgcctcaaatgatcactattttgctgcttttctatttgctcgtttggaagtttgtccatatgcctaacactgctagcattttagaggtaactgtcgagtgatgcctgagacttttgcttttccgagtagtgatctagcactttagagatagtgcccgacccaagaaaccacatttatactcgcatcgacgtgcctttttgatttttccgagccctaacttcaccttttcccttcatccgctcctctgcttccctgaaattccgagcctgctcgtcccaccggaaagatcgtgatggcccccaagcgaaagaggcagagcaccgctgctgcaatcatcccacccatcgaccccaacagccagcttcca

SEQ ID NO: 123403 - DNA, 341 bp, Zea Mays
caaggatttagacaaaacatatttgtcggtggccaatagtgaaataagataatcatgaactattaaagtcaggataaatgatacaaccaagtatataaagtgagttaaggagaaagcattatcaaggagtagagagccaaaggtttcatacatcaaggtagatattgcgcaagggtggcaacacaatggcatgaaagcaaaagtataagaattcaatagggagaaaacattatcaaggagaaaagtagagaggcaaaagtttaatatatcaaggtagatattgcacaagggtggcaatacaatggcaagacaacaaaagtataagaagtcaagggttatat

SEQ ID NO: 123404 - DNA, 350 bp, Zea Mays
tttgattccatttggttttgacccaaggaccctatagtaagtttaaagactgttgtttagtgaacaaactttattaatggagattaccctgttcttaacaagaatcaagagaatgggagggtgaaagggggtcggttcagtaaaacactgaaaatatctgaagaacgctgataaagatctgaggcactgtagaactggatgtgttcgagtgatctagggaaggaatcgaccgcggggagataaccttgagtcatgtcacggttccgcgaacccagccagagccgggccaggatatttcaccgacgttcaccgtggcttggtcattccgccgtcgtgtcactcgcgccttg

SEQ ID NO: 123405 - DNA, 938 bp, Zea Mays
aaagatgaacgatgtcgttataatctttttgagtaagcaaccaaaattatggtcgaagaacactcattgattaattttaatttagcgagggagcctaaaaatcggtttatttatgttgttgtttgcatgctcacacgtgaagttgtgaaagtgcataggagctctgaacttcctgaaaggattaggatctagacgtctagagcaattgcaacaggttcgtcaaatatgccccttgaacccaaaagttgagtttcacacaaaaacgatgggcggagggtctctactcaaacccccctgaaaacaacaaagatgcctctcacattgtcattaatgtcacctagaggagggctactcttttcaattttagctattttttccacaccagaaccatgcttgcccaagcactcgctccttcccattgcttgatcgtcgttgttactagattggccgctgataccacgctcggtctacacttctggctcaatgccttctccaggaaggcggtgcgggcgctacgcccctccccatctccgatgatccgctcatctgacatgtcgccacccctcttgtttgcttgaggcaccacacaactctcgacgtgccccccaccccaccccaggcagatccacgtcatcttcattccaccatgacatcatccttcatctcgcttgacaccctagtgagcaaggctctctaaggccagtgacgaacaaattgattctaacaataataaaaggaataacatcatgcttcacatatttataatccattagcggttcataaactagtgctagtgactaaaggaatacagatatacacatgcttacagtggggtttcgacgctagaatagcgtaatagtagacaaagcatatcaacatcggtgtagagaaagcaaacaaacagcgagcagtcatgacgacgattcccaaaactttat

SEQ ID NO: 123406 - DNA, 360 bp, Zea Mays
ctttattctgtttatttttggctgttggatttcaaatgcgaacagtccagacttaaagtgtagactgtccatgaatgcccagaatgctcgaaactgcattatgacggctagttttttgagaagtggagtataaatacttggtgcacggggttgggctctcccatggccatttgaaacacttgtgagcatatctcgctatttctctattctctttctcacacatcacgtagtggttgaattcttgtgtgagagagtgcatcctagtccattgcatcaattgttgagtttggaggcactaggaagatcaagcgatgtcttttggcttgttattcttgaggttgtcacctcctatatagcttg

SEQ ID NO: 123407 - DNA, 1033 bp, Zea Mays
ttttgcttcatcgatttaatatcacaacccacaaaaaggggtcgaacccctagagcgccttcaacatagggagtcctcctgcttccccactcgactcttgcgatgacaacgggataatcgccacgcctgtggtccatagggagttgatatgaattttctatgaattaattaagttcctgtaattacactaaaaagtattttccaattggatttatttggttttctgtttctccggactgagctcttcattaccagaaaacccaggggctaaaccgtataatttcccagactcaaattactgtcgcacagacgatgagtttattctagtaaaatgcaggggctcttatgcaactttacagggccgaaggggtatcggagagttctggccgtccgattagaattcaagggttcagtaaactagtatgcgagcgcgcccactcgatcaacgatcgatgatcacgaactagtgcgcgacactcaattagctggccgaatcctactcgttgatccgatgacgaatggtcctaatctattactgacgaaccagtacgcggtggactaatcctggccgacctgcaaccatccaacgaccagcagccatcgtctccattccgacctaatctgcgtggtctggacactacgcacggcggtgggataaccggagatcacaaatccgatcattacgagcgccatacaccaattcactcggccctcgtgagattaacgactacccaaacctatttctcccatcaatttctgtcgccatctagtgcagaccccggtccacggtgcggtcaaactcacggcggggaaatcgctccgatgagcaattgcaaaggttctatgaatcgaacacgggcgcggtgtaaactcctatcgaccagggaaggtaccgcaattaagaggggggggggggagttaccatcgaggaaggcagaggagagcacggttgcggcgtccgtcgtctcggcgacaatggtggcactcttttcacccttggaggtgtcacaacctcataggagtggtctgggcg

SEQ ID NO: 123408 - DNA, 783 bp, Zea Mays
tttttcaaacatgttattttattcatcacacaagttcattacaagcatacagttgccacagatcacactacgcgcgagcgttttctaaggtgcttccgaactccctttctaaggtgtccccaaattctctgagaagatcgtcaaggctagccagggacatctcctcaacgtcagacaagctttctaaccttgagggaggtagtgttggcggggcttcctcttttcgttcagtctggcatccttggctcttggtccgcttccggattttcttagtgggggcgagcttctttaacttcttatcatagtccatcttcagggttcggtaggcttcacaagtgttggcatcttcaccttctgctatttcgagactttcttggagggacgccttttccttttttttaattccttgatttgttgctctaggctttccacccgggaatttaggtgggtgcagtgggagaaaaggtcgtcatagtggttgtcaagggtgtggagatatctggccatgtagactatggtggggtcatcctcagtaggatctcttccggacaaggcctgaagtcttttccttcaggtaggggtatttttgttgctaggtggaaagtaacaaaggggtgtctcggagacttccctgttgtagttttggcatagctggcggagggctttttgggcaacattttggcaagtgtctgggaatcagtgtctagtggaagtgacttggaagggagggtgatttgggtagttttggctttctcccaggtagactgccatagagcatttttc

SEQ ID NO: 123409 - DNA, 295 bp, Zea Mays
gaaataaggcttgtgcagtgatgggcttggactgaaaaccctagaaggtagtaaaaagcatttctttgagcttcggccatgaactgacattccttggccgaagtgatgagtaacaagtctgggccacacctcggaccgccatgacgaaggacttcaccatgactgctgagttagcaccatacgaggatatggtagcctcatagctcaggaggaactactttgggtcagtcaggccatcgtagataggtagtgtaggaggcctatataggggtgtccatggagtagcctataattc

SEQ ID NO: 123410 - DNA, 289 bp, Zea Mays
gacaacttttattttactcgatcttttaccaacattacaccaatacacacactagcacatctcaagaccaccaaaagcaaggctggctagctgcgtggctggtattcatataattaggattgaactgcaagcgtttggtcatgatcgtatgcttttgcgtggcatgcatgcatatatgaacgactatagctagctcatacagtcgccaacagccagccattcaccaacacaaaaaagcttcctttgtccattccgatccataaaccctagcaagagctaagtacgcagg

SEQ ID NO: 123411 - DNA, 608 bp, Zea Mays
ctttcctcttctgttgtttagtcgctatctttcaacaatttcttgtctcttggtattggtatgctcatctccttgaaatctctcatactatcatattttttatgcctacctttataccctaatgactgttcaagccatttcagttagcatgcccttgaccatccttgtttctcgatgatccatgagcattcattttacttcgcacatccttggtgatctcgttaattccttgtaacttccttcggtaatgaatttttacttcaacccttctattggaatcaaacctatcctacccttgattgttttctccacttcgccatttcgcgagtcttgccttaactctatccttggttatgtttttcatgattatcatctttacccttgtcacctctatatcttaccttgatgcttatattatacatgtcctaaaaaaccttttctccctcgtctcaatcatatagttgtattttacctatttgcccttggtcgtattctcttccttgtcgcttgcgagttttcaactccatcctttgttgcatgttactaccttcaccttcgttgtctctccatcctaccttgatgactatcttatgtatgttatttaaaat

SEQ ID NO: 123412 - DNA, 411 bp, Zea Mays
ccggacggtcctcgccgtggagatcgccgttcaccgtgattgtgccatgccgtaatcaattcaccacgtcgtcgcaaactgcaaggactcagccgtgacctttgtagacagttagccagtgagtgcctcgttagcgacctccggtgactattcccacttctcactgtgcgtgcttccccatccaaattcaacctcctcgtggtcgtattctataaattgatgccctagtctgctccgctagcttgttgtgaagccagagcaccagccctcgcctccgatcgtccaccgtagcgccctaattttgtttccccccaaatccactctccgcgccaccgtgagtcacctcgtcgtggtcagccatctacaggtccgctctcgccctcctggtttgtgtttcagcactctagcatg

SEQ ID NO: 123413 - DNA, 309 bp, Zea Mays
gattttactccccaactagataggcacattacggttcaattgataggttgcaaccttgccccctggcgttgctatcatataagcccctttcatgtgaaaaaagggttattgacacttaacactaaaccttcgactgataaaactatgtgaagcactagaataaaaaagaatgagtgcaggttggttgagaacgaagaaaataccagccatgacaagtgccccctcgggtagatcgtccagggtgtgattcaacctttcctgcttgacttacactttttgtttctgcccttgtctagagctacaacctgc

SEQ ID NO: 123414 - DNA, 1013 bp, Zea Mays
aactttcaaggttaccagagagaaaacacaaagtatagttcagcttgggtacctactagaactccaaggatccctacagatcagaaaccttgagaatgtcgaagctccaattgaggcaaaggaagcaatgctttgcaagaaacgccagctctctgtgctgcagctaatgtgggcatctgatcgagatgaggtaaatggaaataaggaagaggatgtgctagaagctctccaaccgcacgaaaatctgaagagactagacatcgtgggttggatgggagtcaaatcccctaattggcttaaaaatgaatggttaagcaatcttgagcttattttcctaagtggctgaaatgcatgggagcagcttccaccacttggtcagcttccctccatccgaacaatctggttgcagcatttgaaaatgttgagacagataggcccagaggcatatggcagtggcagccaaatgaagccattccaatcactagaagagctggtgcttgatgacatgccagaactcaatgagtggttatggagtgaccagacaatgaggaatctacagaatgtcgtgatcaaggactgcaataagctaaaagcgctgcctccagtgcctcctaaccttacagagataacaaattaacaattgcaaggaaagggtattgggtgccataccaccatgatgtaaagttggcacatgtgaccactggcaggtccagtgtctcatctctttgcatattcaattgccccctgttacttgccagattatctgcacaaacaaacaatgaaataattgaaaggtttaggtcacttagaagcattatcactgatcaaatggcaatactaaggtgttcacttttaaaagaaaggcttgaactcattgagagcctagacatccaagattgctcagagatcacctccttcagtgcagacgacaatgatgccctcctacagctaaaatcactccagagcttatgtatatctggttccaacacactgcaatcacttccttccactct

SEQ ID NO: 123415 - DNA, 351 bp, Zea Mays
gttcggagagcagtggtcagttactgatgaagagaaagaagagcagcaatacttgtttgctatccaggatcatcctcgattgtggaaaattggttgttttccatgtacaacacgatatgggtataacaatgtggtattggttgtactagtgctcaacgggattgtggatttcgtgggggctgcttggatacaactgaaggttgctgacagttttgtgatcaaagagcaattggcttgggactagaggtattgcacacattacagtgaattcaatcgaagtttgtgcgactttcagtattatgtactatacacagtgttggcaatggtttgggcaatggcattccatctgca

SEQ ID NO: 123416 - DNA, 550 bp, Zea Mays
aaatgctatcgaatcctcctctagaattgatgcagcaattggcgatggcgagtgcgatgtctgttcaacagatgaccactccacatatgcaaataattcgagcagctcaaacgtcggcttccatcgagggtacgaccatcccaagctctatcgcgtcaacgagaaataaggttcgctatccagttgatgacatcacaaggcatgtggcatgcacactagttataagatatggtattaacaatcagcgtacaaagaaagtagccacaggccttgcaatcccaagacgcaagttccatggaaacgacattccagaagaatattgcagggtagaagtgacgacagtcgtccaaggatccgaggacgacatgctagacatccctgggcccgaagatatcaagacacttggacaagctatcaagaattttatcctttggcctcgaagggatgtcgaattggttgatccaccacgacagccgtcgtcacaggcccaaccgtctccgccttctcaaattgttgttcctattgtacatccatcatcacctcctcaaac

SEQ ID NO: 123417 - DNA, 596 bp, Zea Mays
gttgccgttgaggtatctaggtatcccaattcattttagaaagctaagaaatgcggactggaaaagggtggaagaaagattaaaaaaaagacttagcagttggaaaggaaagcatatttttaatggggtaggctcacattgattaattcagtgttgagtagcctaccaatgtatatgatatctttttttgctgttccgagaagagtcctaaaaaagcttgattattttcaggccagattttttggcaacaagaggagaagaagaaataccgtctagcgaaatggaacattctgtgccaacccaaagaccaaggaggcttaggaattagggatctagatattcaaaacaaggctttgctcagcaaatggctttatagacttttgacaactgatggaacttggcaacaactgatccacaacaaatacttgaatgtgaaaactatctcccaaaccttttggaaattaggggattcccatttttgggctgggctaataaaagtgaaacacgactttttgaggtttgggactttcacaataagaaatggttctcaggttaggttctgggaggacatctggctgggtacgtcgacccttcgt

SEQ ID NO: 123418 - DNA, 410 bp, Zea Mays
cgtgtgagcacctcgccgtggccagcgtgctacaggtccattcatgtcctctgctctcttgtttcagtacccttttgtgtccttgatgcttctcgacccgaccgattaagctagaacccattagatcgtcgagaacacttcatgttatccgttgattgcgcggtcaatgtgagcagagaagttgggagctcgaaccgtgcaattgatcggggggaaacgattattagatgttgaattaggtatcaaccaagttagagcaccggccattgcgtgtcttggccagtacaggctcgccggagctcggtctgccgccgttctgcatcgaggacttggcgcggtgaagaaatagaaataggaggggtattccgtaaatgtcagtgtaacgcaggaatagtgtcgcggcccttttt

SEQ ID NO: 123419 - DNA, 567 bp, Zea Mays
atccagtcaacacctaataactggttttatcagtccattggttcattcggatgccttcacccttttgggattggatgagatgcgtccgacgaatgtttctgtctttagctttcagtcaatctcttcaaacggatggtccgttgcttccatattgcctcgctgcagttttgaaggatagcaattttgttaagtcttgaacacactgacggtctatcacatcgtcaacggagaaaatatcaccaagaaaaatgagattgtctttgcgattgccctgcgttcaaccttacacacagtcgatgctctggtgactcggactcctcaccacaagcgcccaatgagaacgtccaattgaggagtcatgagtcatgacgatcggctgctctgccaccctacctgtcattgtgatcctatcctgtatattccaacgaagttttgtagagagaaatttagaatgttgccatcgtacataaaaacggtattcacccccaaaggtctttcattggtcttaatgtccacgcccaatcatataaaataaagaatttgcagtataattgatagtgtttgcag

SEQ ID NO: 123420 - DNA, 426 bp, Zea Mays
gtttgagtgagacgatatgatccaggccgagtgacttctgctactatgaatggtccttcccatagtggtgacagtttgtgccgcccttcccccataagaattcgccggaggacgaggtctcccactgcgaaggatcgatgtcgtatggccttgtcatgatagcgtctcagagtttgctgataccgtgctgactgaatcacggtgttcaatcattcttcttctagtatatcaatatcctccagtctggtagcctcagcttctgctatgttttcaaagatcaacctcggtgccccaaacttgagatcagcaggtagcactgcctccgatctgtagaccatgaagaaaggagtatttccatgcagagctcggctaggttgagttctcaggctccaaacaacataaggcaattctctaatccactttcct

SEQ ID NO: 123421 - DNA, 302 bp, Zea Mays
ctcgattcggagttataatttaggagatatcgttgtttgaatccgggtatgttgctgtccaaaaaacagatttttcaggtgggtgaacaacagtaatattagcagtttctaggaatttttcgtgggtaattagtgatacccagtatgataatcatgtatggctttgtcttatctttccaatgagtacttatgtgcttggtttggaattatattttaaaagatattgctgtttgaatccgggtatgtcgctgtccaaaagagaaaaaaacagattacatggtttatcttgtaaactgttttgg

SEQ ID NO: 123422 - DNA, 472 bp, Zea Mays
tagtcaaagcatatgttctgattgcagattcacgtggtctataataactctcctccgatgaactcgccctgctggtgatttgcctcacgaagaggttcatcttgatgatgaagttcctagcaatgcgtgcaatatcattgtgttgggaatacagaacaatgaatctttcgttttgggaaatgatggagatcattattaaatgtgggagacaaatgtgtcgacacctatcttgcctctatatattgcaaagggatccaaaacaaagtcctaggcatgagtgctttaagctctcttatcgggtcattgataaatgcaatcgaggctgaaccaataatcgcaaaaatgaaagtcgcgagcttgaagttcggacatttattggcactattgaaataatgtgtggtgaatgcgatggttcaagtggtcttgtgagagatccatcccacatatatgttgaataaacattgttccgcta

SEQ ID NO: 123423 - DNA, 465 bp, Zea Mays
acttagcgaaccatttagacattgcatctcgaaaaatgggtgggagcaagttaattaatgtttcttaaccttttctcaacttaaattggacaacacacaagtcacttaaaacaccatattttaggaggtctaacatagaggcattaacacctggcataaaactccgtaagacttacattgactactgaaagacctaaagcacttatgtgtatgtcttagcggattgttcttcaatttttaacaaggaccgacttgtgaatgctacttgcctccagtaattattggactgcgataacactcgtataagacctttaatcgaccaacaagacatttatttatccaaaggggcatggaatgcaatatttgacaaggcaaggcatcgacccgccataccacagaaagcatgccgacaccgacagatgctatcaactaatcgtttttaaaaatattaaacttacttctcgc

SEQ ID NO: 123424 - DNA, 516 bp, Zea Mays
tttctgacttaagccgattgctccgtcagtagggtatagtaatcaccctaagtcatgtaagtgtgaaggtatgttgcgtcggttttaagtcgtttccgacttaagccgattgttgatcgagagtttatatgcggtagaacatagaagctttattaataatgaaaccttttgcttacgaagtacatcttgtccaccagagtttcgaggtactgctacgggtagaatttcctgagttgttcaatattccatgaattcctcactttagttccgtccatttgggtaagtcgatatgatcctgaccgggtatcttctgcaacgatgaatggcccttcccatgggtgtgacagtttgtgttgtccttctcctgtcagtactcgatggaggactaggtatcccactgcgaaggattgatatcacactgctttgttgtggtagcacctcagggtttggtggtatctggccgactgaaagaccatattcaaacgttcttcctctaatatatcaacatcttccagc

SEQ ID NO: 123425 - DNA, 396 bp, Zea Mays
ggggtctgctatatagaagaggtgcaggagtcctcatgaaatgaattcattcggctataggaatgcagctactagatgaaatccacacagggcaatgtggcatacatgcaacataaaaaacattggtagggaaagccttcaggtctgggttctattggccaacaacaaagaatgatggagtagacttggttcagaaatgcgaagcatgccagttcctatcgaagcaacaacacttgcttgcccaacatttgcaaactattcttgtaacatgtccctttgcatgctaggggctggatatgattggaccattcaaaaaatctcaaggagggtatactcacatactcgtcgctattgacaagttcacagagtacaaacctatcacctctttgacctcag

SEQ ID NO: 123426 - DNA, 660 bp, Zea Mays
cggtgctccgcacgggaggcataactccggcgagctagaccggccggagaagaccaagaccgatgctcagcttcggactaaaccaaatcgatgacctaaagagtatttcccctaacttaattgcactaatgaccaactaatgagctctggccacggtgaccgagagcatggtggacggatgaaggtgttcctggcgatctaaggctactccgtgcaaattgagggttcggtaagcatcacagagctgtgagagtgctcaaacgaggaagcagaggacaggggctgacctgtggagggctgaccacggtgaacttagtttcacggtgttcttcgactgatttgggggaaatcttaaattcgagctcactggtggacgattgctagtgattctcgatggctgggtgggtgatgaccttgcggagctggtgggggcttcaatttatagggagagcgagcggtggccgggaattttaagaaggacgcactggcgcacgtgaatccgtggctaacgtcgtggcaacctcaccggcgatgatgggacggcggtagggagtcacggtgacgtggtagatggacagagacacacggcgggctacggcgaaggtttgacgatggtgagaaccttatccacgggcggtgagcaaaggggaagggattacg

SEQ ID NO: 123427 - DNA, 384 bp, Zea Mays
gtatggatgaatatgtacaatattctgttcaaatgtcgattacaatctttcgccaaacaggagcctctatgtttttctacagataaatgcaagacaggaatcctaaagtcttcaggaccttcagaacatgcttcagtctaacggtctccagcacccccatcctgcagatagataaaggtataaggtggtcgtcaatctaataaaggaaaactaaggtaaaaagacagataaaagtttcatactgagttgagcagtttccgagcttcatctccagctagctcacgcccgccctttgcccaaatttgagtaataaatttgtttctgatgctttgggcttcagcgagaatatcaactaagtctgacgttgaaaggctgaaggttggc

SEQ ID NO: 123428 - DNA, 374 bp, Zea Mays
ggatttctgatttgcaacatgttcagcgtgtttactgtttagggctgccagtggccatactagctggatgcctacatgtcataaaaatcttctaatattgaatgactcattgagaattctaatagcatgggagctatggcaacatcgaaatgattgtgtcttcaatattgcttctccgtgtgaattcttgatcgtgcacgtgcagacagaggaggaaggaaagctatgatgcgcagcaggggctcagagcttccgtaggttttatagagcgtcttgtccttgcgatcgttacataactcaagtgtcgcacgcatggtcttaactcagtgctttgtgatgtttctggtgtggtgtgtttgtgtgactagttttgt

SEQ ID NO: 123429 - DNA, 416 bp, Zea Mays
gtcgacaaatatgagcctaagcaggacctgggaggctggttggccgtctatacaaccgctgcccaggccactggggcaactgaagatgtgatgactgcatacttgcccatcgtcctcgggcaagatgcattgcaatggctacgacacctaccgtggcactgcatcgacgattggagcgacttcagtcatcgttttatcgccaacttccaatccctctccgacaagccggtgcaaccatgggacctcaaatccatcaggcgccagggggatgaaacactttggttgtacctcaagaggtttcagaccatgagaaatcgcatcctagaggtcgctgaggcagcagtgattgaggacttctaccgaggatccaacgactcggccttcgtctgagccatactgcaaaaggcgtcgaccac

SEQ ID NO: 123430 - DNA, 847 bp, Zea Mays
ctcggactctccctgccttatataatctgaccgctcccgcgacgtcatttatctcgattaacggtgccatcgcgactgcttttggccaacatcgccatttaagctcgtacaagtgtcctgggaggttcgccatggtgcatcggtgtcgtgcgtagtctctccgtactcggatttggtgcgggcgtaggacgattgctcgccggagtggaagctttgcagtcaagccgccattagccgtgaaaagccctccctccaccgattcactctatggtaagacctctaaatagctgtgacttgatcctaggattatgtagcacctgtccgggggaagatccgtgcactggaacgccaggatggcttgctgcgatgtgcggaccaccgtgggggcagagcgccgccgcgccctggtgtgtagtggggaggaactccggtgatctccataggtggagctcggtctcgccgccgctactgcctggagatgggctggtgagggtgttgtgggacgctggccgttggatctccagacggacgcgctagattcaattctgcattttaaagatccggagcgtcgatctcttgatggacggtcttgatgggatataacatatctcttcgactaaagtgatctggaccgtgtatccctaatccgacgtgtcaggttgcataccggttcacacgctgtgcgatctagtctgatccgtctgttttggatcggacggctcataatagatcttaccctttcggccatgccattatgcaaaagagacaccgaaaagcttgctattcaacccgccatccttttctattgaaactaaccacaagttggcccctggtttatacaaagtca

SEQ ID NO: 123431 - DNA, 450 bp, Zea Mays
tgacaccagaacacaacttttgatggaggatgcaaattaaaaagattagtgcgtacaagaaggcaagagaagacaatagtaaagtactgtcactgcgagagcgccactaatagtaaagtactggacattgcaaatccccgttactactgccttctcttgcgtgctactgaaggatgggcgacgtacctggctgtagtcttcctgggagagcgccgagaaggatgggagttgatgcctcaccaacgcatgatattttatcgcctcaatgatgccgttgatggaaaccttgccccggagccttgattgaaggttaggacgcgtggattgcgcgggcgaggccgaccgggtggggcgcgagactttggggaaggagtaaatcgcatgtatggggactccatggagcgtccacgcgatgcagatcggtcttccagggagagattgggagcgaca

SEQ ID NO: 123432 - DNA, 506 bp, Zea Mays
tgttaattgaactttggagggtcggggatgagattttggtgcactccggcgagggcgccaccgtgctcaggtagctgtgccgccgcgggatatctcaggggaagtggatgagcgcctgccgtcgatctaaattgaatggccaggatcatatgcagtgtaccgattcgtgggaattcatcgtggccattgatcggtcgatcgacgatcggcgattgatctggttctcttttaatccagagcgctgatctcagatcgggcggtgctgggcgcgtaacggttcgatgaagtggactttggatctggaccgtagatcgtagattgcgcggctgaaatcgcataccggttcgctgtttaaatctgggccctagatctttaaatggatggcccaggcgcacctgagttcgctcagtcgtggcattttcgtcaagtgccccctaggttttcaccaaaacaacccgccgtccagctgggttgcggcctgtgtcttaggttcttttacaccgtgg

SEQ ID NO: 123433 - DNA, 573 bp, Zea Mays
cgagaattgaggtgctacggtggacgattggaggcaaggagcgatgcactgggcgcataacaacctaatggagcacgctgaatgctcaatttatagtgtccttgaatggtggctccgaatttgaggagagaagctggcaggcgaggagaggggatgagtcactgtggcgatctaccgtggcattcactggacaaaggcgtacggctatcactggttaacctctatggctcacgacgacgtggtaagacagtccaaggcgtggcacgactgagtgaacggcggtagccgcggcgacgaccgcgcagccacgtcaccagcaattgggtacgacgtcagggcggccatagtgcctcagcttcatcccttgtgtaagatcttttttccctaagtcattatccgtgcgccattggggacgaatcacagcgccgacgtgaatccaggtgcgggggtcactggcggcgaggttcggtgcacctgagatctccttcagtctactatacaatcagagcctttcatcatagcgcctgacagtgcattttcaggggcatttttcacaaatttttacgtggcaac

SEQ ID NO: 123434 - DNA, 386 bp, Zea Mays
gtgtgcgctagacggcaagaggcatcgatttttcggtggtatctgacttggatagtgaatgacaggtgggaacgagagagaagacgtccagtgggggacaactgtcagtgactagcgctggtaccggaggagtgaggggcgttgtgcagcctgcaggctgcagggcacaaggaacctatggtggggccctggtgcgaagtactctactgctgcgccgtttccacctttcgattcgattggcggtttcccggtttgcatctgtgtgttcctaggaaaaaatgaacggttggcgcttggtcacataccaactgcagcggaatgtgaattggggaatgtccattttgcaaaatcgggaagaacgaaattgctgcttgtttgagtcaaaa

SEQ ID NO: 123435 - DNA, 460 bp, Zea Mays
tgacggatgaaccccataatatcttgccatgacatctatcagcagccagccaggatctgttttccgtgcaaagtgcagatgcggtggggatgctgagaccacggcatcacgtgcaggagctcatgtattatgttgctcaagctaatcatgtgtactactaccatctgccaaccagagtacactgcctcagctaagcaacactgctaattaaggactatcacgtgaaagcgctctgctcgtaactcgaattactagattggttggcccctgtccctgttcctgtctaatttcatttagtgtcctgtccttgtgatcattcatggtcgcagcagactctgcgccagctgccttgtttccttgacacgagagtctgtctctgacctgttctctctgtcttctgcatttatattacaatgctggactgctcgttgttggtcaggccggtccgccggtgcgcgcg

SEQ ID NO: 123436 - DNA, 437 bp, Zea Mays
cttttggaagaagtggagcaaaggcaaacaaaagaaagaaagcaagtacaagacgtttgggtgaaaggtttgccccaactcaacaaagttattggtcattgcatcgtccatatttttcaggtactccatatacgtcgtcccaaggtatgttcgattatcctttatggcatcattttgctccatacgcgtctttatattatgggaggagtgcaaccaaattattatgcatatggatagttgcgatatgttgctgcttacataaagccgaagtatttcagttgttggtagtaatgattcttgctacaatttgcttcggtcatgtttattcatgagatgaacatgcttataatatttgcttatcactatttggttattgtttaattacaaactacttaatcaatattgtcgaatagtttcaagtaaaggattcatttttt

SEQ ID NO: 123437 - DNA, 292 bp, Zea Mays
ccgccatacgaagtcactgcccagacatacttcgccagggccaccacgacattaggtgtcaattgatggatctgcacgtcatacctctgcaacacctccaccacaaaacggtgcgtgggtaagcgaaggccggcggtaaaaatgcctcaaacacaactatttcaccctccagctcaggaatctcttccgcccccgaaactcgtccaactccattcccgaaataccccaactgctgcatgtcttgcacgcgaaccgaggagatcctcgaaacgctgaattccactgtgtggcc

SEQ ID NO: 123438 - DNA, 280 bp, Zea Mays
gatcttacccttgattgttttctccactttgtcgtttcgcgagtcttgtcttaactatatcctttgttatgctttttaattattatcatatgcacccttgacacctctatatcctacattgatgtttgtctcatacctgccctttaaaatcgcccatcttccgtctcataccttctttctcttggtcgtatcctcttctttggctcgcgagattgtaacctcatcctttgttgtgcttttgcttcttattgcctttacccttttcatctctcaatcttac

SEQ ID NO: 123439 - DNA, 597 bp, Zea Mays
aagatttgtcgtttttgttctttttccacgctaggttttcacacaagtgtaaattgctagtttggtttcaagcttacacacaacaaagatatgaaaattgaggggacattatcactaccatatgatgctaaagtatacaaaatagaaatgtacctttgtagcatgtttactacttttcattttatccttagcatcatcttgctagaaacaagtgaaactagacaccacatgagatcataataaatagggttctagttactcatttcacactaagactaggcttatagatatcactaaatcaatcatcattcaagtcttagttctagcaaacacttacacacaagtatgtaggaatatatgacaaatgtgatgcaagcaagcaatgtagtgcacaaacaaatgcatgaaacatatattaacgagcttgctccccctacttgtgtgcatctcttgttcaataaaatctcataccattatactttgctcttgatccattcgtattcattctaactcaattgatcagtagctcccctgagttcatgtccaattttctattgtgcatatttctatatctttgttccaacttgcacatttgca

SEQ ID NO: 123440 - DNA, 281 bp, Zea Mays
gtagtgagtttgcatttgcgtgaggaaggaaacgagaatgttacgtagatgctatacctatgggcctatgtgtggcccaaaagtgcacacgccgctgatttgaagcagcttttctggtcgtcgacgtttatctgtgtcttcagatgcccatgacggagagacggtggtcaggcccagacgtgatgggcccagtccgacgctggagaaaccacacgcccgcagcgtacccgccggcggttgccccccatctccacgtggacacccagttagcttgcggcatc

SEQ ID NO: 123441 - DNA, 344 bp, Zea Mays
ctggtgtcggtcctgctgttgtgcccggagaacctggaacttccttttgagatgtcctttttcttcctccttagctctttcaacttgcatggccttgttggaaaggtgagagaagttgaggaagtcttggctagctagaattgtcttgagttctggcctgagtcccttaaggaaacgggccatcttcttgctctccgtattgatatcatctggcgcgtagcgggctaactccgtgaacttgtgcacatactcgctgacagatcttccgtcttgagtcaattctcggaactcgtcctccttaagctgtaccaatccttggggcacatggtgctcccggaaagctg

SEQ ID NO: 123442 - DNA, 481 bp, Zea Mays
aacaacggtgcaagctggctatttatagaggctgggggtgaccgtccacttcctaccacgctcgccgaacagtcgcaagtattcaataagcaattcaagccacctgaaaatgagtcaggcaacaggcgccgcttcgcgtaacacgacactgtttggtccaaggtcaactgctcaggcaatatgattacaccccacggtcacatcaagttactactctaggacagtgtgctaaacactctgcgtaccaagacaccccttgggcacacccattgggtgtgttgccaaaaattttcaaaatattttctgaagaagtcatatccacacagtatacaaaataaatgtactgcgacaaaaggaagagattggttgagatgggaggaagtccaaatatagctactgaattgcaagtccaatcagcagaagcattgaagcacagagcggggtgatgtctagccgagagccatctgcctccaccagccag

SEQ ID NO: 123443 - DNA, 272 bp, Zea Mays
acttccacgtttccagtttctagacttgctatgttgtatgatgcagaatgttgacctataaaaagctgacatgtataataggtaagtgttgcagaaatgtgtatgttgcttggatttgtggctatacaagaagggatcgattccggaacgatgtatacatgattggataggggtagcaccaattgaagaaagtttgtttgacaccgatcaagatgggttggacatgtccaacggagaccttcagaggcatcggtgtatagtgggattctaag

SEQ ID NO: 123444 - DNA, 308 bp, Zea Mays
attggtgttggcatatctagcagacatgaatgaatgtgtagcaccagaatcaaataatattgttgcaggaatggcattaatgtaaaacataccgagtacgatgtcagcaccatcaggagtatcatcaacactgacttgattcaccctggctatagaatatcccttgccaggagtctgttgcttgttcttagctggtgtgccagaatttcccatcggacaagcattagcatagtgcccaatctgactgctcttgaagcatgtagggtcggtcttctgtcctgcaggcctcgttggggtgccagtgggag

SEQ ID NO: 123445 - DNA, 477 bp, Zea Mays
attggatagcaccaatgtccctgcacggacccccattcatgcctcataggggagatgaagaatcaaatgctgcattggattgaagaagccgggtggaaatatcttctcaagcttacacagtaacacaggtgtcaatctttccaagtctgcagtcatggtccgagataactcttttgcacaaaagctggcggaagaaatagctcaactccgaaagtgctagccagacatgctcagggacataggctcgaaccatcgtaggaagaatccgttcaatccatatgtggacgtcatgactcttcatccctaagactcgcagagtagataagttcaccccctactcaggttagctgcatacccatcagggaacatcaacatcttgatccactgaaatacttccttcctctgggccctacttaggatgaaatcggccttaggctttctccatgtctttccaccactaggtggcttcatctcttg

SEQ ID NO: 123446 - DNA, 337 bp, Zea Mays
gaagagatggcccagaacttggatggaagaatggttttatgtgaagaacgacttgacagcgagggaggacatcaaggaggttatcatacgccccatatggtcccgcttcggtctccgaaagccgaaggttgaaattgatgaagccgccgaagcatgtcagaaggcgtttggtactgtctgcttcttcattgatacaagagatttaattcaagagcatatagcattcagagtatggccgcttgtagagagctaggaaatgacgaaggataccatcaccaagtctagcgaaggtgaactggtccggctgaaatatacattcaggtatggggataagttc

SEQ ID NO: 123447 - DNA, 392 bp, Zea Mays
cagggagcaggcacgggggtcctcttcattgccctcggaggtgaacaactcaagtatgcacttcagctattattcctagcatcaaataatgcagcagaatatgaggcattgatccacgggttgaacatcgctgtgtcactgggcgttaagaggttgatggtatatggggattcactagtggtcataagccagataaataaagactaggattgctcgactgattctatgggcaagtattgtgctgccgtctggaaattagaagacaagtttgaagggttggagttccatcacgtggaaagagaccgcaacgcagtagctgacgcgttgttaaagctgggatctagtcaggcccaggtcccacccggaatctttgtccaggaagtgtcacgccc

SEQ ID NO: 123448 - DNA, 1113 bp, Zea Mays
atttcaccaatcggaggagtcagcacataacgatattcattcaagacccaatgtacctacatggacacctccaccctcatacccacctgtgccatatcagtatgcatatcttccaccactgtattcgcccaatcaaatgtgggacatgccactgtacccatatgggatgacacagtaccctgcctgggggcatcccaaacttctgtatctgacaagttgacaccaccagtgcaagattgattgggttcacctcaatctagtcaccatacacaggtctagcgagatcgtcggactactcggccacgaagaccgactgattcgacaggggaacatagagagaaaatatatatgagtgctaagataggtacaacagatgttgtcatacaggggaacattgaagagccgataatttttggtaaaccagccaagacaaatgaggagaaagacacaggagcaaccaacaaagcagttaacccgaaatactccatgccttgatggtgtccatcgggtctaacgtagtctcaaaagcgcaaattgcagcgcttgagaaaaaagtagagcatagaaaaagaggcataaaaatatttaatgacacattcgtagtacccaccaccacaaaaaggtggaggccaaaggccaccgaagcaactcaagcgggcacgaagatagaaggcgaaacactagctacatagttctctacaggtacgacagaccatcttacacctgagactggactatccgcgccttgtcaggaagcctcagcagctacgcggctctctgcagatacgatggaccatccagctccagcagccggaccgtccgagcacatagtggatcattcgaccccctgagtccggaccgtccgcacctcgctaggaaacctccaatgatgtgccaacacttatggatgaaggtaacatcgaggaggacgacctactaggagaggatttggtcgactacggagtctcgcccgagcacatagaaaatttggtaaacaagatgacgagctaattaggattaatatgacgcttagcggcgttggaggcaatagtttgatcaaggctcttacaagatcgcacaacaatatcatcctagtatgtagcaagacgctta

SEQ ID NO: 123449 - DNA, 358 bp, Zea Mays
aggccatccactgcccttgggaatgacatacaagcatgccagatggtcttcaatacagtatgtacttacataggcaccagggatttagtccaggagcacattgcttatagagtgtggccactcacaagtgggtgggaaatgctgaaggaagctgctgctgggtctagccaaggtggtttggtctacctgaagtacatgttcaaatataggagccagtttgatgagccaaatgatgactggttagatgccattgaagcaaccaatgttgaattgcttggtgcctactcgaaggctgaagatgatgctatgacaatggccttcagggctcgaggcaaaaagaggctgaatagagtatttg

SEQ ID NO: 123450 - DNA, 443 bp, Zea Mays
gggaatctcaaaccagctttgaggaaactcttgaaaactactatttcatctttttctggcttcggagtagtttcttctccaccaaagcgaatcagctctttcttatcttcgctcaaatagcccaacttcaccatcttaggaaaatcagctcggagatggtggactttccgaagtccaggtggctaggcttgctcggcactgcgatattgtaatcctcttcagattcggtctcttcaataccagcttgctctatttcagcagcaggggcgtcttccggtgttaccaacccagatcgctttattgcttccgaaataggaatagtttcaacagcttcggtctcgtctccctcatgatcgactcttgcagtagagcgaactctggccatttgattatgacttacttgaaatttttggtgttggcttttttgtctttcctgaagctct

SEQ ID NO: 123451 - DNA, 437 bp, Zea Mays
ctgcgggctctttttgacgatgaagagttgagattgatgctattcaatttccgagaagccggtcttattccaaaacaagagccaatgtaacaatgtgtgttgccatcgccgttctttggtgacgataagcgaaaacgctgcccttgcccaccttcgccaaaggactgttgtggggacatgtatgtggacaattttcttacgcgcagtgcacatcttataattgaaacatgatgtgtctttcattgtggttccttttgaaatgtatatgcgctaagttgcatatgtgagtgtctttgcgcgcttgggtgttgttaatacgtttatattgatccgactgcaatgttaggcgactgttggtagggtattatcttctgtctaggtgatgacttcgcctttttgtgatgcgcctgttgtgtgaatccagctgcacacttagg

SEQ ID NO: 123452 - DNA, 541 bp, Zea Mays
actgttagacacaaaacaaggcaggctgctgatgaggacgatgactttatgccattatcgaagaagcgtaactttgatgacagtcctccaaaagtcttgaagaagatagttacaaagcagaggaaagtagtggaccccccccccgacaggttagaatttatggtcaatggcaatatatcattttctgtgtgaaattatgttgtgttgaggtttgatttaaacattgagttgcaattatgcagatgtaaatgtttacgctattcattgtatacatttttcagcagaggcttaatgtgagatgcaatccccaagacgtattagtatgcatccagatattaaatgacagacagcgccaagctattgcacggagggggttctccagtattcttgatatgagagttgacacactcggcagtagatctcatttagcttggctgatggaaaagcttgaccataatgacatgacaattcgagccggcccagggaaggagctcaaaattacaaaggatacagtgcaccttattttggggttaccaaatgc

SEQ ID NO: 123453 - DNA, 529 bp, Zea Mays
acaccatgtaatctaacatagaagatcacagtacaatgcaaggtaaggtggttttgtttttttaataagttgctcattatctgattaaattaagccgattgaaaaccaccttaacttatttcaaagaagaatacatgtggcttagcgctaacacaattagccatctccatatttaagtggatctatctgtaagcaaaaccaagttaatcagatgaatactgaagtttgctaaggaattgggtaaaaaacataaggagcaacttttgttaggagtcagggtgtgcctttcctggtatgaggtggggatgtctcgttgctaacttggaagataggcattcgttttgttagagaactggcgaaataatagatgttgacaggaggaactgctgcggagaggcgatgggggcgacaggtcccgcccgtggagcatagtagatgcggtttgtgatgcctacgaacagcgcctcgccgttgggcctgaacgcagcgacgaccacctcctcgaacatagccacctccctctataccc

SEQ ID NO: 123454 - DNA, 539 bp, Zea Mays
ccgacctataaatatgagaggagtgttcaaactcattcacacatctcacactttaaaattctctaccacctcacactcatctcatcctcatttcgtttgagtacaccattgttgagatgtgttcgtcgagtttggacattgatatgatcgacgacgaggtgatcgagctattgcaacaaactaaaatggatgaagaagacaagttgcctccgaatcttccacgaccaggacacgaagggcgcagcattagagctacatcagtcaggcccacgaagcagcccatgaccggttgatgcaagactatttcaacgacccgtatatctactcgttctattttgtcgaaggtaccacatgtgaaggagtctctttctttaaatcttaggttggttgagaattcctcctacttcactcttagaactgatgcactcaactgtaatggtttctccacacaccgaaaatgcactagtgccctacacatgcttacctacgacaacattgctgactccattggtgagtacatcaaaatggggaaaaagttc

SEQ ID NO: 123455 - DNA, 477 bp, Zea Mays
tgaaataattctttccataaggtactagtgaaagttctatcgcgatccgacacaatcgattctggcataccatgaagtcgatacacagctaccatgaatacctgagcgaccttaagtgcagtaaacggatgacgcaacggcacaaaatgagcatacttggtcaagcgatcaactaccaccaagatagtattgtaagacccagactgtggcagcccctcaataaaatccagcgaaattgcttgccatgcttgggaaggaaccaacaatggctgaagtaatccaggatatcgagacctgtcaggtttagcctgatgacacacttgacaagctgcgacagattcccgcacagaagtcttcatgcgtggccaataaaagagttgcttcactcgagcataagtaacaggaaatcctgagtgaccaccaatagcactgctatagtgctatgtaatgtaccaatcacagtagtctggaggctag

SEQ ID NO: 123456 - DNA, 476 bp, Zea Mays
cgacacggtgtcgaatcggtggctataaggcttccgatacgattgccctgtacctgacacactaacaccgagtttgtccctgaacaccccagctacttcgtctctgatcctctccgccaggtctggcgaccatccattgactttgtgggtggaaatctcaggttgcctgacatcactctgtcgactttcctcccagggatgtttgaggtgtgcgttaggtgtcctattaatgtcaccagctcctgccctatacctctcaggcactcttatggccgaacagtattcagccctatgtccatgaggtggtatggtatgattataatgtgttcctgatggggcaccataatgttgctgcgatgaatgtggaaattgtgcatattgcgcagctctcggctctgcgtacgcatatccggacggtccggcgtaagaggccggatggtccgtgacctggccaaatggtccgaaggtataaccgg

SEQ ID NO: 123457 - DNA, 507 bp, Zea Mays
ccgcgaagactatccgtgcagaagtcgcctaagggtgcaaccggactagcataacaagtgcgaaaaaaccgaagtctaccgcgaagactatccacgcagaagtcgcccaagggtgcagccggactagcacaacaagtgcgaaaaaaacgaagtctaccgcgaagactatccacgcagaagtcgcctaagggtgcagccggactagcacaacaagtgcgaagaaacggaagtctaccacgaagactatccgcgcagaagtcgcccaagggtgcagccggaccagcacaacaagtgcgaagaaaccgaagtctaccgcgtagactattcgtgcagaagccacctaaaggtgcagccggactagcacaacaaaagcaaaaacgacaacaccaaaccgtccgcgccaagaccgactatatgcgcaccagcacagcataacaaaacacaccagaccaagtacacaacgccttcgcaagcatagccaagtgtgcgggggcacacaacctcatc

SEQ ID NO: 123458 - DNA, 584 bp, Zea Mays
gtgagctggtcacgaagtcttttctgggagatggccgaacgctgccatcgtcaagtcgaagtggtccttggggggaggtttgaaatgtgaccattgtgaggtgatgttttactgtgggaaccttggtttctcgaggtgcttttttgggcctataaagaccggtccccgccgcggtggaaaaacttttacgtgctggcacaaagaaaccttggcttcttcatctaagaaaacaactgcgcgctttccacttctcgccaccggtgagctggccccgtgaagcaaactgcccgcccccacaggcggtacgttatgttgtcctcttcctcatcaccgtctgccgcgattgcgccgtcgagcgtgtcgtcgtcaaagaagacggttagtgattcaacgacggtagtggagttgtttccggggcacattgtggagtttgggacgttaaggatttactcgagtcgcatgcatgaaatgcagtgtttgggttattttggggatggtgtggggcgcgcttcaagagacgaagaggtcctagagccgaagggggtgttggttgtttttaaggcgttcttcactgttggccttcg

SEQ ID NO: 123459 - DNA, 707 bp, Zea Mays
gcttcgatcatcgccggaaaagagtttcggctaacgtttgttattggagccgtacgagccatgggtggatcgccactctgctctaccagacggtggttatagaaggcggcgaggtcgccatgtttcaccctcggtagaaccacacagagggcgccgcaaggtcatgatccaccacacctttgaggagacatctgccatcgggactcagtttcacatgaccaactaacaggagtggatgatgctgatgtaaatgaacttggaggcggcagggtggcagtacaccattgagctagaggaaggagaggagatcgtcggctgccatgactgcctggcgctcaccgcgatcctttggctctatgccgtctgacatgcttggtacaacaggtttgccacttatttgctctcactgtgatttggtgaggttaagttaggcgcctctatattcatctattatcatcatagtgactctatgtacctcctcttgtgtgttgatgacattatgctcattgtcgtctctcctttgagtctcatgcaatggatcattacaaccattcaacatgaattcacaataaaggatttgggtcctcttcaccactttctaggattctgttgagcgtcgcccggataacatgtttcttaagtagcgtcagtgtaccctgaatatcttggagcgcgcaggcatgtcggactgcaagccatgtgctatc

SEQ ID NO: 123460 - DNA, 616 bp, Zea Mays
gaattttctacaaattaaacaagtttctgcaattaatttaatactaaaaatctatttctaatttaatttccctggttttctgttctctggactgggcctcaatatctggaaaatgcaggggataaactataaagatcccgagactcagaccactagcgcatggactgcgggtttattcttaagaatcccagggactctttattaagattcctgagccaaaggggtactctcagatctaagccgtcggatgtggagcgcatggcctagattagactgcatagcccatgaaccggtaagtcacagtagcagtcggatttaatatcaactgtcaagatttaatgaaccgcgattgcccaacgaccacacgatcggagatcaatgtctaacttttactcccggcgaagggttacgcgaccttctaatcttgaccgcccatccagatcaaacggccagggcatcgtcttcaccccctggttctctctctcttcttttcttctctcgcgatgacccaagcaacagcgcccagccaacacggcggaaccgcgccggcgactctcccatccacgacccggtgccctagactaacccgaagggaggtgcacgtggtacggggaac

SEQ ID NO: 123461 - DNA, 592 bp, Zea Mays
aattccttttctagagtgtccccaaattccttgagaagatcataaaggctagcgagggacatatcctcgatatcggacaaattctctatcctggcgggagctattgctgggggagctttcttcctcctttccgtctggcatccttggctcgtggttttcttccggattttctttgtgggggcgagcttcttaagcttcttatcatagtccatctttaaggttcgataggcctcacgggtgttggcctcctcgccttctgctatgtcgagacactcttggagagatgccttctccttcttaagctctttgacttgctgctctaggctttccacccgggagtttaggtgggtgcagtgggaggagagatcatcgtagtgggtatcgagggtgtggaggtatccggccatgtagacaatggtagggtcatcctcggtggggtctctccctgacagagcctgaagtcttttcctccaggtgggggtatttttattgctgggtgggaaataacgaagaggagtttcaaagacctctctgctgtagttttggcataactgtttgagggcctttcgggcaacactttggcaagtttctg

SEQ ID NO: 123462 - DNA, 432 bp, Zea Mays
caaaaataagttttagagaattacccgctgttatataataattgtagttcaaagcaccccttctgccctaaaatttggtaattttgtccagagaaaactattcaccttctgacccccaaattttgaggcaaaaaaatatacaccagtaccaagccactgtaaattttttacagaacttttagaattttatttaagcaacctgtagttcaaaccgactccaaaacattaaagagaataaaagaaaagggaagaagaaataaacctcactccaataagtctagcttgagtacttatcaattctcactaaggcttaaaaagaattcagtggaaccccaaaaataaacctaccacttacctaaagtttgacccaatttatcaagtataccacccaagggtcttacataagtaaggtttaactttatctaactcaag

SEQ ID NO: 123463 - DNA, 468 bp, Zea Mays
atttataaggtaaccaagggtttggggccaaagtatgtttaaggccttggttacagtgccaccataaaccttgttacaccgcatgttacactctcgctgggggctggcatttaggtttgtgtggcccaccacattgcagggaccgcctcacctcgacccatgttgtgcgcacttttgtctcgatggtctttgtcttgtggtcttcgtctctgatccccccaatgtccttactgacaattcggccactccttgactccagcataaggggagtgttgtcagtcttcgtgcttccttgggaccatctagagtgaatgtgtcttcacttggtggttaggcctttgcaacaaactagtccaaatttgcctctggtaattgcatcttcttaggccaagggagccctcgattcttgaatatgtgaacaaacttgtggttggctgctagtaactgagagtgattgaggtctagttc

SEQ ID NO: 123464 - DNA, 516 bp, Zea Mays
gtgcaagttctaataaatttctgcattccaaacatgtctcctaccgtgtatataagtgcatccaagcaagatcgacacacattactgctagatacgatatggcatataattctttgataaaaacaaatctctgaaggctcactatctctctacacttttctacccctataaagcacctgtttttttggtttccaccgttgtcccttttgaaaaaaaagtcattatacttctttctaatctaacccacggtccaaacatgtgtatcgtgcgcgaagcgtataggtttgttcatctccgctacttctcacctaccattggacccttatctatggatcgtgggaaaccacctaacccccaacacgataggaaaccacacgcaacgcaacgctcccacatagtaccactaccacctcacagtctaaaagaggacaagcgaccgagtgaactataaaaaagggttggatatcaactatgtattttaggtttagagaaatgtccacaaatttagagaagtgt

SEQ ID NO: 123465 - DNA, 542 bp, Zea Mays
gttcggaaccttgcttgttggttgtacatttattcattgaaaaccttcaaactttttggttttaatggtgggaggttaaggatggatgagagtattgatttggcatgcacaatcctgatccagttcccttgattatccggtctggaatactaatgccgatcctttgtataatttttaattcttacgtttctctactaagttgtgacaactacaaatttcattccaatataatgtacacgagttatttaattttacactacctgtagctatagcgtgtcacaactttctttattgcttcaaaattgggatgctcacatgtataagagacatgtttgtcgttctgagtctatgttttatattaatttaaccccgtagcaatgtagaaatcatgccacaacatatttccccacaacatataagataagagggccatatttgtgagctaaaataattttgatagccacaactcgcatctccttttttatacttttcaccctgcaatgcaaaattgttctaaggaggccatggtacatggctatatc

SEQ ID NO: 123466 - DNA, 317 bp, Zea Mays
tgcgaaacaagcaaagcagctttcgagatcctatgtgacgggcagtcaaccaagaaggaggatggaactaaatcagagcttcttcctagggcatcctttggcttcccactttggctcgaggtaataactattgcaaactcttgtttttaagctctagtctagattatgaaaggcaacagctacagcctatgatatgtactgatatggtaaaaatattactacaatataatacccaagtgactgaatatgacaccgaactatcgaagcaccttctttctgatatctattttttctgtctcacaggtccaaccagccgt

SEQ ID NO: 123467 - DNA, 422 bp, Zea Mays
cctcgcccgagcccgcgttagctccccctcacctcactctcgctttctgttcccccctctcctccaccctagtgagcaccgtcgtttccaccattggcacagtgagcacgctccctgtacttatcagtaattaccttaaaagcaattatgttttatgcaaagtgttgggggccttattattccgatggtcctcaaaacactaactcaacacctatttttagcttgtttcatatgctgcaggagcaatgccgaaggtcaactgaagctactaatagacgcagacacgaggacaatagtttcggacaaacaatgtgtgtgtataagtgacaaagacgagcaagattgggtatgttaggacctttttagcatgtttatcttgtttgctaggcttacgcatgtttaagacacatgtgataatagaa

SEQ ID NO: 123468 - DNA, 419 bp, Zea Mays
cagatttaccagcataaaagcttggtatggttcaatatagtagaaattgattctggagttttaaaactcggcctaggaggtaagatagtcccgaacattgaattaagaaatataggtcgagaaaaccctcgaactgccccactcatacacatcagccctgtagctcatgtgaccatacacaacggcaccataggccatatgagaaccttgaacccgaccaaaaccaaggttgaccttagacatgtgctttgtcgtaggagagacgagaggatttgttcaaaattgaacagaaatgaattttagccccccctcaatccccatctcgcaaacaagtcctaacggtgttaattcagtccacaaaaagacgtttgtacccttgcaacatttccccactttttattaactgattataaatttgc

SEQ ID NO: 123469 - DNA, 352 bp, Zea Mays
tcctgattggttgccggcagcatctgcgcctggcttacacgagcctgtaccggttgagtcgctcatatttggcatctggactaataagtgtaaaaaagtcttgcctgcagccacgtgtataggctccgacagtgctgtgcagccaaccaatcaaaggcacaagcccagtcaacgcatgcggggatcctaggcgccaggggctaggtaaccaatcacgaggaatattcgcatcaataccatgcatgcatgcaccgcaagcagatcgggacacaggagtgttatgaagccgatcgagagatatgcaacccagctagagcatatgaagaaggctcaaactacgatcgagtccatt

SEQ ID NO: 123470 - DNA, 445 bp, Zea Mays
gtgcgattcatcggggagaaggtttggggcgcctggaactaatccgcggtggcccacatatgagtcatcgctcgtcggttcttgtagattagaagagggagggagggaaggtggagaccaccaacaaggaggcagaggtctcatatggttagaagcactcggtaccagtagtagctgttttagtcagggagcacctctgcgccatgcccttttcctcttcttgcttgtttttgttcaatgatgatggatttattgcactctgatgatgaacatgtgagcatttgagggtgtaggtgcaaaaaactgggacttcttttctccatccctccatcctcctctatgctatattttactccttcgctttgattcagttcaattcaacaatgaacttattgcaacactatagcttatgttgaatttagttttgatccatggtttgggattt

SEQ ID NO: 123471 - DNA, 361 bp, Zea Mays
cgaggatggtaggtggtgctgaaatctaacttggtgcctatagcttgctatagacttaaccagaattttgaggtgaattgtgttcctctatctgatactattcttcgcggaatgccatgcagtctgactatttctttgagatacaactaagcaagggtggctcctccataggtagcctttactggaatgaagtgagctaccttggtaagatggccaattatgacccagatggagtcattaccttttggggtttggggcagtccgatgacgaaatccatgcctatttcttcccatttccatttgagcactggaacgggttgcaacactcatgcaggtttctgatgctctactttggttcact

SEQ ID NO: 123472 - DNA, 504 bp, Zea Mays
ctctatggcaaattcaactttcctttcaggtggcatgcctggtaactcttgaaggaaaacatcggggaattctaaccaaatcctaattgcctcaatcggattggactctttgttgtctactggtaaatggtgacagactccttctagttcaggcaagtatagcttggttactacttcttttcctgatggggacaccaacttaactgttctcttgtaacaactgatagtggcttggtttctgtgtagccaattcatccctaggatgacatctaacccttgagttcacattactactaggttagcggggaagcatatcccccttatttcaatccttagattcggacaaattctatcggactgaactttcccccaactgaattaactcttgaaggtgggatcattggttctatggggatgttatgtgcttgtaccaagatgaagaaacaaaagaatgtgtggcaccagtatcaaaaaatacttttgttggataggattcgacgagaa

SEQ ID NO: 123473 - DNA, 594 bp, Zea Mays
ttcggagtggtgcttgaagactttattgtctccagcatatctagtacattgaccatcctttttctcttgggagtcgccgtgagatctttttgtgccttcggcactgtcattcctgccgaagggcttgtaacttctaatatctttgttttctcggcctctatttcttcaatattatcggccttcggcatcatagtcggctcttcattcttctgtgtaagaacaggtcctttggcttcagtagccgtagaggtctcaccaccaaattcgggcactgtggccagttcaatgaagcgtggtcggtgagtaaggaccttcacctttttcctctttggcgcgggctcacttagagcaactgaagcatcacctttcccagaggttgcactttttctcttttgccctttcagcgggtagcggtaatcagggtagataaacccaatagcatcgaaaactctattcatcctcttcttcttccggcctccgaaggccacagataacgcgttatcttctgcctttgaatatggcccaagcagttcgtcgcttgtagcttcgatgcacttcagccaatcatcatctggctcaataaacttaccttca

SEQ ID NO: 123474 - DNA, 742 bp, Zea Mays
agacaatgtgtaaaactatatgccaaccttcaaagtgttataagcaaagcaatctgcaagttgatcctttggcatagccgataattcacattccagcttaggataacccatcttatccatcatcttgcgacatacctcaagttctctattgtataggagacaatagagatagtcatcctcgtcatttccaccatagacaagagaggtcgatgggtactttagatcttcagcataatctttgacttcggcaatttgctctgcagtcagtccccccctgaagcatgacaacgatgtacttgtgtcgtctaggcggtaccatctctatggacactgaagctatttcctctttagagccctcatccttaggacctacaacttcatccctctcttttcccaaatcaaggtcagccttcagactaacaaataactccgattcagttttcatgctctcagcaatagatgtgctaagaggagtttccatgaactttgccaaggcgaagccaccttcgtaggctttagaacaactttcagaatgttagccatcgtattccctttccggggtgttcccctaaggattgtcttaagcttcggccgagcctctaccttcgtcgatgcttctggttacaagctggtcaaaggcacttcaacctagattagcacctcagtaagttcctcctcatccttcttctcctcctacattgagaattaaaaccattgtaaaaaccattccaacgcattcaat

SEQ ID NO: 123475 - DNA, 758 bp, Zea Mays
gtgagggcggttgttgcttcctgcttgaccctgagtgatagcctttctcttcatcccgcctagcggaacacgcttgtgttccagagctattaccttgtctagaagtatctagacagatgggaatgagtgagacattagttgataatggtgtgacccaattagttgttctagaaatagttcctgctttttctcatcatgtgcaaccttctcaggaacatatctgaacaactggatgaatttgtttctattctcgcttactgacttacttccctgtacgagtgaaaggaactccttcttaatcttcatcaaacatgcaggaatatgttagtttctgaaattggttgagaattctgcccacgtgatggtgtctatggatacatgtgctgcgcagtaagcatcccaccagccagcagcggggccaatgaggcgacccgatgcatataataccttctccttgtcagtgcattgggcaatgttcaacatgttctccatggactttagccaatcatcaatttgtagtgggtctggggagctggaaaacgtgagtggtttatggcacatgaactcacgatgtttgtctctaggtggtggttggtgtgggtgctgctggttattgttgagttgggcttgcatgttggccatggtgttggacatctgctgcagtagctagatatgggcagcgaaaaaggcttccgacccaggaggcggagggtttgggggatccatctgtggttctaaattaattactactcttcttc

SEQ ID NO: 123476 - DNA, 397 bp, Zea Mays
gaaagagagcaaaaaggaacagaaggggatgaggaagttgataaggaaaaacatgccagaaaaccaatggcaccaagatctgaaatgtgggaacacttcatcaagattaaggatgaccaaggtgttgtgaagaaaggaaaatgcaagtactgcagtcgtgccattagagctgattcttatctgaatggcactactgcaatggggaggcattttaatatctgcaagcgcaatccccataagaacaataaggatccgatgcgaacaaatcttaaagtgagccaaggagaaggtgttagcacttggaggtatgatcttgaggcaataaggcaagcttttgttcaaatggtcatagaggatgaactcccttttatgtttggtgagaagtcaggatttaaaa

SEQ ID NO: 123477 - DNA, 450 bp, Zea Mays
tgcaactcagacagctcagctgaccctaacactggttgaaccgcccctagggtcgggttgatcagtgaggtccacgaaaaaaaccccggttgaactttccttgtaccccggttgaacctgtctagtccccggttgaacctgtctggaacccggttgaactcaccctggacccaagttgaacttgccctggaccccggttgaacttgtcatggaccccagttgaacctccctggacccgattgaacttgtcctgcaccccggttgaacctgcctggaccctagttgaagttaagttcaactcagctgaaaaagctaaattcagctgaagaagctcaactcagctaagaaagttcaactcagctaagaaagttcaactcggctaaagaagctcaactcagctgaagaagctcaactcagctgaaaaagctcaactcagctgaagaagctcaa

SEQ ID NO: 123478 - DNA, 374 bp, Zea Mays
gtttgcaagtggccacactctataagcaatatgctcttggaccaagtctcttgtgcgatataagtgcacactatgttgaaagttgtcttacatgcttgcacgtcactcccaagtgcaataagtggcctcctaatgccgaagcgagaccatatagggcgctgaataatcccttttatatcctccccaatcttcacataaaaccattcctgaatccaagagcctctccattttttccgaaatgtcggcataggttaactggcctctgagcggggcatgaagttgtagcagctaaaattgttgtggtattgttctttcccagtcgccttcgtctgatattataattcgtgaatattgcagaaacatctggctctggc

SEQ ID NO: 123479 - DNA, 404 bp, Zea Mays
caggaccaaaacttgctggcaatgtatagatgcccataatctaattgttctattgctctcacttccactgacagcagcaacagagatagccagaactccctcttcagttgatgccttagtctgttcctcaatctcctctttctcatcctcattcacctcatcattgacagctatcgcccacatttcttcgaccaaatgcaagggaacactgctggaacaactgtggttgtagccccacttctctccacatttaaatcataaacccttagctcttctataggattttaatgcagcaagtttattttcttctgccttatgtccattagctgttgtcttacgatgttccccatatggtgtaaacccacgacttacagggactgctactgaatttactcccaccaaat

SEQ ID NO: 123480 - DNA, 389 bp, Zea Mays
tcgaatctacccatcattgctctattgaaattattattgttcttatctaagtctttataaatgaggttgaagtcaccagccaacatccacggtccaagacattcaaccctaatatccttgatttcttgtaggaacataatcttctcatggtctccttgaggaccataaacactggtcagccaccattcatttcccctttcattacagaactaaactgatatactatgattatccagtcttttttgaccagtgaaacccaaatgccacctccaagccactagaatgcccccagctgtcccaacacaaggaaggtaaatgaagttactaaagtttgtcccaagcatggaaagaatcaattgacttgaaataatttgcattttggtttctaa

SEQ ID NO: 123481 - DNA, 514 bp, Zea Mays
cttcggcgaacctataccggccggataactcaaccaccagtgttcccgtgcggttgacaccgaattcgacttctactgaccctttcccatccatcaattgcagagttctatccctaaatcgctctgtccacggtgaccgtgcgatcaacggaccatccaatgcattcccggtgatcctatgggtcctagtttaattggccgggtcagagactaccaggagcatatcagagcactgaaacaagtgaatagagggcacgaatagacctgagacgagccaaccatggcgaggtgttcacgcggcggtggtttggctgatttggggaaaatgggaaattgggcggatctggtgaacaatttgaggctggtgttagtgcactggatgcgtatttacctagcggagccgcgggtgcgctcaatttatagcatgcttgagcggtggccagtgaatttaatggagacgcgcggcggccggaaaaggaggagatcactggtgcaggtgattggtggcatctac

SEQ ID NO: 123482 - DNA, 455 bp, Zea Mays
tatctggatgggaggagcatcatgtcataaccaaagtcaatgggcatgaactcgagactcccgaaccagatcgtcgtgacaaggtgccaagggtgctgaggattggctatatggagtcttggtgggaatgtggtgtctgcacacagcgagctcctacttggcgcgtcaactgtcagtgttttgaccaagggggtcctcaaccgactcgtgaattagtgttgtgtgccctggcctagatgggtgatgcaagaaaacacaagtctttatctttgttcgagcaagagaaggtcatacttccagtagaggggatgagacttatattacttgcatctaagtgcttgcagtagagaattcaagctggccgagagagggaaaggaacccaagtccctggggctgattgaggcaagtgtcaatatccgcgtgaaggtgaaaaccgtgaagtcttcctctccac

SEQ ID NO: 123483 - DNA, 1504 bp, Zea Mays
aaatattcacaccaagaagtagagtatactaattgttctatgtgagtctctaggacaagccttttttagatcagtgtagtagatgcacatatgaagttgcccctagcctctggtactatgacagggttggccatccacttagggtgctagaatttgcaaatgaagttagcacataggagtttgtcgatcttggtgcagatcaactactaagactccatggactatctccatgtctattattgaatgggtcatgcttcagggtggatcactggacgatgttcaatcaccttgtcaggtaccataatcagggtacctagattatgcccctaaacacgcttaacacataactaccgaagaatcataagacacgttccccgaggtcaagcaaggatgaatcatgattcgcccgagacctcgctcgacggtcgctcaaaactctgcttcgctcgagcctgtcctcgggcgaaggcaatgctcgtgagaaatcctcatctcacccaagggcccctcttcatggaatggcagtttctgcctcgcccgagcccgtctcggacaagaggatagccccgagcccagcctcagtcgaaggtcacgggaaccgtgaagatgtgtgcatttaatgtgatgattcagatacctacacctcgtgacgccacagtcaaaacaaggagcaattgggtcgcggtcccatccactttcaccaactacgatgacgcatgcccgggaataatggacactgctccccccactccggtcactgttcccagacaactctgaatgggtcatgcacgtgcctggtcatagcctcaccctcgggagagaactccacctcgcacgaagacagcttcagcctcaggagaagtctccgcctcactcgagctcgacctcggccaattgcactggcaacaattccctgcgaatcccgtaggagaccacttcgacaattgtactaacccctccctgcacaaatgtatggcccgagggaggctcgaccaaggcctcaggaggaacctttgtctcgctcgagcctggcctcagcctagataacatcaacaaaaggacgccaccaactcctccacgaaggctgctaacaacggggtggctacagaaccgatgtcaagtctgctttacaccatacggggtggattaccatgcacttttcaccatacttatcactatttcaacaactatgacttggacaacacctccatcaggtaggctcgggtacacgtccgagcccccaatccaggcctcaactctcttctcggtcaagatgcgagacacagggtatggacgtcctccccttgatccaagtcaaccgccagtacaagggccattccattggccatactggctacatggactcaagctcacctcctctcccatacacgacaaactatggtgttcctgggatccctccttgaggttataaaagtaggagtccagggcttcgaacggggacgagaacacttcatgggttttcgcctccacaacttatattggc

SEQ ID NO: 123484 - DNA, 373 bp, Zea Mays
ggggggggggggggggtaaagcctggcggagggttccaggggaggccttcagagctgcacgtgcgaacggtgccttcaggggtgggtgggttatctatgcgaggttgcttgatgttgactgctccatcctcgagtgcctcttaagggatctcgccgacaaggcctgccttgcctttattttcggcgagggctgccttgccgcgtcgtccaaggaggtggtggcttttgaagttgctttcttgggaggcattgtgagattggtttgtcgaagcacgaacggtgggcaccaaatgttagaactgactgacacgtggtcgagtaggcccaaacaatgggaagttggaatgctcatgtgctcaacaaaataatgggc

SEQ ID NO: 123485 - DNA, 277 bp, Zea Mays
ttggtacaaggcctattggatccttcaggacttcactcagcgatccagagtggactacacgagaccttacgccctgtcgtcaagcccgccgccgtttggactatcctctctcgagaccaggtggtccaccactggacatcaagaacgccctccttcacgacacgtccatgttcatcctttgttgaggccaagtcggacacgtccatgttcatcctttagagcggcgacgatattgtctacctccttctatacatcgacatcgtgctcagggcgtcta

SEQ ID NO: 123486 - DNA, 457 bp, Zea Mays
ttatatattggtatcacgagctaactaaaaacaaaatagtcttcttttcctttgatgtggtgggcctgaccttttctagtgctaatgttttatatagaccttggctccgccgccaccgcctagggactgagccctagggctaagggtgcggacgtgtcatcgaaaaccatcatcgcaagccccaggcctagcaataaggtcgtgccacacggtagggactactacgaggaggaagatgacgatagcggcttcaggtcccaactgctgttggaaaacaaccatacaatgttctcgccaccgacgctactctacaactatcattcgcacaacaaggtgtgatatatacccatcatcgattcgatcgatctcctctatacacgattccatcttggtcttccattattaaccactccatatatgccaagttgcaagcaaatatgtatacaacattaggttt

SEQ ID NO: 123487 - DNA, 473 bp, Zea Mays
tggttcatgcccttaaaatatggcgtcattatctgctgagaaatatctgccatatatatacagatcataaaagcttgaagtacatttttacccagtcagaattaaatatgtgatagaggagatggcttgagctaattaaggattatgaattggaaattcactatcacccaagtatggccaacatagtggcagatgcactaagtcgcaagactacctgccattgtcttacaataaagacttctaacatcacattatgccaagaaatggagaaattaaacctgggaatgattcaacatggaaccttaaatcaattcaagcttgagtcaattcttctgcaaaagattattgatgcccaaagaagtgataagggtatgaaacacattcatgagaaaataaaggccgataaagcaaactgtttcaaaaaggatgatcaaggtatagtatggtttaatgatcgtatagttgtgcctaaa

SEQ ID NO: 123488 - DNA, 361 bp, Zea Mays
tcttcacagcatgtgctatggcacctctgaccctcctcgtcgccctcacgacagagttgctcctggtacagctcacgtcgcggctttgttccgaccgtccttctctgatgggtcgcgacgttctccggtagatttcaccacagcggccaggtttctatatcagctcatgagacagacgcttctgccacggatgagttacagggaggctgccactcatattcagctttggctccttggtgctctagtttctcactcagagtttgatgtcgtggattttctcatttgtgagatcgaggacaccgtactagatggtctccgtgctcatcgacagctgccttatgctcactatctgtgtcacatc

SEQ ID NO: 123489 - DNA, 689 bp, Zea Mays
taagattcagagagtaaaaatcaagaagaccacgaaaaagggagaaactggcaaggccagtccccggatgagaaaagacacaaaaataaccacctcgtaggtatcctctgtcgggacagtaactctttgctagatccgccaggaacatacttccttagcgcgacaggacaccgatttcaacaagatgcaaaaggtcatctttagaaacgacaaaaacgtggttaccagcaaaagggagttggctattaggatcaatcggagggatgaccggcgtagctgcactctaatttctcttcccggggccatcacgatttttcaaacatcgtggttcaagaacaaaacacgaaaagacgtgggaactcagaaagctagaaagcggcggaggaaaaacaggaactagggttcaggggccaagaggacgtcgacaaaagtacaggttggcacactgagtcgggcatagaaggacaagctggtggctcgggagagttttggtcgcagcagagtaacgagacttggtcagtacctctagaaagctaaggctcgacaggaaggttacttgggatcagaccgttagacaaaagaacagaatacacataagtgaagtggcatgaaacaagcttcattcatccttccataagtcgggatcattacaaaaggaagactgactcattatgagtcgtccaattgcc

SEQ ID NO: 123490 - DNA, 436 bp, Zea Mays
gcagggcatagtggtcaccctgagttaaataagaatatcggtcaatcatgaacaaactgagtgttcttgaagccttttttattgatgacatatttcccattttacagagtacattatcgtcccgatagcttttaaaatacagctaggggtaaaacttcctgaggtgttctatattccaggagttcccaatttctgtgccgtacatttgagtgagacggtatgatcccggccgagtgacttctgctactatgaatggtccttcccataagggtggcaacttgtgccgtccctcccccgttagaattcggcggaggatgagatctcccactgaaaaggatcgtcgtcgtacggccttgtcgtgatagcatctcagagtctgctggtatcgtgctgattgaattactgtgttcaactgttcttcttcgagtacatcaat

SEQ ID NO: 123491 - DNA, 356 bp, Zea Mays
tcccaaatcaaatgtggggcatgccaccatatccatttgggatgccacagtaccctgcttggggggcaccccaaacatctgtattcgacaggttggcacctccagtacaagaccgattgagcgctgctcaatccggtcaccaggcacaggcccaacaagattgccggactacttggcctccaaggtcgaccaatccggcagggaggcatatgcctgcagcaattgaaagaacaacaaaaaaggacatcatcaaaatatgtactacagatgttgtcatacaggaagataataaagggccgatgatttttggtgaatcggccaacacaaccaaaaaagaagatacggctaccatcaaa

SEQ ID NO: 123492 - DNA, 1055 bp, Zea Mays
ggtgctagtgcatttagcgttttcagggtcggggatatggggccgatcgacggtgagcgtggaaggggaatacagcagccagacgtagcagcagccatctgtggagggtgcgccgtggtagcaggtagtggtggcagaggccggaggccagtcatcggctgcagtgtcggagcgtgacgtgaaatcaagagggggcgacgaacgatttggcttctggatgtagaatcggagatagatcgaagcgcgtggcggcgtgtttccgtttgtgaaaatataggagtgctgtatggtcgatggcgtgcgcgacggtggagcagcacggcgtagtggcgggaggaggccgtggccgcgccaaccattcacttgggactgtcgtgcaagctgcccatccctgcgctcttgctgaagtcctgtgttgcagctgctcagctgtatgcttgtgacgagcatgtggtgctgggggccggcggggcacataatttcaagcaagcagatgaggatctacaaccaggagggtgtatccatccatgaattctagtccaacacccgagcatttaaccaaactagcacctttgatttcatcctgtgtctggcacgattcgtgctctggatcgtgttcgtcttccctaacaacagctgggtccggtgagctgaggtttgggtttgggggttttcaccagaggttgcacaggattagagtggtggtagaagacaaccaaccgataggaaaggtcggggcgcgtggaggtgttacaccaagacgagtagcatggtcaggcctgggccggcataaactgagaccctgttcaaaattctaaaatggggcctatcactataatcactcgtcaaatacataattttatatagagcaatttgtttacaattttacggacatagaaaagatgaataggaaaaatataaaattaatgaactttataaaagagcattaagattctttccgaataatagaattaaattaaaaattttatattatgttctgacaggcaacaacctattgacgttggcgactagagtagttgtatggtaaccacaag

SEQ ID NO: 123493 - DNA, 580 bp, Zea Mays
atattctcagcataggaaagtagaagtagaagtagcagtaatgtcagcataggaaagtagaagtagaagtagcagtaatgtcagcataggaaagtagaagtagaagtagaagtagtagtaatcatcattgctagtcgacaatggtatcaggatgtaagtaatgtcatcattagcaactggtcacatcacacaaagaaagtgagttcaaaactgtagatagttcatcattgctaatagacaatgttcttagcatggaaccagttcttacaaatttatgagcaacttagcacatcacataaaggaactcaaacaagaaagtgagctcataactatatatagttcatcattgctaatagacaatgttctcagcatggaactagatcttacagatctatgagcaacttagcacagtacataatgaccactatcccctattttgccacatctgttgagcccaattgtccctggtagcagaccagacagcattgtccatgacaaggccaaggggagctccctcatgaagttgatttgcagcccatgtgtcttctagtggaacatgttcatcattcccatgacgaag

SEQ ID NO: 123494 - DNA, 419 bp, Zea Mays
ttgagaaggaaattgatgatcttgacaaagtcatagttggtcatggtgatttttgcgcgctagtggctgcccgtgggacagatgctgctttcgccaaggctggatgcaatcatcttaagactgttaataaaccaacattcaccctttcgtcatcagatttagtcaatatcccggccgaagccagaagtgtgggtaatagatttattaccgagatctggacaaagggtggccgagagattgctggagacgaagcacgagccttaattaacaaggtatgaagattttcttactttcacgctttttcaagttctctcattatgtttcacaatacctttgtcttattgctttttagggtgatgttgatgaagactgataagccgaagcttattcgaagactctgaagaatacttctgaagttg

SEQ ID NO: 123495 - DNA, 531 bp, Zea Mays
ttttctaattcattttcctgattttataattctctggactgggcgtcattttctgggaagtgcagggaccacggtgttagtgtttctaagactcagagaactccaggtatggacggcgggttgattggtgaattcctcagggactctttagcaaaactaccagcgcgaaagggtacgcatcaaacctggccgtcagatttcgtgcagacagtatggattagatctacgcggatcaaaaccagagcgccgcagaaccatccgattggggatcaacggtgcggattttaaatgctaggatcactacgcgcccgtccgtttatgatctaacggcagggatccgtctcaacgatggggtacgcattgatctaatctacaccgttccttttgcatcctacggcccacggttcttcttcctcagctcgccaccaggatatggccaacagcgcccacaatcggcgaacacgccagtgccgccaattaccagccacccggcggtagcccagacccgacaccccatggaggaatgccgcg

SEQ ID NO: 123496 - DNA, 443 bp, Zea Mays
aaaagcttgaaatatatattcactcagaaagaactcaacctaagacagagaagatggcttgagttgattaaggactacgatttggaaatacaatatcaccctggaaaagcaaatgtagtagctgatgctttgagccttaagggtcaagtgaacaacatcactactcatttgatgtcacaagaattgtgttgggaaatggaacaactcaaccttggtatgctcaataatgtagaagcaatagttatggaagttgaatctactttggaataagagattcgtaaaggacaagagtccgatgagaagattaaggaaattaaagctttcattggtttgggtaaagccctagatttcacggaagatgaacaaggcacggtatggtttaagaagagaatctgtgtacccgaaattgagcacttgcgccaacttattttgagagaagctca

SEQ ID NO: 123497 - DNA, 335 bp, Zea Mays
tttgaatgaagctgaataccagttaagtacaagaagagaccgtgtacagtgggttctctgcttgttctgtaactaatagattgattgatttttatcagaatcaaattggtaggtacgaccattaagagatatggatatctgacagcatatagagaacatatgtgtaactaacgattgcgacaacaacggtgcaacactacatttcaaaagtgcatcttctgcctagcgttgctaagtgctatcatgtttcacaaaagatccagatgcaatatcagttggacctctccgatggtagcaaaacatactttatgctttcaaacatcagagcaaagttg

SEQ ID NO: 123498 - DNA, 567 bp, Zea Mays
caaatcgtttttccatggggcataacgaattgatcccatgaagaaggccaaataggctgacttgcttctataatcccctgattgtgttagtttccacctgaacttgagcagatggtcactaaggaggaagtttggcacaccatcaggtcgctcccttctgacaaggccccgaggctagatgggtacacaggtagattttacaaaaaggtttggcctatcatcaaaatggattttatgtcagcattgaagaaagtttggcagggggatgcttctagattatatctgctcaactcagcctatgttactttgttgccaaagaagagtgaggccattgaggtgaaggatttcagaccaataagcctaattcacagtttttcaaaaattgttaccaagattttggctaatagacttgcacccaagctccctgacttggtctctgtgaatcaaagtgtttttgtgaaaggtagaagtatacatgataattttgtcatggtacaacaaatagccaaggccatttatgggcaaaaagtttctagagtcttgttgaagttggacattggaaaggct

SEQ ID NO: 123499 - DNA, 477 bp, Zea Mays
tggagctttgcatctttcaaattatagggtttttgccctaggtcaccacatcaagtttgtagcccaatcataggagaacaactttgtttaagggttcaagccatggtcttatgagaaatttggagaaaaaccccatcaaagatggactgtcaggctgcctgaagtctgaaatacagattaacagtgttatgacatgaactttgagttcgattttgaaggggatccagtgaccttttgtgagtacacattgtagcaaaatgatagatggattatagcactacaactttgctatagatcactgggtgtgttgccatctgaaaattagagaaaatgatgctccaatgtgctctgtcagtcgctctaaattggtgactgccatggtacagtgctcaatagggatcagaccgccagcgcggctatcctcaccgccgacggctccctccgccgtgattcgtgctgccgccgtccggattcgcg

SEQ ID NO: 123500 - DNA, 394 bp, Zea Mays
gccagagctaccgaggagtcgaacctggaaaccacacttgaggttattgacaatatactcctgaaaatggatgaagaagaagctgttatggctgcggtgaacacggcaactgaaaaggggaaaaagcagattgatgaaatttcggaagaaggagattttaactttcaagatttgcttggacaagagttaacagacgccgaaaaagaagagttgaaaaaatatgccatatcttgcggatataaatcaggggctatgctatttggtggggtcaacgaagggaagctaagatgccttcggaaccgcaccgaggccaaaattgttagaaccctctccaaaagcgttggcttgccgaagatagaagcagacctctgcaggtaccagcgacatcatgtcg

SEQ ID NO: 123501 - DNA, 296 bp, Zea Mays
tcttgattggtgtctaggggagcaaggacagccctagcaccgttgtcttcttcgacggcatgacgaaggtggtcgtagagttcaacggaggtggtcgccaatgttgttcactcattctcgattgctatacacaatcaaaaacaaggaaacatggtattaagaagggatggtatgcctttgtcttgaagtgatgaccccttcgagataaccccttcgaagacaacgattaagatttcattagggaattatgattcattattataaatgaataaatgaacatataagaaagatatcaa

SEQ ID NO: 123502 - DNA, 350 bp, Zea Mays
tcgtgttgccaaagagacgctaaaaggagtcagtataacgaaagattttctcctccggtagtatcctcctgtgttttcaagtcgtccgactaatcgtgattagtcgggctagtcggttagcagagctcgattaggcagccgactcgactagagtacctggtcgccctggtcgtccgactagtcgccgattagggccgattagtcgctcgattagccggttctgggcgactaggtttaggacctaggttttttgatttcttggcttcgtgggcttttttggcgggcggcccaactataggcagttgaaacgccacacgccagccgcctctactgaagatggaacgccagcc

SEQ ID NO: 123503 - DNA, 477 bp, Zea Mays
agctcttggcaaccttcgatcagaagtcattaagctgagaaacgaaggcttggagaaggacaaattatactttcattggtggataaagtaaaagacgatgaagcaaagtctaacagtcaatccaaaatttataaagccgaaattgaagaccttcggaaaaaacttgccgaagccaatgagaactttgcagttgccaaggctagtcaagaaattagtgaatgatcgaaaactaggctagagaaaaatgtcgaggagcttcgtgaatccaaggaaaggtgcttcgagaaatccttggattgcgtgaaaaaattaaaaaccagctttgctaaagtaggtgcttattcttccgaagagaacttcattcgaggcgaccccgagggcgttattgattggataagcgaggaagctgaagcttttgaagagatcctaagcgatcgtggggatatctatgctttctccggcactcgaggtattgcg

SEQ ID NO: 123504 - DNA, 625 bp, Zea Mays
agtcatgaagtaacaagaaacaaataaactatcacaaagcaaacaaggtttattaacacaaaaatcaaatcaacacaagcttctagcacatatattttaaaataaatatacagacacatataaattacaccatactttaaaaagatagattaacacttcattcagatttgtactgaaccatgggctacacaatatcagttattgtggtatttttggcaacacgtctaatttttaaggtggcatattaaattgatacatgcaaaggtgtgcggaaagccggaaactcaaaaacaagatacgaaggttaaaaacttgctttcttgaaaaaggcatatcacagattctccacacatattgcacaataattcaaacccattctactgccacaaaaaaggtgaattggtgtgtgccagttttgccttcgaaaaccaatccaatccgattctatcaaacttgcatagttgcatagagttaaaatttatgggaaaaaaatccttcagtgtgttccgtcaatatattacaaactgaaaaagaaatcaactaattacctctcacaccacatcagtgttattaaaactacgtttaaacggtgtttatacatcaaaacgctaattagagattgaaa

SEQ ID NO: 123505 - DNA, 504 bp, Zea Mays
gaagctagaaaggtaataacaatcttagaatatatggttagattatgagattgtaaattgacttaatatctttgatttgtagaaacaggagtttcatagggaaggtgtaaacttagcaagaccatataaggccaagcctaaggaagaacgatcaaaagtagtgagcaacaagttcttaggttgggtgcgaaaggagcgaagaagatgagcagaaagtgccaaaagtgtggcatcgctgatggtcacaacagtcgtacgtgtttaactgtggaggataataggattcgattagctaacctagctggacgcaagagaggacgacctcctggttcaaggaacaaaatcggaggtgcagcaccacagtggaatgagacatcaacgtcaaaaaacgaacagtgtatgtcgaagatgatgattcatctggtagagagtagaataccaaaagaattatgagatcatgggttgttttcgtggtaactagtgttgcaaatggatgaacgactg

SEQ ID NO: 123506 - DNA, 681 bp, Zea Mays
gtgaggacaagagaaaaagaggaagattgttgctttggtcaccctagttgagcctgtaccgaagagcaaaaaggtgaaggttctgtcccaccggccgcgttacattgaaccggccgtggtgcctaactttggcgcagggtcctcttcagcagccgaagcaatacatactgctccgattacacagagcgctgaagaaccaactgtaatgtcgaagacgcatacaattaagccagtcgaagataaggttgataaggctgaaaagccaaaggttgaagagataataaaaatgccaaagattctgagccctccgacagaggcaaatctgccgaagacgcaaaaggcttctgctgcaactcccaagaggaggagaatggccaacgtgctggatgctgtgctggaaactacgaaggtgttaagacctgctgctacaaagaaagttgctgaaactacaaaaacgcaggccgaagccaaaactgggcaagcagaaaccgaagctgcgaaagctcaaactgaagctgaagctgggccttcagtgcccaccgagatggagcctgctgagcctaaggaaaaaatgacagagctgattgcatctgaaaagatcgaggctccaaacaaaagcactgactacatcattcgtcatacttcgggaaaagaactatcccaagaagaaatgctagaagc

SEQ ID NO: 123507 - DNA, 1737 bp, Zea Mays
cgcgcccgtgtcaaggctgctgcggccgttcttgagaaggaacgggccactgctgctgctctggaggagcagggagtcaccgccgccaagcagatgacgccgccccttcttcgccggttctcgagctctctagtgaccaagctgctggtgtgcagaacatccgctcattggtcccagtgaccctcgagccgtcctccaccaactttgcaagctggcgtggtcatcttcttctcaccctcaaatggtatgccttgacggatcatgttcttgctgattcctacttctccaacgacacggcatgggatcgcatggacaacattgtcttgtcttggatttttggcaccatctccatcaagctgcaggagcgtcatggcacggctcgtcaggcttggctcgctcttgagaacgatttcattggtaatcgtgagacatgtgccctccatctcactgttggtgagtattgtcggaagatgaaaggctccgctgaatcgctgatgctctctccgacctcgacgcccctgtctttgaccgcatcttggtgctcaatgtccttcggggcctaactgcctgagtcccaagtatgccaatctccggaccatcatcaccaggatgatttggtcttgtaaaagattgtcgcagacactgctactcctgactctacgaccaccgctctgtacacctctactacagctttgtcgactacctcatcaccttctcgtcctcctgcccagggaactcgaccacctacccagggaagggtgccgggttcaagtgctggtcgtcgcaacaagaatcgtcgtcacgacaatgtcgtggtggtggctctccttggcattccgtctacaatccctggacaagtacaatccacatgtggcctagatccatgtctacaggttcctctcctcgccctagacaacagcagcaccatcctcctgctccgtcgcagtcctacctggctgcgccaggactgcctaccttgcagctggcctgctcggacccctcctgtgcccctgtcggcccttcctgcaactcctgcaacatctccagctcctcaaccttggcctccttgggctggatcttgggatcagcgagctctcgccatcaccttcagtacaatgacacttcagccaccagccaccgttactgattggattccggaccaaccataccacagctcatgctggtaacatctctctctttcgacctcctggcctcgctactccttctatcattgttggaaatggtgccactctccctgtcacctcagtaggcgacacggttttgccaggacctttatatcttaaaaatattctccacactccccacattattcaaaaccttctctttgttcgtcgttttactactgataattgttgctctatggaatttgatccttttggtgtttctgtgaaggatctccgctccaatagcgtgattattaggtccaatagtgttggtccgcactacaccatgcgcctgtgcagttcatccccttcgacaacttgtgccctagctgcaatttcttctcccacatggcaccgtcgcctcggccaccccggcaccgatgttttgtcccaacttgatagttccttagccattcgatgttctcgtagttcccttgagttgtgtcatgcttgtcaattaggtcgtcacactagattacctttttctagctcatctacctgtactaagcaaccctttgatatcattcattgtgatctatggacatcttcaatt

SEQ ID NO: 123508 - DNA, 633 bp, Zea Mays
aatggctattattcaatctgtgtccgaatcggatttctcgacttcagtctgtgtccaaatattttatctgggtccgtattctcaagtggaatctctaaggtgtcagcttcgaaataaatattacccaacctgacctgctaatgcccgtagccgatctgaatctgaaaacgtaaagatccaaactcacacaaatggccaacctaaattcatgacaacggtatttttttgtgagccacgaataaaaatggggcgtaattttaagttttgacatgaacaaaagcgactataaattttcaatggagcagctcacatggtttaatttaaatccaaacaaccggtttctaattcaaaataaggccaaattgttttctaaatagggttcgagaaatttttgttgggcaattcgattcgaagttcggcctaacattttagattttcggagtggttcaaaacaaaattcgtgcgcgctagcctcgctggcggtctcgatcgctggcatgtcatcgcccgccatggcctatggctggccaccaatttctgcgccaatagcccgcgccgcccaatttgaccaatgcatggccgcccaatccctgcgccaatgggtgatgctgtttcctcctagccaatcaccct

SEQ ID NO: 123509 - DNA, 750 bp, Zea Mays
gtgagaaggagggagcaaagacccaacgacgttggatcggcctgtgggaaccggtcactctagcgactcccggttgcatgcgcaacgagaggccaaaaatagactataataattttcgacggtcatatatagctcaaccaccgcaggcagaaggccaattgcgacaaagagctcgacggaggatctgtagggcggcctgatgaaagaaagaaggacaagtggaggcacgacgaagtgctggtagccacaacgggccagaaaggaaagaaaccgccgaccgaggaagccaccgaccatttcgagaaactgctcgaggcccccatgtccgaaccaccgctatccggtccgacacgcctataaggactatgggttgcagaggaaattcctaagcaagggaacaccgcccgagatgggccaaaccccagcagagtgacaagaaagggaaagtgggagctgctttccccgatgagtcagagtgtgtgctaatcttcggagggtcagattactatgcaccgagaaggcatcgaaagttggaacgacgtgaagtactctaggtacaacaagcatccccgaccttcctcgattggtttgaccacgccattacttatgatcctaccgatcacctggagcatatcctccgacccgggcgatacccactcattgtcagtcccattgtcgagtcagtgcaactgacgaaggtgttgatggatggagggactaggctcaatatcctttagtcagccatgctcg

SEQ ID NO: 123510 - DNA, 304 bp, Zea Mays
tcttccacctgatccgtgaggatgctcggctgtgatatttcttggacgaaaatcccaggtggagcctgggcccgactggatcccagctttaacaacgcatcgacagctgcattgcgatctctctccacatgatggaactccaatccctcaaacttgtcttctagtttcgcacagctgtatagtacttgcccattgaatcggtcgagcagtcccaatccttgtttatctggcttatgaacaccaacgagtcaccatataccatcagtttcttgatgccgagtgatatgggaatgctcagcccgtg

SEQ ID NO: 123511 - DNA, 407 bp, Zea Mays
acatccatccgaaaattagaagataagtttgaaggggtggaattccatcacgtggaaagagaccacaacacagcagcagacacgttgtcgaagctgggatccagtcaggcccaggtcccacctagaatcttcatccaggaagtatcacgcccaagtattccctcagatcagacagaagaatgcaacaccttgagccaaccagaattggaccctaatgactggagagagcctatcatcaggtacataaagaatgaagaagaaccggatgataaggctgcagcagaacgcatcgtaagacagtcggcccactacaccctcatagggggcgcactgtacagaaggggtgcgacaggagtcctcatgaagtgcatttcctcgactactgggaagcagctattggatgaaat

SEQ ID NO: 123512 - DNA, 333 bp, Zea Mays
ctagatggcacttggaaccatgggcaagcttttgacataaattttttaaagcctgacttctcaccaaaagcaaagggcagctcatcttctattacatttcagcaaatgcatccctcaatgaattttgatcaaacctccaagtgctaggagcttcctctccggttgcttgcaaagtaccttgccttgggtctttatcaaatttattggggttgcgcttgtagacattaaaatgtttatttaatgaagatgtaccatgctgattggaatcagccttaaggatacgctgataatatttgcacttagcagactttagcctacccttgtcatatttga

SEQ ID NO: 123513 - DNA, 1197 bp, Zea Mays
gaattttcgaaggtttcatgtatttgatacaagattaattaagagataaaatttaatatggttttcatgtcaaaacagatacactatgtgataaaaaacattattaccaaattatatgaactgaaatgaactaaaaaggagtagattttctagggattaaacaagtttttttcataattgttttaatataagaattcattttctttaatgtttatcagcaccctggtccgcgtgcattattacagagaagttcaggggctgatctaaaactttccagggcatggctgtaaacactccacacaggctcggacggcgggttaattcactaagattctaggggctcttgagtaaaacttcatggtcgaaggggtattgttggatctcgccgttggatcagatccaagggccgagaacagatcgcgctaacacagccgcgtcgtgcaccgatcggcctccgattaagattcgacggacaggatttaatgggatctgaaccgcccatagccccacgatcaacatcctagggtcacgatttacaaaaacactcaccctttcaccagcgctcatccgcccaccgacggccaagatcttccccgagccaaatgtcacccagactcagtctcgggcgaatgcagcccatccatcaacgaatggacggctcccgtgtttcttcttcctcctgctcacaagacggcggcgcctggtttttttcccccgcggcgaacgccatggatgatgcgcgaccccggtccccgagacccaaaactctatcctgaggtgtgctagacgaagcgaagcatagggagaacaacacgagagatacctcactatgaaccacactgtgtagagtcctggccaccacggtgtgcagcatcggaggggaaaacgatgaactccgttcagcaattcagtcgccaggcgcccctgcgtggatgtcgatgcttcgaatgtgtttaacaggtcgtggcgatccacccaatctccttattggcatctacactacgatgtacacccgagacgcccaggcaacacccatcgtatgcactcgaccacaacaatggtgatggccaggttgtccccgtcttgatggctaactgtgcgaggcgagcgccgatatttatggcacccagggagcgaggaacacatttagccagggagggaacggccacaacgagcgcgcaggcgacaactatggcg

SEQ ID NO: 123514 - DNA, 375 bp, Zea Mays
gcagtcttcatatgtatggccttgacatgtctgcaagtgtcacattttgccacatagcgtgcgatttaaatcttcatctttatccaccaataatattgttttagatcatgatacatcttagtggttccaggatgaatagaataatgactaagatgtgattcatctagaatttgctggcagatctcatcattttttggcacaactatgtggttgttaaaccatacaacaccatgatcatctcttctgaagcagttggcttttccggcctccattttctcatgaatgtgtttcattccctcatcatttctttgtgcgtcaattattctttgcaggaggactgactcaagcttcaagtgatttgaagttccatgttga

SEQ ID NO: 123515 - DNA, 457 bp, Zea Mays
agtatatataggcagttgagctggtcctcaggaccagttcaaccgcccccatgggccagttcagctggttctgaccagtgtggtcagagaaccagaaacaacagagggaagaaagaaaaatttaaatttgcgcacagctgctggaagtgaccggacagaaaaataataaaaatctgcatgcgcacccctgctgttgaccgggcagcacacaaaaaaactgtgcgcgcagacaagaaatgacttgactctgcatgcacacccagaaaacgattctccactcgcgtgaaggaccagacaggaaaaagtaaaaagcctctgcatgcacagcccaaaaaaaatttttctgcgcgcgcgaagtgaccggacaggggagacgctgcagtctgcagagcggcagcaacaaaaaaacaaaacactgcgcgcgccaggggaaagtgaccgcacaggggaaaagtag

SEQ ID NO: 123516 - DNA, 410 bp, Zea Mays
gtttgaatggagagaaaaaaaatccaaacgacgctgccattgttgcgttgcgacgctcgtgctggctcggaaacgacaccgtgcttctctttcttgttgattgatggtgattggggaacaggcggaatgtacatgcatggatcgagatgatgacgatccagccgcgctactgtttatgaacgcaaaaacgaaatcaaacggtacgggacgggatgaaatctctccctacttccccgacacacactagcttattgcaagcaggaagaacgacagcagtgagaggtcacggatgggatcggaacaacagggatcagcgaggagatgcatgctgaaaaggaattaatgagagccttccctattagcagcacccgattaatcatcccggtcgggcggtcgatcggttcaccttc

SEQ ID NO: 123517 - DNA, 497 bp, Zea Mays
ggttggaactgttgcctagtcaacttgtgtaaggataaagggagccccaaataatgtcaaggaaaggttgaaatttcacatggcatcaaggtttggacttcgagcagaacctcatcagagcatctgataggatacatatttgacttttgcacattattatgtaacacagaggcatctccaaacaattgaagaatgttaagagtaaggtctatatctgcaggtgttgggcataaggaaaggaccacatcatcagcatacatggagactcgatggagccttttttctactagaaagctgctgaagcaaaccatcattttctgcctttgaaaacatgtagacaagaacatccataactaaaatggatagcatggatgagagggggtctccctgatggagtcccgtttgacgcttaatatggcgacttggaaatccattcaatagaatctgagtagaggaggtagccagtagcccacatatcaaatccctccaaatctgcc

SEQ ID NO: 123518 - DNA, 289 bp, Zea Mays
ccataaaaatccccttttgatcttgttaatggctttgattacccatttcgggacatgtatagcaatgagaagataaatcaggatgtccgataaaacagactaaaccaaaacaatctggccaagaaggttaataagggaaaccttccaacttgggagatggtctgcaaatttatcaatctaggctcttacactcgactctcaatttcacattagaactaggcagacctaaataagagcaagggaaagagatcgtagcacattggatgatattttgagcatcttgcaaagt

SEQ ID NO: 123519 - DNA, 423 bp, Zea Mays
gtcgggggacatgtttggctaactgacttgatttggtgccattgaagatgtggagcaagatgaggggtaaaactgtgggttcagtcgggctaaagtaattgggttcagagttagaaatatctgtaaaagatcctatcccactaccatctccaggtgattctggacaaactgcagataagggtaactcgatcttggaaaagggaggtaccataggatatttttcaccgagcagaagatgaggttgaaccatttgaaccctatccaagtggtgactcagctacctgtctgttgttttcatgtcaggcatgcaacaagctgatttctgttctctccttccccttcctgtgtttggagctggcgtggtctggagtaagtgtgtccacgtgccccaggtgcatgcagttataaatccttaagcccttt

SEQ ID NO: 123520 - DNA, 468 bp, Zea Mays
gttaatctaacctaacaaagtctaacctcaagttgagctaatctcatgtaagttgcttaagcaagttggataatgctggtggcataaattagaccctacccctataaacatgattaacctaaaccggttccctatattagctcagccatatacaagtacttgactgatgcgttgggttgcaaaatctgtatagatcaacatattaaaattataagcacccaagattttcaactatcataacttatcctactcacatctacctacttgtccctaatttggataacaactccaaggatgaagaccaaagatgatcgacctcatcaaatcaaggaaaaataggattcaagccggatcttaaaggaaccaagatccacaatcttggatggagtcttttcttaccctacactttcttaaccaaacctatctatgctctaaagacatctactatcctacataataaagtggaca

SEQ ID NO: 123521 - DNA, 927 bp, Zea Mays
gatggatcctggttctccatagcggatcctcttgcggggaggggattacgccatggcagggacttgaacttcagagggattccttccatcaagctgagcttatagggctgcgacccttgcgtgtgcattctccagctccaagtgtaccctagagaggtccagggtagcactatctaggtcggtgttaagacctgccaccacaccagctagggtgttgaggcgatcttctctagctccacctggaacaatgttggtctggctttctccacgaatacgcagaggaagatgcgtgtacttcatgttgtgcagctgctgtcggtaggtgtggctgagggaccatagagttcgcctagcagcatcgctgaccgaagcagcgtaggtggatagcggcatcagagattcatgaactgacagagtcatgaaccctctatcacctgcatccatcaccctgacatgaatgtgagtgatgtagtagcaagcccgaggaggctcgtacactcgccttgtctcatacaggggtcggacgtaggttcccaatgcatgcagaacatcctgcagcaggttagggaagtgccctgtctcgaacattgaggtataatgttcagtgacaagccataaccccacgtagtgaacctgctgttcatcgttagattcttcgttgatgtcctcttcttcttcgtcgtcgtcttcatcatcgtcactagagtcgtctgggtcatcgcctccgggagcaggggcttggaacgctggtggtggcggtgctgaagctaatgatccagctgtgaaggctagtgattctgccaatggggtgggcgtaggcagaaactcctccgagctatcttccagaataactccattctccacacgaatgcgagggagaaccatagggatttcctcgactaccactgggtagacaggaacttgtcg

SEQ ID NO: 123522 - DNA, 404 bp, Zea Mays
atttaaccctagaggcaaaacctcatgttgagataaacacatctgacggtcatgggatgacttcgcttcatctcgatgcaagcctcaggatgatgccatgtgttgcatctagttaccagcggaactccaactaggttttaaggcccaaacccgaatggttttgaaacccaaaccaccaaaccgtcgtgattagcatatataatatgctccctccatgatcttgacacgtgtcatcaatggtccaccttccgatcaccaagtcctctagcgcctctacttgacttagtcaacatggtctactgctccatgtactcttgtgcttgttgatgttgccaggtgtcagtcacaacagtcagtcttctacttctccaaaaccttagctaagcctcaacgctcatccttca

SEQ ID NO: 123523 - DNA, 417 bp, Zea Mays
tgcgcaccaccaaacgcactacaggtggcaaacgattgcccagaaagcatgcatgcattcttcaacagttttacattccaccgtaaagtttgacaatgacgtgatgatataattgatagaacatgagcctcgttaagatctaaggtgtatgatatgtgtcggcttgagaacgttaaacgtatctatccaacagagattgattacaaacctctggtgctgatcatctctctacccagatttggctaatgatggaccagtacaggtgaagaaaaagtccaggctcgagagggggctcagggggagagagagagagacgaaggcaaacggaaattgtgcacagctcttggtaccagactatcagttgacagccaaacaactttatagaggtgagaggaaaacaaagaccaccatagtaca

SEQ ID NO: 123524 - DNA, 759 bp, Zea Mays
gcttctcgcttttcttcttcagataacctttttcccgaagcatgtcgtacaatataatcaggtactacggaagatgcttcgggagttgaagtgatagttctttcaggcagaatttgttttgcagcttctttttccatttctttttctcctgtctccaaggatttctccttggtaggctttgaaggcccagcttcagtcctagcctggctctttgtagcatcggcttcagttagctttgtctcagcctgcgtttttgaagcttcggcggttttccctagagtagagcttgaactctttatcgtctccaatacatctagtacattgaccatccttttcttcttgggggttgctataagatctttttgtgcctttggcactaccacttctgccgaagggctcagaacttctgatatttttgtttcttcgattctagtttcttcaattttgttaatcttcggcattgtagccggttcttcaatcttctgcgtgagggcaggtttgtcggctttagtagccgaagatatttcaccgctgaaatcaggcactgtggccggttcaatgtagcgcgatcggtgagtaagtacctttacttttctcctcttcggtgcgggctcactcggagcagctgaagcaacatccttcctagaagttgcactttttctcttttgccccttcagcaggtagcggtagtcaggatacataaatccgatggcatcaaaaactctgtttagcctcttctttttccagctcccgaaggcc

SEQ ID NO: 123525 - DNA, 576 bp, Zea Mays
gccgcatgatgcgcgtgccgtcgtgctcgtgaagaaaagcaaaccgtccgtgtggccgtgtgcgagtatgtaggctaggagaaaagaacggacgttgggcctcacaaacatgcatgtgcaggcagcgttcctccatgattttcctgcatgcgtacagattctagagccaaaacgaaattgccgatcccttggatatcgtatttccctccccagccaggctgcatgccagagaaataatccttaaggattctctgtgccccaaatttgtggccctaggtgtggcttgtttcgaccaataaaaatgtgccacgtcgttattaatctgcgattagttaaaatatattaacttttgcgttagacatctgaattaatatgtttctattgagttagcttcgtaataatatcatgcacacattaaacatattatcttgtcataacgtatgtttgttttacttaattgtaagttggtctgttggttattaacatagcaatttagttaaaactattttatggttttaagttacacttttataaatatacgttaaaatgattaataccaactcaaataagtactaa

SEQ ID NO: 123526 - DNA, 1294 bp, Zea Mays
ataggcataagcataacttttcgataaaagtgtaccttgtttcagcatccaccagcctccgacttaggtaggttaccacatgctcctttcctccagtcacttgcgttagaacagccccaataaccttatcgtcagctgcaatatacaatctgaatggtactcccacttgtggtgcttttaatacgggacccgaagacaaatactttctaatgagatcaaacgcttcctgctgttctgccccccaattgaattcggaatcattcttaagccgaaggataggggtgaaggcatcaatcttcccggctaggttcgaaataaacctccgcaaataatttatcttgccgagaaacttctgcacttcgaccttacaggttggaggtcccacattccgaatggatttgattcggtcagagtctatctatataccatgttcatgaatgatgaatcctaaaaacttaccagccgacactccaaaagcacatttacgtgggttcattttcagaccataccgacgcattttatcaaaggctttgcgtaaatcagctatatgagagttaaactcagtcgatttaactacaatatcatcaatgtagacttacacagtatttcccaacagctcgtgaaagatcaaattcatagccctttgataagtagcaccagcattctttagaccaaatgtcataacaacccattcaaataaaccaatgaagcctggacatataaaggtcgttttagacgcatcttcttcggccatgaaaatctgattatatccggcattaccatcaaggaagctaataattctatttcctgacgcattattgatcaatgtgtcggctatgggcatgggatattcgtctttaggagttgctctattcaaattgcgaaaatcaatgcatactctgagcttatctgactccttctctaccgacacaatattagagactcactctacatatctgcaaggtctaataaaattagcttctagcagccggtgaatttcgtcctttattcgtgagagaaggtctggacgaaatgtttgaaaggtctgaaaccgaacttaatgggcagccgatgctctactatctcacgtcttaatcccggcatcttagtgtaattccaagcaaagcaatcaacgtattctttcaatagaccgatcatttcatctctaggatcggtctccagggtcttattcacaaaagtcggccttggagttttaccatctcttatgtcgatttcctctaaaggatcggccgatttaaacccttgtcctaatttgtcgagatctctgaattcc

SEQ ID NO: 123527 - DNA, 881 bp, Zea Mays
gtagcttgtcacatagaaatcacatagaaatcaaaggaaaacacccctgaatctgctccgtcagatagactaaagaagatcctgatggtacaatgaacgaaaagatcttcaggtgcagtgaatgtgccgccagtgaactccgcgttgtgatcctcgctggcgtcgcgattcgtgcgctctgagtgcagatatcagccggcggtgaaaagatcttgactgcaaatgaggtcgtgagatggccgccatgcccacttgcctagcggccggtccagatgacttcaccggagtttgctgcttgccgcccggatgccacatactaagaagcattaccacgtcacagtaaactgccttaggtagcttgttcatcgcttgagacactgcccaggtgaaagccatgacagctcgcaccagtgaacttcccctctctccggcctctagcgcgccttcttcaaattggacgccaccgtcgatagattctataaattgctgccctagtgagctccgctaggttattacgcacccagtgaaccagccctcgcctccaatcgttcaccatagctcctcaatttggaatttcccccaaatcgggttttccacgcccccgagagtctctcaccgtggccagccatcctcaggttggttcatgcttctctgttggatgttctagcatcccttaggtctcctgttgcttgtaggcttggttgatagaccgcgctgaattgccaagaacatcatagtttctcctcggatcttgccaccgtcatgggcagacgaactctgagtcagattcgtggaattaatggagggattagtgtcgccgagggtggaattaggtgtcgaccaagctagggctctagtcgttgagtatctcggccggtacg

SEQ ID NO: 123528 - DNA, 503 bp, Zea Mays
tgattgtgttatatatggagaatttcttagggtacaataaacaccatgagttcacaggattttattcaaccagagctgattcccacatctcttgcttcatgtaaacttctccatgctaagaaaatgatttgctggatggcactaagtgaactttttatacagaagaggataagaaaatgaagacactacacagtatgcgtcatgttttcatggctatatatttagtttcagttgaggccacattgctcgaacgggagctagtttggtagcatgaatgtttttttttatcaactggtagcatgaatgttacacactggaatgtaactgctgcactattagtctaaaaaatatactgcattagccgtggtattaaaaaaaatacaataataataaagccttttcgtcctaaataagttgagataggctagaatttaaacctaaaagaagccacaaatcaagattcagacacatggacaattgcttttcattcacttctatttaag

SEQ ID NO: 123529 - DNA, 666 bp, Zea Mays
tctgtaacatcggctattcttacgaattagcggaacttcttcttcctcttcttcgtcctcatcaaaaatacgaacaatagccagtgcacggtcacacccattggggtcaggttctggatggccacacccattgggatcagcttctacacggtgggtcaacttctggacggcacacccattggggtcagcttctgcacggtcacactcattggggtcaacttctggaaggtcacacggattgggatccacttcaacaaggtcacactcattggggtcagcttcaacatgtacacccccattgggatcaaccttagtaaggacctctatcggtacttcttcacaaatagaagcagaagggccagcatcctggtccaagcatgatagtcgccgaagctgcctcttcttcttctcctcctcagtaggcgcagttggacggctagcttggcgaggatgtttcgggcgagtaccctcaggcttttgggtgtccactattttgttaacctcttgtccaaccataacagccatcggttcagcatgggccgagtcaaaagattctccagccaacatattgagtacaacatctatttctgcatcatctggacttgccgacatcgaaaagtgaacttgcctctcatcatggggaagatcacaaagaggagcaactag

SEQ ID NO: 123530 - DNA, 872 bp, Zea Mays
ctcgattggccggctcttgctcctggatttctcaaagaatgcgggatgcgggagcttcgttattgcctccggaacatgtcctcgtctgatcaagttctcaattcttcttttcttcaggcgttctcttctccaatggagcagattctcgagcggctccgcgcgtttggagaattcgaggtgtgcaagagtcttccttttgccccgtccaccttgcatttccctttccttgttacattaatttgcaaaaaaaggtgggaaacccgcgcgagattgaagtttgcatgtggcatgagtagatgggtggatgtcgtcgagttgaacgtgatcttacgttccttctgaattttttctaatgcgagacacccgtgaatcttcctggataccaatttattctgcatcttttcggatactgtgtggtccctatcaaaatggtcgcttttctcggttgcacccagtattcctggatatggcatatatatccctgattatgtacttccttttggaggattaaatggttgctaacttgattcttgccttcttggtatattttttggaggactagtatgttctgttaacttgctttactgatagtttaagcaccgccatgaattaaattagaagttttgcacttgagtggtcgacattctcattctcatgatattatatgcccaacgttgactcgttgtaccgtaagctgtgcatgtggaccagtattgttcataggatgtgtagagcgtgataagattttcaacctttcgaaaaggattacacattagatttggtctactgcatatgcatatactattaagagcctgtttggtaaagctccaccgctgaaaagtgattcttgatctggtattcaccgagcagct

SEQ ID NO: 123531 - DNA, 372 bp, Zea Mays
ttgtgtatgtccatgtgtatcgtttgaacacccctgcaggttcctagcaccctagggagggtttcacaacctaaactagccatttcaccgaaaacctaatccaccgcacgccacgtgctcggtgaaatgcccaaaccagccaaaattgctccaattgaacccaaatttttcaggacccttcaccatacctccagtaacatattcaccaaatttcatgccaatccgatatcccaggcttcaattttacacaaatccccgtttctagcgatcgtttctgagccgagtgcccaaattccattttcttcgcctaaaatcaaaccaagtgcacacttcactcatatttacccatataaacctattcgtgaagtatcg

SEQ ID NO: 123532 - DNA, 599 bp, Zea Mays
tgtagtatcagatttcttagatgtgtttcctgaggagttactaggtatgccacctgaaaggaaggttgaatttgccatagagcttattccaggcaccgcccctatttccaagagatcctagcgagtgtccggaccagagttggtggaactcaagaagcagattgatgagttgtcagagaaaggctacatcagaccgagtacctcgccttgggcagccccagtgttatttgtgcagaagaaggatggcacgaagaggatgtgcatcgattatcgagctttgaatgaggttactatcaagaacaagtaccctctgcccagaattgaagatttattcgatcagttgagaggagccagtgtgttctcaaagatagatctgaggtcaggctaccatcagctcagaatccgaccctcagacataccgaagacagccttcatcactaagtatggactatatgagttgacagtcatgtcattcggtttgacgaatgcgctagcctacttcatgtacttgatgaacaacgtgttcatggactacctcaacaagttcgtagtagtgttcattgatgacattcttatatattcccagaatgagcaagagc

SEQ ID NO: 123533 - DNA, 340 bp, Zea Mays
tacacatcttctttagtatggcaaggctagatatgtctaactcgtttccttacggtttaccagtaaagatacaaatgatcaatgttctttggctaatgacattcttaaatgctatcgtccaaaaggaaacttatctttgatgagtatgcaacatggtgagtatcggtgtccatggtaaaatgatagtcgtgaaggcgacacagagtagtgcgatatgtccccctcttttcccatacccaaaattaaaatggtgttgactatgaggactctggctgcactcgaatcggcattcatatcatcagcatcatacagcagaatgatctgctttatttaatcaaat

SEQ ID NO: 123534 - DNA, 412 bp, Zea Mays
gcatggcggtatagcagaaagctccaaacggggtgatgaatgcagttttctcctcatcttcttttgccaagctgatatgatggtatccagaatagcagtctaggaaggacaacatagaacaaccaacagtcgaatcaaccacttgatctattgtagggagcccaaagggatccttcggataatgtttgttgagatcagtatagtcgacgcacatgcgccaatccactttattctttttgagtacaagaacaggatttgctagccactcaggatgcaacacttctctaatgaaccctgcagccactaagcgagctaactcggcgcgaataacttctctcttgtcaggcgtgaaacgatgcagtttcgatcgaatcggccttgcttgaggatagacctttaatttgtgctcggc

SEQ ID NO: 123535 - DNA, 577 bp, Zea Mays
gccatccaaacacctagattgtcgttgtgtcctcatcgggcattctggggacatcttccgagcattggagatctacgtgaggcatccacgtgcgtggacatacacacacacacacactcaagcgccacatccctcagatcaccatgcacccaccttttcaagcacgctgtgagattaagggagccgtcatcgccggcgtgagaggagggggaactcgaatgccgccacgccatccaaacacctagactatcgttgtgtcctcaccgggcattctagggacatcgttcgagcgttggggatctacgtgaggcatccacacacatggacatgatctggtagtcgcgtaatttcttgttggaatttctccaccagtgcccctatcaccttctttgccaatgagagtcccatagagtcctagccttcatcttctattttgcattgtaaccgatttacctcaaattgttttacctcatatccgacaatcgatcgtgtggggaatcgtggtcgtagtcccgcactgagaagggagtggtgctccttcgcatacattttgcaccgagtagcgctgtgttttgac

SEQ ID NO: 123536 - DNA, 619 bp, Zea Mays
cttgaccacccttgtttcttaatgatccatgagtgatcattttatttggcacacctgtggtaatctcgttgtttccttgtaactccactcggtaatgaatctttacttcaacccttctgttggaaccttaccaatcttacccttgattgttttctccactttatcgtttcgcgagtcttgccttaactatatcctttgttatgcttttaattattatcatatacacccttgacacctctatatcctacattgatgtttgtctcatacctgccctttaaaatcgcccctctttcgtctcataccttctttctcttggtcgtatcctcttctttggctcgcgagtttgtaacctcatcctttgttgtgcttttgtttcttattgcctttacccttctcatctctcaatcttaccttggtgattacgctatgttcgttatctaaaacctccaatctcccaccttagttcaagcgtggtctcttacttatctcactcgtggttatatcctatactttaccacttgcaagacttatcttaactctattcttggttgtgcctagattcctggttttatgcacatttacctcttcctttatgtccttgcctattatcacctttgac

SEQ ID NO: 123537 - DNA, 2286 bp, Zea Mays
agatcatccaattgccgcttcaattcaacctgctcctttggggccattcgatacggggccttatgaatgggctgcgtacccagaatcagcttaatctcaaaagttgcatcgcgctccggaggaatgcctggaagctctgccggaaacacgtcagcaaagtcacacaccacccagatgtcctgcacccgcaaggcagcctcaccctccaccaccatggagaaaaagattcctgacttccttgaccggccatccgaaagcaattgcgccaacaaggataacgtgaacttaggggaacttcctaagaataccacctccatacccgacgacgcctgcaataacactgtcttctaaaaacaggatataactgcacgatactgggataaccaatccatacccaagataacatcgaatgcccctaaggaaatcacaaccagattggccgaaaagacctcatcagcaagaatgacggaacacccctcacaaactgaacagctactaatggagccattagcagaactaaccaaaattgggtgacccaacctctgcaccgaaagaccagcccgcgacacaaagtcctccgaaacaaacgaatagttagcgccagagtcaaaaagagcatgggccaccaacgaatcaactgaaatcgtacctgtcaccacgtctccttgctctctgccatccgcagcgggtagtacataagctccggaaatacccacagaagaggaagctcccagagtgaaattaactgaagaaccccactgagccgccgggtgaggcagacgcggagctccaaactgagatgacataggggtagtcggtgcaggagtaggcacagccagatactgaggaaaaccctgcatcggcatgaactgagaagtcccaggcacataaaactgttgcggaggaggtggaactgaaaattgctgctcagtgcttgacatcatgttgacagtgccctgagaagaggaggaagtcactggctcccatctgagcttcccattgggattcctcctacacaccacatccttgtggtcttgactgcagattgaacacctgccattccactggcactctgcacggtgatgcgcatcaccacaacggaaacacaccagccccagcccgggcttaggaacagcccgaaatctctgagtacttcctcccaaagtacccaagttagaggattttccacgatagggatggtggcgctgatgctgagacttgcccctcttatgggctggacctccagtgttgcccctcctcacatcctggccacgaggctgatcaacacccgaagacttctgcgactccatggtatactggtgttgcatctccacacctagtgcttgctccactgtagtacggaagtccaccaacggaaaggctcacagggcatgcctgatggaaggtttcaggccctgacggaactagctcgccttctccatctcattataagccacatgagggacaaagcggaccatcttgttgaagcccacttcatactctgtgacagacttcttctcctgcttgtaggactgcaaatcaatcttcattttctccaggaaggtgaccgggtagaatctcctttcaaactgcctgatgaagacatcccaagataagactcctggtgaggaggagtgcgctgcctgcacgcctctccaccaaatttgagcctctcccttcagcagctgtgtgccaaagcgaacccgatctccatacacaatctcgaagacattcatcttatcctccacgtaagttagccaatctgctgcctcgaccggagtaccactgccatcaaaagaatccaacttcatgcccatccactgcatcagagaaagaccactgactggaagaggcacctcggccccaccacctggagcagcacccgcagggtcagcgcccccgggcactcctccaccaccagcaccctgagcagcacccacaggggcaacaggaatagcttgcctcagaatggccaactcctgctgcatggcctgcatcgcggctaacattgccgccggactcatcgagtccccactaggaacttgcggactaccccgagccctacaaggcggcatagttgcagccacaaggatgagaataataagtaaatcagatgggcatagcatctcttcagataatgtcaaactagctcagacaataacataacatatcaatagtaaagcagaaaacccatcctacatgtgcagtgtgtcaatttattattactccacttgctaggacgtacagcctattcctctgataccaactgtaacaccccactgatcc

SEQ ID NO: 123538 - DNA, 379 bp, Zea Mays
cgagcactgacaggcttctgaacatccaaagtcgtatcagcctctgggaggggcgccactaccaacgtcccagcaggagcagcatcggatgaatcctcagctagcaaatcaagcatagcgcttatctctgcatcactagggttcaggggcacctcaaaatggacctgccgctcgtcatcaggaatctccccaagcgaggcaaccaaagcactaacctcttcagcagagggtcgcactctaaggcccaaactgccatcagtgataggtggattcgacacaaaaagggtgaaggctttggggggaggcaggttccaggccgagtatgccactggagcaccaacatttgacactttgcctctaaggatcatctcaagtcggc

SEQ ID NO: 123539 - DNA, 504 bp, Zea Mays
cctgaagaatcgcctcttggaggcccccctaaaattgggtctcctcctaccggaggcggtcggctttgacttgggcaccctctccctcagagcttagatggtccgcctcgatctcaagccgctttatcctggaatggagctcaccaagctcacactaagcagctcccacacggggctactctacttcccgttgggcgcacaacaacacctctaccatggccatcgaccatgcgaaaagacactgcgaaaggtaaacccggcgacagcgtaaatgatggtaagaaaacaaagagaaagaacagctacaaagtgacattcacctaactaaaagggataaaatcccatgtcatcgaagctcgggcaatcgaaatcacctccccaaagctaccgagtgtttcctcaatagtgcctaggctcatatcacctcgggatggggtcgactcaacctgccttgaatcctctgccctgaggcaccagggttgatgtggaggattggagaagaga

SEQ ID NO: 123540 - DNA, 825 bp, Zea Mays
ggactcctccttcaagttagtctggcatccttggcttttgaaacacttctggatcatcttgactgaggtgaacctcttcagtttcctagcatagtccatctttagggttatgtatgcctcacgagtgttggcttccttgccttctaccaactcaagactgttttggagggctgcattttcttccttcaattccttgatccgctgctctaggatttccacccgggagtttaggtgggtgcaatgggagaaaaggtcatcaaagtgggtgtcaagggtgtggagatatccggccatgtagatcacggtgggatcatcctcattatgctctcttcctaacaaagcttggagtcttttcctccaagcaaggttatttttgttgctgggtgggaagtagcgaaggggtgtcttggcaacttctttgttgtagttttggcatagttggcagagggcttttagagcagcattttggcatgtgtctgggaagaggtggccaatagcggtgatttggaaaggtggatgatttgggtagcttcgtctttctccgaggtagactaccatggatcacttctcaactccattttcacagtattccttccagacatactctagcttcttgcaaactccaaggcgaagcgcacaactccaaagaaggaaagggaatccttccacctctgagcaataggatgttttaaggacaaaggtgccctccatctggtagcaagagaagaagagttgttaatattgggggaaagaagagaagattctttaagatgttaagaggttcttcttttgaggaaagctttttaggtcagggttgcagtctac

SEQ ID NO: 123541 - DNA, 668 bp, Zea Mays
tgaggtagaccaggatgccgactgcagctgctcgagagataaccaacttgcaataacccacaaatttgcagtctatctgatgtccatacccgatttcgaatgattagccaggcaaagagcttgcacttcaaaggtgcctagggtttagataagcgtcttgaagttaatgtcagtatgtcctatgaactgtgctctgtatgttgttgacgttgagtagtaacctgcttgagtgaagacccatgttatctcatcctccttattttctacaaggcgcatagattgtacgattgcgcaaagctcaattggctcaagtggtcgattgacgaaatggcatgcaggttgatacttctcacccatccatgatgagctagcgcttcccttgactgtcgaattgcgtctgccagatgccgcaaagactttgggcgctatgtctcttggacgctggtcgtggacccaagcgctacgccaaaaagaagtttttgctccatcaccgattgttattcttgttgctgccacaaagaggagacaaccagtcttgctacaaggatttttaagcatatcccatggagcttctggtttagcccattctagccacagccaacgcaatcacaacgctctagcaaatctttccgaatcaagcattcctaggccgtcaaggtttattggac

SEQ ID NO: 123542 - DNA, 300 bp, Zea Mays
agaagttggtcccataatcattaggtcatgcatgcatcatgtttaaactatactaaataaatcttcccctcttatggagatatggcacgtaccaagaccacccaacgaaaagcaaccggacctcgaggtgtgccccagcaccagctggctcctagaaatgaggggagcagcagcggaagcaacgatccaataggggatctggaggctagggtggaacgactcatgtcagaactacgccacaggagtagggagcatgcgcgagatagccgccgtattgctgaactgtcagcagaggttaat

SEQ ID NO: 123543 - DNA, 873 bp, Zea Mays
aacagtgggaagaagaccaactcataatgagttggtttttaagtttggtaatacttcccctccctttataatgaagaagatttcatcccatttgacgtgcgtttctttgttttcccatcgctccttttccagtcgatcggccaatcgtgtttatgcttaatgcagtcgttgttcttggatgtaatgcttgagtaatgacttggaatcgtcgagtcgcatttttgatttgcctgcatattcgtagagaaaaaacggctgatttactgttagtattttgaagggtggtaaccgagtggttctttttgcgacgccggcgttttagaggtaacaaccgagtccttttgagccacgttgtcgttttagaaataacggccgagtgattacttgcgacatcagcgttttagaaataacagccgagtgataacgggccacgtcggtgttttagaaataacgaccgagtgataatgggccacgtcggtgttttagaaataacgaccgagtgaagactggtaacgtcagcgttttagaaataacagctgagttacattgggccacatcggtcgttttggaaataacagccgagtgatgacttggcatgtcagcgttttagaaataacaactgagttgtattgggccatgtcggcgtttatggaatcaacgaccgagtgatgactgggcactttttagaaatggcatctggcccgggaaaaccccatttgtaccgcgctgtcgcatgcctctgcattctgagccctagccctgcttttctgcatccagaccttctctgcttccttaaaaccttgcttccgctcagtttgccagcgagattgagatggcgcccaagcggaagaatcagagttcatctgccgcgac

SEQ ID NO: 123544 - DNA, 769 bp, Zea Mays
atagaagaacaactttgctacagacagattagtgggttgtcacacgaaaattagagaatgaggccttgcaagttgctctgtcagaacgactgagttagatcgcgatggtacagtagactgaacaagatcacgggttcggtgcatctgtcgccgccggtgatctccgcgccacgattcacactggccgccgcgattcgtgcctgtgtgaagtggataaccgtggcaggtgaaaagatctggggtgaggagaacgtaggcctgagctggatcatcgtcgtgcccacttgccgtgtggtcagtgaaatatcgtcgtcggtgttcaccgtgatcgcagtgagagacacgtagtcgcctatttcaccgtactatcgtggtcgtggcaagcaatcagttaccatccctgaaccattcccctctcgcgcgccacggtgagcaggccaccgtagaaatatccaggacacggtgaactcgatcccaatccaaaatttgtgataagctcagttgggatctataaattggaggcacccccctgctccgcctccttgttacgcatccaacccaccccaagctagcctctctcatgcaccgtagcccccggtcaccggatttcccccaaattggtcatctgcgccgccgtgagacgtcgcgccgtggccagccacccacaggtctgtcatcgttcttcttgtccatgtttcaacaccctcgtgcgcttgtgatgctcatcggctcagcccgttgaactctaccgcgctatgtcattgggaac

SEQ ID NO: 123545 - DNA, 415 bp, Zea Mays
gaaatatattacatcattaatacacaaatagttgttaattgtttcttacaaaggcaatgttctacacagagaatctaaaatctttaaaaataaagctttagtcgttctcttttataactttatctgtagcttcctacatgagtttgttgacagcctcgtcaatggcttcgttagcaatcttaattatgtcgagcgccccttcagagatggatcagttttggggtcgtatggctctagagggggagagagctcagctgcatcacaagacaagtttgttactaccaaagctaaaataatttacgaagccaaatcatgaaagatacctataagcctggcatgttcagcagcttcttcagctttcctggcctgttccgaggcatcatgagactctttctcatttcttctaatggcctca

SEQ ID NO: 123546 - DNA, 736 bp, Zea Mays
cttttcggtattttatggtcttaatcgatgcatcctcaaagtggtcgcatgtatgcttactatcaactcaaaaccatgcatttgcaaagttgatctcacagatcatcctaattaaaaatactttccctgaccaccgactaaagtccatcagaatggataatgctggagaatttacctctataaggcatttgatgattattgtaccgcatcgggaattgcagttgagcactctgtgcctcatgttcatacgcaaaatggactagccaaagctttgattaaaagaataaagctaattgctcgaccactcttgtagagttgtaacctacccaacacatgttggggccatgccatcctgcacgcagcagcgcatatcaatttccgtccatcaacatacaacattcactcaccaatgcaactagtgcaaggagtcatcccaaaaatctctcacctaagaaaatttggatgcatggtatatgtacctataccagttccacagcaaagtgcaatgggtcctctccggaaaatagggatatatgttggatatgagagtgcatccataattagacaccttgacccaatgaccggagaattgcatacggccccattcgttgattgtattttcgacgaggataatttcccgtcattagggggagcaaaagaacctttggatgagaaatgccgagaaattatatggcaatccacaggaatccccgctcatgaccctcacaccaaagaa

SEQ ID NO: 123547 - DNA, 366 bp, Zea Mays
tttcggcaaaattttaaatccgttgtggatatgagtttttaaatgagtatatatattttttatgagtacgtatttgagacggcaaaatccgacagttttgtaccattgccgtacctaggctttggttttggtaaaagcccatttccgtgcaagactgacgggtgtgaaccatttgacattccctgctgctgtgctgtacctgtcctttccaatgtgacgaacgatgtttgctgaattccttggccgctcggccggtttgggtctgtttaccatttcaacaaccgacttttcaaggcaaatatttttaatgcgactaggcaaatatttttaatgtaatgtgaactaaactttttagaggaactaaac

SEQ ID NO: 123548 - DNA, 303 bp, Zea Mays
cttcgttgcaactgatccatcatccatcccaagtgattcggatcaatcgggatcttctgtgacttttattgccttcgtaacaccatacttcatctttggcctttggggtcacgacgtcacattgcctttggggtctttaaggaagatcacgcactattattgtacactaaaattaaaatgcattcttcgccacgtctattggacacattcatgtatgattaacttaccattttggaactggcaaatttattaataataattgaatgtttaacataatgtgctctaaagagtggttcttgaaat

SEQ ID NO: 123549 - DNA, 366 bp, Zea Mays
cttgatgctcctcgaccagttcgattgagttaagctaccctagatcaccggaaacacgtatgttcctccgttgtctgcgctgtctccgtggaccaaatgatttagagcctcgctagtgaaattgagtgaggggaaatggttgttaggggtagaattaggtattgtgcaacggggaagcatagtcgttgcgttttccggtcggtatgggctcgacggagttgctgctccgccacccatggtcgaggatctcggattgtgaagaaaccgaaaggggaggggcctttgcgcagatgtcagtgagacagagaaacaatagagaggattctttactggtatttcaaatgaccagggacccctgtgcaaaat

SEQ ID NO: 123550 - DNA, 308 bp, Zea Mays
gcacaaagaaatgatgagggtatgaaacacattcatgagaaaataaaggccggtaaggcaaactgttttagagaagatgatcaaggcattgtatggtttaacaatcgcatagttgtgcccaagaatgatgagatccgccagcaaattttagacgaagcacatcttagtcgctattctattcatcccggaagcactaagatgtatcatgatctaaagcagcattattggtggacgaagatgaagattgaaattgcacgctatgtggcgagatgcgacacttgcaaacatgtcaaggccatacatatgaa

SEQ ID NO: 123551 - DNA, 453 bp, Zea Mays
ctcgataaaaatatcagcacctccacgagagttttctttctctaacttttcctttaagcttccgcaattacattgattacttaagatgcaatgtttactattctagtttagaatattttggatgggaactgaggttgcacaactcctttatgtgatagtgataccaacacgtggacaaaacctagtttgcacattgttgcttagttatttccgtaggttttgtttaggagaattatttgtggcctaaattaacgagagaaatagaagtcctagatcacccctcttaggcatccgtgttcctttcaaagttctccattggtagttgttgctctggtactctgaagcacatcttgagttgcgatacgtggaacatgtgatgcacatcagtgagtctttcgggtagctccaactagtatgctacctcgttttttgttctaagaacttgaatggctc

SEQ ID NO: 123552 - DNA, 529 bp, Zea Mays
ggtatggttttataattatcattggcttgaatatagtgtcaaaaaggatgttgtgttttgtcttgtatgctacttgtttaagaaaggtagtggggcagatacatttactacaagtggttggagaaattggaatatatgagacaaagcacctcttaaacatgaaggttctaaggcacacgctgcagctcaagagcgatacaatggctttgtcaatcccaatgttgcaattgataatcatattcacaaatggagtgatgaggatctttatctctataagatcatattgacttattcacttagatgtttgaagtttcttttgcatcaagggttggcatttcgtggacatggtgaaagtgaagaatctagcaacaaagggaattttcttgaatttctgaaatttcttgcagaaatagtgaagaaatgaataaacatgtcttgaaaaatgctccaggtaattgcactttaaccactcctgagatacaaaaacaaattattcaatgttgtgccctagaaactaggatggaaatcg

SEQ ID NO: 123553 - DNA, 806 bp, Zea Mays
cgaaggtatcaagacgagcactcacgaatttgacgaaacctagtgctagatgcatcaggggtcagccggggatagggaacatgtacaactgtgtcccccatctgattccttttatacctctaaggcctgcctaagccacctggcgacggccacatctcagggagaagtgcagcactagaggaagaagggctaaccctcatccaattcagaggtatagctcgcgccataagaggagcaactccgtgctagagataagaaccaatgacgcccgcacctataatgcctttctcccgaaggatgagtttgccccttgagataattagagatctagcccttctcaccaggtatgtcatccagttggggagcctcgagcagaacgtccaacacaaagcagagaagacttggtcccggtatgatcccttgaccatagttctgcaaataaaaccattgttgatgccagcctctgtttgacaacgaaagtggaaccgggttatattcgcacgacctccggttgtgtagacagatgctcgagcacccaattggccacacctccatcgctctccactcttccctcttccacagctcgacgcagaaaaaataccgtcataagttaaaattaggctcaccgcctagataaccttcacacaaggcaacaaaagtggcaatatgttgaatcctgtttaggttcaggtaatggagttgcacctgcagataatcaaaaagaaccatgacaaggaaatgaagaggaagatctaggccttgctcatgaaaacgaatgaacgagaccacataaccaggggaggggc

SEQ ID NO: 123554 - DNA, 369 bp, Zea Mays
ttgatcaaaatttgttatagataaatcctgaaggctaacgagagcagacagcgctggagaaggaatatgactatcccctctattacctctataacgccggctattcttgcgaattagtggaatttattcttcctcttcttcatcctcataaaaaatgcggacaaaagatggtgcaggatcacacccattggggtcagcttcatcaggatcacacccattagggttagcttcaacaggaacacacccattggggtcaaccggcgcacggtcacacccattggggtcaacctcaagaggcacaccaccagtgggatcaactccagtaaagacctctaccggtactttttcagcaacaggagcggaagggcc

SEQ ID NO: 123555 - DNA, 746 bp, Zea Mays
ataagctttttgaagtcttgtatgcttcagttgtacattacttagttgttttttgaacttctgtaggccacgcccgaagttgctacgcttcataccatagaggagactcctttgatcatcgcagcttcggcgacccaggaaccaaagattgaagaagttgttattccgaaggttcaaggggttgccgctctagcctctcttttagagagtgaggaagaagaagatgaggagcgcatagctctggtaatgagttcattttttctgattatgatgaagatgaggatgacaaggaagaagacactgctacaattacttaagcggtgaaggatattgtgttgcctgctgtagctgagaggaggccaatgagcccaaaggttgaacggattctcccagtaacaactcctttggcgatgatagtggccaaagagaaaacttgttctactaagcctgttatgatagaagacaagagcaagcggcctgcaaagattgaagagggtaagaaggccattgaggatgagacgccacttggagaagggcccttcgacgaagagttcgggggtcagaaatatagagttcaccatacaactaggaagattatgtgtatgaaacaactagccgaagccattggctatgttgaacaacttggataccctttggggtccactatcttcgggggagggccaaacgattatctatattactgctcggataatctagagacggaagtgtgtcgccacatgacagac

SEQ ID NO: 123556 - DNA, 382 bp, Zea Mays
gaagggttcacgggttcaccaggagttatgcacacactttggtttgggcagaataagagccaaagagcaggtcgacggtgagggtggcccgacggcgttcttcagaagcaggcgcgtgttctggtgaaaggcttcggccaaatttcgattggttggcactgagagcaataggaggctaacaacaagcaagaacatgaagcaattgggtaagtactaacccgaggaatgctggccacagagcggggaagacttagacttgtcggtgacagagaaaggggagaattggtgttgtggcggctctggttgaaattggggatggggattgaggctactcggccgtgaaaagctatagcttcaccgtgcagactcaatttgagaggag

SEQ ID NO: 123557 - DNA, 390 bp, Zea Mays
cagaccctaggtgctaccatgacaatgatgtacgacactggccattcacagtaggagacctggtgctctgtcgcatatagtacaagctatcaccaccacgggaaggacctttcatgattgcagaagtaactcggcccaaatcatatcggttaactcagatgaatggtaccctagtaaggaattcatgaaatttcgagcacctcaggaagttttatccatagtaacaccgtaaactctaggtggtaggctaccatttataatctggcaacttaattctcaataaagcttctattttccctccacatacaagtgtactctcatgttctgctaacggagtaatcgacttaagttagatcagtttaagctggtgctacatgatcacgattacca

SEQ ID NO: 123558 - DNA, 357 bp, Zea Mays
cagaggccaggggtttctacgtaagaattccaagactcagtacacacccgcgatagactgcgggttgatttccattttctccgaggactatcaagcaaaacgcccagccaaaagggtatgggatgatacccactgtacgatcccaagccgactcctagattatatcgacgctagttataaaccctgtttcacgaattaccgccggatcagaaatctatgatccacggcgcatgatcctcactttctcacttgaccgcccgattgcagatctacggttgatagtggttgggacgaaggggtatggaatgttataattgtgaccgttcaacccggatcgcatggcccaaggccatcttc

SEQ ID NO: 123559 - DNA, 379 bp, Zea Mays
ggcctagatgaccataggcctgggtctgctcctactccatagtaaaactccaaggtgaagttggccagagccagccaaacgtcttaactccagagttacaaacttcatatagttttgagagacttatataattttttggagtacattttttgttgctctgaagtcctcaaaaatcaatctagacattcagtttgaagatatttaccaggcactggtactcgtcatgagaaaacattagacttttcggagtagagctgctctacacaaatttttggggtagagcttacctggaatggagcggagttataccaaacacgcctaaatacattttggagtagagcttattaagtaaattttaatcgatgccactatataatcc

SEQ ID NO: 123560 - DNA, 447 bp, Zea Mays
ttgtcaatatctgattttgaccaagcgctagaagagatcatccctgaggaccttctatcatagcctcctgaagctaacaatcccactatttgttcagatgtcccagatgatggtcttctgccgcatgatcccgccggacaagaaataacccgtgtagtttctcatgcttcgtcgaccttggagggtggtctacgttgtgaagacgctgatccgagtcacctggctcctatcgacatggccgagggatcttcagccttagatgtggctgtcatggaggacccaacccccgagggtggtgctgggagcgacccagctccccagggtgttggggcaggctccccatctactgcttctatggatgtccacattggatcgccaccagtccagtccaaaaaggctacggtgacacatctctctacggctctcgctggtctagtcactttagag

SEQ ID NO: 123561 - DNA, 482 bp, Zea Mays
tgtgtgaacataattggtttctcaggaacatatggtggtctatatttatcttcttaaagttggtggtctgtacgacctttagctttcccttctttttttagctttttgtatgacattagcactggaatgtgcctaacatgtcttagatgcaccatccttttttcaagcctttttctcaacatcaagagaggctaacaaattttcaacagaagttccaattactttttctaaatattttagtgtttatcttatgttgttacaatgataagtttgataggggtgaaaacgggtcggttatacccgtcagataccggatacagatagtacaaatatgtgtttttatacgaatttaggtatttttatactcgggacgactatgggtagtacccggatagtgcagcttcgaattcggatcagaacagagcgaggactacccgacaaatacccgtatatttcgtcggatatgggtacccgggtttcgg

SEQ ID NO: 123562 - DNA, 458 bp, Zea Mays
aaaatattgtagaaacagtagaaaccggtacagattaaagccaaaggaataagctgacaaatgttttttgtgtagcacttctaccgtcgctgtcccatgaagatcatgcggaataatgtacaaggtccggtactaacacacatggtggatggggtgaaccgagaattacaacctatctgtcgacggacatggtggatggctgcactgacctggaattgctgcgccaaacaattcgttttttagaaagttcatatggtaaactattggagggggtaaattaaggttggtgcttattttgttaacttgtctctggtttagcaagtaaattatacatcagagtcctagagattctctaattactaaaaactactggagaggaagataaaaatagaaccctctatttattttgttcattgatcacttggcataatcatgcattgacttcccaaatgattttt

SEQ ID NO: 123563 - DNA, 619 bp, Zea Mays
ggaagatgccctactatgtcgaggccctagcactgcagaagccatgtgtgggagattaactttgtgagctgcgaaggcgtcctgcttcgaggtgcaaatttttggcaggcttcgcaggatcgcacaacacggttcactgtgcatacaatatccggctagtaaaatccttggcgcgtgactttggcggcgagggccctagcgcctgagtggtagtcacatgttcttttgtgtacttcgcggaggaggtctacgccttctatagccgtgatgcatttgagcaaaggttgacatattccttttttgtacagtttcccttctattagggtgaaacaacggcttcggtacttgagtcttttggcctcggcttggtctgtaggacgatagtgcctttgtaggtaatggacgattggtgccctctagtcttcggtcatgatgagacttataattctgtgcccataggggtccctcacgacggaggcttcaattatctgaaaaatgaagattgtgacttcattgaatttctcgactcgacgactatattgtaccctgagagttctgctacccacttgcctatcctggttgtagcttctgggttgttgaatagatcgttgaggcttcg

SEQ ID NO: 123564 - DNA, 401 bp, Zea Mays
attacaatgtttctagcgcttgcatttggtctctaactccttgtggagcaaaaagtgcattttgaaattggtttagcccacatcaagaaccctggtgaaaatccatgaaagagataagtttcccatacttagtcaattggattatatgctaactatgtttgtccaagttatagggaagcttttaaggatagcaaaaagagttggaaaagtttggctcaaaagagcaaaaactaggagttctaggcctcaatggaccagtctagtggtgcaccggaccgagtccatagggcccgacacttggtattttggtgtcctagtgcaccagactctgccggtgtacatcaaaccaccagtatggatgaactttgaggtctcgggaattatttttaataattcaccag

SEQ ID NO: 123565 - DNA, 598 bp, Zea Mays
aaggtacatgagggaaccaataatttgggagtatctcaactgattaactccttgtcctctgttcttgcgaagctttagactaggattaaaaggtgttggagaatctttggagtcaaaatacccaaagcggtttagaatgttctccacataatgagattgtttcagaataatcccattctcacccttaatcagttttatgtttaatataacatctgcctctcccaaatccttcatatcaaaattttgagataaaatgatttcacatcatttatcacatcaatactagtcccaatgattagtatgccatccacatacaaacacaatattactcccttaccaccaacaaaccgatagtacacacaagtgttggcttcgtttaccacaaagcctgctgacgttagagttctatcgaacttctcatgacattgctttggcgtctgcttgaggccatataaggatttccttagtctacacaccacgttctcctgtccatgcgtcacaaatccctctggctgctttatatagatctcctcgtcaagctcaccattaaggaaagttgtcttcacatccatttgatggatgagtagatcatgactcg

SEQ ID NO: 123566 - DNA, 938 bp, Zea Mays
cgtcgctatcatcatcttcgccgctatggattgttctttctccattatcactagcatattggaggaatgtttcatcttcaaatagatcttccggttcatcttccccttgtctctgaaggtcttcaactatacttgcgtgaacagtaaaagaattttcaccgaccaacgcgtcaatgtccatgttgacatcataatcttgaatctgaaaatcaacacactcatcatcttggtatgacagctccacaccctttgatatttcattgcttgaaatttcagccacattccacaaatgcctatgtgagaatttttgaacaactcgccagtctccacgatatttggtgtcttccaattaaaatacctttgtcgcctgtgtggatagaataaaaggatcatccttgtagcaaatacatgcttggttgatgcttctaaaaaatctgtcatctttcatccttgccctgttactacatgtatcaatccaatcacaacgaaatagaaccactgaccgatgtcgctagagtctgcattgtactgcagctgaattatttctttcaaacggccataaaattcaatatcttctccattatgtgtgccatcaaccataactccactattctgtgtccttctatttttctcacgctcgatagtgtggaaccttacaccaccaacaatacatgctgaaaatattcttactcgcagatctggttgacatgacaaagcatataggtcaccacttacatcttcaccattcacaaaccgtagggttgcaatctgtacacgtaattccccaatatggttaaaacatcatcaaccactacaaatggttaaagaaaatatgcaacaccaactcatatggttcttaaaccaggtagtaaattgtttctcaacggttttttcaatatcttgaattccttcattctctagctcttttctatataacc

SEQ ID NO: 123567 - DNA, 524 bp, Zea Mays
gctagttcccgcttgtgttcctaagcttgacggcggtcgtggcggcgagagttgcgccattctctatatgctctttcgtcggggtctcccccatctctaaggcttcatcctaagagacgggctgtgtcgggtcctgttctccggcttcatgatgtcgccacacgttacgtcacctgtttctccatcgccgagcatcatgttggggaggttcttcccccagcacggtgggttcatcattagagatgggtgatgaatctagtctcccctgaatgaagaggatgtcagggaagaaaggagttggtgcagcggtgtgcttcttctcatcctcctttgggtggaggtgtcgggatgattgccagttgtgctttccttccttggtgcagaatatccacttcccttcgttgggcgatccatgtccactccttagtaggtgaggtggacaacagagttcactgggttggggaggccgtggttgactggccttctaccctctagggactcctaagcctagacttgcgtgtgac

SEQ ID NO: 123568 - DNA, 490 bp, Zea Mays
gccggactagcacaacaagtgcgcaaaatcgaagtcttcctaaaaacactatccgggcaaagaccgactacaggtgcaaccggaccgacatcataaacacgctagatcaagtgcacaagtcccccacgggcacggccggatcagcgaaggcacacagcctcatcatacaaattatagttacatacgtacaacgagggcatcacaccttacattggttcaaccttcagaatgatacccatctccctatagttaaacagcattatcctcagctcctcaccctcaaaaagacttcgcaactaccccttacctacactcgccccagccgacgaggacaacaattcccgcttgccagccctatccacacgaagacgaccaccctccacctcactcactctacgcttcgccaccgcccttcgccgcctacgcccagcactcggaccaggaaaaacttcagcatccgtcacacgcggagaagcctccgccgcagcca

SEQ ID NO: 123569 - DNA, 500 bp, Zea Mays
ctcctgacctcccccctgccccctcgtcaagctcatcatccggttccgcctatcggatctcgccgtgcaccgccgctgattccacccaccgctccgcacgcatttgcaccccaactcctcacagatctccccagatctacgcgctccacgcactgccattttcccgctccgattcttcccccactccagtctacgccgcgcttaatcgcccgcccgctgtttcacttccgttgaccgattcccgctcgcatttccacaccctgcgcttggttcggaattggtctcgatggagtaaagtccttgcaatggcggaagacgcgcacgagttgttcgattcctccccgccgcgggaggagggctccgacgagcagctcgcggccgtaccgctcggcgacgaggcgggcgtcgtcgaggaggaggaggcgtcggatccggggatgagtaccagcatgccggccacacccgcgacgccctacgagccgcccccgcggcccaggcgg

SEQ ID NO: 123570 - DNA, 657 bp, Zea Mays
gcaacaacaccaaattggataatgagatcttcaaaacaatcatggtgtggttgtaagcattataaatccttttcattgtgagaataactaggcataagttatttattgcaaatcttataagccttgatcaagatgaataatgcttctccctatttgtctttaaaagtgagtccaattccttcaatttcttgatgcatatctttagggggagcatatttctatatcttgattatattgagactaattcttcatcttagtaatctcacatagtctcaagtatgagaataagtttctcatgaagtatgcttctacatttcaatccatcttggtaaagtaatgtcacctttatcaaggattgtaactttcaatgttatagtagcatatttactagattctcctgttttaagcttgtttgataatctaatgcctatgttgttcttttgatcgcatctgttgtttgtttgatcattgaataacttcaataaaacacttatgtttcttagtgcctcataatttcaatcgatatctctcttgatatgcactaagttaaaaggagaattcatgatatatttatgcaatcagtgatctacttgatatataataacaatgacttaaaaaggatcactagttgtagaaccctctcttgtgcaaaatatt

SEQ ID NO: 123571 - DNA, 900 bp, Zea Mays
gcttcgacgggaaaccatggcatgtttaagtttgagcttggttggctaattagagacggtttccatgatatggttacctctatctcggagcatgaaacaaggggcaacaattccatggaaaagtggcagaagaaaattcgggctgtacgccagcaccttagaggatgggcaaaaaatacggctggaacaatgaagaaagaaaaagtccaacttactaaattaatcgatgacctagataaaaaggcggaggttactcgtctctcgcctaatgaactagctatgaaggcatttattaatgaacggttggctggaattctaagagaggaggaaattcgactcttccaaagagccaaagttaaacatctgctggaaggtgacgataatacaaaatatttccagttagtggctaatggtaaacaccgtaaacagagaatctatagcctagaagatgataatgggtcaagtatagtggacgaggaggaacttaaaaaacacattactagctactataagggcctatttggtaaaccaaaccaaacttctgttgaattggaggaatcgtttactcacgacatcccccaagtttcagatgtggagaatgaaattttaactgcgtcgtttgttatggaagaagtccaaaaggcggtcttccaaatggagcataataaagccccgggaccggatggatttcctgttgaattctatcaagtattctgggaagtaattaaaaatgatttaatggctctgtttgccgacttccataataactcccttccggtgtatagccttaacttcggagtcattacgttaattcctaagaaagagatcgctatgaaaatccaggattatagacctatttgtttgcttaatgttagttttaagattcttactaaagtgctc

SEQ ID NO: 123572 - DNA, 386 bp, Zea Mays
cctccgcgtctcgggttcgcgggaggccattggctatctgcgctaggacccttccaaccttgcttagcgtgtttagtgcccgagcaaagtcagggtataggttctgggtgaggatcgggttctctcgccggagactggcgtcttgttctgcttgcacccgcttgcgctcttgagcttggcgacaatcgcggcggtgggagttgcgtcgttatcgatgcgttctttcgtcaggggtctcccccattttcgaagcttcgtcccgagagacgggctgagccagatctcactctccagcctcgtggtgtcgtcgtacattttgacgcctgtttcgccgtcgtcgtgcatcgcgctgggaggctcttccccagcacaattggttcgtcgtc

SEQ ID NO: 123573 - DNA, 722 bp, Zea Mays
gagtgtgtgaatcggggaaataactgagttatgttgattggacgtgatgtgtaaatttaaaaattgtaggtttgtgtgtagggtgtattattgaacatgtatgtcgatgtattataatagtgattgcgttagagtcgtttgaagtattttgaatgcatcccgaatagggttgcattcgaaatagggaaagagacatgtagtgcgataaaaaggctagattgattttataggtcgtatgaaaaacattctattaagtgtatatatcgagtgtgctaaatggatcctacgtatgcagagtgtagtgtattggttatgcgaagagttttggaatagacgagtatgaggcgtgcagttaagtcgtgattgaagtgcaaatcctatgcaatgtgatgggattcatgattatataggagttgtatttgttgatgtgatgagtagggttaaatatataggcttgtgcgaaggatgtattattgagcttgggtcaaaatgcgaggtactagtggtacgctaggcaggcggtgttccaaataaataaatcggttgatgtggtagctgtcatgcgtggtttattgttagtgagtagttgaattacgagttatgcgagaatcatgttagaaactagtatgcggcatgtaactgtgttcgcgtggttaaataataataataataattgtaagaacagtcgttcaaattggtcagtccgattaagaatgattttg

SEQ ID NO: 123574 - DNA, 644 bp, Zea Mays
gggctttgtcagacggtagctctttaatggcttcaaaggcttctttttctgtaataggtaagtccagatcctccaaattatgagagggcagccccaggtagttaagattaatagtgacagttctatccagtcttgttcctaacaagcttctgtagaagttatccaccagcatggctttgtcagcatgatcagtaaatacattatctccagagaccagttttgccacaaagttcttcttctttctatatctggcatgcatatggaatagtttggtgttagcatcaccctctctgagccagttgattcttgatctagtacgtgcaatggtgcgcttaaatgaggcaagggctaaggaatgctttttcagtccacatctcagccaatcctccaaaggagacaaaagcctgaaatcttgggctacttcaagcctgtgaagaatctcccttgctaaagctaactgtgaggtcacatgcccaatcttttgtccactccatttctgcaaggatctagcagtggcttttagtctcctatcaaagcttagaactgggcagactccttcatcaatagaaatccaagcatcattgacagcttcctggaatccatctaactttggccaaaaggattcaaaatggaaccgcctcttg

SEQ ID NO: 123575 - DNA, 328 bp, Zea Mays
cgacccatacgtgcgatgctaaaacacaactacctgcctcatcaccacatgacagtaaaactatttttaccaccgtggtggttcccaaaaaggtgtttttgcccgtgttctgcgcgctcggtgtttcagatcccgccttttcacacctttgcctaccacccactacacatgactagcgagcctaggaccccatgtcatggtctaggtcgctagcacacttgctgtgggtgtcccttagtattctgcctaacgcttcggggaagcgtgggttagtcagcctttaataaaggcttccaccacatatagtggttacctttttgcattttcc

SEQ ID NO: 123576 - DNA, 359 bp, Zea Mays
ggcttgattatgaagctgcaaagggcacttgagagtaacgggaagtcgtccttgcaactccagggtcttcttcttcatgtgaggaatgttgtagtgctggccgccattttgcttcatgatctccatcatacaaccctgctgggttaggaaaattcggtttgatctatccacaggataattctgatatgactcatcaacctttctgagaatttctctaatgttgtttggtgtacctttctcaaacaaagattggattgcagcaaaaaatccaagatccaaaacgttcagatcaggtgaattaggaggctggcatgttagcctaatgtcccaaccatcttctttggcggctgtcacaaacg

SEQ ID NO: 123577 - DNA, 577 bp, Zea Mays
taaaaaacatattgctttctctaaaagctgggtgatcctattttaaaaaaatcttgctaacaagcctaaaatgacttatgcatgaaaacaggggtaagggtaagacttaaaacaatgatagcctaaaggcaaatcattcaaccctaccaaacaacccatcaacaccttccacactgaagtagcgaagcaattgttctctacaattatatataaatgcaagcagagaaaaaagtagcaaaacaattgttctctacagtaacgtataagacatttgtcaataaatcaggctatttttcatctccttaacatgcttagcaactaccctcattatcagcacacccaatacttgtagaaatatattccaaggcacctatatggtgaattttctaagatctaagataaaagaataggcttgactctaattaataggatgaaagattttctacataaattttaaggcaattaatgtatggatatgagagggcagattgacagaacaagcaaaaaaaacttattccagtgcccgtaatattccagtgcaaagaaaatatcctctgaaatgtagaaacagcaagaa

SEQ ID NO: 123578 - DNA, 292 bp, Zea Mays
atgaagtcatatttgatatatagaaaccgtagtgatgtatgggcaagttcttgcgtacactatatgtagcattttactgtagctacagaaggacaccgagaaccatagtttgcagcactatcgttccctctgttgccttaccctgagggttaccacactacagtgcagatagcctgagcatgtttgcccaacagggctagttgtcaggaagcaatcattgagtattgttgctgaccagcgagcattttttgtgtgtttctgagctccagttagcatcgtccctgtgttcccc

SEQ ID NO: 123579 - DNA, 379 bp, Zea Mays
atagatgactcaaggcaaaggtatatgataggtttttcatttgtccagttaagaggtgaatatagatgagaattaatcaggttaataggctagatagtcgtactatcaagtggggtcaacgttgttttcttgacatactttttagtgcctcattactcacatagttagtgcatttgcatgagggctaacaatgcttggttttgtggaagaaaagcattcataaagcattttgaaattggactgaacttgtctactacagaccgtctgggctaatatggtggaccacccgtaggtctaactcctatggtgggcataaacttcaaattttctgtgttgtatatgtacttcgaccgtccatagtcatgactataaattttcc

SEQ ID NO: 123580 - DNA, 377 bp, Zea Mays
gcttactgtgatggtgtgtaatatctgcattatgggttaagcgctcttgggcgatatgatggagatacaggtaatcgaacctgtcgagccattgagcgcacctgcatgattgtctgaggtccttaggacaaggacatctgtatgtggggttaataccttgggaggttccgtaacaggtaacgcgtggtacggtcattcgaacctgcatggctgtcaaaagctttcccatgtcctgtgcaccgtagtgcatgcctcagctgctcgcactgaatgcagggggcgagcttgcttccagccaaaggcttgttccaaaaacctatgggtcatgtggcagcaccagacccctatctgagcggagagcggggtccaagagcgca

SEQ ID NO: 123581 - DNA, 820 bp, Zea Mays
agatatatcgaaggtatgtgttttcttccctgattcttgtcttgtcgtgtctgcaagactcaagggcagattacaaaccctcacaaactgcacactgcgcagatgcaggggcactcactgagctagccttctcaagaaaagctatcctagctctctctctgctagctcagactgcaagccaggacaaacggtacatgcacccaataggatagacctagatctcagctcatcacgctcatctagcaaggtggagtacttggtctgcaaagtggtgatgttcgacatgtgtagagcgcactcatcacattcagtctcgtcggacacctcaactgaagctctagcagactcaagttccctaagggttctctcgtacttggatctaaactctctcctctcacgagcagcccgcctaagcaacttatcctgataagccaaagcagcgttcagctcttctatctcagcgaagaaatcatcggcggaaggtagtacctcagaagtagtgtcgtcgctgatgtctttgtcgtcgctggtgccgaccacgtcctcaccaagtgccatggtgcagaatcctcctgcggtgtcggcgatgaagcacaacccgtttagcttgccctcgacccgcctctcaatctcctcgtcgctcgaggaagatacaacatcgtcggagttgtggtcgaggtctctgagggaggcgaggaaggcacgctccttgatctttgccttctgaaggtacttcttcttgagcgcctccttgtcgaatcctcccttggacttgtacttgtcggaggagtacttgcccttgcgccgaccaaagtgatgg

SEQ ID NO: 123582 - DNA, 335 bp, Zea Mays
cgttgatcccatagcaaacgactaggattagatctagacgaaataaatcctgagcgacggattagatatgggtggccacgatttgatttggcgtaccctttcgtctcaatgaatcgtggccgtgtgtcgtggatcggatggatccagggggatctcgacttctttaaatccctacccttgatttcagatccaagggttcctgctgcgtaccggttcgggagcgtaggattctaatccgagccatgtgttgccgatcggacggctcagatctattgataccccttcgccgagcaaggcttgcaaaagagaccttatacttttaccaaataaacccg

SEQ ID NO: 123583 - DNA, 360 bp, Zea Mays
agaaaagcaatgctgacaatagaagtagagagttgatctttgaagttggagacttcgtaaaccttaaggtctcaccaatgagaggaatgaaaagatttaaggttaaaggtaaactatctccccgctacattggtccattcaaacatctggaaagaaaaggtgaagtagcgtatcagttggaactacccgataacttatcggacgtgcatgacgtattttatgtatcacaacttaagaagtgcttaagagtacctgaggaacaattacccatggaagcactcaacgttaatgaagatttgacttattcggagtatcctatcagaattctggaaacatcacgtaggattactcggagtaaag

SEQ ID NO: 123584 - DNA, 370 bp, Zea Mays
ggaatacattgttcgacacacttcgagaaaacagttatcattagaacaaatagccaaactgcaacactatgccaaggacttgaaatacccccgagggtccttggtatatggaggaaatgacgaagacgacttcctctattatctgcccgatagtaaggaggttaatatttgccgcgagatgatgaacaacatggggtttccaaagcttgatcttggtttgtccgctattatgagggatcagcttgcggacatcctcgcttacaatagcttgaaggtttgcacatttcagcttcgtatttggtatttttcgttatagtgaactatttttggtaattcttactattattgttagttcgttcttctgtttggc

SEQ ID NO: 123585 - DNA, 351 bp, Zea Mays
ctcattttggaggtggtggaactacttgtcgtggagccatgcgtcactgtggttaaagaatcgctagtggtgcgcacactgtcctactctatcagcatcgtcacctccttgccaccatagtcgtcgtctcatcgagtcgggaaggtcctccatctccgggtggtagtggacgatgacacaggaggtggcggtgccggctcgaacatccaggcggcaactctatttaagaagacaataatggcgaccctgctttggggattggtggctcgcgtgcccctgtgcgctctcatttggggcaccaatgtcagttggccaaggaattattgcatgtgcatggccctcatcccaatc

SEQ ID NO: 123586 - DNA, 601 bp, Zea Mays
catctcccgacagacggataattctttgttgtctaggaggcagtacaaaaagtcatcttcatttgtaccattaaacactagggcccccttcggatactgcaattcccgggcataatgtttggcttcagaaatttcttcttcggatagtctttttcccgaagcatgtctaacgatataatcaaatcttttggagagtacttcaggagtaagggattcgacttctttggccacacttttctcaaaagctatattagtatctggagttattccttcagccctctgctcggttgtggcaagcttcgtctcagcaggcactttgggccctgcctcggtttcagcctaggttattgtagcttcaacttctatttgcttagtatcagctttgggttgcgttttgtcagcttcggcaaccttccctgtgggagcggaacttatggagtcggttgtttccaatacatctaatacatttaccatccttctccttttaggagtcacgatagaacctgtttgtaccttcggtaccgtcgcccttgttggagcgttcaaaatatctggcattttcgttatttcttcaatgtctggttcatcaaccttatcaacc

SEQ ID NO: 123587 - DNA, 1616 bp, Zea Mays
aacagaaaatcaggcatttgtgactctgaaaacagccctgattcaagctccggtattagctatcccaaacttccgcaaataatttatcattgaaacagatgccagcgggggaggaattggtgcagttctacaacaggaaggacaccctattgcatttatcagccgagctttagggccaaagaatctgggattgtccatttatgagaaggaatgcatggctattctctttgcaatggaacaatggcgctcttatttgcaacatggtgaattcataattaaaactgatcaccagagtttaacccatttggatgaccaaagattgtctactccatggcaacaaaaggcattaaccaaattgcttggtctgcagtttcggatcacatacaaacagggcagcgaaaaccgcgtagcagacgcgctgtcgcgccgtcctaacttggggcaggatgattttaagctgcaactgaatgctacttcggtgtcatcagttattccgagttggctgagtcaagtagctcaaggttatgaccaagatccgagtgccaaaaagctactgagttgtttgcttacgggtgaaacaatggaacactacactctgtcccagggcatcattcggtttaagggaagaatatggataggagcaaacaaggccatacaacaaatgattatgtcggaactacatgaaagtgccattggtggccactctggatttccagtcacataccgtagaattaaatctaattttgcatggccaggcatgaagcaacaagttcatgattttgttcgtgcttgtcagatctgccagcaagcaaagcctgagaggacaaagtacccaggactattgttgccactgcctattccagaaaatgcttggcaggtggtcagcatggacttcatatcagggctccctccttctcgccatggcaactgtatactggtggtagttgacaaattctcaaaatatgcacactttatatcattgacacaccctttcacagctctggcagtagctaaggtttatttatctcaagtgtacaagcttcatggacttcccaccgctatcatttcagaccgcgacccaatcttcactagcaacctatggaaggaactgttcagactttcaggcacaaaactatgcttgagtagctcttaccacccacaatcagacgggcaaaccgagcgagtaaatcaatgcttggagacctatctccgctgttttgtgcagtcctgtccacgtcagtggcccagttggttaccgctcgctgaattctggtacaacacatgttaccatacagccttgggaaaatctccattcgaggttttatatggtcattcaccagcacaggcaggcattggatcagctgaacattgcaccgttccagatttacaacaattcctgcagagtagacagaacatgctgcaacaagtgcgtatgcatctgcaccgcgcccaacagcgaatgaagaagcaagcagataaaaacaggactgaacgggtgttctcagtgggtgatcgtgtcttcctcaagctccaaccatactgtcaatcttcgcttgttgagcgtcagaatcataaattatcatttcgatttttcggaccctacaccattgtgaaac

SEQ ID NO: 123588 - DNA, 352 bp, Zea Mays
cttggatatgagtttgcacttgtttcttgcttaggtgcatctgttaggggcatggagggttccttttatagccccccaagcctcaaaaagtcgttgatgcaaacaaggaaactgttgtctctttggggcaccagaccggtcagtgcatcaccgaacctccaacactgcctcctccttcaggatctgattgtagccctccaatggtgccttcttgagttaaacgataagttctattatatttcttgtaatgatttttgtgtatgtggtgaagtcgatatcttgccgtagtagcctccagagattttatgagaaggtgctagtgctctaccaggttaggtaaattaaacttgtg

SEQ ID NO: 123589 - DNA, 384 bp, Zea Mays
tttaaagtcaaaggaaagttgtcccctcgcttcaatggacccttcttgatcttaaagcgagtgggagaagtggcatatcaactagaactacccgatcatctcgcagttgtacatgatgtcttccatgtatctcagctgaagaaatgtctcaggtacctgaagagcagctaccaatggaggatcttagtgttcaagatgatctgacttatgatgagtatcccatcaaaattcttgatacactaacttgtgtcacaaggagcaaggtgataaagatgtgcaaagtgcaatggagtcaccaaggagaagatgaagcaacatgggaaagagaagaagagcttcgcatagattttccccatcttttccctagaccttcttaaatctcga

SEQ ID NO: 123590 - DNA, 828 bp, Zea Mays
ctataaaaaactcgttgtacattcataaatctacataactgttaaatgcttatgataactttcacctacgtttatggcattatgtgtacatatttatgacgctgtctgtgcattgacaatttaacatacgattcacatttacatccagaatataattttctcataaatcttttggtattctactctctaccagatgaatcatcatctccgacatacaccgttcgtttttcgacgttgatgtctcattccactgtggtgctgcacctatgattttgttccttgaaccaggaggccgtcctcgcttacgtccagataggttagccaatcgaattctattatcctccacaattaaacacgtacggctgttgtgaccatcagcgatgccacatttttggcacttcctgctcatcttcttagctcctttcgcacccaatttaagaacttgttgctcactacttttgatcgttcttcccttaggcttggccttatctggtcttgctaagtttacaccttccatatgaaactccagtttctacaaatcaaagatattaagtcagttttcatattcacatattcatcatatactatagcaatgttattacctttctagcttccacatccgtagcactactatcaaccagacacatatcagtgttatgttccaatgttaatatcaacatattacattgatcgtcgttagcattgcattcatttgtattagaccccattacaatttcctgtgaaataacacaaactccagtgaagacaaatgttgtagagcagcataaataatacattataaaattttgttgcatacctcgttcccat

SEQ ID NO: 123591 - DNA, 360 bp, Zea Mays
aaggaatcaaggaatgggtgggtagattacctggaccgagggaaccggcgaaaaggaacatgtccggtgtggtgatttggcttcttcgttgaggtagcgttcgatctaagtggctgggaagcttcgctagtctctgagggagctggccagggagctagactggagagggataggttggagtggctaggctatgatggacaaagctttggcaagcttgagggtggcgccgcgctcggtattttggcgattaccggcgtccagtcacgtgcaaaaagtatggagtgtgcaggagggcaaggacgtggggctagggcttctcataagcgagggctcgagcacgggctcagggctaggcgcgcg

SEQ ID NO: 123592 - DNA, 660 bp, Zea Mays
gcaccacactccttcaccaatgccatgacatctctaattgagcacccattgtcctcctttcttgccaaagactcaacggatgatgtgctcttctcacttgctgtcacaagtttgctcaattgatcttgcacccaatgtcctcctaatgacctaggctttttacccttgtcctttcgaccaacaaaaacatgacgctttcctttagcagttgtaggtgaaacctcttcacattcttcatagtcttcatccttctcatcattggcctcatagtctccatccttgtcatcagtgttctcagtggtttcaccctctagactttgtggtgtagtaccactagacggagcccaatgatcatctcctgtgttcctaatatcttcatacatgatggctttttcttcctcatgcaacagaggcccatctttaaacttggcaattcctttgtattgctacacattaggagaaagaagatgttagacatataatatgtaacacaagatgcaataaagacaattatccaaaagttctattaccttattcaatttcttccaccttttatttgtcgcactccaggtttttttcgcagtgtcccatcccaaaccattttccttcgatagtcttttccaatttgtgtactcaatcctcatcttgtcccatttgttc

SEQ ID NO: 123593 - DNA, 770 bp, Zea Mays
agtttttttacccatgcgagtacggatatgggtacagtttcatacccgcgagcgggtacgggttttttaactggcatatttttatctcacgggtatgggtaaacactacccaacggatatatatttgttgacatgtctactccatacatttataacattaaggtgttgttgggttcacagacagtgatgcaaatgactactacgactgcggtatttctagaggaagcaatggtacttgaaagcacgtaaatgattgcagcagctgttgtagaacaacttgaacggtgttggctccgatttggacgacaaacactagagatgaaccacatggcagtgccctctacgggagcgcggccagtccatagcacgggtctagacggtcagggacctcgacgtaggaggtgctccctctttgcacgcttccggacggtccgcgactgacgcggaggtcttcttatttgtaggaaacccagacctcgcctcctaggagggaccctgtcgggatgagagatcctaggcgtctcttgggatcggcaggtcatccaggacgtcaggtgaaagtttgagggagaggatggctaaactagtgctaggctaaggctacattacttctactcctagggaatggaaagaacaatgcaaataaggtatattttataaatagatttgattggatcgattatggggacgtcaatcaacagtaccccttctgtcggctacctagaaacggggtacccaaaataaggcatataacctcctaatcgccaaac

SEQ ID NO: 123594 - DNA, 542 bp, Zea Mays
aatttattgtgagacccaaactagaccacttcccttgaccctcaccaaaggaggatcttgatgttggaagacttgacatcaagacaccccaaagcgaccaaatatgacttaggttgtatggtactcaagatcactatattgtacgtgtaccaaatattcaaatctgtagcatacatgcacacgtggagtgaagtattatcatgaacaaaagggtacaccagctatatcataccaagcgacacgaaggatagtgtctgtcaccaatcatacatgcacccttgcgtaccaattatagtgaaagttgtcttacacccttgcgtgccaaaagcatcattacatttatatgtgctctccatgttcgtcgccaatcaacaccacaacaataatagtgatagtgtctttatggtatccaagtataaggatggaacattgtgacattagcgtgccgacaagtagctagaagaaagacatgctccgataatggatatatgattttctttgtatatatactctttctaacaagctttgataataaaaatcta

SEQ ID NO: 123595 - DNA, 275 bp, Zea Mays
ggactcaccagctttggatgctcttctgccggacagatactagcttcgactgtcgcagcaggaatggactccggagctaaggggataactttggcatgttcggtgatcttcatcttttctgtatcaagcactgcagttgtcctctctaaaggacatgccttcggcctgtgagtcaaaaccttagctttttcggtaggcgcggcggaagaggacgaaactgccacttttctctttaacccctgttttcggacaagaaagcagtaatcaagataaaa

SEQ ID NO: 123596 - DNA, 837 bp, Zea Mays
aaggtagcgtcgggcgagaggagggtgaccttgtcgtggtcctctcctctcatgtgcgagccggtggtcatggttcgccatggcgaagcgccagagcagatcggggagatcagaagtggaagaaccgcgagatagggatggagatagagcagcgcagccattgttggacctcggagagcttggcagcgcaagcgtaagagtaagtgggggagaggttggtgtggtacctttattaattctggttccgctccttgtggttttaactagattgatgacacgcactcactagcgcataaactatctctgatgctcgcgcacggcacaaggcaaaaaccgcagacgggtccagatgtggacactgtattcctgtcctgtatacagttccactttggttttagatgatgtgaactgatgggaccgtttgtgcgtttgtgaaagctagaggaccaaaccacaggcaggaaagaaagaataattgtctaccagaccagtacggtggtttaatttgttgtctgtgtgaaatcggttaccctaccatttgcgtaaaccagcatttttttatcagacacgattaaaaaatgatgctcatcagagtcaaagttaagagcgaactgcgtactgcgctgtatgtatactttattaccaagtaggttcgatacagtaataacgaatccacaggtcagatctgtcgcccatgttcacatgtttaatatttggtggatttatcgttatggccaacgggaatgctgcaatagccggtgctctacgagctttactgtacataagttctgcctacaattttttttttctatgtacatgtgctaagatccaaccggc

SEQ ID NO: 123597 - DNA, 372 bp, Zea Mays
tttgcctctaaggatcatctcaagtcggctcaccaagtccatagagggaattcttctgttagtaacccgagttgagtcagctaggcctcgatacagataagccgggtatgccctgtctttcaacggctgaatattcttgaagacaaaatcagcaaccacagcttcagcagtcagacccctctctttcagcaatccaacttcagccagcaaagcacctgcctcagctacctcctgatctgtgggagactcggtccagcttggggtgcgaacatctggctgtcttcccgaccgggggggagagagtttccataattctcaactatgaaccactccaagtgccatcccttgatactgtctttgagagggatttcg

SEQ ID NO: 123598 - DNA, 320 bp, Zea Mays
gagggttggaggggacagcaccgccctactcctgaagaaaatgaggttgttgtctacagaagctttatgaaggcgggtcttcggttcccgttgagcaaatttttggttgaagtgttgaaaaaatttcagatctttcttcatcaaattactcccgaagctataatcagaatgggtttgtttgttgggttgttagaagccaagggctagaaccgagcgcaaagtgtttttgcaatatgcacgaactgttgtatgagacgaaggctaccagcaaagagcagtatcacaacaacttcggttgttatggattcattgctcgttct

SEQ ID NO: 123599 - DNA, 388 bp, Zea Mays
ccgaacagtatcataaccgacctgggatccaacttcacaagttcagagttcttcgatttctgcgagcaaaaaagcattcaggtcaagtacgcttcggtagcacacccgagagccaacgggcaggtcgaacgagctaatgggatgatattggaggcactcaggaaaaaggtcttcgataaaaatgaaaagttcgcaggaaagtggataagggaattgccctacgttgtttggagcctaagaacccaacctagctgagctcttcatggaaacactcctttcttcatggtctatgggtcagaggcagtactacctgctgatctcaagtttggggcgccaaggttgatctttgaaagcatagcagaggccgaagcaactaggctggaagatg

SEQ ID NO: 123600 - DNA, 595 bp, Zea Mays
ttgctttccttagtggacaggctgaaaactaacgaagccaaacttagtgcacaagccgaagctcacaaagtcgaagttgaagatttaaagaaaaagcttgcagaaacgagtgaaaagtttgatgttgcaatggtgaagcactagataagcgaaattgaaaaatcaagggtacaaaagaatgtcgaagagctccacgactccaaagagagatgctatgaaatatccttggaatgcaccaagaatctaaagaacagttttgcaaaggtgggagcatactcttccgagcataggttcatctgtggtgaccccgatggggttatccagtggatcagcgaggaggtcgaagcttttgatgagatacttagcggtcgaggggatttctgtgcttttgctggtgcccgcgaggatgtatcaattttggaaaaggtcagatgtgaccatgcgaaggctgttgtttagctagaatttgttatctcagccgacgacattaagaatccttcagccgaagcgtcttcgttaagcggtaaattttactccaaagtatggataaagggcggtcatgagatagctaacgaagctattagaaaaaatgaaa

SEQ ID NO: 123601 - DNA, 387 bp, Zea Mays
gttgttcagcggggtagctgatggccttgacctgaagtactaccctcaccgttcgaccagcagtgctggaggtgtgattgtctcaccagttggtgatggcaatcccaggctgaacagcatggtcaacttgggctgccatgctcaacacagagttggaccacgcccttgacgagttgggcaaggttcgggcggaggttgcggaattgcgtgctgagtgcgcagcacgccactatttggatggtggttctcccgcccctgtcgggattcagcaccttaccgttcaccgccccgtggtcgcttcgactatggtaccccagactgcaggacccgcatagatttggatccttagatcgacagagtcggagtctgtaataatgcttagttcag

SEQ ID NO: 123602 - DNA, 346 bp, Zea Mays
ggaatttatcaattaacattactttctaaccgaaactggcatcagattttctgctggaaagagacagaaaagtatctgtgctatggattttatggcaactcctctataacaagactttaccagcaggcagaacaattatgtattaaaatatgcaggctcatgttaccagattgtttagcttgaaatattaaatgcagagaccaagtcaaaaagaatttgacagtgcaaaaataaaaatctcaacaaatcaagtgcaatggaaaatggttaactcatccatttctttaagcatttatgctttactacattgtcatcacaaaggctgaaagggaacggcatctttttg

SEQ ID NO: 123603 - DNA, 430 bp, Zea Mays
ggaggaatgagttactcatcttgacattttattactttgcttcattccttacagtataacaaatgattacaaaaataccttcgctttacgttcaataatgcgaaggtgaagagaaagaccgtagcttcgtaggcagagagagacgattcactccgactccgaccaaaaagcgtgtccaatgcatggtactattcttctatttataatcacgagatacagcttcagcaaaattacaatcataccctcaagcatatacatataagctataaatttgaacaagggcatcaacgtcttttccttccgtagtcttattgagcaagtcgaggactttggtttgctatcgctgattccttcctcatgtacatgctctgttgaaccgatgcttgctgcttcgaccttgtaaccacgacagccacacatcatcccctag

SEQ ID NO: 123604 - DNA, 475 bp, Zea Mays
atgtccaagcagcttgtgccttatacccttatgtcagttataacatgggtgtaagtaataatcttatgacagatctccgaaagggtgtggaaacgatgtttgatttaaacacaattgcaatagcccttcaggagtatgagttcttcagaataaaaagaggataattctcgagtgacctggcaaggagtatggcaaccgacagtaatatgtctccatccagttggtgggctatgtttgggtcaaagacaccgactctacaatgtgttgcaaagcggcttcttgcacaatgtgcttcatcaagtgggtgtgaacgtaattggtctacattctctttcattcatataaagctccccaacaaactagggtactagaagctacatgagttggtgttcgtgaactacaacctacttcgcattcaacgtgcatcagctacgccagacctagtgagtttgaccctaccttagcctatatggat

SEQ ID NO: 123605 - DNA, 665 bp, Zea Mays
tgcaaatattttacccctcaagcatccatttactgccctctctgttgctcgactgtttcatgaccaagtatacaaacaccatgggctgcccaaatccatcatttctaatcgggacaaagtgtttgtgagtcatttatggcgggagttgtttcgtttggaagatgtttagttgcgcatgagctcatcttatcatccacagtccgatggccaaacagagcgtgtaaaccaaagtttggaaatgttcttgcgttgtttcgttcatgcttgtcctcaccaatggagtcagtggttactggtggcacagttttggtataactcttcacctcactagctactgggcatacaccatttgaactcatgtatgggtgtcagccgcaccatttgaactcttcatgcttgtcctcagctgtttggggacaaccagcaattttaggagggaggaatgttagccacatcagtgaatcagctgaagatggtgaagctggagaagtgtcagatggactgcgccaagacggcaaaatgcccaggaagcagaatatgcgtgtattcgggcctaactgggtaaactagtaacaaccgtattaatacttgtgaagactatatgagagggtatgaaatgtaataacctaaacttccacttaattccagacatcacgacactacca

SEQ ID NO: 123606 - DNA, 345 bp, Zea Mays
gttcccggtgatccctggtggtccagttcaattaaaggggtcgaggggcatcaccagcatgcaaagatgctagaacaagaacagggagggtatgagcagacctgtggagggctggccacgacgagcttggttctacggtggcggaaacttgatttgggggaaacaagaaatttgggcacactggtgatcaattgctagcaattcttggtggctgggtagttgatgaccttgcggaactggtggagggctcaatttatagggagagtgagcggtgatgatcaattcggtcgagccgtgctggctgccggagatgaagaagaaccttggcgcagtgaattcgtgtcc

SEQ ID NO: 123607 - DNA, 563 bp, Zea Mays
atcgggtggcatcaaccgtccgatccacatcagacggcccggattagacgatgaagggggtatgcatccagagccattcagattaggcccaatagccaggatttaaagcgtgaagtgatacacggggatctaatctacaccgttcgattctcaatacgcggccctgatctatcctgcgaagcaatcttcctacttcttatcacaaccgtctatcctaggatggacggcgaagaggcttcttctccatccagccacctgacgcgacggggtaagcacgggcgcggcggcgccatggtcagatccccccaagctaggccccaacgtcccaaactcaatgcaatcgggtgctaacctatacgggatcgatggctaacacgtgggaggaggacataccggcgatggcgcagcagagacccccggccacgcaacacgacggatacacagaggagttcacaccctggttgaccaaatcctgggctcccgatcaccaaaccttcacagcgagaacccaggtactgtcctcggggcgcggcggggcttataagctcgatcctcacgacgaa

SEQ ID NO: 123608 - DNA, 286 bp, Zea Mays
ataactatgccagctatgagcctttataagtagtcttgataggaatgaagtgggccactttagtcaatctatccacaatcacccatatagcatcatatcctttctgggtgcgaggcaatccagtaatgaaatccataccaatctcttcccacttccactcgggtatcttcagtgggtgcagtagtcaagctgacctctagtgttcagccttaactctttgacacacatcgcacatagccacatgtgcagccacatctctcttcaatccataccaccagtatttctg

SEQ ID NO: 123609 - DNA, 566 bp, Zea Mays
gagaaaacgaacccagcctcacccaggctcgttcagacgccgaccaacgcgatcgcttcctccgacgcctcccgcgctctccacgaacaactggtatgagcttcgttcgcctcggccgctcgactcgccgtcgtccagccgcggttctctttctcctcaaaggcaatgtatctcctccggtccccacccctgtgattcaatcgtttcgtattaggtatcgctgcagtgccaaacggtgatcggccggggccgcctggttcaaacttcaaagcaaacttcgattcgcatctcgccggttgagtttcataggcgcgttgcctgatgtatcctagttggaatggacgctggctgctgggtgtgtgaggcccttagcaggtaacttggagggatgggcgtgggccggccaatctgctagttgtagatggcgcgttatctgaagacgcagaatggccacgtccatgtggtatggtctcctttctatttggagaatccaccaagcagattttatactttattaagattttgtgatacttgaacttaaacaccaacgatttgttgtaaatgag

SEQ ID NO: 123610 - DNA, 527 bp, Zea Mays
gagaactatgggcttgttactttccgcgaagtggctttgctttttgatgaggagtcttcaatggaatccagcaaacagagtgtacctttcgttactcagactctttgttcacaactttccaccatctagctttcacttgttataaatgacaagttgctaccatatttgggaatcagataatattatttctgtaataaaaatacaggattgcattgaattcatagttagattggtcatttcaggcgatcaaataccagatgtagagaagtccttgctttaaccacctcaaatttctttgttttagattgcaattactgtagcacatgagctggctcatcagtggtttggcaatcttgtaaccatggagtggtggacccacttgtggctaaatgaaggttttgctacatgggtaatcaattttagaacctaacatttcgatgtttcagttcgtaggctgccactatatattgagtaaatagaattttcttttaacagatgagtaatctagctgtaaattctttctttcc

SEQ ID NO: 123611 - DNA, 368 bp, Zea Mays
gcaaagcctccggcactcggcaaaggcgcggattctggtagtgtcttctaccacaatcatctatagaacacatcttttaatgtcttgctatccaaccacccaaaaactaggcccccactaatgacgttccgagaaattctctggcacaattgcctcgcactccggtcactccacagttcgccactgtcccgagatccaaaataagttccagacactagtgtaactccttgcgagttgttcctcatcaggcagtagtgtactagctccttgctgccacatgcccacatacttgaacaatcacgtaaccatgcattaatggatggtgatgtgaggtggtccttgttggacactgatgccggcaatgcaat

SEQ ID NO: 123612 - DNA, 498 bp, Zea Mays
cgcaatcatttcatgcaaaggaaatctcaatcctgctttaaagaagcttttaaagactaccacttcattcttttctggcttcggagtaatttcccctccaccgaaacgaactagcttcctcttggcttcagtgatataaccaagcttcatcaacttaggcatatcaccttcggtaatcgtagactttccaaactctaggtggctaggtttagatggcatggcgttgtacttatcttcagtttcactttcttcaacatcaatctgctcagcttcggcagcaggggcaccttcagaagcttcttccggcacagccaaccctgagcgtctcatcacttcggaaattggagcggtttcagcagcttcggcttcctctccgtcacgtataaccctagctgtagaacgaactcttgccatgtgatgatgaattttccacaatttttgatgaaattgctgacttttttaatttttctgaagctctttctcttgtgacgaagcaaa

SEQ ID NO: 123613 - DNA, 518 bp, Zea Mays
ctttgttgaggcagtgaaaagtgctcgatcagtgttgtctgtcggggtatccatgccaacccatggtttggtatcatccacccattccttccacaaccaacgaaggcgtaacactctaccaaatttatcaagctccggaatccctaacccgcacaagtcctttggtcttgtgatcgttgtccaattcactaaacagtgacctccattagtgttttcttcccatttccaaaggaaggatcttctgattctgtcgattcgcttatgagcccagtccgcgagcgggaacactgtcagatgataggttggtatcgaagagaggaccgtagagacaagagtgagaccgttgactctatttagccacttgcctttccaacaaggaagtctttgagcaattcgtttgatgagcggttgaacgtgcactttctttaaggggcgtatatgaagttgcatgccaaggtagcggcaggggaaggttctttgaccccattgaagggctcaaggacatggtctagatcgac

SEQ ID NO: 123614 - DNA, 670 bp, Zea Mays
catatttgccccgatttgagcttattagggtttcgtgcttcatctggtaaaatgtatgcttcaggagttcaggatttttgcttccccgtctctgcctcacatttttcggatctccttcctccgtcttccttagtcttccagatctgatttcttgccgacgccgctgggattgcctgttgcactgatgccgttcgtgacctagctcgggtggaggcggtcgtggtcgtaggtttgtttggctaactacgcttgcttccgcatcttagtcctctgcttagtgtgcgttcttctttgcttcctagaacacacatgctttgatcggtctctggtgtactgcagaggttaggttagtggcgcgcttagcagacatggtttttcgcatacacgctgatgttaggttgccagcaacacagctgcagaaacacaactacggatagggtcttctaggttgagttgtcaaggcacttagtggatcgtgacagtgtggataattgtttgatgaaaactaaaacgtagggtggtcacgaactttttgtccatgttcacaccagtgctttatgctggaatctagattcagattcgatgtttcgctgctggggctgtcccaaatggaacccattaccaatgggttacattcggatctcgggactggagtctcaaataggtgaag

SEQ ID NO: 123615 - DNA, 326 bp, Zea Mays
atcatatgcttcataaccatctttcgtagttcagggtacttgttgcttgggatctcggttgagatcaaaaggtcgtacttctcaggacatgtgagcttgtacttcctctgcattatgagtataccccgcttctaaaactccacgacatagacgtaggctcggaccttaccaagaatatcatgtttagtcagcctatgttttaagtcttgtagcttcgcatgaaagacacgcactacaagatctggacgatcttgcggtgtctgcctagggataagctctctccttatctcatccaagttagggttacatgtcatggaaagaaatat

SEQ ID NO: 123616 - DNA, 327 bp, Zea Mays
cacggctcaaaacggtccacagaagtcagatctttctagaatggaatcgaggtgttgcacatgagtatgagagcgatcacttgctcttgtggtgcttgggtgcctgtagaggccgactaagggctctatttatagcccaaatgaccaaaagagttgttgcttgattgctgggaaactaccttctgcgggtgcacaggactgggtcctgtagtagctcctccaggattatgattgggcccttccatctttggttggcactagaccgttttgatccaccattagaccaccacatgttgcatgatcgttgaagtagccgttatgcgtccg

SEQ ID NO: 123617 - DNA, 350 bp, Zea Mays
ggcccagcgccatggccacgcccgccgtgacgtcccgatgagcacccatgtcggcagcgccttcgttacaccgtcacaaagttcggaaaccacacgaaaaccaccggccgagaattctgcaccgaatcttgacaacgtcatctcgaggggcatgccctactcgtgtgcataaagcttgcgcaggccaggattcacctcgcccttgcgcagaactgcataaaaccccaccccatctgcggcgagggttttcctcgaagcctcggatctccgccgagaaagcatctccaggtgaggtacagtctctcgagcttgttgtcgtgcctcttccagtcctcgtagtctcacaatct

SEQ ID NO: 123618 - DNA, 473 bp, Zea Mays
gagatttcctctgcacgagatgattggagatgtcttggaaaattttgagatttaccttcattagctgacccctaacgccattgttaggctcagcgtttacatctgggccctccaaagtcaaggggtggagccactcgccgaagccttctgccgagtacatgaacttcattatcaaacgaaggctagggaagacggactgcatgagaactttggctgctacaactttgcttatcgcaaagacatgaagacacaggtggtcagctatcgcactaaatggccgaccggttggaaatctgaatggttttatgttaaaattgatgagaaaaaatagaagctagtgcagagcccgctggagttaaccttcgggctaactaggccttagtgcaacatgacgccgggggcaccatgcccaaatgctgtgtatgagtttagaattgtatctgaacacatcggaactagggacttagttcaag

SEQ ID NO: 123619 - DNA, 506 bp, Zea Mays
atcaaagacacaatgcttcattaatggtgaataacagaattattacataacctagttttggagtccaaaactgagttcaatcaaggttaaaaaggacaacatgatgaaaaagtgtaagtatgaaaggttggagcatttgaatatgttgcatacacttactataaagttattggcactttggtttgcactctaacttggtttctagtgaaagtacccttttggtccttttttgagatgaaacttgaaagttgtggagaagatcaggtagatgtgagtttctatgacttagtccattggattataatctaattatgttcatcaaagtcataggaaagtgctcaagaaagtccaagttgaatggaggaagaagagctcaagaaggtcaatttggttgttgtctgtggcacaccggaccgcatgcgcagagaaggcagtagtaggcctagtcgacatagtgcactggaccttgggtccatgtgcaccagacttcctacagagaagaatcc

SEQ ID NO: 123620 - DNA, 272 bp, Zea Mays
gtcttccaatacttgattagtcctttcagtctgtccatcagtctgaggatggtaggccgaactaaaattcaacttcgcatccatattctcatgaagacttttccaaaatctgggggtaaactgtgatcctctatccaaaatgatcttcttcggtacaccgtgtagagacacaatccgagccataaataactctaccaattgagatacctcaaaagtagtcttgaccggtactttagttagtctatccacaataacccatatagaatcatatc

SEQ ID NO: 123621 - DNA, 526 bp, Zea Mays
tgctgtgctgcgtcctgcgtgcgcatcttgtggtggccgctttgggcgcagaccccgacgaaatggctgaaaatttgaaatccgtctcgctcctcgccgccgcacgcccgcaccgcaccatgctgcatctccttctgctgtcatgctgtgtgtagtgtgtaccacgaaacacaactccaatccagaatccacgcctcccaaagctctcctactctcaaacaccaccatagcatcggttcgccattaaaccggtcacctcgcctccctggcgctgcccctcttcctctccaccgcgttcgaatcccatgggtctctgtttcagcaagaagcagcaagagaagcgccgagacgtgcagccatccagtgacgccaagaagagcggatgccggaaatccggcagggacaccgtgcttgtcgccgatgccaagaaggctcctcaggcaaaggcgccagcacttcccaagaaggctgtagccaggccggaggaggcaacagctgacaagaggaccgtgttcgtcgtcaaggc

SEQ ID NO: 123622 - DNA, 468 bp, Zea Mays
ggcacatctattttagatacatttgaatctgattatgttatgtggatgaattatgaaatggttgttgatcctatgattacatgcaatggctgggcaaaaacctaacaaacagcatagccagatagaggcaaataagaaaaacagaaacggtggccttatcagaaaggaacaatgggaaagaacagtctttttcaaaggaaaagggactaagcgatgggatacatgacagaaatcgcctttgaaatcagcctaacagatgcccgcggagaatataccagcgataggaaaagaagggcagcgccaagtgccaactagaaaatcgaagatatgctggagaggaatatggaaaggcgaagcaaaaggaatatttgaaaccttttatgctggtgaacaagtgtgtcacagcaggtctattttatttcaggaaaagaaagagcgcctttcatggcccgacagggacgttcaagc

SEQ ID NO: 123623 - DNA, 518 bp, Zea Mays
tgattgtttttctgctagctatcaatgaaatagacaaaacaaggtaatgcagatatttagatggcatattcatcagtaaatctgtttctttagcacattgtgcttaaatctgattctttagcacattgtgcttacttactactcctgtacttggaactaaatggacatgacatcatctgtctctgagctaacattttggctggctgatccttttggctgttagatagcattcatagcaattgaatgatcaacaggcagcatctggtcaaagtgcaagttaatttcatttttttctcagtataatatattcttacttagttaacagtactttccaaattagctgaacctgttagcctttcctgatagcatcgctagtgctttattttaacaaacaaatattttctgtatgtttgatacattgtaatgtgttataagttgtaactaaagcttaggtttctatcttgacttatttgacacctatgtatcacttatacttgagtaacacagccataccagta

SEQ ID NO: 123624 - DNA, 762 bp, Zea Mays
aatcttctggcaaaacattgtctgccgcttcagagtcccgtccgaactcacagtcgacaacggcaaacagttcgacagccaagacttcagggaattctgctgttccatcggcaccaagcctatcttcgcctctgtgtaccacccacaatccagtggtgtggtcgagcacgccaatggcaagatttttagcgccatcaagaaaaggctccttgacgacaaaaagggcaaatgggccgaccagttacccgaagttgtatgggccctgaacatgacagagtgtcgggcaaccgggttcacacccttccgcctaatgtatggatctgaggccatgacgccgcaagagttaaagcacgggtctccccgaacaaacaaatcagtcgtacccgatgtcgacgaaccaacttccaaagatctcatcgacggagaccatgacctcgccctgcaggccctcgacaaatatcaggtttagaccaaggcctagcgtgacaacacagtcgtcccaagagaattcaacgaagggggcctcgtactcgtaagaaccacccggacagagtcccggggcaagctagagccaaagtgggaaggtccatacatagtcaagacgaaggcatcccctagtgcttacaggttgtcaacatcatccgacgaagatttagaacattcctggaacattaataatctccagaaattttttgtttcagtcccagggcctacgcgcctttgtaattctacaaacaatgctattcaggcccgcactctttt

SEQ ID NO: 123625 - DNA, 382 bp, Zea Mays
ccctcttaagaagatgttacatattagttcaccgggaggtgatatgaaggccacacactcatgcctccatgttaatctcaagattcagggaatagattttccagtcaacctagtggtcctaggatccaatggtattgatgtgattcttggatgtgactggttgaaaagttgtgatggagtgatacaatgtgccaaaggaacaattatgttgacaagtacacaaggtgaaagaatccaagttagcacagacatgtcaacagatgaaaaaggagagacaatggtaaatcacttggaagaaaagcctctggaaaatatcaaggtagtgtgtgaatacctagacgtatttccagaggaattaccaggtatgccacatgatcgtgat

SEQ ID NO: 123626 - DNA, 301 bp, Zea Mays
tgaagatctgtgatttgaagcttcagttctgctaactcggttggagccatgcggtatggtctctttgcgatgggtgctgttccagggaccagatctatgtagaactccacttctctttctggtggcattcctggtaattcttctagaaatacgtccatgaattcttctactactgatatactttccgttgctagattgaacatcattgggtcactggcgggtggttgtgcctgacaggagactgactttccctgctggtcgatgaggaggactgtcttgtctgcgcaactgatgatgcctt

SEQ ID NO: 123627 - DNA, 581 bp, Zea Mays
ttttacctgtattaaagtcacaaatatgataacaaattggtcagctaatcggctctaagatatgcatgaaacaaactaataattaatacacacaattcatgatagaatagacttttttcaaacttgcagttgctactagaagcacaagcaccacaaatcagtgaactctatgtctctaaaccaatatttgcaaccaagatccaagaactggagtatcaacaatacaagaatagatcccaaacacaggggacacaatcagcctatggtatgatctgatagatggaaggatactcagtgatgttctccccaacctcttcagctttgcaaagaatccaaaaatatccctctgggggatcaggaacaatgatcaagtgctggaatgtttcagaattcccatgacaaggcaggcccataatgaattcatcatgctacaaaacctgttgcatgccctaggtcctacacagttggagtcaaaagacctttgggtctatatatgaggccaggccggccagcaaagatacacctcggctgcatactacaagtatcacttcagaaccctacagccccaaccgactgccact

SEQ ID NO: 123628 - DNA, 1099 bp, Zea Mays
caagcttcgcttggtttcgggcgcacctctccttagtatcagagcaccgttgagtcaaagctgaagaaacaactagcaaccataaacaatgtaaacaaaaagaaaagtcggtgagaaaaggcagcaaaaaactcaccagcattagcagactttaggtcatctatttgcttctgaagagagagaggattccaccatgacaaggaagatatttactcaggtactgaaactccatgagcttctagtggagcaaccaccaggtccaagacaccctatgaaagcaaaagttagcaaacggaaaacccattggtaaatgcaaggtagcgcaagatacaagtacctgtaaatttgacaagaagaacggaaagcccaaagctggaatcgctgaggcgctcccagaggcaatgacattagtagaagccacagtttcagcagggacaagcgttgaaggatccggatcccccagactaagcatgacacccattggaatttcaacaccagatacacccattgggaattctatgccataaacactcattgggattttagcgccagaaccactaacctccaaggtggttgggttgggtggaccaatgggcacaatagaatttgttactacaacatcaccagtccagggcatcgacgaaccaacatggatatccattgaaacaatagaaagaaagccaaacgaagaaccctgaggggctggagcaccctcggggcctagagtaccctcaggggctagagcatcctcgggggctggtggaccctcagaacctgaagcaccatggcagactgacaggcttacctctagcccgaccaacaaactagcggaagatacttcatccgggcaatctatacggacgtcgataactctactcaatatattcaagcataagtcctcagaaatggtgtcctcgagcacaccatcaacaaccgacatagttaaacctcatatattcatcatctatgcggcaacaaggttcgaggtgttactgcaaaccttggatcgccgctcacgccgaaccgggggaagcacttcttcttcctccacatcatctccttcctccaccacgtatcaagccgtcctaacaccactccc

SEQ ID NO: 123629 - DNA, 369 bp, Zea Mays
cttgatctctatccatttagtgaatttatcgattgctaccaatacgtgagtgtatcccccttgagctttcttgaaaggtccaatcatatccagtcccccagcatgcgaaagaccaagttactggtatggtttgcagttgttgtgctggcatgtgttgttgctttgacaagtattggcaagattcgcacctctgaactaactcggctgcatcattctttgctgttggccaatagaatcctgacctgaagaccttcccgactagtgttctggaggctgcatgtattccacattgcccagcatggacctcctccagaagttgcttccacgtggaagggaggatgcacttcatgaagacacctgacgcacccc

SEQ ID NO: 123630 - DNA, 349 bp, Zea Mays
tcattatcgtgtcgggattttctttgttgttcttgataaaatatgtgttgagatgaataatcgatttggagaatccactattgagatattgacatgttctcatgtcttgatccaaagaataacttctctaggtttaatatagatagccttgttcgaggtgctcagatttatgatgctgatttctctactagtgactttgcacaaattagacaacaacttcagacttatattcttcaagtaagaaggcatgtggcattctctacttgcactgatattgctagtttggcttctaagatggttgagacagagaaacataaggtttttccattggtttatagatttattgaat

SEQ ID NO: 123631 - DNA, 570 bp, Zea Mays
ctcaattgtgacatattccttaccaatcaagggtcgaggctagagaatcatctagagattctagtcacgtggcacgaataaccagaatccatgagccacgtgttctctaggcctccgttctatatcaatagaaagacacagggtgagcaaatggcacaacactgggttagatatttgccctttaaaagtgttagggaaaacaccaaacatccccagccccaaagggggtagtgatcaccacaagaaggaaactgtggatcggtagagaagtcggagccactggcacaggttccttagccatatggcacatgaccaacaccccacgaggcatgaccaacctatggtctcactgcttgagtcctaacagcaagacgcaaagcacctctaggcctagcaggatgtctctgaattggaggatcatgaacaccatgagatgggtggttcatgttcttcctgctcgacttagaactccactgctcatctttcttcctcccaaagcaaaacacttccaaatgcctttacatgtcacaatactcgcaatggaaccccacctctctcttgggttgtcac

SEQ ID NO: 123632 - DNA, 570 bp, Zea Mays
cccgagctagtcgagtacacagattgatagttaaacaattcgagtgcctttgaagtctttttattgatgatacatttctcagcttacagagttcattgtcatcccggcagcctttgagatatagctaggggtaaaatttcctgaggtgttctatgttccatgagttcccaatttccgtgtcgtccatctgagtgagacgatatgatcccggccgagtgacttctgctactatgaatggtctttcccatagatgtgacaatttgtgtcgtccctcccccgttaaaattcggtggaggacgagatctcccactgcgaaggatcgatgtcgtatggccttatcatgatagcgcctcagagtttgctgatatcgtgctgattgaatcactgtattcagtcgctcttcttcgagtacatcaacatcctccagcctaatagcttcagcttctgttatgttttcaaagattaacctcggtgccccaaacttgagatcagcaggtagcactgcctctgaaccatagaccatgaagaaaggtgtgtttccatgcagagctcgactaggttgagttctca

SEQ ID NO: 123633 - DNA, 522 bp, Zea Mays
gtgccctatctagtgcggtgtctggtgaaacaacgatgacattaaagcaaatgtgctagtttacatgctctctgagtcccctggtcagtccacaatgtagtgttgtgccaactagagtggtactcacgtttccaacctcttgcttgcctttcatcttggacaagttagtgataagtgttctgagtgaccacatcggaagcaaccttccttgcccccactaagccaccgatttacgtggttgttgtgaaaccgcataaattgactggcaacaagcatcaactcctcgtccccaagagactcaacccgctccttcgaaataaatagtaaagaggacaaagcaaacatagcatatgaagggttagctgaaggaggacaacctaagataaggttcatgttgggtgtgtcgagattctaatatcttggcccaaatctggaagtcaatctatgtggatttgagcttgttgaatagctcatccagggtgagggtctcatggtttggtgcctcaataatagtatagattt

SEQ ID NO: 123634 - DNA, 303 bp, Zea Mays
agtatcatacttcatatatctctggagattccaaattttgttcaaaatggcactggtactagaatttgcatgtgcatgtatcaatgtatagtaaagtaattttctattaatactgtgtgcttcttttcaaagaataatatagaacaaaaccaaattatggaatagctcttcatatgtgtacaattgggttgcagtcaggttagggcttgaattgaaatttggaacgacagttttggatagtaaagccatgaattgcatccctaggacccatacatatgaaagcgctactattgtaaatgtgag

SEQ ID NO: 123635 - DNA, 283 bp, Zea Mays
gctgtgggctagtagaacccagctctgaaagctttcccaactagtgttctttatgctgcatgaaccccgcactgtccggaatggatctcctccagcaggtgtttgctcatagccacatcaatacacctcataaaaactctttcaactccacgcttgtacaagtcattgccaataagaatgtagtttacagactgtcaggcgagtcgttcgacaactgccttgtcatctggctcttcctcattcttgatatatttgataatagggatcctccagtcattcagat

SEQ ID NO: 123636 - DNA, 875 bp, Zea Mays
cccatttcgatttcgcatagcgttttccctatctatcgcattggctggcgcgatttggagtgaattcaggctgcagtctctggtgacagcttgtttgttgagattggaactttttcgttgctgcaataatgacaaatgtgttcatatatgaacaatctttctgtatcattggtctgcggtttaactggttaccactttgtactcttgtgctaggtgagtttagtcttcctatttggagttatagtgtcgcgtacaaaatggcatggtttcagggtcctgttcttctggatgtgtgtcagtgtgtgtgatcgcacttgcatatttgtttgggcaggttcagcaaattgtccgcgaggaggagtgggatgccttcatgagtgttctacggaaaccattaccagcgacttttagaatcaatgcctggtaatgctggttactctgaagtgaaatcatgaattttcactgaggtcttaatttacttgtcggattccttggcttgagtaactccacatggaccactgtcgtcaaagatattcatgttctcttaaacgtgatgcccatcccttcttctcgtcctgcgcccggagccttttgttatcgaaggctggctgctccatgacttgtatatctggttaatctgccattcaagtagtcatgtgcaaatgtggtattagatagtttatttgcagcctgcgctttatggtactccaataagggacctgtacttctgaactatcttaggaatgggtgattgtcacttattataagactcatgcagtttcagggtaacttcaagtgtgccattaccaaacctttcagtgtaattactgccaaaagtttattccattaggcaataccatgctattctcacaggt

SEQ ID NO: 123637 - DNA, 683 bp, Zea Mays
gtttgcggatgataagctgagctgaagtttagcttggtatccatggactcatgtagtcttttccaaaagcgcgagataaattgggttcctcgatctggtacgatcttctttggtactccatgcagacaaacaattcttgacatttataactctgctaattgggctcccaagtaagttgtcttcacagatataaagtgtgccactttagtcaacctatccactataacccatattgaatcatagccatcccgagtacggggtagtccaactatgaaatccatactgatttcttcccatttccattccggtacttcgagaggttgtagcaatcctgctggtctttgatgttcaactttaactcattgacacacgtcacatagtgcaacatgagtagccacatctcttttcaaaccgtaccaccaatacttttcctttagattctggtacatcttagtacttacagggtgaatagaataaaccgaatcatgggcttcccttaaaataagttggcgtaggtgctcgatttctggtacacagattctctttttaaaccatattgtgccttgttcatattctatcaaatctgggctttacccaaactaatttgtgtcttaatttctttgattttctcatcagactcttgtcctttacgaatctcttcttccaaagtagattcaacttcc

SEQ ID NO: 123638 - DNA, 679 bp, Zea Mays
tgtgtgtgtgttttttgtgtgtgtgtgcctataagattttggtaggatctttgataattagggaggtggaaagaaccaaaccgtctaatttaaagggtaaattgagcggggtttctaaactagcccttaggtagtagataaaagcaatgttgatctcggtcattttccaactgtcatggtcttcaacatctcttttacttgtacaagttgcaggggtcttctcgaccagccaggtcgtccttctcactagcttcatcgaagaatctgagcgtgttcttttgttacacaaattaaggcataggatcctcttcattattgaccaatagtatcattttacaagataacagcgggacatggctcgtagtgggggccgttagaataatcccggtggttaatgaccttggcatatttcctagtctaatcctgtctctgaatcttctccgttgattgatcgcaccgtcatgactgcattgcctgtcgatccatctgtttctcatcgaatactttatctgagtcgtttaccgtcctccgcaccgcacgcgcgcacacggagctgagcacgtgcgggccatagcgccactcgcttctgcaatgtacatgaaaaaaaaaatgaagtgtcataatccacacgaagcatgaacaatcgcctctctcgctgttttttcttcttcatataaac

SEQ ID NO: 123639 - DNA, 397 bp, Zea Mays
gtgagatccacatggagctgacggatgcgcttctctgcatcttctgctcgggcaatcatctgacggtggtgccgagccaagaaatcatactgggcatccagggtgagcaggtatgcagtgaggtacacgactgtggggtcatcctcaagcagctgctgctcgtccaatgcacgcatcctggccatccaaactggacggtttctctgaaagggcggaaagaatctaagcggtgtgtcggccacttcttcttcatagatctgacacagagccctcaatgccttgcgagcgacgacttggcaggtgtctctgaatctgtgcccagcagcagtgacactccattccacatggtgtggactggatccaatgtatacagtcacaacacacttctctgtgccat

SEQ ID NO: 123640 - DNA, 683 bp, Zea Mays
agcacattacaacgttgggtcaggagcgctgtggacgatatcgtccaccgataacctatgaacaacacaccttgccgcattatcatagtactccaacatctccttcaggcccttgtccggtaaggccaagggagggccgacgacatcctgtagttcacagccaatcttgagctcccagacgagcagcgctacggcgacacctcggtgaacgctaagagcaacgatgccccggacgcgatgcgggatgttgtctaagtgctccactagagaggagccatgagccctcacaaaatctagagcccgacccaaatggaggcgcagctcctctagcctggcttccaaggctgttagaagagaaagagataagggcaaggagaacatcgaggattctaagaagcaggggataagtgccttaccagccgcgcggccatcagactaggtaagttgagatcggagcagctcgacctcggcctcgacagcctctagcgccgtacgaaaaactccataactctccagagagaccaaagggagaggtgacaacagtttcgaccacgacgagccgacagatgacccctcggtggaccccatttgaagcaagggcatgaggatgaaaatcccaaaggtaacgatagacaaacactcgcttaagccccgccttaagtaggaacaggccatgcccaaag

SEQ ID NO: 123641 - DNA, 518 bp, Zea Mays
tggtgtttcacgctaccacaatctagaatttccaacctttgatggcaaggaagatcccctcggatggttgaatcgctacgagcagttcttttggggccaacgcacgccggaggatggcaaggtgtggcttgccttttaccacctcatgggagttgcacatacatggtacttcatggtggagcgcgaccacaccaccttgacatggtcccaattcaaggagctctgcaatgaccgcttcggaccaccgctccacaataatgcattcggcgagtgttagggcgaaggcgaaaccagacctcgatcgacaactttgtaaactctcttcggccacaactaaccttgaccgaatgcaagaccagactaaggtgaaggctaatgtggcggctgaaggcgaaggcaacgacgaggtcccctcagtcgtagaaagagcgaaggccaacacgggggctgaagacgagggcccgcgtcctatgaagggctgatcaaggaagcgaaggcccctctcagcgagggctgcg

SEQ ID NO: 123642 - DNA, 500 bp, Zea Mays
cgcctaccgcgcctaggcggacgccatactcaattttacctgggtggcgcggacgcctagcaaaaaatgtcgcctggacgcctaggcgacaccttttaaacaatgatagtaggtgagcccaaatttcattactacatcacaacctaattacaagaacccaacagtttgaaagtcaaccgatcatatcatcagcacaatttgttagaggaatggcaggctcatggcctcatgcaacctttttcttgctactgcctatatcactctacattagccatgaccatagaagttttttagaggaaaataacacatggctgcccacagctgacagcactcctgcattttgagaaaaaaatattgatttatacaaattcctaccaactaactctaaaccatgatgctttagttttgttatgattctagtagcacatcaaatgactctgcgatgtatggccagactcttctatcatgtgtagcacatgaatggtagaaacagatctgac

SEQ ID NO: 123643 - DNA, 706 bp, Zea Mays
ttcgaaccaattgctttgcatttatcgatggtcatatctcatatgtgcctccatacccataaattccacatgggtagaacttgcttgcatgcactgtattgaaatgttgtttgtccacagtattaagatatttgttggcttctgaaaaagcaacggttttatttgaccttggtagctccctagattgcacccgagatgcatccacgtgactccaaataaaccacgtgactccaaataatttttatctcaattttagggaaaattttatgcaagtggcattgtggaaactggaaagttaatggtaggccatggtataattcaattaagctaagctgggaaagtatctctttccattattctcctttttatcattcatctgccatttttttatatgaatactactttatgcatttctaccatgtgttcctttacaagaaattgttccttgcatgttgtttcttcttgtattgttttttcattcaaggttgaatggaaaaactcttcttacctgcagaactagaagctatttgttcatggagatgaaaacaatagatgatcataagctgatcgctgcagttactaccatcatattagagctaatcgaatgggtagtggcaaaaggataatgctggatttgagaaattctgatgtcttccttttgggttttttatgtctttgaattgacgtgctgggtagtgggtactca

SEQ ID NO: 123644 - DNA, 549 bp, Zea Mays
caattttttgacatttgtttacctagagggagggtgtggaaataaatcttcatcaacttcaagcgcatggtacaacacagtagtatcatgcatggagccaggttgtccaatagattcatatataaagcgcatatcaaaatcaacaactcccatcacattttgagtaggtttaccagatcttcccatgaacctgatgaagtctttctttggaggcgttgcatttatatgagtgccgtcaattgctccaatacaacccttaaagtgaggccacattctttgatcattggtaattcttctatgcactgtatggaaattagggtcctttggttgtatgtacctttttgacattgctaccatgcaattcaggacgtcactgaattttctgctaattgtttcattagagtgcttgaaatccttttggacggcagtgaatgaccaagcatgaccacaaataacaagaaacaatcctaaagattccatagagctcatatggatggaagaggatagaccaaagtctcttaccaactcatcatgcaaattgtataatag

SEQ ID NO: 123645 - DNA, 536 bp, Zea Mays
attctctctctcgtctcatctccatggcgaggctctcggcgtggcacaggggcgtcgatgcaaggaggtcaagaggttagcagcaccgcaacagttataacccaaagcggttcgaccgtctggctccctgctgaccgaatcctaggtagttaggcatatcttctcctaataacaaacttctgttgtgcctaccccgagattcgtggcgagaagatgcacaggaacacgaagctgtcatcagggtccctcatgctatcgaccccacgtggacgcagcacgcaccgagcgaggaacacccaacgcgcatggccaaaggaaaacggatgcagattcccacgtggagcccacacgtcattgagatattgatgttttcatgaatgagcttgcgatgatgtcattcctggcaagcaaaaagatatacgtatgaactatggccaagggtaaatcaccccacacggagttttgtttttgttttttaagatttcagtttatacttctttaccaatattcaagcctaaagttgatcaaaataatag

SEQ ID NO: 123646 - DNA, 851 bp, Zea Mays
gggaaagggagatgaaggaagactcacttaattccagattacgctttgctgccaatcgctgcgctttggtcaaaatatcttcatcggtattagtcctcttcgcacttataatgagatcaccattattaagcttttcagatttcactctcttagaaacagaattagcccccagtgcatcctgcaatgccaccattactttattatcagattgagctcttaaggaaagagcttgtctcatatcatcatttttagtgttggctttaatattaaattctttacataatacctggagaactgagcgagggacccctgcaaaggaattaacatgtcccagataacagccactcgcttgagtatctgatacaaagggcagagtaacagactgatcagatacctgaacgggaatattaaacaaagaaggagaaacaggtaaaatattctggtgaattagtaagttaccagcagctttaaaatgatcattatccaatccgactccaacctttggctgagcatagaccgcctcaccatccataccggcgaccattccagcccgagatgcagtctcattcaggaacaaacggttggctgcatgtcctgacaaggtccacgcggcctcactctcctgtgacatgcccgcaaggaaagagcaatggggatccagcacgagccgggatttggacttcccatcatcgctaccacagcctggtgactgatcaagagcgccaggtgtgtgagtggaggcatattgatcagcaaaaggggaaatggattgtatggccaaatgtaaaataagtcattttgagaccatttgattgtatccacacgtactacaaaaacgaccgcgctcgacg

SEQ ID NO: 123647 - DNA, 306 bp, Zea Mays
gaaagtatcttcctctcatggtgtcaatatgactttgtttaatggtcgattttccgaagatggtatggcttggccaccagggccggtcctcagaatcttcatctccactttccacatcataatcatcactgtcatcagaatcttcagacaaatcctccattatctccttggtaattttctctgtattcgttattgtcatagattcataaaatccagcaataaaaggatctgcaactttcttctcctcatatagcttcttttcctcagtcatcttcttctcctcagtcatattcttctcctcagaca

SEQ ID NO: 123648 - DNA, 444 bp, Zea Mays
ggaaaaactgccctggaacaaggtaaaatctcatctgtggcagctaaaacatcttcctcacaagcgatatggattgctcttacttagatttgtatgcagcactgaggcctcaccaaagatatttaggatgccttttgtagttaacaactcctcagtggttggtttgatgaatagggcaacatcatctgcatatagagatagtctctgaccagacacccctcgattaaaaggttgaagaaggccctcatgctctgcatttacaaaaaagaccgttgagaacatccgttaccaaaatgaagagcaaggggggtaatgaatccccttgcttgggacctcttttatggaaaattacttctcctgacgtcccatttagcaagattctagtggaagaagaggctaaaaggcttgaaatcagattacaccaggcagttttgaatctcaaat

SEQ ID NO: 123649 - DNA, 307 bp, Zea Mays
gaaaactctgccaaagaaaggcacttgtcccaatcttttccgtagtgcagcacacatgcccttaacatgtcttccaaaatctggtttaccctttctgtctggccatctgtttgaggatggtatgctgagcttcgtactacatgggtcccaagtgattcctgcaattgttccgaaaatcgcgccacaaatggtgctcctctgtctgatactatagtccttggtatcccatgcaaacgaactatctagtcaatgtagatttctgcatacttctctgtcctgcgggtggtatgcactggcaagaaatgag

SEQ ID NO: 123650 - DNA, 514 bp, Zea Mays
cctagaacgagacgaagatgccgctcatgctcttcctccatttttgaataaatcagaatatcatccagaaacacgaccacaaagtcgtccaagaactaatgcaacatcctattcattgcttccataaaagcagcagggggattagttaagccaaaagacatgactatgaactcgaaatgcccatacctggtgcaaaaagctgtcttctcaatatcctcctcacgaatcctcaactgatgataaccagagttcaaatcaattttagagaacacctgggcacccctcaactgttcaaagagaacctcaacatgatgtagcggatatttattcttgattgtcacttgatttaaagcacgataatccacacataacctcttgcttttatccttcttctcaacaaacaataccgaggaagcccatggtgacctgctaggcctaatgaaacccttagccagcagatcatccaattgccgcttcaagtccacctgctcctttgcagccatccgatacggag

SEQ ID NO: 123651 - DNA, 727 bp, Zea Mays
tcgttggaccactgcccatagctcaagggaacctcaagttcaccttcgtcgccgttgaatatttcacaaagtggattgaggccagggcagtctccaccataacatcgaagaccgcccaaaaattcttctggcaaaacatcggctgtcgcttcggagtcccatccgaactcactgtcgacaacgacaaacagttcgacaaccaagagttcagggaattctgcagttccatcggcactaagcctgtctttgcctctttataccacccacaattcaacggtgtagtcgaacgcgctaatggcaagatctttagcgccatcaagaaaaggctccttgacgataaaaagggaaaatgggccgaccaattacctgaagtcgtatggaccctgaatacgacagagtgccgagcaaccgggtccacacctttccgcttgatgtatggatctgaagcaatgatgccgcaagaattaaagcacgggtcaccccgaacaaacaagttagccatacccaaagtcgacgaaccaacctccaaagatctcatcggcggagaccgtgttctcgccctgcagaccctcaacaagtaccaggtccaaaccaaagcatggcgcgacaacacaatcgtcccaagagaattcagcgaaggggacctcgtacttgtaaggaccacacagatagagtctcggggcaagctcgagccgaagtgggaagggccgtacatagtcaagacaaa

SEQ ID NO: 123652 - DNA, 320 bp, Zea Mays
gtcggccatttcttgcgatatcccagcactggagccttcatatcttttctataagcaaagttgtagcacccgaagttcttatggagaccgtctgaaggcctcgacttcgtctgataatgaagctcatgtactctacagaacccttcgacatttgcgctcataccctatcttcgcagggcccatatataaataaatattgagcctaacaatcgcatttggtgttaactaatgtaagtatatttcaaatttcttcaaaactttggcgatcatctcatacatcgaaaagtgaagaccaacaggaaagaagcttctgaacacaa

SEQ ID NO: 123653 - DNA, 411 bp, Zea Mays
aattgacaatgcaaaacagagtctgtgtatgatcaaatctttgttgactgagaagcaaaacgaagaagagattgaacagagaagagaactgaaggtaacctttcaggacaagagaagttatccagattatgtggcctatcttttggtttcttatgtttaggtgttgttaatagttatgagttccatttagataacatgacaaacattttcttgcaactcattgtaaaataattctagtgtagtatctgttttgttgaatatgaaaatacattttcgtagcatagaagttgctggaataatatactagctttggtaattcaagccgaaagctagaataggaagctaaatcaatccacatctcttgtatttttcttttgtacaggatgccattgaaattaagctaagagagga

SEQ ID NO: 123654 - DNA, 1323 bp, Zea Mays
gttgttatacgagaactctgcgtatggcaaactggactcccaatttctgtcaaatgtcaacacacaggctcttaacaaatcctcgaggaccttgttgaccctttctgtctgaccatctgactgggggtgataggcggtgctgaagtctagcttggtgcccatggcttgctgaaggctcatccaaaattttgaggtgaactgtgtccccctgtctgacactatcttccgtggaataccatggagtctgactacctctttaagatatatccgggcaagggtggctcctccgaaggtagtgttcactgggatgaaatgggctaccttggtaagacggtcgattatcacccagatagaatcgttccctttttgggtctgaggcagtccgattacaaaatccatgcctatttcttcccacttccattcgggtactggaaggggttgcagtagacttgcaggcttctgatgctctgccttagttcgctggcaaatgtcgcaccgggccacatactgtgctatctctttcttcattcctttccaccagtatctggttttgaggtctaggtacatcttggtggtccctgggtggatagagtaggctgagttgtgagcttcgtcaagcagaacttctcgtgtctctccttttggtacacacagacggtttctaaaccaaaggactccttcatctgtcccgaagtccggaagttgctctttgcgagttctctccatgagacttgttgtctcagtgtccaagcgttgagccttgcgtatgaggtcttctagcattggcttgacttttaggctaccattgtctcccagacaagtgttcagttgagctgattctttcttccagtcttccaagaagttggtttctttcttcccgaaaggttttcggttgagggcgtctgctaccatgttggtcttcctggggtggtaatggatctcaaggtcatagtctttgattaattccagccatcttcgttgacgaagattgaggtctggctgagtgaaaatgtacttcaagctcttgtgatctgtgaagatgtgacatttgttcccaatcaggtagtgcctccatatttttagggcatgcactatggctgctaattccaaatcgtatgtgggataattctgctcatgcggcttgagtaggcgtgatgcataggcaatgactttctcattttgcataagtacacaccctaaaccttgccttgaagcatcacagaagatgacaaaatcctgatggatgtctggcagtgtcaaaacgggtgcggttgtgagcttcttctttatgatttggaagctttcctcacacttcgaggtcca

SEQ ID NO: 123655 - DNA, 360 bp, Zea Mays
atgggcactgttatcaggggatttgtaataaccacatgactttttctatgagaagcctcaacaatgcccacaccagcccctttctcattcgacttaacatcaactggctgcacattggtatcaattttggtagttgcacattggtatcaattttggtagctttctcatctgacttaatgtccatatcttttgccagaaggttgttggaattcaaaaacttctgatgcttaatagtcattgcttcagccaaaaattttagagaatcgatgatagcttcagtacaccttgacttgcaaattgaacaacaacccctgaccttgtcacacagaacttggcaagtactatcaatgcattcgacat

SEQ ID NO: 123656 - DNA, 480 bp, Zea Mays
atgtaattgtgctatgtttgaactgatcgttctgtctgcagggtgctaaaaacacccttgaggatgtgaacgagttattttctttgaagtactccagatttgagttgactattttgttggtagggtatagtgatcaccctgagtcgtgtaagtgtgaccatgccacaccgacttaaggcgtttccgacttaagccgattgctccattagtagggtatagtgatcaccctgagtcgtgtaagcgtgagcatgtcgcaccgacttaaggcgtttctgacttaagccgattgctccgttagtagggtatagtgatcaccctgagtcgtgtaagcgtgagcctgtcgcaccgacttaaggcgtttccgacttaagccgattgctccattagtagggtatagtgatcaccctgagtcgtgtaagcgtgagcatgtcgcaccgacttaagacgtttccgacttaagccgattgctccgttagtagg

SEQ ID NO: 123657 - DNA, 356 bp, Zea Mays
acaatgattatgtagtggaagcaatggatggaatagtggaagctggaagccgcaaggtgtacatgagcccaaagttagcacatcgtgtgaggaggctccaggtggctagatccttcatggacaggccaaagcgtcaaattatcagtgataaactcatggacatataaaagcttatgaatgatgttgggggcgacaataacgtttcagaagcgaaaggaaccaataaggaccgaatcacctactgaggtgacccggcaaaggtgcccattgccaactacgatagaagaaagatgagatgagtgggtgtgggaagaatcaacatgtggagtggtgtgttatgaggcatgagagtcagc

SEQ ID NO: 123658 - DNA, 446 bp, Zea Mays
atgggatcagcagagtggacaaagacagggggatggcccctcatgaactctacccgcttgtctctgggcacttgtggcatttgaacttgcactggaggctgaggtgggggtggttgctgctgcacctgctgcatcactgctaaggtctgaccaattgcctaaactgcctgagtttgcatcatgaacatgtgcttgactgtcatcgggggtggcggtggcaactgctgctgctgggctgcatcttcctagggtgtctgttgttctagcttagcacgcctcgcacctctgcgcctgaactcagacatctgtagaaatcacacacatatcatatctgactctgcaagtctttcagcataagaaaagatatacagaaatattcatagcattgaacaattgatgatcttcactgacaacttctcagataaagaggaaagtggaaataaatg

SEQ ID NO: 123659 - DNA, 332 bp, Zea Mays
caccgtgctactaaagtatctcctttttagtttgtttgtttatatgcaacaagttgttttgcctatgcaagtaagcctaaatgctatcaggttcgctaggcaaaattacctagatgttgatgattattatgatctgatgatggacaatattgataaggtgaccgacaagaagccgatggctctaaaggagatcgagaaatacaagatcatggttgctaaggtctacaacagaaaggtaatgccgggtatcataattaggggtaccttgattacgtccctaaacgtgcttaaccccgaggttgtcgtgaggcactcttgaaagggaaatgaac

SEQ ID NO: 123660 - DNA, 482 bp, Zea Mays
gtcatcagagtgggcccaacggcttgatcttgatctgaggtggggcggaggcgagagaaaagttaagcgattcgggggagggagttcgtacctaggggcagggcgtcagagcttccttgtgtgcacggaggggtccaggaggaggtagcagggcatcgttgtgtgcacatcaacggtgcaggccgcggagaagcaaacaacacagagcatgaaaatggtacaatacgtaactacatatgttgtagtgtatgcccctgtattagtctatctttctcatgcatctattaaaagaatagttacacacttaaagaaaatggcacatctaactcacaatatccaacaattaaccctaatccacttcgtacgtaaatgacaggaaaaaaacaaaatgatgatttaggtctgttgtgtggcacattaatgatcgggtcgcatgtggatccattttaatatatatatcaagttgtacagataagttttac

SEQ ID NO: 123661 - DNA, 399 bp, Zea Mays
ggggacgcgagagaaacaggagagttgatctattaacgtgtggatgcgatgagatcggtgtaccgttctgatgcgagagatccgggtcgttcaactcagatcgggtggaccaagatgggggttgtggtttagaaatctggaccactgatctagcgaataacggtcctgagtagaagtgtatgttgttactctcaattaaacctgagtcactgatctcagatcctacggttgtcgttgcacatgggtttgtgggtgacctagatttaatcctgaccgcacgcgtgtgatcatgcggttgagatccaagaataccccttcaactgggtattttcttaaagagaccctccactttaaacttttcaacccgtagtccaccccagctgtagcctgagccttgag

SEQ ID NO: 123662 - DNA, 459 bp, Zea Mays
gggggattgccagcaatggcactgctgctgatcggtagctactgtcgtggccagttggtcaggaggaagaagagccatgggtgccctttgatcgtgaaatggatgctcccaattagataagagaatacctcttcgtttcgttaaaagggaatcgtttgatcgtgatcctacggttcaaaataaatcacgccttcattagatctaggccgtagatccatggatcaagggttgcagttacttaccccttcgttgttatatcccatccatcggatcttgatcggacgactgacaacagaagataccccttcgccgaagattttgcttaagacaccctcggtttcatcagattaaaacccgccatccagatttccatgattaagtcctcagttgaatacttaaattacaaagtagtccctagaatttgcacaaacacccctagaagctatttcgggaataaaa

SEQ ID NO: 123663 - DNA, 400 bp, Zea Mays
gtttgggactgttctgctacaccgacttcagttttgctatatcaactttactatagagcaactctatcctagctccaacaattaagattttgttgaaaaatatatatgttacccaaatcctcgtgcctcatcccgagcgtcatggctatgatatgaatgaaggccaatacgcgcctcatatggtccttgtccttgcctcatggcttcttgattgacgtattctgctagatgctatctaatcctacactacgtaccagctgtctgctggagacggcgcatggtgagtcggcgttgatgtcgtgggtgtggatgtgctgccggggcagcgcataccactggatctccacggcacattcggacggtagctctagcccgaaatcctggtgcgcgcggatctcca

SEQ ID NO: 123664 - DNA, 310 bp, Zea Mays
gggtgaagggtcctctcaaggatccgagaagcgggcaaggttggtgatccgtccctttaacccaaatcactcttttcctcgtccacctgcctatcctttcaagcaaccatttttcatccgtcccactagtgcctctactcaaactattcagccgagtgcccttggtactcgtttcctagtcctacccagttcatctaacaactgcttcaactatgggaagtctagacatttcatcaaagattgtccctatccaaagcaaaataaatcaaacttccaaaaggcttctggaagcacatctcaaggcaaggga

SEQ ID NO: 123665 - DNA, 348 bp, Zea Mays
gcaattttgggattaccaattattttctaaaattccagaactaatgttttaagctactttaaatgccttaaaattccttatttaacctaaaaatcatgaaactgtttttattgatttctatgaaaaataagaagcctaggaaaattggtttcacaattttaggatttttctaccattttctagaatttatttggttctggaagaaaaagaaaaagacaaacttgcaacagttctgggccgaattcaaactaggaggcccaacagcacatgaaaccggggcgcgtgcctgcgcgcgcccgcacgctctggctattttgcacaaagggcctcggtttatcagctaattcg

SEQ ID NO: 123666 - DNA, 450 bp, Zea Mays
gtccgctcaagcagaagtgcacaaagctgaagtgcaagaattagaaaagaaacttgtcgaagcaactgaaaattttaatgtagagctaacaaaacgtgaaatatctgatattgaacacgcaagggtatagaaaaatgttgaagagcttcgtcaagctaaggaagagtgctataatgttgctacagaatgtgctaagaatttgaagaatagcttttctaaagtggcgcattttccatagagcagaatttcatccgcggtgattctgatgggattacccgctgaattaacagcgaaactgaagctttcaaagaaattctcagtgacagaggagatttttgtgccttcgtcagcgtccgaggggccatgtcgatcctggaaaaggtcggctctgaacatactaaggctgtggttcagccaggattctcgctttcagctgatgacattaaaaac

SEQ ID NO: 123667 - DNA, 478 bp, Zea Mays
cttaaagatcaaaggtagagaattgtaggggataagatcatcggttcctaggacccattggttagtaagcgtgctagggaaaagccttttggcaactagggcccatcagacagctggaggaggtaagtaatgtctatcctagaagaacatgcccctggacgagccccatgacaccgagcctggggtcgggcatggcggaactacataggggggcaggtgagccaaagggaatccactcgagtggatccctcgctcgtcctgagaccgacccgccatatgtgaccagtcgcattaactgcacctggcattgagccacagcaagggtgtcggtccgcctcccactcatgacctacaagctcctcaagctatgacacactcaaactgcagcgcatttatgacccatgtgccccctcgacatgcggcacactcttgacctatccggactaggcctaagtgcatagaccacaagcagggcaca

SEQ ID NO: 123668 - DNA, 338 bp, Zea Mays
tgcaggagttcttggagattcaaagaaggtgcttagtccgggttctagccattcaaaattttcttttatggtgaggatgttgtatataaagtctcattgtcaaatctgtaatacaacattatcagcaatgatgaagctgatgtcagatggataccctaacagtgagttgccaaaatcatatgatgaggccatgaaatattttaaagaattgggccttggatacgaaaacatccatgtgtgcaagaacaattgtgtgttgtttcgaaatgttaatgctaaaatgaatgagtgcccagtatgcaaggagtctagatggaaagatgaaacttgttcgaagc

SEQ ID NO: 123669 - DNA, 737 bp, Zea Mays
accaaacttgtcaaaggactatcccgagtcaattcagtgactataagtatttacaattctgagagatgtatgcgacataagcatagatgtcctagatagaacgagtaaagtggttcgacgggaacacactatggtttttacaccaacatagtgaaaaaattctcagaataacctctcggtatactcgtaacttcgtgttactggcattatatgtccttttatctcatagtttgcttcatgtcattcagcgacaaagagagcaatgtgctaacatctggttgagcaatgtatggctgagatttatagtcttaaatcatttggtaaggccttttgcttagtaacagaatcccaatttatgatgtcttctatgccaaaaaggctttcatgcattatattatatatcttcgggttactttgggtaaaactttatgcatgaggagagagcagaaaattaacttatctgtgtttaattgtatttcaatttaatttctcagattttcaagcactatagagctcgatatagttgttatggccacttggtgatatatataaatatatgatgccacacaacacaatcaaataaaatatagaaccaaacaaaattgtttatgaaggttgcacataatatgacttcagggccttgaacgacccaccacaatccacgtgagtacaagctttatcgtatctggcgccaacgtgtgtgtggtcatcagggctatcgcagcatagcaagcctt

SEQ ID NO: 123670 - DNA, 368 bp, Zea Mays
ttgcatagttgattttatatcagaaatgcatgatgggccggagaacgtaccagtaactgctcaagatctgaaaaacatgtaagcaatacttttttgttacatgtgtatatatcaagagccatgaatattactatagcaaatgtgtgtgtaataattttttgtgcaaacaaatgtaggagggcagccaggagaagagaaaactgcgcaaatgatgtagccaaacttttggctttctttagagaatgcaagaaacagaatccacaatttttttgtgattctcagctagacaatgatgggaaaatagtgagtattttttggtcacacgcaagtatgcagggggaatacgcagattatggtgatgttgtgac

SEQ ID NO: 123671 - DNA, 1105 bp, Zea Mays
gtcatgtaactaatgatatggtggataatttttgtgtaactttatgagaagatataaaaaacaatgtttttaaaacaccatttgaattacctgtttgatagaagaagctaaaacaaacttaaaactcctgaagtaaagctcttccaaataaggcttaaagtcagctgtttggactgttgtagctgttaacactgtagaaacagtaaaagccggtacggattaaaaccaaacaaacggtcttagtcttgtctgctgctcctgctgttgactgttggggagtcccgtaaatgtttctggtatgtgatatagatttctggagactgaacggaatggtatgtgatatactggtacgtggtcacgtctggaataacctttgagtcagtttctcggttggggagactgcagtcgtcctagcctcgggtgatcgttgtgcgcgtgacaatgtttgccagattgaccgagttcggttgcgtttgtataaaaaaagattggaggagattaaattcctctctaattaaaattgaatagaaaagaatctgttccctcttatctatcttcgatttagacgcaacctgttagctacgtagtagatctactggggttttgacagtggtggcggcaacacagccgtatcgcgatcaggtacgcggttctttcgtgttccagttccaccagccaaagtctctcttctccattacaacccaggcttttatataattgccatgggctgcccgttacatgggcctaattcatccacacattttctatatactttggattcggccttttagcccgagtgctcctctttgcttcctgaacctcagcgtccgcctcttccatcgcagcatccttcccggtgttcaggtgccctgtgctgctaacatccccttccccttgacagacagcttgtccccaagctggagcccgtgggaactgctgcttgatggcgtgttcatcttcccaggtagacaatgaagccggccagttagaccatcggattaggagttgaggtattaccttgttacctttgcgaagcagcctagactccagcacctctgtgggtattttcagctcctgcagcaggtctggcatggttgcatcggtt

SEQ ID NO: 123672 - DNA, 768 bp, Zea Mays
gttgtgtgcactctccactgcccagatttgatctatgaattttggacagtttggactggaagtttggaactggttgctgccactagacgtctagacctggaggctggagcatggaccatggagacagcatgactgtgaaccatcgttttgttcttgtgaagtgtaatgtgatggcacttgtgagttgtgaattgtgagcaggctgcatgcaacagggagtcagggagcaggctgtcgagagtgactgtgtgagtgcagactgcagagtgctcactggctcactgtgtgactgtgtttatggctgtaggaagtagaacctattacctatggctgcgatctgtcatctgtgtggctgtgtttatgaatgcactgaaatgtgacattttgttgttgacactggacagtggacttgtggtttactgccttactggtttgcacttgcatgttgcatttgcaccagactattagcgtattatgtatctttgtgttagcacttgtagttgaaaacttgaactgattagttatcaaatattctctcaagttctatgcaaaattatgtgctatttaagggtatgctgtcattttatatattttgggtactttgggtaatacccgaacccgaacccgaaagtttgggtacccgaaattgcgggtagtgttttttcaggctgctatcgagtatcaagtttcattacccgaatttttcaatacccgaactacccgacccgaactaaacgggtaacccgaatgcccagtcttagatatgat

SEQ ID NO: 123673 - DNA, 1032 bp, Zea Mays
gctgactgctgaccaaaagaacaagtcgggatggagtagtaaaatatctgttatacaaaagcagaggaggaaaagaaaagataggcgtaggataagctggcaaggcacatagcatttcctcgatttgaggggatcaagatccatcaatggacgatctgaagataggcctgaaaactgacgacaacacctagtcctgaatgataagacctgaattattggaggggactttgcttgtgctttctccacatgcatagatgcatgaatgtatcagatgcctgtccacaccagtcttcaaagttatgtcacatcacgaataaaataggtagggaaaagcaatcctgtacctccatcaagtgatacaataatgttagataccataactagcttatcctcttacacagtttactgtagagtgatttgtgtgcaatggaaaacataagattaaaatgccagggcagatgactagtactagcagtacaccgtgatgcatgctttctttttctaggccaaagatgtacgtactttaagactttatcaagtccagcatttcagattaaaatttagccccaccttttcatttttgcattgtacttgctgcatgctgggccctgaacttattttagtattgttgagtataatatgcgatttatattatgactaatagtttaatgtttgtttcctgatgggctaacaaaggttacactttaagaattgaagtcaacatgatgacgctaacatgtaatcaaaagtaggtaaaatatattcacgattgagattttttttgcacgctccccagaaactcctttttttaagacatctctcctgtagcttgtgttcaaattaagactacacactttttaaagtagtactctgattgaccagaatatggattacatcttctattcttattttttttgtggcaaactaagcagtctagaacataacttcggctaaattatattgactatacagatcatctatgtgaattaattcatttctgctccttgatgttcaaaagatatttaagtatgg

SEQ ID NO: 123674 - DNA, 568 bp, Zea Mays
caagaacacaaaatcgcacaagaggtgtttgcaacaagttcaagagattagaataagaagggagaggaaaaccaaatccatgagtacaagcacaaacctcacaccaaagggctccttcaatcgagttgaatctagagcaagtttgggtgagagaggaagaagaagtgtgcctttgtctcaagttaggtaagcaatgaatgtgggggtgaccaacatcatttaagagagaggtgtggcggtctatatatagccacggttcaaaactagtcgtttgaccagatattttgagctcatggatttccatgccctctcagccctctcgcgggggaaggcaaaaggttgcatcctctcgctctcgctgcagcagctcctcggcagggaactttccctgtcaagaggaagatggagcttttgaccatgtggtcgagccccctctgttcgacgcccccttcgtcactggtctccgcatgcatccgatgacagtgtcacggggcccccgtgatactactactaatttctcctcgaagggagtggactcccttcagaaaataagattcaccaatcccac

SEQ ID NO: 123675 - DNA, 381 bp, Zea Mays
gacgaagccgatgctgccgaaatagtgcccatatcagaagtaatgaagcgatcaggtctagttgtgccaagggaagttactaacgaaggtgcttccaatgccgaagctggacaaactgtggttgagggtgagagtaataatgaaagcgaagaggataacaacattctgaacccggcaaagcctagtcatcttgaatttgaaaaatctactgtaacagaagatgacatgactatgatgaaaaaactgggttatttcggggaatctgagagcaagcttgttcgatttgctagggaagaggtaatttcggagccgagggaggacgaagttattgtctttaagagcttcttcagagaagggcttcggttcctcctaaatgacatg

SEQ ID NO: 123676 - DNA, 416 bp, Zea Mays
tcccacttcgaattgtagaggcttccttcttttattatgatagctcttctacctggcctgagcagcttccaagttcttcttaacgactctgactttatcatcggcttcaagcactatgtcaggtccaaatatttccctttctccagcttgtgaccaatttagcggtgttctacaccttctcccatacaaggcttcaaaaggtgccatctttaggctggattggtagctattattgtaagagaattcaggcaaagaaaggcacttatccacaataaaatccatgctgagttcctcccattttcaagagggtatggggagaggctgtagggtacctgctaccttcaaatgactagccttgattctttggcaagtgtcgcactcagatacatacttagcaatttctcttttcattctgg

SEQ ID NO: 123677 - DNA, 624 bp, Zea Mays
gaggatgccattcctgagggtatgctgtcagagccagctgatggtgatatgatggatgtttgttctgacattcccgatgtgggattagaggtatcccgggcggcatctcgcgcgtcgtcaaccttggagggcggtcttcagtgtcaagaggttggttaagattgcccgactcatatggaggtgactgaaaatccttcagccttagaggtggatattgcagaaaatccagtcctcaagggtgatgttggtggttacccagcccccgagggtgttgccggtagtgttccggctcaggtgggtaacgcaagctataacccagcccccgagggtgttgctggtagcgattcggctccgatgggtggtgcgagctacgacccagcccccgagggtgtccaagcgagttctccttcccatacctccatggatgtccacaccgggttgtctccaccacattctgatggactaatagtgatgcatacttcttcaacttcaagtgagggagtggccttagaggtcggtgtactggatgacaagattctgatatctgctggaggagctgaatcaacccccgacgatgcttttcagattgtcccagttgatcttccttcatcgagtcataacaca

SEQ ID NO: 123678 - DNA, 775 bp, Zea Mays
aaaaaaaaccaatctgtcaaagttccttttgcagcttcgattatcaaagttcagctgcccacctgtagggaaaatttgatgaaatgatgattcatatactaatgccatgtgggtttatgtgaatcaactgatgaaattattatggcggtgctaaccaaccctgtggtgccacccttttatatttatggttgaatatgaaatacagtgaaatgtgtcttagcttcggttaagttcaagtacttattttgtataggatatgtatattgttagaagtctgcgtctcctaaaagcagtttgaaacacaagtttgttattataccaagcaaaaatgttagatattaagtgctaatatgtgttggtccttagttgtttgtgcatgtgatacttgtccatccattctatttttgaaataatcagaaggtggtgcatgccatgcttgcgctattgtaaacaacttgatgtcacattatatgtgtcggatcatcttgaattagaaattagcaattcaatgtccatgtggaactgtttatgcaatggaagaagagaaaggtagcattcaaaagaaaggtgcccacctgatacaatcttcctaaagtaaacttgtcatttcctgcttgtggttttgtaagtgacatctacaagtctcatatgacaagatagccatatccactgttagcaactacatttagtggatcatgtgttgcttctgttaaggtttttctgttgacaaaaaaggacttgcttgtttcattgtcatcttttggagggttctcgt

SEQ ID NO: 123679 - DNA, 746 bp, Zea Mays
ttttgcgaaggaagaataaaaacacttctcagttctttctttattgaatggttctactttgtaagaacaccttcagggattgatgtaggtattgattattgaaagccatgagcccatgagacaacatttctttctctgaaagtatgttcctatgcggttatgtcagttctactgcatttaggctgaaggttgttgagggtctttgcttctgtggtgtgtcagtgtcagtgctctcttactcgtggtatgccttcacaagttgtatgttgagagctatttccttgattccacagcatgttggatcatggacactgtaaacaaagttgctgtcgggccatatgttcatttgagaatatcaacgtttactgttgaaaatgtactttgaaatagtaaagtgtgtacaattcactgacaatttccggctcatgaaatgttaacaggggattggagagcccctgctctatgttggaaatgtagtgggaagtagttatgcatgctcaacatactgatttaactgtcatgttttttcaaatactcatgtcatgctaaacaaagttattctattcattaaatagctgatccaggcatataggtagaaaagcaaagaattgaaaatcatatactagcttgaattatgtggaatctttaattacatgtcgttctatcaggagtggttcaaaaggctgaagaactgaatgctgatatgttacctttactccttgagtaagtacgatctttgattaatg

SEQ ID NO: 123680 - DNA, 792 bp, Zea Mays
accataaaattcaatatcttcaccattatgtgtgccttgtgtcattacaccactattttgtgtcctcctatatttctcacggtcgacagtgtggtatcgaacaccatcaacaatatatgctgaataaactcttattcgcagatcaggttcacatgacaaagctaatagatcagaacagagatcttctcctcgctcatgccaaaagtgttccaatctgtatatataaaatttgtatacaatgagaataacttcaagtaataaaggattaaaatgaaatacaaaacaagttctcacataatttttaaaccaggaagaaaattgtttttctacttgtttttcaatatcagtaaatcctccctcattctgcaactcctttctgtatagactgtaaaacatattaaaatcatcaattagcaagcaatgaatacaaaaaaacaagaagaagcgagaggaatagtgggaatagatactctatatatggcttgacctctgcacaattgttaagcacataccaaaccatcttatcataatccttatataaataagtaatccttggggctccaagtaattctactccatgctggaaaacagataagtcacccttactcatatcaacatgctctctattccttccctcgtaattgtgtcttgtctcaagatcgtcaaaatacctcgaacatgcatgcaaacattcattagcaacatatgcttctgcaattgaaccctcaggtcgtgccatgttcctcatagaatgtttcaaagtgtataaccttctttctacagggtacatcc

SEQ ID NO: 123681 - DNA, 426 bp, Zea Mays
gttgtatttgaactaggttatgagtttatctcataagagtttaaatgatcaacaatagatcgtgattattctccttatttttcccattgggtttttaaggagactcggctcatatgttgatttcccagattttctgacacgattatcttggagaaatattagcctgagttatatgtctcatcatttattttccccactggggtttttgaaatgatgactatagacatattattgttctttgggctagaggtccatgggagaacaatggcataccatggttcaattgaaccaccgacaattatctataaggataattgagcttgtgttgttcagatggaaacaggaaaatggaaacattaacatcttgcaaagtcttgtgataatcttgctgatatattcacaaaatctctaccatactcaacgttt

SEQ ID NO: 123682 - DNA, 534 bp, Zea Mays
tatcaagcattctaagagcactctaaactccgagactccacgacgacgatgtcctagtgtttgagggagatttgagcgcatttctaagctgtcactctatttttgtgttcttgcgctctcttctttgtgttttgtgcgtgttgttgttgtgttgtgctcaagaagaggcaacagcagggctcaacaccactagccagtagacaaagccacatcggatcacaaaatcagcacaaaagctgaaatcaaagctaattcctctagaaagaggcaaacgactcaacacaactagcaaaagctccaaaatccagggtccctcccccttgaaatctctccccctatcaaagtactctcccaaagcaaaaaaatctccatcgtttgatgatgggagcaggaaaagcccgaaatgcacaaaatctcttcccttgttaggaggtcgaaaatctaaaagtctctcaaactttctcccccttgttgacaaatggactcatcaagcacaaaagagggtagaaactcccccttgacaagagaaccccc

SEQ ID NO: 123683 - DNA, 568 bp, Zea Mays
gtcaggagtagctagcagcctagcaggcgtctggaaatttcggacagacacgtggcagcccatgctagcttccaggcgttggaccatgatctaacgctggccgcagaatcgctgtcgctggcgagaagggactgcgggtgggactgccgtctcattcttttggtgacgtgtgcgaggggatccaaatccaagggacgagacgacatgcaagtgttgcttcaatcttggcccttaattctccgaatactcttcgtcatcttcactaccaccgagttcccggttcaaatccaagggactgccgtctcattcttttggtgacgtgtgcgaggggatccaaatccaagggacgagacgacatacaagtgttgcttcaaccttgacctcgttcgttcgttcactttagtatacaatagtaatcacactataaacacggttattgtgatctcgtaagacttataagtgtctcatggttaactacaattatgtgtgtaagtgtcaaataatacatgcaagtatcaagggttggatgtgtctatttctcactcctaatcactaggtataatctaga

SEQ ID NO: 123684 - DNA, 688 bp, Zea Mays
cttcagaatgaggcccttgagaaagaaaacattcttctttctttagtcgagaggctaaagacaaatgaagctaatttggctaaattctctgaagcagatcaaaaagattttgaagcttgaaaaggaaaaaaagttgacgaaagacgcataaccgatctagaatatgcattatctgctcaagtagaagtgcacaaatcttaagtgacaagactagagaagaagcttgacgaagtcattgacaaactttaatgttgagcaagcgaagcgtgaaatatccgacactgaatgatccagggtgcaaaagaatgttgaagagcttcatcaagcgaaagaagaatgctactttgttgctatgcaatattctgacaactcgaaaaatgcttttgctaatttggcgcattctcaactgagcaaaattttgtctgtggagatcctgaaggtgtgatcaaatggattgaaggtgagattgaagcttttgacgaagtctttaccggcaaagtagacttttgtgcctgtgtgggtgcttgaggggtcgtatcgctactcgaaaaagctagctgtgaacttgtgaaggttgtaatacagccagaattctcagtttcagcgaatgacattagagaaccttcaaccgaagctaccgcccttggcaaaaaaatttattctgaattgtggatgaacggtggaagag

SEQ ID NO: 123685 - DNA, 381 bp, Zea Mays
ccgccttctatacggatcggaggccatgaccccacaagaaataaagcatgggtccccgcgaacagttccttcagccgtccccgacgtggacgagcccacttcaaaggatctcatcgatggagaccgagtcttcgccctacaagctctaaacaaataccaagcccagacaaaagcatgacacgaccatgcagtcatcccaagggaattcaacgaaggggacctcgtactcgtccgaacagctcggacagagtctaggggcaagctggaacccaggtgggagggccccttcatagtcaagacgaaagcttcccctagcgcttacaggctcacaacgccaagcggcgaagacctggagcactcctggaacatcgacaacctcca

SEQ ID NO: 123686 - DNA, 766 bp, Zea Mays
aaaaagagaagctttggaatagaacagacaaggccaagaattcattttatctgggaaaaatcaccatataactagcttttgatgaagcaaatgatgataactgcttggcaagaacgaaacaatattggtatccgcctaggatccatcttcaacaacagatagtactgctctcatacgaagaaatcatcaggggtagagaggatacaacaggtctctacaagatcttcatatttctatcacaaattatcatcactggtagtttataggtcaataattatggatcttccggcgccaaggaccaatgacatattaatgcccaatttcacttcaagctctgtggtgatgtgggatttcatagttatttgtctactcttctcacttctggtagatcagaggtagataatggtaagcatgctaatgggtggaattcagtgtagttcggctacataaaccccgtgtatgtgtccattcaggaccaacctttaccatttagcttacagcgtataccaaacttgtcaaaggaccatctcgagtcaattcagtgactataagtatttacaattccgagagatgtatgcggcccaagcatagaggtcctagatagaacgagtaaagtggttcgacgggaacacactatggttttcacaccaacatagtgaaatttttcttagaatgacctctcggtatactcgcaacttcgtgttgctagcgattacatgtccttttatctcatagtttgcttcatgccattcagcgacaaagagag

SEQ ID NO: 123687 - DNA, 308 bp, Zea Mays
gggccctaagcctactgatggcgagtgtgtctcctatctagaattgaaggagatgatgtgtgcattgactaaagcctttgagagccacaccattaatgacaattcgtctccctcaggttcgatatatccatccttctcttgtttgatgaaaatattgcaaatgagtataataaatgggaagtatcattggacaagatttttgcacgacgtcgtatatgtgataggcaaaaaaataaaattgtggttaatactttaatgaatgatgcattagtttggtggaataatttgcatgactatgagaaaccaca

SEQ ID NO: 123688 - DNA, 954 bp, Zea Mays
ggaaagaaacctttgttgggtggcaagttgttgcatatgcgttgctccgcacacatattaaatttaattgtcaaagatggtttggaagtaatgggtagtgggattgaaaagattagaaatagtgttgcattttggtatgctactcctaaaagacatgagagattccaagaaatagctgcacaagttaatgttgaatgcaacaagaaattgtcacttgattgcaaaacaaggtggaactctacttatatcatgctcagtgttgctatttgttacaaagaggcttttgatcgtttggctgaatgtgaaagagcttatgatttttctccaagtgaggatgaatggaagtttgctagtgaagtttgtgataggttgaaattgctctatgaaattaccgaattgttttctggaacacaatatgtaacaactaatgacttctttccaaagatatgtgcaattagaggacacatgagcaagtggctagagtgtgatgatgagttaatcaagtccatgtcaagtcatatgattacaaaatttgataaatattggactgacattcatggtctaatggctattgctgttgttcttgatccaagatacaaatttggaatgttgaaagcatgttatacacgtctatttggtgcacaaagtagagcaatgctagagatagaaaatgtgaggaaattatttggtgaactgattagagagtacaacaacaaatgcattaaacctgttactagtggtggacaaaatgcatcatcatcttgtgtttctaatgcttccacatatacggatgagttgttctctgccatggaagaagagctcgaagacatgtgcagtgatgaagaaaaggctaagtctgagcttgatctttatgtggatgaaggtcgtattcccaagtcaaaggaatttgatatattaggctattggaaaatttctgggatacagtaccctact

SEQ ID NO: 123689 - DNA, 503 bp, Zea Mays
atgttttgatggatgcgagtgcaacgtttcttagtggcgatgtgtcggaggggttggattttgggtcgtggtctttcgaggatggggaattggggagccctttcttgtgggtggacgaatcttctgaaaatgacttagattattttgcggcattgaatctggctgcatcggagtctctgctgtgattcgccccttgcgaggcactggtgacctcgactgatgcgggcataggagactcgtgaaggtggaggatgggcgtgtcgaaacaaagcatcagtgagtcttcacgaagtgtaagaagccatcgccaaatcggtatggaaaggtcccatcttcgaagtgggtcgcgactggatcggggtacccgtcgcgagctacttgcgtcgacatctgggtcatgcattggagaaggggacctgtgggacctttttgagggggaagagttgaggttgatgttgtttaattttcgagaggcaggtcttattccgaaggaggagccgatg

SEQ ID NO: 123690 - DNA, 543 bp, Zea Mays
gtgaaatccggtaaggagccctccgtcgagatcgccttattccgctttacgtgtagcactagggaattggcgtctgggtgcttgtgcgcggagatggcaaactccggccaactctctgccgttggggaccagagcgccgccgtgtttcagtgcgtgagaaagaagatgacccctgttcgttgatcgcgtaactaacggccaggattagacgactacgtactgcttcgaggaatggatccgggccgtgggtttggatcgagcggtccctagtcaatctcgcccacttaaaatctcacccgtagattcaggatcgggcggctaggattgggtcggggatgacaacttcatgaccacccacgatttaatccgagccctcgattgttgatcggatggctggcaatccaggataccccttcgtcgtgcacttttcttaaagagcccctgcgttttcaagaaaataacccgccgtccatcctgtgctgcgcactgagtctaggatattttaccagctaacccctgcacttcctaggatttgaggcccag

SEQ ID NO: 123691 - DNA, 615 bp, Zea Mays
gaaaagttaaaaagacgtcgacctacttaagaacgtcggcaccgacattcttaaacatgttaagtatgtcgatttttataggtcaacgtacataaggctaagtacgtcggtcgctgccaagccgacagtctttaataattaagtatgtcggtcaacacctagccaatggtctttaaaaattaagtatgtctgacaccacccagccgacggtctttaataattcagtacatcgaccacctgacgttcttaaattattaagtacatcggttgtgccctgattgatgtacttaattgtttttagtataccatggctgaattctcctcttctattttcttccgtgctctgtattctctgtccactatgaagacttagctgtcgtgctcgtgctctctctagccatcaacgctgtcattatacgaccgtcgccgttgtattcttcctccacgccgacgccttcaccaccatgcccacaccactgtcatggtcgcccacatgccgacaccatcattcgtgcctccaccgccactatggtcggccccgcccttgcacccacacctccaccgccactgcggctgcccccacgacatagcccttgtctatgcctccaccgccac

SEQ ID NO: 123692 - DNA, 1302 bp, Zea Mays
cgtgtgcaagtgagagtgggaggctaagtgtactagcgacggattgatccttagaagaaactaacataggaatccccattgtaagtatcgtaacccctatgaggttggttaattagcgaattggacctatttcacaacccatgacctctaattttcactctagttaaaatctatttaaaagataaactgtccgtttctgcgactatggttttgacaatgtgttactacctctatttgaaataatataccatctatataccaaactattaggggcagataacctgggtataacatggactaggaatgacaagaaatggcgggttagtagaataaaagaaccctgaatgacatatctaatctgaccccgacctccatgaatagtcttgcctcatgtttttacctcaaccaaccctggcccccaaggggacccaaggcagaaggccgaccctaggtcttaatctcgtccaacctctgaccgcccaaagggttgaggcacaaagtcatgccttgcagagtccgccttgcctgacctaggggttggaggctgcactcgaccctcaatggtcagaattcatgggatcgtactgatgaccatccaggaaagggtacaaaagagtcaggctttgacacacatgtatggttcgaatgacaacacgagtgttgttagcatacgagctctaacattgaggagagatcgaatgaccattctagaaaaggcacaaacaaatgtccatcacctgcacaaaagctaatcatggctaaaccactcaatggcctgaaggacaactaaggacatgttgcaagacaagacaaggcacatcagtgtggcatgtgtggctacgttgatgtgatggaaggggacaatgtcagcttgcttgggaggtcctttggtcaacaagtatccaagaggacaagaaacaacatgacaatgctaggcctccgtctgtcccgcctaacccctagatttatgtaatagcacctcccttctgcttggtctccaaaaggaaggggaggaacacaaaagggcaacaagctagcacaagtagccaacacctataaccgcaccaatcacttcactcgcactccacaccagaggcttgggcatcgagccctcccttgcccaagtttgtaatttgttcctgttatagacataggatgtagggacattcttcccgaaccagtttaaaatccttgtgtctcccttgaataccatccgcaccagacgagaaaagcatgtatattattagccagtggttttaggacactaacacaaacctattagctagcctaataactaagata

SEQ ID NO: 123693 - DNA, 477 bp, Zea Mays
caattatcgcaggtgtaggagtctaaaggcattgcgcgacgtctgagaatggagcgagtattcaatctatttttgagcagcagccagaagaagactttgtgcttgggctgacatttagacttccataaccaaacaaatagagggagcgtttgacaggtgccagtcaagtgagcataaaccgtctgagaggaaaaccgagtggaggaggcactgcatctccaaatatcattgtgatcaagcaactgaatattaccaagggtgtcctgaagtgagagaagttgctcgaacgcttcagcagaaagggggatatggaacatttcattcggggaagctaatcgagcttgatggatgttaatctctttgacagaggcaaaagaccagagctccgggaacttttgagataaacattgcccattccatcgatcatgccagagaagcgtagatttaccatttccaatttgcacttgggcaatttcc

SEQ ID NO: 123694 - DNA, 361 bp, Zea Mays
tcgagttgtgctgcgtaatgttgttcatgccggccgccgacacacggacacagcgccgccctcggcgaccacttgcagcctgccttggtacagcgaccacacactgtgtaatagacgagctcctctcagagactctcagctcccaagtgcagtcgttgtatgcaaacctagctagctacgctgctagcagatgatgctgcagttgttgctgtctcgcctcggagggacattatggagtgagagaagagagggagcccacgagtggtcacataagtgagagcgaggggaatggggagcgaggagagctggcaatatcagtagcaagaaatgggagagaaggaggtgaggtggaagtagctaa

SEQ ID NO: 123695 - DNA, 421 bp, Zea Mays
cacctacgtccatgtgtgctctcccttcctctcactaaccgttggtcccacctatcatttcctccctcttttccagctctcgctctctcgcaccgattacacagttccagtaatgcacatcggtgcaacgctagtggattggccatcttgcacgtgacgacaaccaccgttggctcatgctccccacacgctctcctatttaagtcgttcggttctctcccaaaaaccctacccctctcaaccaccaccaagcttttcctccatcaatcgaacctccctccttgtcgctcctagttgctgtcggccactcgtcgagtttcccctcaatgtcttttgctggtccaagcaccctagcccccgtctcctccccactaattgagccttcaccactttccccatccaccggtgagctctccctcgt

SEQ ID NO: 123696 - DNA, 365 bp, Zea Mays
ccacactataatgtaatcgggggcataacagtacttatggacccacctacatgcccggttacctataaagaccttcgcattgtacacggatgggacactcatatcaagacgctacagttccctacaatctagttgtgtacctgagctctctcgctcccttagtgtttgggcccacctgcctacgtgtcagttggtcacaacatacatgcccttacatagggaagggacgtaatttaaattgtcagagtccaccttaatttatcacactctccaatcaggttctacccttttcatctgatcccaacacttttttcctttcaatctctttcagaagtcatgtcccacaccctttaagaggaagtcta

SEQ ID NO: 123697 - DNA, 296 bp, Zea Mays
ccgaagagaaaaaaggtgaaggtccttactcaccgaccacgcttcattgaaccggctacagtgcccgagtttgtcggtgagacctcttcggttgctgaagccaaaaagcttacacctgcgcagaaaattgacgagccggttgcaatgccggagatggaaaaaattgaagaaccgaaggctgaagagacaaggacatcagaagttttaagtccttcggcaagagttgaggtgtcaatgccgaaggcacaaaaggatcttaccacgactcctaagagaaagagaatggtcaatgtttt

SEQ ID NO: 123698 - DNA, 349 bp, Zea Mays
ctcggaccgcactctaaggtcgatgaggcacgggatgacctcaatccagcgtcgagcacatcagcacaaacctccatcacaccatcatctgccggctcggataacagatcttctggaaccatatcctcaagaatctgatcaaaattcgctagggtcaattcttgcagaccaatgagagcagacaaagcaggagaaggaactccactactttcaccactggcgacatactgtcgactgttctttcgagtcagagggacctcatcttcttcctccccatcgtcttcaccagcagcacaggcaacacccccattgggatcaacaacagatggagcatgtaacaccccaggtg

SEQ ID NO: 123699 - DNA, 311 bp, Zea Mays
ttcggccttaggtgcctctatcttctgatctgacatcttgaggagtagttgtttcttgggatgagtggaggggtttatatgcagtctgtgttcaatgatactccggctgactccgaccagatcagatgatgacgaggagaagatgtctttgttcttgcgcaggcagtcgagcaagctggcctcttcctgcggagcaaggccttcgccaattaatactgcgtgtttggggagagtggtattgaggggtactttcttgccccctcgtcactttggatggggctctagtgcttgttagtcttggccaacggctc

SEQ ID NO: 123700 - DNA, 438 bp, Zea Mays
taggatttgtgcggtaggccatgtgattcggggtggtcatggcttcgttgaccctaggtctagagtgagattagaacctggagtcgcctatccatgtgctccggctgggtttgcggcagtgctctggctcactatcgtggtgtatggagggaagaagaagacgagacttggattgttgatcggatgatgggcagaccagatcagtggagctcaacactttggccaggtgcaatggtgttcgtagatcatctagtgagagaacgagattaaaaaggaagaaaacgattcaggtacatgaatcgtggttgtcgatctatgatcctacgggcacagttgcataccggttcagtggatggatctgtgccgttgattgaacaatgcgtggtcaagatcataacagagacgacgttgacctgagtgctccagcaacgtagatcc

SEQ ID NO: 123701 - DNA, 931 bp, Zea Mays
cccaaggcccacgctgggccgtactcgtaccacgcttcactagtgtcagagccatcgtgcctgataaatcattgtaccccataatccagtactacacaaattattgcgcccgacccgagaagcacacccccgatgctgtctccgtttttattattaatcactgggcgatccagacatgcgccatcgcttttggctttggacgatgccagcgagatgcctgttccactggactggaccacgatcctgatgccttgcccactcgagtgcgccagagtctcttattattatcgtttacaacaacatgcaatgcaatgagcccgatggtgaaaaacggtggtggtcttgtttaacgttttacacgagctatcaaaacttgccgtgcacttgcacggcacaatatcccatccccccgtcaaagtgtggatggatgcccaaggatagagatgcgcctcgggcctttttgcgtcaaaagtacccaggcctacggaggaaagaatatggacggatgggactgggacgacccaacgggcaacggcaggtctcctcattttctcactgctgccctgtcgacctatcctgctactgctagtaaacctaggttcttgcaacggtgctagtgctactgctaccccattcttcttcctcctctctcagttcatggcctggcccaaggaactgtggcttttttattctccttctcctgcatgttttagttcaaaataataataaaaaaagaaacaaattggctcatcagtcgacggccgtcaccctgcatcccatgtgaaagctggaacacctgagctcatctcagaattcggaccagcgttgcggccgatcttgcttccctcccacctccctccgtgactgcattgtcattttgtcgcgtgggcgcatgtgcaggcggcaatggctggctccccatccgggtttg

SEQ ID NO: 123702 - DNA, 363 bp, Zea Mays
ggtaatgaatttttttacttcaacccttctattggaaccctacctatcttacccttgattgtttccccactttgccacttcgtgagtcttgcctcaactctatcctttgttatgcttttcgttattatcactatcacctttgacacctctatatcttacattgaggtttatcttatacttgccctttaaaatctcctctctcccatcttaatttgagcattgtactttacctacatttcccttggtcgtatcctcttctttgtcacttgcgagtttttaactccatgctttgcctacttttgtttgttattatctttacctttttcatccctcgatcttaccttggtaattatgttatgtctg

SEQ ID NO: 123703 - DNA, 635 bp, Zea Mays
cccaattcttcccatagtgcagcacacatgccctcaacatgtcttccaaaatctgatttaccctttctgtctgaggatggtacgatgagcttcttattacatgggttccaagtgacttgcaactgctcccaaaaacgtgctacgaacggtgctcctctgtctgacacgatagtccttggtattccatgcaaacgcactatctggtcaatatagatttctgcatacttctctgccctgtgggtggtatgtaccggcaagaaatgagctgtcttggttaacctatccacaatgacccaaatagaatcgtgttgtcgggatgtgttgggtaaacccacaataaaatccatgctgaggtcctcccatttccaagatggtatgggaaggggctgtaaggtacctactaccttcaaatgattggccttgactctttggaaagtgtcgcattcagatatatacttagcaatttccctcttcatcctggtccaccaatacaaagatctgagatcatgatacatctttttactgccgggtgcatggaaaatttggaaagatgagcttcatccaatagtttcttcctgagttcgggattcttaggaacaaccaatcgatcttcaaaccatagaactcccttgtcg

SEQ ID NO: 123704 - DNA, 782 bp, Zea Mays
tcagatttagagagaagtttgatgagccaaatgatgactgaattgaaatgtattgaagctactagtgatgagctgcttgggacatactccaaggccgaagatgatgccttgtccgcagccttcgagtgtcggggcaagaaaagattgaacggggtatttgatgcgattggcttcgtataccctaattatcgctacccactacgagggcaaggaaaaaagagaaagactaccgcttcggctaccacagctgtgccgaagggcaaaaaagtgaaggttctgacccaccggccgagatatattgaaccggtcgtagtaacttaatatggcgaaggggcctcttcaactgccgaagcaagacaagctgcttcgattgtgcagagcgttgaagagccgattgtagtgccgaaggtgcctacagtcgggccagccgaagttaaggatgataaggccgaagagccataggtggaaagaataataaaaatgccagaaatccttagcccactggtagaggcaaatttgccgaagatgcaaaaagctcctgcctcaactcccaagaggaggaggatggccagcgtgctagatgctgttatggagactacaaaggccttgatccctgctcctattaagaaagctgttgaagctgccaagagccaggccaaagccaaagctgagcctacagtgcccattgagacgaaggctgtcgcacctgaagacaaggttgatcagcaaacttcagataccggcatgacagcagggcaaggtatgatagaaaaagcaaaatc

SEQ ID NO: 123705 - DNA, 331 bp, Zea Mays
aagaaagatgccttcactcctatcattcggcttaaaatgatgctgaattcacctggggcagaacaacaagaagcatttgaccttattagaagatatttgtcttcggctcccgtattaaaagcgccccaggtaggagtgtcgttcagattatacattgcagccgaagataaagttattggagctgttctaactcaagagaccaaagtgaaggagcatgtggtaacctacctaagtcggaggctggtggacactgaaacaaggtacactttcatggagaagttatgtctatgcctattttctgcatgcaccaaatgtaggtgttatttattat

SEQ ID NO: 123706 - DNA, 704 bp, Zea Mays
cacagatacgatcagataggtctgaagcaagacaagaacctttgctttaccatacattttcaaattgaaaatagacaagtctcaaagatagcaactgaaagacaacaaggagacacacgggaatatttttcagccacgtgggattgggggcgtaggtcaaccacgaatatttgtgcatccggctggaaatgattcatgtcgctgaaaaattaggaagactttacagtacctgttggagctcggttttcatgtttccccccctaaaaacagattattggaaggctacaactggtgaacttggtcttctcttctctacctacattctacatgtccaccctaagactatcggcgattgtgatcaagcagatagataagataagcacaggaaaaattgcctctggagaggtggagaaataaatgcaaacaaacaaccacttgcagcgtggaaaatggcatgtcaaccgaagaaatatgggggcctcagaatccttgaccttgcaactcagaatggcactctcacgatgaaaaacctggacaaatacttcaacagacacatcattccctgggtgaacttggtttgggaaaactactacaactccggagcagtaccgtctatgaagaaagtggggtcattttggtggaggcaagttctagcaaacctttccagttacaaaaacatcgctaatccacgggctgggatggcc

SEQ ID NO: 123707 - DNA, 556 bp, Zea Mays
ttactagcaaatgattctaggggagttggttaggtggcttgagtagtgctccttgggtccttggtttgacttcccgcaggagtgaattctaaggctagggttaaagaaaatcctctcatttgtactatgccaagcaaaacataggtctaaggtctggctctggccctggtcatgctcatgcaaatgcgcagtatcctttactgatatgctagtaggttctttgtctgaatattctcaactatgactagtactctcactcaattctcagtcacaatgtgaaacttcttggaaaaacagaattattatactttgaaaccctaaatttttattgattctgtggaagtatacactaaaacaatacctatttatacccgtatttctaagcttctcaagtaccactatactaaattgaccacccatgacttgtctttttccacgctgttattcatttggttacttagttttttttattatccagggcttcattgatgttagctaatagaatgctgttttctttttctaaaacataggacatagttgtacaatgaagtggcat

SEQ ID NO: 123708 - DNA, 419 bp, Zea Mays
ttctgactcggcccctattgaaacaatggctgttacggttataccagagcttgacaaaacagtggacacccgaaagcctgagggtactcgcccaaagcgtcctcgtcaggtcagctgcccaactgcgcctgttgaggaggagaagaagaaaaagagacggcttcggcgactgtcatgcttggaccaggatgctggcccttctgctcctgtttgtgaagaagtatcagcagaggtctttactgaggttgatcctaatggtggtgtacctgttgaagctgaccccaatgggtgtgaccgtgcaccaactgactccaacgagtgtatccgtgcactagctgaacccaatgggtgtgatcctgttgaaactgaccccaatgggtgtaaccttgttgaagctgaccccattgggtgtgatcttg

SEQ ID NO: 123709 - DNA, 400 bp, Zea Mays
tgcttcacaaatatcgaaataaaagcagttcttggcaggtgggtctttaggtggtggtggtgcaactccttcttcaacctctacttcttcctcgttctctatatataatcatatataaccatgaatgctcatgtaatgcttatgaaaatgctataatagaaaagatttatcaagttgtatcttgaatacaactttccttcacggtactccagggaactagggtttttggagttagttcttcattttagagggtagaccctacctagaagactagggttttaagtttaggaaccaaacaatgtccaaaacaagtcaaacttcactcatgggatctattactaaattaggcttatcctaaaagtttggtgatttttggagtcttcaattaattcctaaaatt

SEQ ID NO: 123710 - DNA, 794 bp, Zea Mays
tatgaagaccatccgctttggcctttgtctgatagtgcagttcatgcacctggcaaaaagcttcggcattagcgctcataccctggtttcggagagcccatagaaaaacactgagcctaacaatggcattgggtgtcaattgatgaaggtatatctcaaagttctttaaaacttctcctatcatgtcatttaaggggaaccgaagtcctgttctgaagaagctcttgaaaatgacaacttgatcctctcttggctccaaaactatttcctccctagcaaacgggcaagcttgctctcagcctccccgaaatagccaagctttctcatcataaccaagtcatcctttgttatagtagatttcccaaattcaatgtggctaggctttgctgggcttagaatactattatcttcttcacttttattgtcactttcgcctccagctacaacctgttcagcttcggcattggaggcaccttcggcagtaacttcctctgacacaaccagacccggtcgcttcatcacttctgatattggtgctgtttcagcaattttggtctcctctccttcacgagacaccctagtagtggatcttaccctggccatttctgtgtttaggttctttaagccgaagctgatctcaggtgacgaagcgcatgcttgaaaatgcaacgtaggaagcttcggctatggtcaaattttttaacagcacaacagcgtgatagcaatgaatgtcatggtaactcctcaccaatccgtctgtttatatagtgttgcagggggagaaggcgaaccgc

SEQ ID NO: 123711 - DNA, 298 bp, Zea Mays
aaccccaaaaaggaaaagaatggttaatgtgttagatgttttggaaacaattaaacttccaagcacaactccaaagaaaactgctgaaacttctgaggcacttgctgaagtgtctgttgctgaagctccaaagcaacaaactggagttgaatctgggccttcggaaccaaccaaggcaataccttcggaagcagaagaagtaaaaattgcaagggcaaccgaagaactgaaaatgtcggagccagcttcggttgaagaaattgataccgccgtccccgaagcatcttccaaaacatac

SEQ ID NO: 123712 - DNA, 322 bp, Zea Mays
tcagtttctactgaactcacaagaccgagctcctttaggatcctcactttaccatttctagccatcaaggacgttggaagcttttccacaccaacactggctatccttatgcttccccacgataaagcaccaccaaaagataccctaggccgttgaatcctcctagttgggggacacaacataccactagtcttcttagaaatcttgttgataaaaacttccatggtagatgctgaacggggtggagaaaactgcgacagagagggctgttgcctagtcaaggttgcccctattttatggcaaaagtaagtgataggagatc

SEQ ID NO: 123713 - DNA, 550 bp, Zea Mays
taattgcggattgattctatacaaataaatagatcataaattgtgcaatagtcataaatacatgtctataaaagcatatacatctagtagttgtggacaaattacatatatagataaaaaataacataaatactgcaatgttgtcgagatctacatgtgtatgtggcaatatatggaatcagaaaacatcatcttcaatcgtttatttgtagcaattgatgggatattaatttttcaacatgctattattggaacatagatacacatagaaatcagcataaaataccctgtcgtggcataaacctaaataaattttgtcatatatgctatgtaatggacaaccaggacagatgcaatgactcaatgtataaatcattaattatacatgtatagaaactaactgaagctatcatagaaatattaatacaataaataagagaatactattgtattaacagttctgtacatttgaccctgtgataccagtttagttcagaaggacagataattgttagttatgaccaaatacatcaaaactacctgtttttat

SEQ ID NO: 123714 - DNA, 308 bp, Zea Mays
ggactccattgtattgggatcaaactggtgaaaggcagttctttgggcctgaaattatacaagaggcagaagaacaagtgcgaatgataagggagaatttgagaactgcacagtcaaggaagaaaagttatgcggatacccgaagaaggctactagagtttaaggagggtgatcacgtgtatctgaaagtgtcaccgatccggggtatgcaaagatttaaagttatagggaagttgtcccctcgcattattggacccttcttgatcctgaagtgagtgggagaagttgcaaatcaactgaaattaccc

SEQ ID NO: 123715 - DNA, 537 bp, Zea Mays
ggcatctatgtaatcgttgtgtactaaaatttatcgaataacttgtacgacgtagcaacgcacgggcacatacctagttataaaataattatagagagagagaaagaaagaaagaaagaaagaaagaaagatgcgttcgtggacctttcaaaggctgttcttggacgtttgtgtaggtgcaggaaggacctgacggcgacgcgcgcgtacttgctgcatgcacgagagggggaaaagattggtctcaccaagtcagtcaacgtccgcccgtcccgtcccgtttgaacgcgatggcaagtgtggacgccatgcagatgcagtgcagcaagcaacgtggggctaacctctccgtggaaaacaaacagatcaagattcatggtgtggtggcttggacaggtgcgcatatcatttcttgctttgcttgagagtcccagcaaagctgcctgtctcggagtcggaggagagagagagaatcccgttagtcaacccagcggatacgcgcagcacacgcagagaaaaaacacatataaattccac

SEQ ID NO: 123716 - DNA, 453 bp, Zea Mays
ccgctctaggataagacgacacgtaatggcaaccacaacgtcgccacagtatcgtgacagaagaaggaaaggtcatcaacaggagtccttcggtcgataaaaaccccataggacaaggggctacgcaacaagacccaacccccactagttttgcccaaccactcaggcttatgtaacgagccctcctctcgccttggcaaataaaaggaaggggatggtcacgatctaagacacagacaacaactcacaccaatagcctacagacttgtaatcatgtagagcacttttctcctcgctctcgcactatagactttgggactcctccctctccgacagtttgtaaccccctattacagatttagtccagagtaacacaagttacttaattggacgcagggacttgcacacctagatgtgaaaagcaattgaattactagtcggtgagttcgaaat

SEQ ID NO: 123717 - DNA, 371 bp, Zea Mays
gcagggtccgtgcagctagggagtggcttgtcaaagctactgatattgtgggttgattgcacacatactcaggaatgtacagggaatagcacgaagcagtatgcaggacctgcttcggctgattctgtcgtgcatcggcctcagctatttccttttgcttctgtatcgtgacttgacatgtcctagttgtatgcgccttatcttctccacagaacaagcaaaacaacctttttggttgcgagctgaatctacctccgaagcttctacctcctctgcctcttggggctagtggcctgaaggagctttgatgtgttcctgatgattgggagctgtgctgatgcccttgactatgatttcccctgtcttcgctt

SEQ ID NO: 123718 - DNA, 464 bp, Zea Mays
ttgggataacaaacataggccaacatgtgtacggggcagtgctcattccatagggattgaacccatctgtggccagcgcaacatgtacattacgcgcctcttcgcctttctcacggtgaatggcatcaaagtgtttccatgcttcaccatcggatgcgtgcaccatcttgtcaggattgtattgttttccatttttgtgccatgtcatctgttttgcagattcctcggtcatgtataaacgctggatcctcggtatgaacagaaggtgccgtaggattgtcaaggggatgtcgagctgcctcttctgtccatcaccagagtctacctccataaacctagacgatttacattttggacaatactttgcctccacgtattctttcctaaatagcacgcagcccttcggacacgcatgcatatgctcatacgtcatcttgagtgcacgaaggagtttttgtgcctcc

SEQ ID NO: 123719 - DNA, 892 bp, Zea Mays
gcttatgaatctcacaccgatcctttatattataccacacgtttcattaatggacttagaccttatattaacgctgtcattatggtgcaacgtccttcgaatctcgattctgcctgcgctctcgctcttgtgcaggaagaggcgttggaatcgacaagacgccgtcatgtggagcctattttcaaccggatggcttggccacacgcgactgcagctcctgatcatggtcgtgctgatggggtgtacactgagtccgacaagaatactctagacaacagaaggctgggatcatcagcagatcgggtagcgtctctgaaaagctatcgtcgtgcacgcggtcttttgtgatcgatgcgcggagaaatggtttccgggacacaagtgtctgagcactgttcaattacaagcaacagaggaggtctgggacatgctcaatgaggaggaatccaccgaaccagtggaaacaatgcatggacaattgctaatggcaatatcatgtgctgcttggtctgggaacgacaccagcactacctttcatctccaagggtccatacatcaccatgaacttataatcttattggattctggatcctcgcatacatttatcagtgacaagttttgtactatgctctctggtattaccacattggagcgtagtatgactgtcagagtggccaatggtcaagtcatttattgtacaaagcaacttcggcaggcaaagtggtttttatctggatatcagttcatctctgatttgttgtttctgcccctaccgtcggtggatcttgttctgggtatggactggttacaagctcgtagtcctatgagagtcgactggctcaacaagtggatgatcataccttaccaggatacttccatttgtttacaaggg

SEQ ID NO: 123720 - DNA, 1084 bp, Zea Mays
cgtcgacggcgacctccctgcgcgaagattcacgccgccgccgtgattcgtgttcaccggcggttggataactacggcagagaaaagatctcacgacggggaagggataggatcacgaattggagtttatcgccgtgggtatagtcgctgcgacatggccagactaccggagtcgccgtggaagcgccggtgacctcggctgcgccacacctaagcttgttactacgcgattgtaagcgtggcacccttaggagtattctccttgcgtcgttacaccggtgactgccacggttacagccaccgtgttcttccctatctccggccgccaacacatcgcggtcaaattgagagctaccgacctcggggtctataaattgagcgcgtcctcagctccgtcaagtattcacgcagctactgcacccacctgcatcccaaaccccccacccgagaactctaattttgaattctccccaattcactttcgaactccactcggtttagcctcaccgcggccagcttattccaggtcagtcctagcgctttgatcgtttgttctagcgttcttaggtcctcctcaagctcttcgacccctcggattgaattagaccaccaggaattgccgggaacgtgttcatctgtccgcaaggtccacggtcactgcggccagagcaaacctagtagccatttgtgaaattgaatgaggggaaacctcgggttaggtcggaatctggagtcagtcgtcggtgagcaccaatccttgcgtgctccgcccagtctagctcatcggagcatggcttccgcgcgattcgccgtcggggatcagtcgatgtgaagaaatagaagtacgagggcatttctgcaaagtgtcagcgactgggttcaatagtgtttggacttcttcgagttattcaaaaaccatgagggctcttccgcaagactgccaacgcgggcgcgggcgcgccccgtttctctgtatggctgggccgtatgggctgcttctggcccagtactattcaaactttttcattttctttttcagagaaactttagaaatatgtagaaaactacagaaaattcgtaaaat

SEQ ID NO: 123721 - DNA, 285 bp, Zea Mays
ctaaacatatgctgagaagcccgttctgtagctagatcagccccataccattttataagtaatcatgtctcacaaggaaatccacttagttactgatttacgtacacacatgtaccatcccagatctattactctaataccatgtccttataaagtctgaaaactactatgaggtctgacatttctcaagcatataatgctggaccacaaaatcgcacatagttatcttgtatgaattatgatggtatgcagccaaaaaaccaagcattgtgtgaaaggtggtcc

SEQ ID NO: 123722 - DNA, 570 bp, Zea Mays
agcccgggctggagcaccaggcggtaaccttgaacacctcacgctgtcgctcacaatctgggtgaagatcagcaatccagcaccactcattgaggagagcatgcacagtttccaactcccaagcatgtgcagggatgccagacacttcaatctcaacttggaaaggcagagacgccgccgcagatgagttaagggttctgctccaccgcataacatggattttagttgtgggggatagattcacaattctgcccccatcaaaagcacggtccgccatttctaaacttggaagaataagaagcagacatgcaggacccagacgacacatagacagcgagtcatgaacaagcgccagtcgccgcgcaaagctgtccaaaatagcttcctcaactgcttcattaatagccacagttaccgtgagaacaatggcacgatcaagcacttcagtcctctggttgaaacttggagaccaagggatgatccgggtaggagcaaactgtggctccgtgcagacatcatcaccagcatcaacagcgatgtcggactccaggcgacgccttctaccacgac

SEQ ID NO: 123723 - DNA, 532 bp, Zea Mays
gccagtactgcttatggctacctcaaaagtgataggatcaccctcgttgtctatatcctcactcacataaattacataatcatcaggaatcgttggtttcttcttccttttagatcttttgatatttttttgaataggttcattactttccatgaagttgttctagctccttagggcagtgacctagggcaccattactagggactcaaggatactaaattacataattctcatgcgtgttcaaggaagccgacatgttgtcgttgcttgcatgttgttgaaagggagcaacaataaaaaaattgaagttgatgaaccttgtccatcccctcttggttaaggatccacatgctcgacggtgactctaatgcgatggtagcggccatggcattgcattgtactagagggatggggcaactatggttggttggaagtggtgataggagggagagcagccattggcaagtgtgattgaatgtgcaaagtagtggaggaaaataagatggaaccgtgatgcgtccttctctccctc

SEQ ID NO: 123724 - DNA, 363 bp, Zea Mays
ggcgttaccacgtcgtagtaaaccactgaagcatgtctggtcatcgtcggtgaccttgccacggtgaaagccacgaatcctttgcgccagtgctctcccctctctctggccgccagcacgccatgcccaaattaggagccaccaccctcgggccctataaattaagcgtgccatcagctccgctaggtaatcacacacccaatgcaccagcccgtgcctcagattatccagcagagcacttcaatttgggatttctcccaaattagtcaagaacaccgccgtgtgagtgctcaccgtggctagctcgctacaggtctgttcacaacctcctcgttctcgtttccacatccctgtgtgctgtag

SEQ ID NO: 123725 - DNA, 369 bp, Zea Mays
tgcatatatatgtagatatggctgtgtagaagcgttgcagcggaaaagaggcgagttcgagcggacaggagtcgctgctcgcttgagggacaccgttttgagcgcttgggaattagaactgcttgaacttgaagcatgccaattttagcttcttcttttctatatatcaaactatactccttgtcataatgtttcaagagccattgcgactgcatgcgtgttacagctgcggctatcctatatctatctgtatctcttatttgcaataattttggaccgatgccctgtcactggtcaagttgaagctggaacaacttgcatcctcctaaaaaaagaagaaaaggccagtgtccttaccgatacttcccg

SEQ ID NO: 123726 - DNA, 488 bp, Zea Mays
aaaaaatgttgcttggcacacttgcggttccctacctggcacgtcaactctcgtggtgtcgaaaaccgatgggacaatagatttgtgttcggtggcggatgcaagcatggactcattttgaacgatgaatcgcgaggatccgggccgggccgcctagtatagtgtagtgctgatcgacatattgctcaagagcgtgttacaacaagtgtgcttgtgtggagaaagaaagttgtccaacccttttatagctcaagggtggactttaaagttgagacttatattctactcgggggtacttgacttgtttccccctaggttgctctagccctcctggtgtcgtctgtaggggcacgcgttgtcgtactccttatacggcgttctatcccgtctgctctccatacggatccctttagcttgttcggtgtcaacatttcggtacattgcgggtcccacaaagtgggcttacggtgaggtttagggccatgttc

SEQ ID NO: 123727 - DNA, 377 bp, Zea Mays
gctcaggctgctgaattcatggtcctcatttacctcaaaattcttgaacctttttaattaaaattcttgattttttatgtgggtgctcggggaaaccatccccacttctcaacctgggctcataattcttgcttaatttcttgaattcagcgtttcttggtggtgcttgattattgccgtctgatattgcacagtcctgagtttctagttgcttcgtcagcaaccggtagaggtgtcttttttgcgggatgatagaattgagcttgattgcggtggagcccttttggatttgcagccgattcttgaatcttttcttttctctctctccttggatgcctgcatgaaagccatgctcttaaagcacggttccttttctt

SEQ ID NO: 123728 - DNA, 520 bp, Zea Mays
tacatataggagttcagctccatacatgactgctgtaaaatgtctgagcagcttaacttaaaacaaaatgtctgagctcagcttaacttaaaacaaaatgtctgaactccaagacattgagaccattagtttagttcacagttcacccataatgattgtccacaaggtcaaatataacattgtaatctagcatcaatcagaatcaaaggcatgtggagacttatcagattcagaggattccattgcaatgtcaccatcttctgaatccgatgaggactgctgcacttgaacttgaacatcacgcatcagagactgcaggcttcttaacttcttcctaggcttcatagacctctttctttttgcttgtacttgaacttgtgcttgtgatgtttgttcttcatgtgatcttccatcttgcgctggttcaacaacatcattcggaagaggtacaataccagtaatgaattcattttcatcatcaccaacaacatcatctacttccctctgtaaaggatctctg

SEQ ID NO: 123729 - DNA, 408 bp, Zea Mays
gtagcaagtttgatgttgacgtagtggcatccggtgggtcccacatggcagacttatggtggagcttagggtcgtgtttggtgcggctccatcttctgtcatgaccaccgcgtcactttcagcatgcgtatgcatacacccgatatggtatatcatcctgtcctttcatgtatgtgggtcactatagagactccatcgtggaggtccctacgatcggggttgaccaaccccatacgactgtgggggctgagactgtatgtgatgacatatagttgtgtttgacagggacttttcgacaccgcacttgtggcctagatgtggtttggtggtgacgcgtcttgtcgtggtgacattggtcagcagcattgggtcggccctatcatcttgctgattagcttggcacgagac

SEQ ID NO: 123730 - DNA, 371 bp, Zea Mays
ctcatctctataattagatctcaaactacttaatcccgtaagcacaccactcctatctctgaaagtacatctacttgattactaaatagtactttcaggattttagaatgtggatagttatatttttttcatgattctatgctatgggctttaaaattagtgaacctgtttagagacccatctggaatgcctagcacgtagttggaggacttgagaaaataaggctctcattgcgcaatgaaacacaggtctggtacgacatacaattggtccatgtgtgatgactaatgctagaatgttttttgtgttcctactttgtactcttggaggtaatggtccttccattaatatgtgaaatttcataactcaaa

SEQ ID NO: 123731 - DNA, 498 bp, Zea Mays
cactggcttttctcggtactggagatccttttgaatctgaattgcctctgcctcgatgtggttttctggtacttgtaggcatttgcggagctgagacacatgaaacacattgtgaatatctgacatggattctggtagctcaaggcggtatgttgcgggtcccactcggctaatgacggggtaggggccgacgaaacgtggtgctagctttcctttcgtttggaaccttttgacaccacgcatcggggagaccttgagataaacgaaatctccttcctcaaatctgagttctcttcgtctattgtctgcgtagcttttctgtcgactctgagcttcaagtaacctcttgcggatcaaggcaactttctcttcagcctctttaacaaagtcgggtccttctagtgtcctttcccctacattggaccacattaggggagtctggcattttcttccatacagtgcttcgaacggtgacattttgatgctggcctgatggct

SEQ ID NO: 123732 - DNA, 337 bp, Zea Mays
cgaaaagatgcgtggcagaggtcgcacaaataacccgcaagattgttatctaggccagcacgctacctgggcgcaacacgacaagcaggctgttccgcgtcccatcatgctgttcacgtgagtgaaataatgatgatcaccccgcttcaccttgccactgcggtaattactggacgccaaccaggtaaaaattaagaaccattcgaaatccccacgcagagcaaggggttggttgagcaagctcttagtaagccgcaagctaggtgaccggccgataggtcatttgctcacacccatgtccaaggtcgtacctcacattctcccacgagaacccggc

SEQ ID NO: 123733 - DNA, 711 bp, Zea Mays
gctggatcggtgtcaggatcgtatgactctagaggaggagagagttcaactgcaccaaaatataagtttctgtaagatacgaagctaaaacatttatgaagctaaaatatgacaaacacacctatacgcctctcgcgctctgcggcttcttcagcttttcttgcttcctctgaagctagatgagattcttcttcgttttgtctgatagcttcgtctgctatctctttgccgccgttcatccacacttcagaataaaatttcccaccaagggcggtaacttcgactgaaggttctttaatgtcgtttgctaaaactgagaattctggctgaattatagcctttgcatgttcatagccaactttttcgagaagcgacacagaccctcgagcgcctacacaagcataaaagtctccctgccagttagaacttcatcaaatgcttcgatttcaccctcaatccatttgatcacaccctcgggatctccacgaataaaattctattcatcgagaatgcgccaacactagtacaagcattttttagcttatcaaagcattgcataacaacagtgtaacattcttccttcacttgatgaagctcttcaacattcttttgtaccctggaccactcagtgtcggatatctcacgcttcgattgctcaacattaaagttttcggtaacttcatcaagtttcttctccatcctcaccacttc

SEQ ID NO: 123734 - DNA, 372 bp, Zea Mays
gaagtgggtggcctaggacatgatagtccatagagataaccaaccatatcgccatagtggttgtccctataggtgagccctagaacacgcacgctgccacagaccatagtggcacgctggtgccaccctagcttgcctaggcctgacaaccagggagtaagaatgatgctaatatagttgtacgtatcatgttaaacaaggcacaatatgtcttatgactctaccaactcattgatcgaccatgacatcactgacatacaacatggtgagtctggagccctccttttgaccgtggtcactgcaggggggcagaatacgtggcatgatggggcgcacactagaggccgagtacggtggccccctaggcctcac

SEQ ID NO: 123735 - DNA, 448 bp, Zea Mays
agagagttttgtaagggtacccgagcaaccttatattgatgactagagggatatccctttacaagtcatgaagcttatctaatcaattccatgtctatattcttgagtgctcccgatctttcggagtttggtcgcttcctttcgagtatctcgccatttggttgtgcgagagacatgtcttcggaacgttaacgatcttgcgccatgttattcgggatcgcctctagctctgggcgtcatcttcttctgttgaagtctgttccgcttggatgcagcccaacagtatacccctactggacaacttatcaggggcccaccaagcagcccatgggacatgtccacgctatgaggacctagtggatatctatctcccacaagcccccgaggctcaagccaatttttgagagtaattggctcgagactctaagaatgagtcaccctatttgat

SEQ ID NO: 123736 - DNA, 311 bp, Zea Mays
tggatttgttttgtgtcccattaatgaccccttaaatggctagcctgttgttgatgagttattgaggatgcttcgaggcagatgtccttcttgagtcaattggaggttaatgttggccatgtcacgatgggtgatcctttggattctgccatgcctttggtttcagaagtcaggagctctctcatgtcgttcaacgacagattcaggtccaagcccccttgttttaaggtctattccagaacgaaggtggtttatgtgggaaacccctaaccctatcttagggttggtgttgtattaaattattaatagac

SEQ ID NO: 123737 - DNA, 1604 bp, Zea Mays
acgaagatttgttattccttttaataaagcggggagggaatctggcacacagaggtgttcacgtctgcaaaatttgtctcaaccgttcgattcggcgtgtacgtccaagatgcaacacgtgagtatgaaaatccccacaccacgggatgcttccacacaagactgccaggttcccagtcaaaagcaaaacagtgatccgctggccacaccacgggacgcttccagataaagctgccaggttccagtccaaaggaaaaaacggtggaccgctagcttctccgtgggcgcttgggcggagatctagatagcgctgcacgccgctgcttctccttccccgcgagtgtccgctccgtacgccggcgactacgatcctgtttctggtgcgtaccttacagtccatccttcttcacgtgtctacgctcttcactgcgccatgcgattcctccagtaatagatcgcgccctcgacaggtgaaaggaagtgtcgcattccccatcagcactgttactgacggccgccgcgtggtgttcctgacgtgtgctaccatctccagtacacccaatcctcaacgtgccgacgatccacgcaggtacgaagacttctctggctatgtgttcttcgtgctaggttttgtcttctgcatctcattctgattccattgaacacgactagatattagggcttcgattttaggtttttggttgtaacttcctcctccgtacacgggtgattagggcttacctccagcttcgctcacttcgactccatttttttattcatcaatttttttatttcctaatgtttaccaaatgttgaattgctattattagggcttaacctgcatcatgcattcttataataaatacataagtacataaacaaatgtacatgtacatagaatacatatagtgactaagtacatatgtacagtcatatatatacacaaagattatatactgtggctatagatataatatacatatgcatataatatataatatagacgcgcttacatatatgcgctcagatctatacatatccaaaacaagattacatttcttaactctaagcttcttaagtcctacaaatccacatatatatatacattcatacatacatgtttctgtttcttgactctaaccttctcaagtgttcttgatttcacatagactaaaaaataaaggaaaaacacatgtaaaaaaagaacacaacatgccatcttcatcatctgtccacctagcagtgatgtaaggccgattccatatcttgatgaatgcgatgccccaagaagaaaaagaaggcacacgtgagtatgaaaatccccacaccacgggatgcttccgcacaagactgcaaggttcccagtcaaaagcaaaacagtgatccgctggccacaccacgagacgcttccagataaagctgccaggttccagtccaaaggaaaaaacggtgggccgctagcttctccgtgggcgcttgggcggagatctagatagcgctgcacgccgctgcttctccttctccgcgagtgtccgctccgtacgccggcgactacgatcctgtttctggtgcgtaccttacagtccatccttcttcacgtgtct

SEQ ID NO: 123738 - DNA, 436 bp, Zea Mays
cttcaatgcatctatatcagctaggtgcgccatggcatcgtgattctcacatacatattatctgcgccaattcatgtgtctgactgtattcttcaagattaacaaatgtttcaaccaaggtacaagaggcatataatgaagttgcttacgtgctacctcattcgttatggtcacaccatcatcgtttacaacatctacaaatctcgtgtcaccatatattgtacacttcttctcattcacggttactttccaggaaagcatatagctattgtcacatacatcatttttttcatagtgcataccgagacctaagagcaacttcttggactggtacatgtccttagtcatcttgtgattcttcagaagtacatcaccgatcaacttcacaagctcattgtagcagatatttgagaacacaaacttggacttaagagtc

SEQ ID NO: 123739 - DNA, 450 bp, Zea Mays
ggagatcactcggccaggatcatatcagcttactcaaatggatggcatggaagtggggaattcatggaatatagagcacctcaggaagttttacccttagcgagagctatcggagcaatgttgtactctgtaattggaaaatacgtcatcaataaaatatttcactctcgaaggcattcaaactattggttatcaattgacttcgacttgattagacttggaatcaacacacttactcaacttagggtgaccactataccctactaacgaagcaatcggcttaagtcggaaatgacttaaggcggtgcaacatgctcgcgcttactcgacttagggtgaccactataccctactaacagagcaatcggcttaagtcgacaatgacttaagacggtgcaacatgcccgcgcttactcaacttagggtgaccactataccctactaacggag

SEQ ID NO: 123740 - DNA, 442 bp, Zea Mays
ggtagtttcagctaatgatcaattggcactcgatcgagagtggtgattgatcacattaatctgtctggattattagatgcgtcccatgcagaatggaagcccagttcttcagactatttgttggtgacatgcttgaacaatagagtttctgaaatttacaagatttgcattatgatcaaactgaaggctatccgatcttactattcgagcgtatagtgcaggctcttggtcagtggtcttcttattttcaacaaaattttgatgcggttgatagagaagggtactctcccctcgtaaagtgtaccgcaaccattcgaatgcttgcgtatggaaccagcttgatgaagttttgaagatgggtgcaagctcaacattggagtttttgggagaattcgcaaaagggggtcattgcagtttttggcccagagtacttgcgacctcc

SEQ ID NO: 123741 - DNA, 579 bp, Zea Mays
ctcctcgtcgatagttgagtagagcgctgcgcagctcgatcttggttggttgttgggaagggtcgccgccccatgcctccaactcctcgatctcccccggatgtgcttcgcttcagctagctaagtcccttcttcctttgagattttgctacgaacaaccacctcgatctgctctcgtgctcatccgccaagctccgtggtgccatactgccatgtcgctcacggaggtcagcctccacttctgctacctccactccctctccatcgtgctcctatacttcctctacgtgatctcctgatcgcctcggccgcctcccgccaagctccgatcgaacaaggctttggtttgattcgatcagagccgaagcactagtattaattactcgatgcttgctcctcttcgttcttccatgatcttgtcgtcccgttcttctcccggccctctcctgctttgctgctaagtctcatacgtgcctctcctagcgcgtactcccacacccgatcgatcattcgactaggagcagtgcgcggcagtgttcgaggaagcaggtaagtgtttcccttctcaggtagtgggat

SEQ ID NO: 123742 - DNA, 401 bp, Zea Mays
cgagcatgtatcaaaggatggctagtgtcagatggtgggtcctgcgggtgtaccactaatgctccctagccgaagctgtgagtaggcctaggtcccagtcgaggctacctcctgggggccattgccaactctttcttaggtatgctggtctgcagcctcgacaaatcgagcctaaatcctacgggggacaggtaccaagggggaattggttgcaccaaacataacagggacaagtggtacacacataagtgctaatactgcttgataaatagtactcaaaagtaccttacaaaaagcaaaagtattacatccaccttcaagcggagtcctagctccatctctactctacaggtatgaactacctccacaccagtagggtcgcgtgggtagctagctccgag

SEQ ID NO: 123743 - DNA, 821 bp, Zea Mays
cgatgatgtagaacacccttgaattggtcaaaaccaggagaacagtggtttttcagacctaatttagttaaagaaacagaagaaaaggtccaacgcataagatattacttgagagaagctcaagcacggcagaaaaattatgtggataaacaacgttgaccattgatttttcaagtcggagatcatgtctacttgaaagtatcaccgatgaagggtgttagtcgatttggggttaaaggaaagttagcacccgatacattggcctgttctctattcttgaacgatgtgggcaggttgtgtacagacttcggctgccagattcactgtctgctatacataatgtgttcaacgtatctcaattaaagaagtgtcttcggatccctgatcgaactatggatgtggctaatgttaattggaaccgaagttaacctattcagaacatcccgtttgagtgttcgatcagaaaaaccggattactcgaagaaggactctcaagttttacaaagtacagtggaaaaacacatagaagaagaagctacatgggagtatgaagatttcttagaaaaaacattttcccaagtttttagcctcctgtaatctttaaagtttatatattttattgtaaattcacaacaaacccccacactcaccccttctctgtaagagagaataggaaataatattgtgacgtgtttccttttccattacttaccctagagccttaaatcttgggacgagatttttttatggggggtgaaggaggatgtaacacccctggtgttatgagaactaaaactttggcatgacatcatatacattgg

SEQ ID NO: 123744 - DNA, 522 bp, Zea Mays
gtttctgaaaactatatgtacatagtatctctgggggcttggtgttgacctctgcctccctgctgatgaatttgattcccagccatttctcgaagaaaacaagttttatcggcagtggcattaactaaggcagcgatagcctctgccagcgtgggaggtacatgcggcgggttcagagtttcctccccaccatgggaagttctagccccatcctgagcacgagttctggacgacatctgaagaagaaaaacatacttgattattgcatgccatgattacacaacctctgttacattattccaaacttgttctaattatacatactcaacttatacaactcacttttccttatttagattacataaggaaacaacatactactacactaatctattcatccgcgtccttggctgctcccgctccactgctaacttcaggagaacgatcattcgcgatgttcatggaaggaggggctccaaagagatccaactccccataaggtcctccgccagctgctcatga

SEQ ID NO: 123745 - DNA, 941 bp, Zea Mays
gtttgatgtcagaagtccgccgtggtgcagcactgcagtctgcaacggcgatcagctaccgacactttgactggcgtcctgcgcgctgcagcggggggatctccaggcaccgctgctgcatccgcgaaagttcctcttattgaaaaaaaaaaatcgcttgaccgattccacagacggacagatcaaccaatgagcgtcttccgggtaggccctcgaagccagtggactggttctgccacgtgggtttgctccccgtcgcagttcagcaccacaggctccatatggtcagccttcagccctcgcctttcaagcctgtaagtaatccgcctcacttatgtatgaaggctcctttcgctgcagggctccttggttgcctggccggagaagtcgcttctggcagccgtcgccggagctgaggagcgggaaagcctgacgctgacgtgcgcacggtacgtttacctccagcgctggctgtcttccatggcttttgagttcagagaagatctacatatgtgtgagaaattcttcagcttgtttctgtaggtagtgttgctgtgaatatttggtatgcataaaattatttatctgcatactgggggtgccggtgggtgggctgattattatgcatgggttactgtattgttttgagtaaaatcgcagaacagcgtgtataatatggcgatatgtactagagaacacctgtgttggtgctcttttgcacaaattaagccacatggatggacgtgttcgtaatagcacagagccatgggacactattttcgcgatcttgattccaagcgggcacacgcggaagctgaaacggcctgaaagctcctgccatggcacatccaaaggatggaaagatactggatgctttcatcgtctttctcaggtcaaaaaaccagcggacctccatggcgctgaggcctagagtccgcacc

SEQ ID NO: 123746 - DNA, 579 bp, Zea Mays
gtcaggagcatgattgttattaccttgctggtggtgtggcataccttctgtgttttgatgaagacggcgacgtaggcgcaaatctctggtggctgcttcatcataattaccttcttcatcaaacaccgcatcatcgggaagacgtggacgaggaggtggtggtggcggtgcttgttgttgcgtctccaacacagcaagtctgtcaacaatctgggataatcgtcgatccagcctctcgtaagtcttgccaaggttcatgtcaatgaaggcatcatgcactgacttgtggaccgtctcctccatttgctccttcaggagcttgttgtttgcctcaagagcttggcagctaacacattcatcgaagtatgtagggatccttgcttcttcgtcgtcgcctgccatcgaaacacaaaaacaggaaacaaacggtgacggttatccctagtaatttcactacacgctcctctcaggtggaacacaggaacacgctctattgtatcttaccaagctcttacaagtgtctgacgaaatacaagcaaaggatggtacaatcagaggctggttcgtgatacttaccaa

SEQ ID NO: 123747 - DNA, 430 bp, Zea Mays
gatgaatgcaattttttcctcgtcttcttttgccaggctgatctgatggtacccagagtagcaatccaagaaagacaacacaaaacacccagcggcgagtctaccacctggtctattctaggaagtctgaagggatccttcagacaatgtttgttgagatccgtatagtcgacgcacatgcgccaatccactttattctttttgagtacaagaacaggatttgctaaccactcaggatgtagtacttctctaatgaaccctgctgtgactaagcgagctagctcggcacggataacttctctcttgtcgggcatgaaacgacgcaacttttgtcgtatcggcctcgcttggggatagacctttggtttgtgctcggccagctctctcgggacatccggtatatccgcaggttgtcatgcgaatacgtctc

SEQ ID NO: 123748 - DNA, 596 bp, Zea Mays
gaattgagtagagaattttgtccaggtaattgtgttgatgacagcaagggcagcgtagtacgcatcccaccaatccgcagcgggaccagtaagacgacccgatgcatagagcactttctctctgttcgagcattgagctatgttgagcatcttatctatagacttttgccagtcatctgcttgcagtgggtccacagagttggagaaggttggtggtttgtgactcataaactctcggtgcttatccctaggtagagctggtggtggtggtggaggtagcggtggttactgctgttgcatccttcgttcttggcgcatctcttctctttcttggcgcatctcctgacgctcctgtcacatctgcacatgcatatctaccatagtgtcagccatttgttgcattcttcattcttggcgcatctcttctctttcttggcacatctcctgacgctcctgtcgcatctgcacgtacatatctgctatagtgtcagccatctgttgcattatccgcatctgggctgcaactgttggatcagctccgactggtggaggatttggaggatttatctctgcttgttgttgttgtctaagcaccc

SEQ ID NO: 123749 - DNA, 308 bp, Zea Mays
caatatgtgacgtgtgtcaacgagttaaagacgaacaccaaagactagcaggattactacaacctctcaaggtaccagaatggaaatgggaagaaatcgatatggatttcatagttggactacctcgtacccgggatggctatgattcaatatgggttatagtggacaggttgactaaagtggcacaccttatacctgtgaagacaacctactcaagagcccagttagcagagttatacatgtcaaggattgtttgtctgcatggagtaccaaagaagatcatatcagatcgaggaacccaatttacc

SEQ ID NO: 123750 - DNA, 448 bp, Zea Mays
gtacttttagggggttgccctatggtcactctataaatacccccacccgaatagggtgagtgggacggatgacaagacatttgagaactgctattccacatttgtcgtgttgtgactcctactatctccattgtttgggtcccccttgtcaggacccaacacctttcttagctaattaattgagattagtgtcgtgatttgtggttgtgagcctttataattgtgtatttaatcagatcaatagaatacaaaaggtagcaatgtattttggtagcaccaaaactcagtgtgttctagtgttcgtgttgaatttttgagcgtttgggtgatccaggaatcatcttcgtcgtctccgataagggcacaaggcacaccggcgagtagaagactacatgcctatttggtttagcttttttctgaggagtttttctaagaaattggttgtaag

SEQ ID NO: 123751 - DNA, 539 bp, Zea Mays
catcgatgtggtagatgttgtcttggaaccagtttaacttattcagaatatcccatttgagttttggatcagaaagacagggtcacccgaaaaaggactcttaaattctataaggtacaatggaaccaacatactaaagatgaagctacctgggagactcaagacatttgggaaaagaattttcctaggttcttagcttcatgtaatctttgagaagtgtacatttgttgtaaagttggaataaaccccttcccaccctactctgtaagacaaataaggaaataaagatgtgacgtgtttccttttccattactcatcctaggactttaaatctcaggacaagattctattatggggggaaggatgtaacaccactggtgttattgacaccaaaacttgagcataacatcatgtgcatttacatatcatgtgtttgttacacctagagtgcattcactaggtaaaattttcaaacaagttgtgatgataggacttgatgtgtacttaaccctagggtagggtacttaaccttgaattag

SEQ ID NO: 123752 - DNA, 503 bp, Zea Mays
ggcccccgaaatatcaggatcggctctgccgtcgtccacgctggccatatgacatgagctcccctagacatcatgtgccacccgagaacaacgaaatagataaccattgaagcaggagatttgttacgaatctggaagaggttgttgcgattcgaccaaacgatagagatttgccctacgcctatataaagatagccatctgcggcccccttaatcatctagctcgagttgtgtaggccaacattgaaagtcggatgttagccaggaagacaaagctttatcagaagccgccggtgaggggatcacagaaccacggtggtttggttcttgacgaacggctttggaggatcccagaccatgtagaaggtgtacattacctgattcgagcaagcgtagactagggcactggcaatttgtcaccgaagttggagtttcgccattaagccgcacacggtcgtgggcgggggtttgcgtcgcatcaatgcaggtaagtccttgttaac

SEQ ID NO: 123753 - DNA, 350 bp, Zea Mays
atcacgtgtccatgatttcggatattttttgacataaattaggataatacaagtgcagtctgttgaaggaccacgggagtactaaagaaagtaaagaactcattgaccaacaaatgtagttcagaagcaaagattcaaaccaaatgagcagtcgaatcttgtgcaaaattaaggcccaaagacatgccattctcattgctttcagttttatcctaccaatctagtgacccaaacagtttaattacaagtgaatcaacagaaaacaagatctacagactgcaagtatcaaaattaactaagagcagtgattggaacatagaaaattgagttcactaaacataataagcata

SEQ ID NO: 123754 - DNA, 392 bp, Zea Mays
gaaaggtcccactatgtcaaggcatcatgtagagaatgaccacatgatggatattgtttgtagctgagatacatgtacacgagcctggtttgcaaagaattgacatccttcacatgtgcacacgatttcgtttgcatcatttattgttgttggctagaagactccctgtcggtacgcctttcccaccattgtcatagctcctgcatggtcgtcgcaaatgttagagtggatgtcttcaagtaatacttttccttcattagcatcgaaggcatgatataggttcgggatctcggagtaagataataccctacatattgtttgtggtgtctattgctatgtaatatgatctgctgatctaccatctaggggttacatgactcttcttttagatt

SEQ ID NO: 123755 - DNA, 468 bp, Zea Mays
ctccaaggcaccctccaccaacagccagctaagcaagacccagtttcacggcaaggctcgagtgaaccacgtcgacacccaagaagctcagcaagcccctggtgtagtgcttggtgagttcctagtcgaatttatccatgctcctgtacttttttgattctggagcatcccattctttcatcgccactagttttgtggaaaagcatggcatccccactacatctttagaaatccctttggtcactcgaaccccagggttagacctactatgccacctcaaatgctcccaagtcagaattcttttaagtggggtagtattcttggcggacttagccatactaccatcccatggaattgatgtgatcctaggaatggattggttgacccagcacaatggcatcataagcatcatagataagactattcttctcaccgaccaccaaggaaaatcagtttcgtgtaaagctc

SEQ ID NO: 123756 - DNA, 423 bp, Zea Mays
gtagcctctttttgctgctccttcaaaggtatgtggttcagagcaaatatttatttcagataatcccttcaccgtaattctctcttctggggcaactattgtttgtcttcaagaaacaaagataatgagctggaacaacaacttattgaaggaaacattggggtgtaagttaccaactcagacggttcatttaccatccctgagagcctcaggtgggattctaatcgcatgcgatgcggattttttcgaaatgattactattccctacccatcagtatattcgttatctgtcagggtctgctcccgtctaatcgacgtggcatgggaccttgcaggagtctatggccctcaacctgaaaatgagaaaatgactttcctgacagaactgcgcaatattcgtaatatgatgaagccgaaatggtt

SEQ ID NO: 123757 - DNA, 408 bp, Zea Mays
ttggaatgtcatttgacactcttgatgaagtggaagaattctacaaaacatatgcacatgaaagcgggttttctgttcgtataggagctcaagctaagaaaagtgatgtggttgagaataagagatttgtgtgttcaagggaaggattcacaaagagatgtgctcaactaaacaagcaaaagaagcactcagagacaagatgtggatgcaatgcgcgtatatatgtgaggttgaatcaggacagtaagtactatatcgcttcttttgttgaggagcataaccatggtctagtgtcacctaataaaattccttttctccgatccaaccgtacaatcagtcaaagagccaagactaccttattcacatgccacaaagcaagtattggtacctcgcaagcatatagacttt

SEQ ID NO: 123758 - DNA, 294 bp, Zea Mays
ggcaagatcgccatgtaagattttttccttgatgcaagttgtcgtttatgtgtggaagtcgattggtttccggcagtgtatagggagtagtcgtgtcagcaagatggcggtgtcaacctactgcgtcctgaggcaaaatcgtgtcaacccatgtccaacggtggagatttgcccccaaatttttccaggatgtgcctaaggtaatttggcgccaatttagtacttgtattttgtggatttgagctttggaaaatagagaacaaatctgaactttgggaaggggttaaaattcag

SEQ ID NO: 123759 - DNA, 575 bp, Zea Mays
gtcaaatcgactgagtttagttctcatatagctgatttgcgcaaagcctttgataaaatgcgtcggtatggtttgaaaatgaacccacgtaaatgtgcttttggagtgtcggctggtaagtttttaggatttgtcatacatgaacatggtatagagatagaccctgaccgaatcaagtctattcggaatgtgggacctccgacctgtaaggtcgaggtacaaaagtttctcggtaaggtgaattatttacgaaggtttatttctaacctagccgggaagattgatgcgttcacccctattcttcggcttaagaatgatgccgaattcgcttggggggcagaacaacaagaagcatttgatctcatcaaaaaatacttatcttcggctcccgtattaaaagcaccacgagcaggagtaccattccgattatacattgcagctgaagataaggtcattggagctgttctaacacaagaaactgaaaggaaggagcatgtggtgacatatctaagccgaaggttggtggatgctgaaacaaggtacacttttattgagaagttatgcttatgcttgtt

SEQ ID NO: 123760 - DNA, 284 bp, Zea Mays
gatccaatttatgttattttattgagctgcaggattttaagatagaggttttgtggtcttagttgccagaattgaacctatagccatctacagtgattcagatcacatgacattcaggttaattgtgaaagtgtaaaataagtattgtccaacatatgtatattaacttattgataaatatggtctaattgtttgtcttccaatggtctaaatatgcaccagcaatattgaattttgaatgaattaaattgactatctcattacaaaacatttgcaattagttt

SEQ ID NO: 123761 - DNA, 555 bp, Zea Mays
gtgaatttttttatcttctataccaattcagtgcctcatcaattataaacttttgcttcaccttttgattttttgttccctaggttcattaagcatgtttacataattaacttgctttaaacatggtactgctatttcacaaactatgatgatgaacttttaggagcgttgatcatgtgactctgacctttgatatattgtttgcacctgtaacttgcaatttttgatagtaatcccacatgctttctttatttcaatattcataattatatgtggatattacactagaaatctattgtaccataaccatgatgttttagactatttgttgtataactatttggtgacgcaccgaaggcgaacattacgccgatgagtcctttggtgttgccggtgtcggagcagccgctattcgctagactgtatataactcaagtactgcattgttttgtcgatatacttctgtgggcactgggtacgcttcaaatcagcttttctaagttcaatagttcaacatggaatactcattacaatatttgttgcagggcaaggaaa

SEQ ID NO: 123762 - DNA, 415 bp, Zea Mays
ctcggattcacctacaaggccaaggaacaatgaaggtccagcaattcgatggggaagggggatgttggatagtgaccaaacagagagcacgacgagaaaaagattaatgtcttaccgcagcgacgagcggatgacggtcgagctggaccgtccgaagtggtgtcggagacgcgggaacaacgagttgccaaaaccctagggttggggacaaaggaatagcccgtgtggaatgcaagatgtcaccaacttcttgaagatgtggacttagggaggcttcttgcgatctatggtaaatgggctgcgaacggaagcgcttccaccaaaagttgcccccgaagctgagcgtttgatccggattctagcttcttgcggccaaaagctgcgcataagctgaaccaaataggggctatttttc

SEQ ID NO: 123763 - DNA, 466 bp, Zea Mays
ggtccgatttgcggtgtcaagaatgacatcccaagctttcatccaattcattcccatgatcacatccaaggataatcctagcattactattaattgggcttgaaattcccttccttcaattttgagggttgcccctcggactatacgatttgtgaaaacctcagccccatctgagcttatccggtacttatgccccacttctaccgatgattggttaaagcgatgagcaaaagtagtactcatgaaagaatgagaagatcgggaatcaaatagtacgactgcgggatgatcgttcacaagaaatgtatcggccatcacaagtctcagtcgataatctcgtccacattggtgagatgcactcgagtaggatagacattgttcttcttgtttgggcgaggacaagacttggtgaagtgccccatctgcccacagttgtagcaaggtcccttcacttgagctataccac

SEQ ID NO: 123764 - DNA, 1724 bp, Zea Mays
cctcgatccgcctccgccccacgcacccgacatcgctcgctacgcccacttcatcgccgcgggcgcaatgagcgcgggctggaggacgctgttgctgcgcatcggcgatagatgcgccgagtatgggggctccgccgaccacaaggaacacatcgtgagagccccttcctcttcccatactgtttcccccctctgctctccttgctctcggaaccctaggttatccgagcggcgatttatagttggggatatgagcttagcttggagcgcttggtgtttggttgccgttgctgttggtcagagtgggtggggagctaaaaaccgtagttactcgcacagccgcacaggagcctgagacctaggttttagtattattggactgctgcagtttgtgctggttaaaaaaaatgtttgtatgcttgtactaaatgctgccagaacaaaaatactggtagatcactttacttttagattttgatagaaactacgctttggaattgcgatgcagccattttcctgattgtttgtggtatccagaccttaccttgggttttgcttatttcttctaagtatcagaacctcaggcttgtgactctttgttggatgtggtatatgtaatattgctgtttgatctaactagattttatcatgtagacaaattatcacgttttaacggttctgtcaggaaataaaatctgaatggaaattattattattttgtgcttacccacctgaaagttcgcacatctgttagtgcagccagtgcagcatccccccccccccccccaaaaaaaaaaaacgaaatggaatagtttgtaaatcctagatatacaaatctggcttcatggtcatggattgttgtgcttctgttgaaacttttgtaagtgaatcagcgattttagtcgatggcaacaaatgtcccataaggtcttaacttttaagtgcaacaagtagagttcttatgatgtcatttttgttgtgcagtttaattaaatgatttcaccagcaaagaatggacatgatataagtagggtacaaaataaaggtgcataactaatttctgcacacatagttagaacagtgctccatattgtgtatttacacactatcatatatttgtttcaatgtatgaatatggatgatatggttatatgatttgtgtaatttatcttaaacatgttcttatcaaacatttgcttcataggaaacttgttatggtgtactatcccgagaatatgaacactccagagatgcaatatttgaggtaagtatgcagcagtcgagcctgttcatatattattgttcctatttgctaatctgggcatttttgcaaatattataacaagtaattctaactgggctgcttccagatgtagtccattagctaatccaaaatttgaattttacaaagtaactaagatcctggttgtccagattacgacaagcctgtagcttttcccttaatcgatcagatcatatcatatgattaagaatgtgcaacagaacccttttgctgtcgatgatataaatgagcttcaatttattttcacgtccataactatataccaagcctttttgccacatttgcaagccacaccgtcgctctgaaggctagcaactcacatgccacctgtaggttggtctgttgtgctggcatgatgacaccggttcctaacactggtgtgaaataaaagtaaacggcaaaagatatgtttatgtgaacg

SEQ ID NO: 123765 - DNA, 462 bp, Zea Mays
cttggcgatcatgagatattgagaaactcattcggtcttcctggccatgtgagagagggaaaaggttgaaagaaacacatgctttgtggactcctcaatggggacgtaaactcttcagagttgaacctcgggaaacaaatcacccttgtctttatgttgaccgcaatctttgcgatttggttctccctctcccctctctctagttctcttgcttgcgatcgttttgagttggcttccaataatcacaattgattgagcaactctaagcaagaagagtcactctttcgcactctgatttcatttatactcattctaatgccgcaagaagagtcactctaagcaagaaaatttcaggttccacctattcaccccttctaggcgactttcaaatagtaaataaacatatgaataaaaggttatacaaatttaaggggcgtcctggtccactttgtccccttctcg

SEQ ID NO: 123766 - DNA, 518 bp, Zea Mays
aattaaaactaggttttgatctatttttccgtcgacgcttcactgctcagtccactcttcacctgagccatttgattctccctagcgcaagcccagtcgtggctcactcacttcttcggtcatcgactgaccagtaagtcgttgacctaacccgcccgttgcagcgcaccttgccttctcatcactcatcagctcgtcgactcgtcggggtcctgtagacaacgttgatattttgcctcctagtccgcaccagctgatgggcaagttgttggtgggaccatggtgtcacctgtccctcgctaactcattagagttccaccacgccgttgcaacacgacaatgagtgtcgcttgccgtcaccgtcatctatcgctaccttgcttcctgcactcgctcctccaagatgtcgtcgtctcaccaacgccatctcacgacaatttcgatgactcgccagaacgacgcaccgatgcggctgctccgccctagtgcctcgtcctcagtcagtccacatattttct

SEQ ID NO: 123767 - DNA, 482 bp, Zea Mays
gtctagcgaaggtgagatggttcgactgaaatacaccttcagatatgaagataaatttgatgaaccaaatgacgactggctaaaatgtatcgaagctacaagtgatgaactgcttgggccatattccaaagcggaagataatgcattatccacatccttcgggggtcgaggaaaaaagagattgaacagagtttttgatgccattggttttgtttaccccgactactgctactcgctgcaaggacggggaaagaagagaaaaactgctgcttcgaccaagactgctgcttcggccactccagatgagcctgcgccgaagagcaaaaagttgaaagtccttacccaccggccacgttatattgaaccggccgtagtgcctgagtttggcggggagacttcttcagctgctaaaccaaaagagcccattcctcctacgcagaaggttgaagatccggctgtaatgtcgaaggtacccttaaccg

SEQ ID NO: 123768 - DNA, 563 bp, Zea Mays
tatgtttaacatttcaggaggcgatgaaatgcaagttggtggcgcagataggtctgcattctgttgtggtcgctagagggcaggcttaccctccaaaggatgttgtaactgtccatgggattgagcggcgagatgaccacacaaaatgcaggttgattttgtgtttgaaaacttcttggattttccgctccctaaaccaatcgctggtggtgatatgttcactcttggggaagccaaaaattcatttgtgttatggcctaagtcaggcatacaactagcagaggtacactttgctaacttcaacctgatgaactttttatatttattcgcaacttggttaatgtcatgtacttgtttctgaattttacataggaaacaacagttcatgcaaagcctcaacaagtcccacacacatcgcctcaggtacttcatcacacacctgaaaaggataaaatgccaacaccaacaatgggtaccgaggatatagatgtcacacatagtgcctccaatgtcagcaagaagaggaaacataagcataaaaaacataacaaaagcaaagagaa

SEQ ID NO: 123769 - DNA, 430 bp, Zea Mays
tggtcacccattctgagaactgtgtgggcactggattcttgtcttgtccttttaaccattcttctttaatggaatgactcacagctctcctgcatattcaagttaacaattacgcatctcgtattttttaagcaacagttcacatcatgtattcgccctcactttgaacagttgattaaccctaaaccctcttatgtacgcccttagaacttcaagttgctaatttcttaactaatgaacatacttgagagcagttttctgccaccctctcagaagctcaggcttcatgtttcaaatccaccatgttttgttttatttgtttcgttgggatttgagcttctcacaacctcattgtatatatacctctttgctgttcagtgaaatgtacatcattacatatagcttatcatttctctaactaacatccgcg

SEQ ID NO: 123770 - DNA, 559 bp, Zea Mays
atctgtatgaatccaaattatccagtgaaaatatgttgtagcacaagttcaacgaccttatcgctttgaagaacagatcaagagcagtgcttgttaacagtgcgcattcggctagactgctagtccacttgctgtcaggacttgtgactatttgtctgaccacagcattcccatattcagctgcaacaagaaggcatgaccaagaccaaccacgatgctgctcctcctgctgtcgcccataaccaccacgatgctgcctcctggaacggcagcagctaaccgattgactggaaccatgtcactcacgccttgttcgtttgtgcaggattgtacccgaaataaggtcctcctcctgctgtcgcccataaccaccacgatgctgcctcctggaacggcagcagctaaccgattgactggaaccatgtcactcaccgactcacgccttattcgcaggattgtacccgaaataaggtcccgttctgcaggccggtctccaagccagaccggtaaccaagtcagcctagggtcgagtggaacatgtcttgttactcattcctgg

SEQ ID NO: 123771 - DNA, 839 bp, Zea Mays
gaaatttacatgagtaccttgagcttcgtaaaattacaaggagaaggtaaagaggatacaacttaatcggtagagcgatgaatcctgcctgctccaaccaaaaactttgaacaatgcatggcactgttactctatttaaaggcatagggtagagcttcgacgaatttagaattgggcccttagacctatacattcaagttattaaacatattgagggtactattaacttttccatcttctatcttgatgtgtaagttttgagaactccttatgatcttgctcaacttcattagttatgcacacatgctatctgtctgaagcttctgccttcgtgtttacatttgtcaatagcttcagctgaagcctaccttcatcattagtcctataacaaatgaaacaagatagaaaatagttgttgaattagtgttttgaggacctttcgaagaaataggccccaacagtagccctttcgcggtgctagttcatttttataacgagcttcgtctgcaaaataaacgaaggcttcatgtcaaaggttcaaaaaacacattccttgagcacgttattaaaaaggggtaaaatataccgtgatggtccaccaatcagagagtgcaagcggcgcgaccgcttgcttcaccgcttaccgggatatataagccagtcttcctggtgagaatattacaacatttattgctttgcaccaacctgctgccacaaatgctcctgcccctgaagctcttactcttgtgcttaggcattttcgtagagctttggcaatctaacaatggccatagttcgctcaactaccgaactgaccactgagggtgagataccagata

SEQ ID NO: 123772 - DNA, 736 bp, Zea Mays
ttccccccttctttcttcttcggcattccccaaccgctggaagttggaaatgtcttgtttgccaaatattcttgtactagatccctagtactaattttggcagcaaccaccctaaactcaactttggctacctggcatggagagccaagttgcatatggcacaagggcctggtcatcccgaagcttagtttcataggcttcatgaccatagtcatcagcttctcccttctcttctcgtctactttcacaaaaaaccattcatttgtccacccggttggccatttggtgcgatagcaaatcactggagcctttgtatcttttctataagcaaagttgtagcagccaaagttcttatgaagaccatctgccctggccttcgtctgataatgcagttcatgtacccggcaaaaagcttcggcattagcatccataccctggcttcgcagagcccatataaaaacactgagcctaacgatagcattgggtgtcaattgatgaaggtatatctcaaagttcttcaaaacctcccctatcatgtcattcaatgagaaccgaagtcatgctctgaagaagctcttgaaaacgacaacttcgtcttcttttggttccggaataatttcctccctagcaaaccggacaagcttgctttcagcctccccgaaataaccaagtttcctcatcataaccatgtcatcctccgttacagtagacttcccaaactcaatgtgactaggct

SEQ ID NO: 123773 - DNA, 668 bp, Zea Mays
ttattggtacaagggatttaatccaagagcatatagccttcagagtatggccgcttgtagagaactgggaaatgcggaaagaaactgtcaccgagtctagcgaaggtgacctggttcgactgaaatacaccttcagatacggagataaattcgatgaaccaaacgatggctggctaaaatgcatcgaagctaccagtgatgaactgcttggatcatactccaaggcggaagataatgcattatccacagccttcggagtcggggaagaaagatattgaatagagtttttgacgctattggctttgtctaccccgactaccgttatccactgcgaggtcagggaaagaagaggaaaactgctgcttcggccactccagtcgatcctgcgccgaaggacaaaaagttgaaggttcttacccatcggccacactatattgaaccggccgtggtgcctgagtttgacggggagacttcttcagctgctgaactagaagagctcattcctcctacgcagaaagctgaaaacctagttacaatgccgaaggaagcttcggttgaacatgctgagtcgaagaccgaggaaaataaagctaaaaaaccaaatattgaagaaacaaaaacgctagaaattataagcccttcatcggaagtaacagtgccgaaggcac

SEQ ID NO: 123774 - DNA, 538 bp, Zea Mays
ggctcatatgcgaaagaccatggccaaaagggtaaggactgcattgggccgccagattagaagtctacggttcagattagactataccattttatgaattcatatgcatccatggccataggatcaaggatccacggcccgaaaccaaccacgtctacatttcatccctggtcctcgatcccccgatcgacgattcagatacaatgcgctgaaaggttactactatgctcaatctgagccgtccaactgggtgtcaactccaagagaccctcttccacccacgttagcagactaggaggcgccaccagtacggcgacgacgaacgccggtgagccctcccgactcacgcactcaccctaatcccataatcgaacgcggatacactatgtgtacaccaatgcgaattacatggagaagtccttaccgtgcgccacgcgagcaggagcactgaccacggcggagggcggaattgcggtggttcctctacttcggcgagaaattgccgcgcgactgcccaagttctggggggtaaggtcat

SEQ ID NO: 123775 - DNA, 684 bp, Zea Mays
ggggggtgttagagtacctattagggtttcagtcctcccctgtgtatttactctctcaccctcattgtaatgggcttggcccatctaactcaggctatatatcaatctcccaaccccttgagtgggttagggtttccattattctacatcggtcagccccatgcacacgatccttgctacgtcgacgcacctgacactgctccttagtgaaaagcaggcgcccaagctcatctgtcgtctccatgcagaagcggctctccgccacatggagccacccgacgagctcctccaacggcattgtcttgaggtcgcacaacatctcgatggatgccgcgacttgattgaacttcggtggaacgacgcgtacctcctccacctcctcgccgagctcgcgcatctccgagacgagggagcttagtctcatggcaaagtcgtccaccttctcaccatccttgaacttgatattctcaaagaccttgagcagcctttcggcgttggcctcccgaacacgtgcatctcccatgcgcatgcttctcacagccacccacgcctcctttgcgctcttcttcacagcaatccccgccttcatctccggtgacattgcgcgcaggatggcagccaacgccctccaatccttggcacgctccctgcacacggcctctaccgcatcccatagctccatca

SEQ ID NO: 123776 - DNA, 677 bp, Zea Mays
gtttcgaatgccggtgctcccttttcgtattctgcctagaatcctcctccacagagcccctttaccaagtttgtattcaaccctcctgttcaagatggtagtccgggccatagagtgcgaccctctctagagaatattgaggtcttcattgctccatactgaaatctccctgaaaaacaaaaacagacccatttctagatgaaaacgactactgatgaggctgaggtgaatgctattctcagtatgctagtgggtgagtcgtctgactctgcctgcactaagtcagcgagtgttgcagctgggcatgtcctcggcaaggatgaaggaactcacagtcctagaagtgttcatcgcaaactattggatcgaacaagccatccagtcgcatctgctaaggggaagaaaagaaagaaaagacttcgaaggtcatctggcttggaactgggtaccgactctactatctcagtcctcggcgatggcctagcgagtgccaacctcgaggatgatattgagaattatgattgtgccagggtcggcggtcgtgtgcttgatgaggatgaagaggatgaagaggaagtcctccctttgattcataagaacagccgtagcaacatcagcgacgacgtcccaattcaggctttatcaggactggttagtctccagaggtcgacgatgtt

SEQ ID NO: 123777 - DNA, 721 bp, Zea Mays
gtgaggtcagcggtgaacgcgtaagacacaacctccaccttcgcaccacccactccctcggtcgaggcccccgcaggtaaccaaaatttgatgtgggacctcttagccttcacatcttcttcttccaactttcacttgtctccaatggccccactacttttgcccttgatgcacactacgtccatgccataggggaccttcatcaatccaaaaactcaattaacccaaacgcttccttttcgattttccaagctcttagccaccttgtggcccatcataggaccaacaagcttgatgaccttgagctaaatctatttaataaactttgcccctatcatccccttcaaatcagctacaaaaggaggccttcacacttgtctgggcaaactaggaaaatcaaggcagttcacctcaccgacaaactagcctcgactcaggggccatattccaacgaccatatactcttcaatcaaatcctagcctccactgaccatgaggcaaatctaaaggccttgtcatccaggtcatccttctccacattgaagtgagggaaggcaccataatcatacgagatcattgtactcacacacagccaccgctcatcttcctcatcccgcacatcgaactaaacgtttgtctagctgccccaccaatttttggcataggggaccagttcagtcacattacctttcatctttgtagtctttgtggtaaaggtgca

SEQ ID NO: 123778 - DNA, 556 bp, Zea Mays
tcaatgtggggtgactactgtagttattcagtcaccccaacaaccttcatactgtagtatcgcagtcagaaaaaacctcgcccatgactaaccttttcgacagtcagaacggcatgctaaccttttcgacagtaagatcagtgatctccccatgaactatcttggagtgcctgtaagtcctagcaggcttcgtgtgaatgactgggttaagctggtggaaaaggttgataaaaggacttcaaagttgtaaaggcagtgttctgactatagttgggagaattacacatattaatgcttgcctatctaatactcatatataccacatgtccatgtacctgatgccaaaaactgcaattgaaaagctcgatatgaaaaggagacgtttcctttgacatgggggagataaaaaataagtattatttggtaaaatgatctagagcttgtactaagaaaaccaatggaggtcttgggattaaaaatctcagaaatctaaatatgagatctccgaagatataaataccttagttctggattttgatacataacgatactataa

SEQ ID NO: 123779 - DNA, 652 bp, Zea Mays
cttcccagagctccaactttctctcgaccagaacaagtactcctttgcaatcacacccacgctcgttggacagtcacaccggtcaccgtttgccacctgcagtgctggtaagaaccttgtaagagtggggtaagatgcttcataatttgtattccaccaccaccctaagagatagttgtagggttcacattgtttgttgcctttttgtctatgttttgtgctatcaatgacaggactagagaatcaaatggacaaggacaaggggcctaagcttaacgacgatgagtgtgtctctcagctggaattgaaggagatgatgcgcgcgatgactaaatcttttaaaaataccaggactctgcggtgacatcctatgagcagcttgatcgacgagttgctgaacttgttacacgcatggacgtactggaggctcgtcccccaccaacaactccagccccagctcactctcctgtggacgacgacgatgacgatgatgtttatgcaccgctgcgacaatgcctcgcacgtaatcgacaaggtatgggaggtaatggtagacgtcgtcatcataatcctgaaccagaccatgattcatttgctaagattaagttctctattccaccgttcatgggttcttatgatgccgaagcttact

SEQ ID NO: 123780 - DNA, 382 bp, Zea Mays
aaactacgagccacgtcgagcccagcctacgaagcccagagtcggcatagtctaaatgatggcacctgggactcgcaaatcccacgccatccgccataaataatatgagacaatcaggcgatcccgggcccacgaacacgtgtggctttaccctaggtagaacgtttggttttatcgttgccttatgactcctttccatagaagccaccgttggtctacccctcttccagcctataaaaggagaggttggccctcaaacaaaggggctggcaagattaaggtctaggttgagttcacttggatacgcacccacaagcacaaaacccaaacgaatcgacgaacaagaggaaaaacactgacgaggactcagaggtcggagtcc

SEQ ID NO: 123781 - DNA, 723 bp, Zea Mays
caggtcgggacctgtgcggacgcctgttcatagtccgcttcattctcctcctttgaccccttcttctaggagtaaggtgaagccatggcagggcaagttgctgtcgccacggtgttcgccaaagctcacacttggagatgtcctatcaatggcgcaagagcgccggaaaccaaattacaacaatgggcgtcgtgttcaggggatgaagaaggcggaatgtacggctgggttagtggggcagccggaggcagtttcaaatttgcttccttgtttatttggaaaggatggagatcgggaaaatctgcaggaatcgctcacatcttcatttccggatacaaggagccatagtacgtatgtgtatggtaggcgtagatttgggagagcccagcagctgaaactcagccctaggattccttacagacctacgccagggctggcttccctttttgcacgtacgggcacatgggtgactagtgcccgggcagttcattcaactctcaggaagtcagccaccatctcatacgtggacgcagcgaggaatacaatggtgtttggcggtgatcagggaggccggggtggtggtagaggccatcagcaatccgggggtgcagacgggtatgcttcaggtcatcaacagcatagtggagcaggtggctttgtcgctggtcagggacagggatccggctatggccagggcagaaatcagccaatgttccaccccgg

SEQ ID NO: 123782 - DNA, 472 bp, Zea Mays
atttattattcttgtatgtggctgatggtttgtctaagctgcagtagactcagcaaggtaatatccatggagtgaaggtctgcaggagagcatgcacatgaggtttcacacctactgtttacagatgattgtttgctatttttcagggctacggctgagcagtctggacgcattgaaaatgcgcttccgaaatattttgcagggccacagggcaacagattaaccttgacaagtgttccatctttttttagaccgcgattgggaaccgtgaatttttataatctagaccctgcacattatccaagaaaatacagcacaaaattgacacttgggatccccatttgcaacacattactcaagtagaaaaatcgaaaacgtttggtgagatagcagataaaatatatcttattaccagaattcgaagcccccttgatgaaaatatgcaggacaatctcatggcagtgagagagag

SEQ ID NO: 123783 - DNA, 500 bp, Zea Mays
atctttgaaaacacgctggctcctctcatctggtcgaacagatcttttattctgggcaaggggtacttgttcttgatcgtgacctcattcagagctcgatagtcgatgcacatcctcctagtgccatccttcttctccatgaataggataggggcggcccaaggtgaggtgcttggcctgatgtaacctttctctgacagctcatctatttgcttcttgagttcaaccaactctgatccagataccctgtaagctcttttataaatgggggtgttgccaggaagaagctctatggcaaactcaactttccgctcaggtggcatacctagtaaatctttcgggaacacatccggaaactctaacacaacctttatagtctcgagtgaatctgcctccttgctatcaatagccatctgatgacaacctcctttccttggctcgggtgagactaactcagctaccacttcttctcctagtggggacaccaacttaattatcct

SEQ ID NO: 123784 - DNA, 511 bp, Zea Mays
cggtggaggatccctttccaatatacgatacaggagagggatacaaagtggaaaacctcctcggtgttgaagatagtcgaagatgattgccatggagtcgttgtgaatcgacgtcgcaccccctactttagcgcgccagctgtcgtatttagtcccgactgctcactgtggggtaacccacgcagtgcttttgagaggatagcgatgttgattgcaactcgatggtacgtgcaggagcacgtcagaatacaagggaattatataggttcgggctgcctgaatgtgtaatacactatgtcatgtgtggtgttgagtattgagtttgcttggagttcacatattacaggtgagtcgtggatggtcgtggatgaaaactcctattggtctactggtgggcgtgatggtaaaagagagggattcgttttgtagggttacctcggctaccttatatagccgaatagggagatatccttttatagattgtgaaaacttatccacttctgctattctt

SEQ ID NO: 123785 - DNA, 406 bp, Zea Mays
cgaaggcagcgcctctaagacccaaaatttgtgggctctctacttcttcctcagatgaagtatttttaatcttcgaggaatggtctccttcgtcagtttccttagtagttagcataaactgagccagtatcgatcctaagggacttagaagggagaatggcaatggttatgtcattacctcgagaatccgtgtacaaccctaagaagtcattgtagcactctctccttggtcttccctagtagtagaacttttgaagttttcactttcttcttttccgggcccaaagatggttctttgtcaccctctgactcatcattttttgtatcagcttcagcagttttcttcgaactcttcccaacactcttggtaatcttttttctcttctctagtattgatagcaggata

SEQ ID NO: 123786 - DNA, 285 bp, Zea Mays
caagaatttccatattttagagacttgacttactctaacttatatcaagacacacttaagcatagtcacataatagatgacgtgacggctacgtagtcatgccatcacttcaccacacattcccaagtaacaaaacaactctaaccaaacttggcatttggccgatcgattcctaacccatttttcataccaccactacaccacacatcgcaaacatagactaattcaatcatacttcacatggaaatttatacagagtcgccgagtaacaatattaacacatag

SEQ ID NO: 123787 - DNA, 595 bp, Zea Mays
agtcttttattcaaaagacagcgcaacaattacttaaagacgcagccggaataatgttgattgaagtctatcattacaaccacactccgcacaaagccgcccacgtacgtagccggaacaatacaagcgtacgaaaacgaccaacaggccacaccatcattacaactacatacacacggcaagggcatcacatattacattggctcaacctttgggatgatacccatctccctgtagttgaacatcattatcctccattcctcaccctcaaaaagatttcgtagctcgccctcacctacactcgccccaattggcgaggataacaattctcgcttaccagtcccgtccacgcgaagaagatcactctccatctcactacgatgacgcctaccacttcgcgacaattcactcactctccgtttcgccaccgccctatgccgcttatacccagtactcgcgcccgggagcccctcggaaccctccacgcacggcgaaggctccgccgcaaccacatctaacgctgcaaaataatccaagtcctcatctgaagactcctccgtccacacaatcgaactcccagaatcatcaaactcaa

SEQ ID NO: 123788 - DNA, 508 bp, Zea Mays
ctcagtcgtgaagaaaatagacaaatacatgaagcattgcctcttgagaggtgctggcatcaataccacataggcacctcatgcaacttggcatttagcatgtagaccgaaacacaaacgggcctggagattctagatctcaagaaacacaataaagccttgctcatgaaattgttatacaaatttttcaacaaacaagatctaccatgggtgcatatgatatgggacaatagatacaaaaatggtatactgcctccagaaggtagtaagggttcgttctggtggagatatatattgaaatacttgtcggcattcttataaatagccaaagtcaaaacaggcaatggaaccacaactcatctttggcaagaaaactggaatgacacaccaattcgtgaaaagtgcccatatctttttcctatgcactgaacaagaatataactctaagacaagcaaaaatgacacccttggttgatgatttgttccatctacctttgtctgcctccgc

SEQ ID NO: 123789 - DNA, 341 bp, Zea Mays
atttatgccagagttagacaagtttgtggtcgttttcatcgatgatattctggtatattccaaaaatgaagccgagcacaccaaacatttgcatactgtgcttcagagactacgtgaccatcggttgtatgccaagttgtctaaatgtgaattctggctgaaggagattaaattcttgggtcacacaatttctcaggatgggatatcagttgatcctgagaaggtgcaggaggtgatgaattggaaacccccgactacaatgaagcaaatacgaagttttctaggattggcagggtattatcgacgatttaatccggatttctccaggattgccaaaccaa

SEQ ID NO: 123790 - DNA, 757 bp, Zea Mays
gttggactgtgttatactgtctttggtggatcatgtaaaatatgtgatgcgatattgtagatgataatgtttgatattgtttaaaagtttgacattgtttgtagagtgaagtttaaaataaaagatgagatagatgataatgtttgatattgtttaagagtttgacattgtttgtagagttaagtttaaaataaaagatgagatagagatatgataggagagctgttagagacgcctttagaccgagttcagcggatccctcaccgtgagtggctaaacgactatgggttcgagtatttcgggtttagagctttgggctcgggttttaactgagcgcagaaacggactggcttcgacgtggagacgcgagccatctttcttgcaggtcgcgtgtttccgtagtgggccacataaatgaatactttcaaaggaggccaaatgctgctggcgtgcctgagttcagcactatacagaaggtaatcattgctctacacatgcttgcctatggtgggactgtcgataggttggacgagtatttcacatgagccagagcacaatacttgagacattaagtgagatcacccgaatagtggttagtgtgtacgagtctgcttacctctgagcaccaaatgcagacgatatagcaaagctactagctaaggctaacgagtggaggttctcgagtatgttaggaagcattgactgtatgcattgggagtgggagaagtgtcccaccgcttggcatggccaatacaga

SEQ ID NO: 123791 - DNA, 449 bp, Zea Mays
ctcttcctgaagcagacgaagtagtggtttttaagatttttatgaaggctgggcttcgttttcccttgcacaagatgctggttaaagtgttaaagacatttgagatatacctttatcagcttactcccgaagctttaattaaagtgggagtttttatttgggctatgaggagccaagggctggagccagatgccaagtgtttctgcaacatgcatgaattatcctaccagatgaaggcaattgggaagaagcagtatcacaacaacttcgggtgctatagctttctgcaccgctttgatgtgaggtgtaccgtgccaacgtttcgaaagaaatggccgagctcttggatgaaacaatggttttatgtcaaaattgatttgagcaagagggaagatgtgaggggtataatccagcgccccatacggtcacgcttcggcatcaggaggccg

SEQ ID NO: 123792 - DNA, 667 bp, Zea Mays
taaagctctagctcgagtagcagaacttagcgcatccctcaaaacctgcaagcgtactacaacaccttgcatgaagaagtgcatgtattgtatgatcggcttcacccgaacatgccacccgatgtggcagcaatgggagctggaccatctagaacagcaaatgcaggatctgatggggggattgacctttttggagcccctccttccatgaatcttgcagatgaacggtctcttgaagcaggcagtggaatagctaaggacgaagaggattagagtagtatagtctaagtactgtacttatgtaaaataagtaaggaagtcgagttgtataatggagtatgtatattattactgttccgcaatgaaataaagatggtgtatgtttggcatattttatttccaaatgtttctttgcctcagatgccatcccggacctatgctcatgatgcggcaggtacatcccgcggtggggaggacactcccaatccaccacctgtacctcctaccctggccgaggctatcactgccttgatcaacgccaccgccgacaacacgcgctttctgcgcgaaatggcgggcagccaatttcaacaacacggaggaagagttctccctcaaggaccatgagacactacctatctagagttctccgaaacctgcccaccgc

SEQ ID NO: 123793 - DNA, 601 bp, Zea Mays
gtgtttacctcttagacacctaacaatgtgtttttctagctttgcaactttctcaccattcttgaatttattctgaaacactatattttgatgacagatttacaataagtgaaagacagtggattgaagcacatgttgagaatgctaaatagcaggttatagtgttatactctatattgaaagcacaactgtcatctgacgaggctcatacacatacgggtatccattctcttaggtaaatgttatgctatgtttattgatcccgactcatcagttttcctgctttgtaccatataaatagattatatacttatatgcataactgcgaataaattcctagagcagaaacaaagatttatttaattatcttataagccctcatgtatctgtggcatttgcctttagggaagttgttggagagcataatgatacaaaccaaatctccttgaagttccttaaagaaggcagtgtgcagtcctctccaaatgaatttttatcaagtgatgttggtcctcttctcaaaatgatgtgtcatttatattagtttactccaggcttgctgcacactaaattttcatgtgtgttacaacttcattcctca

SEQ ID NO: 123794 - DNA, 631 bp, Zea Mays
ctttggactgacaaggcccttgtactacatgcaacttggctccccgtgccagctagccgaagttgaatttagagtggtagctgccaaaatcagcactagggacttagtgcaagaatatttggcaaatagaacatttccaacttatagcggctgggggatgccgaagaaaaaggaagggggaaaagtatgagcttgttcggctcccctatcgcttcaaatttgagaaatagttcaagaaaccatgcaatgaatggctggaaatgatcgaaaccatgtgcaatgagatccttggcaactatacgaagaaggaggaccagctaatgactgctgccttcgatactcgggcgaaacgaaggctgaaccgggtaatggatgcattaaacttcaaatacccagattacgagaggtttgacggaggggctgggtgtgtgaaaagaaaaagggttgttagtatcctaagcaggcaagctgcccgctcagtaaaagaagatgagaaggccttgaagaaaacaaaaacagtgcgagagccaaaggcaacaattaagacgctgaagcttgaccaaacaccctctactgaattgaaggtcgatgaagcggtagagaaaaccccttcgttgccaactggtggcga

SEQ ID NO: 123795 - DNA, 283 bp, Zea Mays
agtctcagcatgagctagatcgagtggaccccaagtggtggaagaagtggggtcaggtccgtcagctgtagtagtggaagcaggctcgactagggcagtcggtggagtcgactcgagagcaccccaatcggcttcgtcgtgctcctcctccacaaagatggtctatcccatctgatctagatctgtaggctcaaagacaggggatgtgcaatgtgaagtctcatcgaatgtaacctcataggtctccataatgtggttagtctccaggttaagaacacgataa

SEQ ID NO: 123796 - DNA, 619 bp, Zea Mays
taaaatgtatcgaagctacaagcgatgagttggttgggccgtactccagagcagaagataacgcattatctgcggccttcgggaaccgaaaaaagaagagattaaacagagtctttgatgctattgggttcatgtaccctgattaccgctacccgccacgggggcaaaagagaaagggtgccacttccgagaaggatgctgcttcagctgctccaagcgagcccgcgccgaagaggaaaaaggtgaaggttcttacacaccggacgcgatatattgaaccggccgaagtgcccgaatttggcggtgatacctcttcggctactgaagccaaagaacctgcgcttacacagaggattgaagagccggctgcaacaccgaaggcacccttggtcaaattagctgagccgaaggccgataaaattgaagagatagtggtcgaaaaatcaaagaaattaggggttacaagccctttggcagaagtgacagtgccgaaggcacaaaaaggtcttacaacgacccctaagagaaaaagaatgattaatgtgctagatgtgctcaaaacaataaagacaagctctactccaaagaaaaccaccgaagctccaaaggcgcagtctga

SEQ ID NO: 123797 - DNA, 542 bp, Zea Mays
tattagttgttcttggggagaccattgtctttttatgccagaaaacaaaattcggttcttctattttgtagtttcactttcgtttgtactgatctggtgacaaggaattccatagtacgcacaacaacaaaatgttccaagatcacttgtctgttggtgtgcatccttttgtgtctgatgattggctgtttcatttctagtgacgtttcgacttgccaacaattgctggtatgaggaggtgagttgagatgctttctgtattatcagagcttatgcatgtaacagcttctctaagtcagctatcgagggtgatgttgtggttgatgtcatatggttatcggtagtctgctcatgtgctataaattctgctaaatcaacttgttggagtctagctaccacttgagatgttgcttgtagaaactgtgcatgcgccttcttgaactgttccatctgatacttagctggaggagttgccaacataatgtgttctttgcacttagtgacatcacttgcagttgacattccaaggtctgacatttgta

SEQ ID NO: 123798 - DNA, 439 bp, Zea Mays
gaggaagcagaaggtgcaagtcagacaagggaagctcaacttcactactctggaggaagtacctgagggagcccccatcatgactggtaccatttcagtttttaatcaacctgcattaattctgtttgattctggtgcagcttatagtttcattagccagaagttcagtgctaaatgcaaattgcccttctgtcatgcaaaagggtcattcatgacaaccacacctgggggtaaaactgtaaccaaccaattaatccgaagtgtgcatattcaactgggaagccacattatcaaaaccacccttcttgtgttggtttggaaagcgtggatattattctgggcactaattggatgaacctgcaccaagtagtgcttgatgtggccagccggatcgtggaagtcaattccccgttctatgggaatttcaccttaattctgc

SEQ ID NO: 123799 - DNA, 484 bp, Zea Mays
ctggattattctctggaccaaagtttacttagagctaaagttgagtactaaaaaaaactaaaccactttatctcacttatatggtgtgaattttgttatgacgttagctaagctttagacaacattttttttagattttgtgtttacgtctcgagagctagaatgatataaactcaaatggataaagcttagagataaaatgcaatcttcgctataacctacgtgaactgaaatttcgagtattcgtgaaagctagcgtgcaagcaacaccatcgtttgctctctgccactgtacagtgtcaggtagtagtcaaattaactagtacaaccttatgtaccacttcaataatgcaactccatcatatatatcagtgcaatttgttggcacaatccgaattaatctccatcatcgctccatccacatcaggtcgacggacaattggtccttgtctactggagtagtagtcccgcacatggatagatg

SEQ ID NO: 123800 - DNA, 375 bp, Zea Mays
gccttgcgagcgatgacttgacaggtgtctttgaatctgtacctagcagcagtgacactccattccacatggtgcggactggatccaatgtatacagtcacgacacacttctctgtgccatgctcgatgaattcatgaccatcatactctggctggctcctgatttcgaggcgaactatgcatgctctcagcaacttggggaaaccatcttcattctggcaaaagctggtttggcaacggacctccatctcacttatgagagaaggaaagagggaaagcatttttgaaatgagggatgagagcaagaattttttttaagaaaatagttttgactcaaaaactgttggatcaggctaagggttacgtcctgtggcc

SEQ ID NO: 123801 - DNA, 335 bp, Zea Mays
cttaccccttcgtccaatccaactgcgtccgtcgatgcgagatccagcggtgcagagtagatctttgattcattaaatccgtgccgttaatctttaatccaacggctctgatcgcgtaccgattcggcccgggatacatctaatcctagcggtcgatagtcgatcgtgcggctgagattgcaagatacctcttcggccgtgctttttgctaaagagaccctctgttttattaaaatcaacccgccatccccgttttactgtttcctgagtctgggacgacttaccccgagccccctgacttttcttataattgaggcccagtccagtgaatagga

SEQ ID NO: 123802 - DNA, 415 bp, Zea Mays
gttcttcttcagcgccctcccgatttcgatactgcctgcgtgcttgcttctctgcaggaagaggagacggaaactgaagcagctcgaaaatcggagttcaaacgcccatattattcagcagctcgactagaatcccccaatgcaatgaagccagcattccgaggtgcctttccattgccggcaccaccccaagcaacagatgacaagactcccttgccgatcaacaaatacaatcaatcagctgctgataaaatggaggctgtccgaaattaccgtatggccaaggggctgtgtaaagtctgcgcagaaaaatggcacaaggggcataaatgttcaactgcagttcagttacacgccgtgcaagagctttgggatatctaccagcatgaggacacaaattcaccccaagtggacg

SEQ ID NO: 123803 - DNA, 341 bp, Zea Mays
gctatggatcctttggatctattaccagacttcttggttaggttgataggattgttctttagtattaagattttcgactagatcggtagagacgacgtatattgtggttgttttctaactcataatattgctatataacccttgatttcttctactcttgttttcttgccattattgtcatccttggacaatatctaccttgaaatattaaacttttgcctctctatttttctccttgataatgctttctccctattgaattcttatacttttgctttcgtgccattgtattgccactcttgcgcaatatctaccttgatatattaaacctatgcctctct

SEQ ID NO: 123804 - DNA, 306 bp, Zea Mays
tcatgaaccaacatgatctagtggaaacagtatttgcaactgataacaaagaaacatgaacccttgctttctgcacttccgcgtcgaattgatgcctcctcaagtcagcaccgccaaaagcgtcggcataacgttgctctagcgtttgtagatgctgctgaagaagccaagttatagggtgtgataacgatatgagagtgttttctttatcttctttcgggattgccgtgagaacaccctgttgatttgtctatgggtgattggtgggaggggacgctggttactcagacattagacctatttccc

SEQ ID NO: 123805 - DNA, 388 bp, Zea Mays
ctggagtgtcgcctggtgcgtatcttggagtcctcggagcatgtcatgagaaggagaacaattaagtatgttaaggtcttgtggactaatcagtctgagcgcaaggctacctaggagctgatgcggcagaagtacaccgaacttttcgttatgggtgagtttttgtcttcgctgatctctcttttgtcgttctgatagaagcgttggaattcgaggtcgaattctttttaagggcggtagagtgtgatacccaattttctaaaaagaagttaaatttcttttccctcctctttcgtgctctgtgccattggagtttggagatttaggaggcgcatatctcagaggaacggtagaattttggcattcattcactggggccgagagctca

SEQ ID NO: 123806 - DNA, 355 bp, Zea Mays
acacgacatgctttaagaaacagagctgagacattggttttcagctatgttatgcaacataagaatgttattgacgggttcatcgacatcaccacaccgatctgcatgtaatgagccatccagattttagccacaacaacaaatctacatagaacatagacatagtggagcctaatcttacatctgaccataaaatggtgcaaagtagcagtgccctcaaagacatttccaaatatatctatatagatgatgtagccactaaggtagggactgtgaatactttatggtagtacaatttgggagtattagggacatgtccacagaacaaacaggataacttattgagcttgggtaa

SEQ ID NO: 123807 - DNA, 543 bp, Zea Mays
ctaagccctcataggggacgcactatatagaaggggtgcaataggagtcctgatgaagtgcatttcctcggttactgggagacaactactagatgaaattcacgccggacagtgtggaatacacgcagcatccaaaactctggtagggaaagtcttcaggtctggtttctatttgccaacaacaaagagtgatgcagccgagttagtccagagatgtgaaacttgccaattcctgtcaaaacaacagcatttaccagcacagcagctgcagaccatacctgtaatctggccatttgcgtgctggggactggacatgattggacccttcaagaaagcttagggaggctatagtcacgtgttggtcaccatcgataaactcaccaaatgggtagagtacaaacccattgcttctctaacttcagccaaggcaatggaattcatacaagatataatattcaggtttgggataccgaatagcatcataactgacctgggatccaacttcactagctctgaattctttgatttctgtgaacaacggag

SEQ ID NO: 123808 - DNA, 617 bp, Zea Mays
tggaggttggtgaagagttgcgagcttgaagtagattggatggcgatgtttgccacctcttcctcttcttcggagctagaactttcttcattggagttccattcttcaccaatgtgggcttggccatatttcttcttcttgaaatatcccttgttcttgcccccttcttgaacttatcctttttgtactccttcttggcttcttgttcctttttgtttggacaatccgctatgaaatgaccggtttggccacattcataacatgtcctcttctttccttttcgttgatacttatcatttttcctcacaaacttcttgaaggttttgataaacatagtcgtgttttcatcacttgaactatcttcatcacttgatgtttcgaccactttctttgtcttgtgatctttgttcttcttggaggaatcttgttcatttgagatcaaggcatgattgtctcttgtcttgattggggcttcttcggactcatgttgttgaatcttagcaaatagttggtgaggtgtcatttcctcatagtcatcacagtcccttatcattcttgctagacttttatccttttctttgtatgctctcataaatagtctagtaaccttggagtca

SEQ ID NO: 123809 - DNA, 484 bp, Zea Mays
cttttatggtgttacaaacctacccctcttaaaagaatctcgtcctctagattaagaaacttccgagaataactgggggaattctgctctgagttcatcttctctttcccaagtggtctcatcttccgaatgatgactccactgaaccttacacatgttaatgactttactccgtgtaattctgcgagatgtttccagaattttgacagggtactccaaataagtcaaatcctcattaacattcaattcttccatgggtaactgttcttctggtactcttaagcatttattaagttgtgacacgtgaaatacgtcatgcacatccgataaactatcgggtaactctaactggtaggctacttcaccttttctttccaaaatcttgaatgggccaatatagcgaggagataattttcccttaaccttaaaccttttcattcctctcatcggtgaaactttaaggtagacaaagtctcctacttcg

SEQ ID NO: 123810 - DNA, 472 bp, Zea Mays
agttgggccagctgaagttaaagatgataaggccgtagagccacaggtggaaaaagtaacaaaagtgccagaaaacgtaagcccaccggcagaggcaaatttgccaaagatgcaaagaattcctaccgcaactcccaagaagaggaggatggccagcgtactagacgctgtcatagagactacgaaggccttaagccctgcccctaagaaaattgccgaagctacgaaagttcaggccgaaaccaaagctgggccttcagtgtccaccgagacgaagcctgtcgcgcctgaggaaaaaacagcagggcagattgtaccagaaaagaccaaatctcctactcccgaagctccggtcgaagatgttgactatattattcgacatgcttcggggaagaaattatcccaagaagagatactagaagctagacactttgcccaaagactgaaatatctgaagggggctttagtgttt

SEQ ID NO: 123811 - DNA, 605 bp, Zea Mays
gtgatatgctcccatttccactctggaatttctaatggcttcagcaaacctgcaggccgcttatgctcggccttcacgcgctgacatacttcacaggcggccacatacttagaaacgtcaaccttcatccgcttccaccagaagttttgcttcaaatctcggtacattttggtttcgccaggatggatggtgtaaggcgttttatgagcttctctcaagatatccatcttcacctctgatttctgaggcacacagaggcggcccctgaaacgaaccaaatcattctcgtcaatggtgaactctcgcggtttaccatcaccaaccctctttcgagcttcctgcaaaagacgatcctgctgctgagccgcacgcaccctctccatgagagaggattgaataagcatatgagtctcctcgctagcggtgccgacataacacaaagcgatccccaaacggtccagatcagcgatcaatggcaaggccacctttcgaaccccggacctgctaagggcatccgccaccacattagccttccccgggtgataatgaatggacaaatcatagtctttaatcaattctagccaccaacgctgccgcaaattcag

SEQ ID NO: 123812 - DNA, 416 bp, Zea Mays
cgacaaatctgacagaacctcaaaggtccatgaaattggcagagaaactgaaataaacaatgcaatgacactgttgatcaatcacttgttccttactaatcaccacccacaagccatcagacctgctaatgccagctgttgcttgcggccaacaaacaatgctgcacatgtacaacttggccatggacagccgacgtgaaccaatgccaattcacaacctctgtgtcgctactgcccacagcacaccactgcatcatccgtcaggaacagcttgcagtcaagcattgtgtaaaaccacatcaattctttgcatctcatttgactacaaaaatgaagagagcaagcacgagaaacagacctgagaagaacagtgaagacaacaaatataaaggaggaattataccgctgaccatggc

SEQ ID NO: 123813 - DNA, 374 bp, Zea Mays
cctccaccaccaccaccagttccacctcgtgataagcaccaggaatttatgagccataagccaccgaccttcgccagttcgccagatccacttgatgcagatgattggttgaagtcaattgagaagatgctcaacattgcccaatgctcagacagggagaaagttctttatgcctcaggtcgtctgatagatcctgctgctgactggtgggattcttatactgctgcccatgatgctgctgatactattacttgggtggagttcagtacacagttcagaaactatcacattccagctggtttgatgaagatcaagaagaaggagtttctgtcattgaagcaaggcaacatgtctgtcagcgagtacagagataa

SEQ ID NO: 123814 - DNA, 476 bp, Zea Mays
aactcaaggtggaagatctgtcagtgagtacgtgcacaaattcacagaattggctcgctacgcgcctgacgacgtcagcacagaagccaagaagatggcccgctttttgaaagggctaagaccagaactcaagactatccttgccagccaggatttcctcagcttctcgcacctctcaaacaaagccatacaagtggaaagggcaagggaagaagaaaaaggtcaccttaagaggaaattccaagtcctccgagctaagcagcaagaccgacaccagagaattcgatcctttgggtttccacccaagggaccaagcttcaataagccagttggacccactccgtcacgtttcagtcagtagggtcatagctcctttcagcccccctcagttgcaagcaaccaaccaccagctaatgcctgttggcactacggagaccccagtcacttcaagaataactgccccccgttgaaggcat

SEQ ID NO: 123815 - DNA, 337 bp, Zea Mays
ctaggacgaatagcgcgaggacgtgaaggtcaccggtgactgcacaacattgctcgacgcgttcgtctacatcgagatgtctttcgctggcctacgcgtctagtggtaatttcatgatctataaccacagtagtttctagttttatggggtcgaaaattttgttttgcgctagtgtagcctccccataatccttcacttttggtgtcgattcaccgagaagtgagctaggtacttctcctctacccattccacatttttttcgtgaaatcttcaaactgtcgctgctcgtcggtcgataaactctcaaaagctagcctcatgatgttgcttatgaac

SEQ ID NO: 123816 - DNA, 486 bp, Zea Mays
tatgcttaattttgtgtgctcagtgtagcttaatttactgcaccgttgctgcctggtagtactagatgactcttttcgtgctagttgcattgctttgccgctagtggttctgtgcattggatctctaatgcttggtcacttgtcgaatgatttaaactttcaccgcaatgttttgtaatcctatataatgattgtgaaaggtcacacactgacacacatgacacagatgacatttctataatataggtactgaatcatgtatgctctatgtactatagtttctcctggttgttttgttaattactctttccagtccatttcataaggcatatgtgagttttgaaaaaaaagtctactatataaggcacatgtgtcatctgaagtcattaagcgtatgaatagggttgggcaaaatattcaaacaaagatcacacttgtgttggatgaactaataagtgatgaacttcgtttgtttggtgttggatt

SEQ ID NO: 123817 - DNA, 466 bp, Zea Mays
aaatgccatagtcagaatcagtgtatacatttgggctttgaggagtcagggaatgagtgctaatgccgaagggttttacaaagtaaacgaactccactatcagaccaaagccagagcagacggcctccacaacaacttcagatgctacaacttcgcctatcgaaaggaaacgaaggccctagtgattggatatcgtactaaatggcctactggttggaccaacgagtggttctatgtgaaggctgatgagaagaagagggaaaaactcatgagtatggtaatgagtccgttagagctgagcttcggcatgataatacaactttacaatatgcaactcggctccccatgccagttagctgaagttcaattcagacatgtgaccgagcacattagtactcaggatttagtgcaagaatatctggtgaataaaactttcctaacatcaggcggatggggaatgccgaag

SEQ ID NO: 123818 - DNA, 734 bp, Zea Mays
ccgttctccagatttcagccctctgattatttgtgttcttcagaaatgccttaggctactcgacacatcatctggaagtacaaagttacacgagaagtctacaatttcattgtatgtgtgcaacacgatccaccttattcttcagtctcaggtattggacattccctatattgtctaatgtctataatacttttaccacatctgcatgaagaattgactagactactgattctaacaggtggacatgcatttattgcctgatcttataggtactgtcctaaaataaagatttgataaattttcatcccaagaactgaactctaggatttatctggctgagtggaggccgttaacaaatatggtgcatttttgaggaaaaattctgaccaacaaaattatagcctgttcaacacgctggaacattctcctgagtttgatggtaactcgttgtgctctgtatctagacaggttgaagaattcttgaatcaaaaacaaactaattcgctggatgatgtagcaaccacattcttattttcaatcatatgtgcacctttaatagatgttatcagttcctttctagatcttcttgatttggtgaaaacacattttctcatgatagtccgtcatcgacctggtcgagtagccatagatctccctcaataatttatgtgccgtcgcaacgcacgggcactcacctagatattaaatattaaaccattagttttagatcccac

SEQ ID NO: 123819 - DNA, 390 bp, Zea Mays
aaaatgtgcacaaggggcctagccatggcgcgtggtggcccaacaacttcggcgagcaattcgcagtgcatcgaagcttcccacgccaatcttctcgcacagtcacgacgcagaacataccccgactctaccagacactagataagggtccaagcggtgcaaaagaccagtgtcgatggtggcggcgttctttcccccctctcagagttcacgtttgggaattgaggttcaatgctagggataaggcttgcagtagttggctcgaccctaatgcgcgcagacaggatttaacatggcgaggttggtggccaagtccacttagggccgtggatcacggcacgccgctgccatgtgcggcatgtccgttgcagagaagcgcctgactacctg

SEQ ID NO: 123820 - DNA, 304 bp, Zea Mays
atcgaaggaacaaaaatattagaagttttaagcccttcggtagaagtgacagtgccgaaggcacaaaaaggtcttgctgcaactcctaaaagaaaaaggatggcaagtgtactagatgtgctggaatcagtaaaggcttcaagctctattccctcaaataaaattgccaaggcttcgaaaatgcaaatcgaagctaaaacaaaaccagccaaagttgaagctgcagtgagccaggctagtgccgaagccggaccttcagagcctgctgagaaaaaaccctcggaaactgaagagaaggcagcag

SEQ ID NO: 123821 - DNA, 494 bp, Zea Mays
aagatgagcaggaagtgccagaaatgtggcatagctgatggtcacaacagcctatgtgtttaactatggaggataatagggttcgattggctaacctatctggacgtaagagaggacggcctcctagttcaaggaacaaaaacatagctgcagcaccacagtggaatgagacatcaacgtcgaaaaaacgaacggtggatgtcggagatgatgattcatctggtagagagtagaataccataagatttatgataaaattatattctagatgtaaatgtgattcctgtgtttaattgacaatgtccagaaagtgtcataaatatgcttgcaaactggcataaacgtatgtggaatttatcataagccattaatagttctgtagcaaactgaatgtacaactacttagcatacatgtatgtggaaatatgcataacactgcgttgtgtaatgcataaactagtcagactgtgaagcatgactgtacaaaaaatgag

SEQ ID NO: 123822 - DNA, 547 bp, Zea Mays
cggaccatatacaccataaatctagagatacacacgtgagagtaactatatccttgaaagtaggaaataaattatgtatataattttgttgattacaaactagactgccactgaaagttgtcatgggcaatctgttgggtacgggcggccggccagggcagcagcagtatataaggtcggatctgatctggcatactgccatctggggccataagcccagcccatgacagaagatataattaaatctcaacacatcagtgtgttcaatttatctccatcagaggataaaatgagatctgtaccacagaatcgatcgcaatggatgctccaccttccatctgctcaatggtgtcaagaagtctctcattgtctaatattgctaggagacctccagcagcacgaacttgaacatcgcttccaagatccatcatggaattaagctgcaagtaaaccaaaagatattcccatctcataagaaatggctaacaagatttgggcgtataaaaatgaatgataaaaaagatgataaacaatcagtggttatcag

SEQ ID NO: 123823 - DNA, 723 bp, Zea Mays
ttgacatagaaagcgagaatgaaagcgccgaagatcagccctgggaatcaagtcatactatcttcgggagatcaactatcaaacaaagtaaaattgatgcaatgaaaggaaggtacttccgcgatatttctattgtgagggccgtgggagatagcaatgcccctttgcccgaagctgacgaagtagtcgtctacaaaatcttcatgaaagcgggacttcggttccctttagataaattgctagttgatgttttgaagacttttgaaatattccttcatcaactcaccccgaggctatcatcagaatagggatttttatttgggccatgaggagccaggggttagaaccaaatgcaagatgtttttgcaatattcatgaactgtcatacgagacgaaggccactgacaaagaacaatatcacaaaaattttggttgctacaacttcgtgcctcattctgatgtgagctatccaattccaaagtttcagaagaggtggccaggggcctggatgcaagagtggttttatgtgaaaaacgaccttgtcgaaagagaagatattaagggtatcattcaacgccctatctggtctcgcttcggcatcaggaggtcgtctcttgcccttgggaatgacgtacaagcgtgccaagctgcatataacacagtttgcacatatattggcaccagggacttactccaggaacacattgcttacagagtgtggac

SEQ ID NO: 123824 - DNA, 436 bp, Zea Mays
ggggtgactccctgtgccaagccaaggggtcaggcaaggcgaaggaaggttgatatggccagacaaactagacaaaacccactcgagtgggccttgcacgcctctcaaactgattacattgtcagtcccgtgtacgtagcattaactacgctggtcgacggggtgcagcgcgaacgttatcggtcctccccctcatgacctatgggtcctaggcctaagtcccagtcatgctatatgagtcttaggtctaagtctcactcatgacctacggtcctgcacaacgacaagagagaataccaacggacaggctacaaagacagaaggtcggtgtaggaggtaaagtggacaaaaacaaataatgatgacgcccgaacttccctcgatagcccgaattaaatcctccctcgacaatatcagagatagggcaggaggccca

SEQ ID NO: 123825 - DNA, 328 bp, Zea Mays
actgcccatgtcatccacaataaaaatatgagatagccagatgaccgcggacacgcatggctttaccccatggtaggcacacccaattttaccctcactcggtggctccttctttgacctataaaaggaagaggttggccccggatgaggggatcctagagcggacaaacggatggaccccagacgagaaggaagtaggaacccagaaggaccgatgaacaggaggaggactaggaggtcagagctccgccaccaagccaagatttatctaggactccatcttgtaaccaccacgactgtgaataagagacttgggagcctctcctcc

SEQ ID NO: 123826 - DNA, 837 bp, Zea Mays
gcactaaaattactacaaccaattaacaacgcattcttcacgacaatcactcaacaatttgcgttttaaattagacatcacatgagcactactacttttcatctgcgaccataaacatatgcatttagactacaataagcaaatcatcatgactacgagcttaaccaagtcatctattaattcggctaactagcgcaacaacataggccgctatacatcctacacgtcggcttgcctcttattatcgcaatccgagacaacacatatataacaaacaattaacgaaatcgactcctatttaacatgagttgactaatcacggtagaagacctagcgaaccattttagacatcgtaactcaagaacatgggttggagccgattgatcaatggttctcaaccattgctcaacttgaattagttcacacacaagtcacctaaatagcacatttttggggtctatcgtggaggcatttacacatggcgtaaaactccataagactacatttgctactgacaccaacaatacctaccgacctattattcaccatacgaacgcagttacacaccgcctactagtttttaacataatcctcatatagctcgtaattcaaactactcactaacaataaatcacgcacgacaactaccacatcgaccggttaatttatttggacaccactcgtctagcgtaccactagtatcccgcattttgacttgacttataaacatagaggaagtgatacaacgaccaaacatttatgtcgagcacaattatttatgaccacatttatcgactagacaagtggaacattaaccgattattcgcacacctcgtc

SEQ ID NO: 123827 - DNA, 672 bp, Zea Mays
gtgacactctttccacctgcccattatctcttgggtgtgccactgatgcatacttgatctagatgctcctctgctcgcagaagtcaaagaattctgaactggtgaaattagattagatcccaggtccgtgatgatgatgttaggtatttcaaacctaaatattattttctgaatgaactccaccgtctttgctgaggtcaaagaggcaatgggcttctattctatccattttgtgaatttgtcgatggcaactagtatgtgagtatatcctccttgagctttcttgaagggcctgatcatgtccagcccccagcatgcaaacgatcaggttacaggaatagtctgcaactgttgtgtgggtagatgctgctgttttgataagaattggcacgcctcgcacttctggactccaagatcacaactaatcagtcctatgcgaactagagacgagagcagaccatttggatagcctcttacctaggattatgacatagaaccccgcgaccatgcaccatggtggaagttgtcctccggcgagcgattggtaggtccagacatgccgctcggcactggttagttcatgaatgccttccctggatcctagcaaactccatagtgcgatcatcaagggctcgacgacggcatacgcgcaagacgccgacagtggctccc

SEQ ID NO: 123828 - DNA, 534 bp, Zea Mays
cgccgtggccgagcttctgcactccattccctcggtaagaaatccatccctcgtgttcgtcccgcctcccgcatggtaaatctcgatttaatttgatgcttagcgcccggggaacgctgattggcgatctcaccggcgctcggcggggagagaagcggcggtgccgccgtctcggttggtcgaggggtgaagatttggtcgcgcccgttgatcatcgcgtggacggctacgattagaaataggataccccttcggccaggacccatctggcccgttgatctcgggctagacggtcacgattacctggcgagtgttttaaatccgagccgttggatatggatctgagcgctcagggcgcataccggttcgggttgaacagttttaatctgggccgttagaatctgatcgggcggccgtgatcacaagataccccttcgcggcgcgcgttttgcttaagagaccctaggtttacttgaaatagaacccgccatccatttgcactgttctctgtgtctctggatttttaccccgtgg

SEQ ID NO: 123829 - DNA, 487 bp, Zea Mays
cgtctagtagctgctttactacattggaagactagtaaagaggtgaagagaacgactgaaaattcagctgctgctgctgctgcttcgttcgttcaacgaagcaggcagccagtgtttgacggacacggcgcgcggcaagtagccgttgcactcagttgtgtgaatgcacgccacctgctgctggccaggttcagttagactacggcatagctaggttcccaggctgcagaagggccaagagcaatggacggccggcaagccgacaaaaccaccatggaagcagatctttcgtcccggcatattattcgcggtcgatccaccagttccacacctaatccatatcagagatggcaatgatcccgatctccggttcctcctcgtgggaaattcttttattaggtcccgttcgttttaatcaaatccatagaaattgagagggattgaatcccccttaattcccatggattaggatgaaacgaataaattc

SEQ ID NO: 123830 - DNA, 691 bp, Zea Mays
ctgtcttcctctgtcgatgtttcagaaatactgaaggtaatgagttaacccttcccatttggaatgctaagtcccctggggtcagatctaactagcctattgcagtcaaaggagaagggatttgaacaaagctcgagagaaaaggagactgcttcggctactgagggaaataccgggggttagaagaaacggcgaatgatggacataatgcaagccatccaaaagtccccgccctcagctttggcagaaaaaattattgcgcctaatgatgccgatgatattgccgaagctaaaactaatgaaggcgcacgtgaagttgagaacctcgggaccacaatgtcagagattgacagacttatatttgacgtggctccccgagaaagacatcattgaagtatccactgataaggctttgactttaaaaatgaaagaattgaaaaaggcttcagaggagacagagtcggacctacagcacctgggcggccaaggactgtccgatgaagatatttctaaattgaaagaattctcccttgctcgtggatacaagcctagatccgtgctctttggcggtgtggatgaagagattttgggtgtattcctgaccgtgccgaagcaaagattgttaatattttatcaaagactattggatttccgaagcttgagcgagacctcagtaactataggagacaac

SEQ ID NO: 123831 - DNA, 440 bp, Zea Mays
agtgcgaccctccgctgaagaagttagtgctttggttgcctcgcttggggagattcctgatgacgaacgacaggtccattttgaggtgcccctgaaccctagtgatgcagagataagcgctatgcttgatttgctagctgaggattcttccgacgctgctcctgctggggcgttggtagtggcacccctcccagaggctgatacgactttggatgctcagaagcccgtcagtactcgcctgaggcgtccttgccgagccaatcagcctgatccttctgctgatgagcagaagaagaaaagaagatgcctccggcgagtatccagcttggatcaggacgctggtacctcagttcctgctactgaagaagtgcctgcgactggattagctgatgctgaccccaatgggtgtacccaatccaatgctgatcccaatgtgggtg

SEQ ID NO: 123832 - DNA, 1216 bp, Zea Mays
ctcatcctcaagtggcggctcaagcctcagcagcagcggcggcgctgccggtgagggcgaggatggcgccgatgcgggggacggggaggaatacgattcgtccaacctcatagccacaaggagcgccggcgccgccggctatctggacgatgagaggagggaatatgagaaccaggaggtagaggaggagagagatttgttcggctcagataacgaagagtacgtcagaactccggcgcgcagccactacctagtcccaggtccgcttctcgtcaatcctaaagttggtaccaatgccctaaaatatgtttctagattgaatagtagtagcttctgtgttgccattgaattatctaggaggccgatactgaatcctgccaagtttatccaatggttttattgtgagtaggttgttcgtattgttttgtgagatgaggtgcactttgacactgtacaatttccactttaagatgtgtaaatggtgaatctttcactgttcctttgcttgtttctttctcatcaactttcctcagccgtaatgcgggaggtgtactgtaggttatggaccattgccttctggctttttttgttattgttagtttttttggtgcaacatagtattttaatatatcagtacgcataggttggatataagtttgttaggaagtatacgtctagccattttcatttccatctttcacacaactgtaatttatgactctgaagaatactgcctttctctaatgaattctcaaagcctttttctgggtgaataatgccagcagccagctcacagaagacatgaaagtttttattcaaggatcataactggagcgaaatcacaactacaatagagcaaatagttacagctttgagcatctgctgtacatgttctcattgagaacctccctgaaagttactatacatttcttttgtggggttatgctgacaccaagcacaggcttttgtatgtgacaactcaaattctgccgtttaaatgtccattcaatctatcaatactctgttatagaaggacccttgctatatgctaaaggatgtgacaaatgaactgattttttttcatgggcaagatacttcatattttgggggcttagtgcaactaatgattttaaaagcttgactggatttgaattgaaaggtggaagtattaatacttcagtccgtcatgggtaatttcttgcagtgcttcctccaa

SEQ ID NO: 123833 - DNA, 565 bp, Zea Mays
ggttgatatagcaaaatcaaagctggattatagatcaacaactttgttacagatgaattaacacgttgtcacataaaaattagagaatgaaggcctctaactcgctctgccaggcgctctgatgggggttctgatggtacagtggcatgacaaagaccagcagatgcagtgcacctcaccgccgatgaccccgcgccgcgatcctcaccagcgctacgattcgtgcccgattgcgcacagataatgacccagggtaaaagatcttggtgctgggatgagctcggacccggccactggattattcaccgtacccacttgttgtacgaccaaccgaggtgtcctcgccggagatcgccgccttcgtagccgtgccacgttcttaggaatgttaccacgtcgcagtgaaccgtaagagggagtctgtccattgccgggagctttgcctcagtgaaagccaagttagcgctcgctggtgattccccccctctctggccgcccgcgtgtcttccccaaattggacgccaccactgttgatctctataaattgagcgctcagtgtgctcca

SEQ ID NO: 123834 - DNA, 555 bp, Zea Mays
gttttagaaaccctagagtgcaagtaagacattgtgattgaagggtttcactagccataagacgacatgggctaccctttcattcggagtctggaatccatcaccgagcttcgtggttgtctggcttctcgttgtccttgtcgatgctcaatgccccgcctctcatcattgatcaactcccgttcatgggcgtcgactcatttgaaggccaagtcacggagaaaaaggaagaatggagctggttacgagggtttacgaggttgcactctgttttagtatgtagtgtggtccaccatggcaaccatgtcgtcaggcggtttgctgcagcccgattttgcacgcaacagtgaagtttgagcactcgtattgctcgtttaatgagatgggtgacctatatgacacatcgagccaagtttgtggaccgcaagtgcatttcactctattttgagtcttatctttgcaaagtcaatattatgaatggaaaaagtgtgaaacatatagttttagagttccaaaaatccaaatttctctaattgttcacatcatttacttaat

SEQ ID NO: 123835 - DNA, 682 bp, Zea Mays
aaaaaaaagcctcgtggaccccactctcataattccgtggtaatttcccaatacattaaataaatagaataaaacatatgttgcaatttctacattcgttaatttcttgatgtaaataattaatagaaaatgtatgcttcgatgtgggaaaatgcttttgcatctgatgtgttatattcatgaattaattctagtatttttctgcttttatttcccgtagtaaatacttagcggaaatttattaaaatgcatgtgaaggttatatagtgtgtactcaaatcgctctaaatattttctatgtgttgagccttcggactcacatcgagtgattaaattgtataatgggtactcagacacgccgatcaggctgcgttggtaatcggctgagttatggcattagctgaatattgactgcgccctggcaacacgacacaatatttgtgccgttcgaacttggctgcgtcatgtgattgctatatcgcactctccattaatcgaatcgctcccgttgagtcagatcgccatcgccgagtcgcatattttttgcatgccctgtaggcactgtctgtctgccgcgagccacgattgcgcttgttgcgcatgttgcgtggttttatcgtgtaccccaattaccaagccataattgtgcctgctgcgcttattacgatggcttgttatacgg

SEQ ID NO: 123836 - DNA, 759 bp, Zea Mays
ggtggactagtgaatggttctatatgaaggctgatgagaagaaaagggagaagctcatgaccatggtaatgagtcccctgaaactgagcttcggcatgatgcgacctctgtgcaatatgcagctagggtcaccctgccaactaaccgaggtggaattttgggtggtggttggacatattagaactagggatctggtgcaagaatacttggcaaacagaaccttcccaacctctagcagatggggaatgccaaagaagaaggaaggggggaaagtatgaacttgtctgactcccttactgtttcaaattttagaatacatttaaagagccgtgcacgaagtggctagaattgatagagacaatgtgcaaggagattctagggaactatacaaagaaggaagaccagttgatgactgctgccttcggctcccggctaaaacgaaggttgaaccgagttatggatgctctcaactttgagtatcctaactatgaaaggcttgaagaagggggtggagggggaaaaagaaaaagggatgtaagtattctgggtaggcaagctactcgatctatcaagtaggaccagaaagcttcgaagaaacagaagattcttcggaagccgaaggattcggctcccgagaaacgaaaacttgacatgatatcttctgctgatacgaaggtacaggatgtgccagagaaaactatgagtcctccttcaccctctgctgctgaagtgtcagaaattatgaaggtaatgactgaa

SEQ ID NO: 123837 - DNA, 372 bp, Zea Mays
tcacggcacgtgtgcacgcgagattcaaaatggctgtcgcccatccatttttgaatcacaccttggtggctccgtccatccctataaaactaaccgagaggggggctttggaccgttacctttgttgtcttagtcttttgccttcaaacaccatttccgcattctgcccaaagagccctttatcttcctcttgccccttcgttcgtttcgatggcggagaagatcaccgtccttcctccccgcgacccgtggcccgtgtcctccatcaccgatggggatttggaggcgctggttgatgctggcctgctctggccccgaaccactggcccatagcctaagtggatcgcaccacacaacgagcaagtgtcgaat

SEQ ID NO: 123838 - DNA, 282 bp, Zea Mays
gtagactgtgtcttcctgggttatgcacataacagtgcggcttatagatttctagtggtccattccgagacgagcgaagtcgttgtaaatgtcataatagaatctcaggatgtgacattctttgagagcatcttccctatgtgggacaaggaagtagtagccccagatggtccatctcgaacgtattctctgccctcgagtgtccttgaccagactccagatttggagtgaggagtaagagacaaaggactaaaaagtctctgggagatgattatattattt

SEQ ID NO: 123839 - DNA, 750 bp, Zea Mays
ttttgtaacagttaaagggtagaaacccccttttagttctttagttttatgaacgtccattttagtaggtgcaagatcgagcctaggctagcgttcgccccttttttatatgttcgatattgggaacaacttcgaaattgctctttattgataaatgtcgaggaattacaagcgggatgtgagtcattcctgctgggaactatgggggttcatggtggagatatcatgcttggtgattcctcaggttcctgcctcgtgtagcaccccagtttgctagtgctacctacgacgtctgtccttctagggggacaagggctgtgagggtttggcatccttcaatttcctcgttgttgggaggtccgccctcactaatcgttggggagtcgcggtccgagcccaagtctgagcaaagggcataaaacatgaggtctccaccaccctcaaccatcctgatgaactccaagtcggtggtcgggaggtggccctaggccacgatcaccctcgaagtgtggtgtaggcaaggtggaaacatgagagggctaccgctagagcaaacgtggcgaggaaacgttttttgtcataccacatggaaagttctgcatgggatgagaagaagacccacggatcatcacatgtgtcgccttatctcgtcggcctcagatggcaaggatgatccctgctccgcaccttgccctgaggggtgaggctgaggccgctaagtgcttcggcaactacgtttaggtttttggg

SEQ ID NO: 123840 - DNA, 422 bp, Zea Mays
cttctaggggtggtttggtgcatgttggtctgattatgacccgatggtgggccagtcatgtgcttttgtctgacaggctaccatgtctgggctattgtgttgaggagctaaagggggcctttatttattgaggctacccttctaatttttctattatcctcttgccttcctcattgcccccttcctgccttcaagctttcacctagctccccttatggcctattggcgtcgatccttggtggactaggggcacctccaaactctcgttaggcgtggcctattgggccacgacgaatggctagtccccggtgttgaggatttggggccctccttggggttatgtggtctcgtttattcgctttcacgagcggggtcttgctcttcccctccaccattttgtcgcgtctcttctcaattatcta

SEQ ID NO: 123841 - DNA, 626 bp, Zea Mays
aagatatacaaagacacaatagtgaactaacattaatttagaagacaccgtaaaccaccacacattagcattagttatctacacgtcatcgggcatacgtagtcgctaccactggaaagatgacgacgcttactttacctaaccaatacaaacatgaccacacaagcatgagcacaagtgtttaccacgttcactttaatcatccattagttacctaacattaaattagttaagtacacaagttcgctacgacttatatatagatagacttagttgaaaaggaactagacacttaattgggttttaaaattattcactagacaaacacttattagactctcactaatttggttcactaacttagcgagacgtatacttgttacttatataattaggcccaattgtattagttatattatcattactgcgggttcaaccaatcatcaaacgaggaaacagtcgactcgactcaaacacaacagagtagagcaatcaatcacttctaacatatttaagacagcagcacagtagtttttgttttaatcataactcttaaaatattagttcaaaattatcaaactaggattttctggaaagtttaaaaagtgttctacaactttgatatt

SEQ ID NO: 123842 - DNA, 1135 bp, Zea Mays
taaaaaagatgctttgaacgtgaatcttggattgatcagactttgttaaaaatataagttcgaagatgagtttggggagcctaatgacgcatggttaggttatgttgaggtgaaatgcaatgaaatacttggtaactatagcaaactagaggtcgaagctttgcaatgggctttcgcggcacagaaaaaatgtcgactaaatcacgttttcgatgctattggatttttctatcctgattatctcgacatggtttaggattcaaagaaaagtgaccacgaagcggagcaaggttccgaagatacgggctaaatcgacacctcaagctttggaggaagttctagtacaaagggttttctgaaatttattcatcacttataaacttgttgtgttaatgttttttaggttgtacccaaagctgaggtgctggttatgtctgagaaaatgccttctataggaactgaaggggcaaagattgaggatgctatcgatctgatagctcaaaaggtggttccctggaagccactttcagaaggtgaggaggaggaagagtggatagctctagtaatgagcccgttctttgatattgacgaaggggagtttgaggaaaagataccgctggtacgatccttgcagtggaggatgttacactgcctgctgtggttacgaccataccgagaggtctgaaggttgatccggcggctacagtcgtgacaccttcggcaattgtggtggccgaagataaaaattggttcttcaaagcctacgacagcagaggacatgggtaaagggcctacaaggaacgaagatgccaagaaggccattgaagatgacacaccccttggtgaagggcccttcgatcaagaatttggcggtcgaaagtacatggttcatcaagcggctgggaaaactatgggtgccaagcagctaaccgaggctattggctttgccgaacaactgggtaccctttgagggctacgatctttgggggagggccatatgatttacttgtattgctgcccgaatagcatggaaactgaaggatgccgctacatttcggacaatattggcttcccaaagttggaggccatgctttcaaccatgtccttcgaagatttttttggactcccttgctta

SEQ ID NO: 123843 - DNA, 352 bp, Zea Mays
gcgccggcatatttgcatttaggcccctagcgcgcgtggccgccattgctgtgaagctttgcccccatagcttcttccacacctacgacctatgggtggctgccgtcgcgtccaatcgccattcctctccgtcgctgacaacagccgcctgaaacaacctcaattactgccctctagctctccttccttttctgcgcatggaagccgaatcttctgcttcttgcgtcgctggtagttcctcttcgtggaggtctggcaggcgtcctagttgtgctgctccacggaggcccatccgaggcatctccgctggcgcatcttgccggactcactcgccttattccaggcgcgtgcg

SEQ ID NO: 123844 - DNA, 739 bp, Zea Mays
ggaggttctagatacactcactctgtccctagcacttcatgccacaccaatcgcccaagcccctgctcctagaggtgatgaccctgatgatgaaggcgatgatgaaggtgatggagaagataaccaagacaacaacgacaacaacaacaatgagccagaccgagatggaggatttgatggaatgtggcctatcgctgagcattacactttgatgttcaagatgggccacctcccaaatttattgcagaatgtgctacacaagctaggaatctacgtttactctttatgacacacagcgggtttctgagcccccttgggcttgcaattatatcacccgtctacatatcagagtaatggatgatggagatagagggttcaggactccctcaactcatgagtctttgacaccgttgtccacctatgctgcttctgtcagcaatgctactcggagagcactatggtcactcagccatacttattgtctacaactgcatgacacggcgtacatgcaccttcctctatgtcctcatggtgagagctagacgagtgtggttctaggagaagctagagaagatcgcctcaacacccttgtaggtgtggtggcaggtcataactctgacctacacaatactaccctagatctttcaaggatacatgaggaccttgaaaatgcacatgcgaggattgcaaaattggaggcctagcttgagcgaagagatccaccggaagttgaagttcc

SEQ ID NO: 123845 - DNA, 416 bp, Zea Mays
gcggggaaagctctgcgctgtcgtctgcgtgtagtcgggtggagacgatggtcttcggaccgtttatctcgcaggaacggtcaggattagattaactgggtaccggttcgtctgatgatcggtgtccgttggatcgaccgtgggtggcacagattggatctggggatacccccttcaacgattgatcctgggtcgttgatcgaaacatccatggcccgggttagattagtggcgtgagagcatctaaaccgtggattcataatctgggggctgttatcgcatacccgttcggatttatggcgttatgatcgtggccgttggttcagatctgacgatccatatccactgataccccttcgacccgtacaaattgctaaagagcccctcggcttgttccgaataaacccaccgtcctc

SEQ ID NO: 123846 - DNA, 366 bp, Zea Mays
ctaccgaattgggaacaaatgtcacatcttcaccgatcacaagagtctgaagtatatcttcactcagccaaatctcaacctccgtcagagaagatggctggaactgatcaaagactatgaccttgagatccattaccaccctggaaaggccgacgtggtatcagacgccctcagccgaaaacctttcgggataaaggggatcaactttttagaagattggaagaaggaatcagctcagttgaatgcatgtctgggaaacaacggcagcctagaagtcaaaccaatgctagaagaccttatatgcaaggctcaacgcctggacacggagacaacaagacttatggaaagagctcgcaaagaacaact

SEQ ID NO: 123847 - DNA, 513 bp, Zea Mays
gggagttctatggtttgaagaccgattggttgttcctaagaatcccgaactcaggaagaaaatattggatgaagctcatctttccaaattttccatgcaccccggtagtagcaagatgtatcatgatctcaaatctttgtattggtggaccagaatgaagagggaaattgctaagtatgtatttgaatgcgatacttgccaaagaatcaaggctagccatttgaaggtagcgggtaccttacagcctcttcccataccatcttggaaatgggaggacctcagcatggattttattgtgggtttgcccaacacctcccgataccacaattctatttgggtcattgtggacaggctaactaagacatctcatttcttgccagtacataccacccacagggcagaaaagtatgcggaaatctatattgaccagatagtgcgtttgcatggaataccgaggactatcgtgtcagacagaggagcaccgttcgtagcacatttttgggaacagctgca

SEQ ID NO: 123848 - DNA, 359 bp, Zea Mays
aaatccatcaggccccggggatttgtctgaggggagagctgcaacaatgctatcaattccttgccttgaaaaaggctcatcaaccactgcaatccatcttgcaaaattaacaggcctgagagatcagaaacattttccgaagagtcagaagaacccaaacggcatttaaatacattccacagaaggttagctttatgatcgtgctctgaaaagattgacccactgtcatcagagagcaacacaattgtattacgcctatgctttaccattgcatgagcatgaaaaaatctagagcaaatatctccatcggtgacccatttgatggaagcccgttgcttccaataaattttctgaatttg

SEQ ID NO: 123849 - DNA, 332 bp, Zea Mays
tagcacaagatgtggagcctggtcatcgactcaggaaatccaaatagttgtctgatctgactggcatgcagagtgacatcctcacgctcaaagcgaaacctcatccgctaatggtcagggtcaatccaaacggtggcatagaacactttgacccactcctcaatatatctgccactagaggtcaaaagtgaaagcaaacttggtagataagagaggtgaccctctaactcggcaccggcggctgatagaaaagcaggaagatccaagagccggtgaagaaggactcctgagtcctggtgctgaagagcggtgcagccgctgggtccctctgg

SEQ ID NO: 123850 - DNA, 605 bp, Zea Mays
cttagggatgctagaaaaaacgatcaaagcgcttgaactaacccagagcaagctggccatggcgagggaaaaccgtgcggagttcttgagtgatttgggggaaatctcaaattgaagctctctggtggaggatctagggtataggtgggtgcgctagatgcgtgaatacataacgaagctgatggtgcactcgatttataggctccgggggcggtggctctcaatttgatcacggcgtgctggcggccgaagatagggaagaacacggtggctgtaaccgtggcgttcaccggtgcaacggcgcaaggataatactcctaagggtgccacgattactaccgcataataacaagctacagcgtggcgcaaccgaggtcaccggcgcttccacggcgacgccggtagtccggccacgttgcaacgactatagccacggtgataaactccaatctgcgatcctatccattcccccatgagatctttaccttctcgtagaaatcttctgcgtgcaaagcacaaatcccggcgaccagcacaaatccagacgcggatcgccggcggcgagctgaccgagctggtagtctaatcgggatactgtaccatcg

SEQ ID NO: 123851 - DNA, 425 bp, Zea Mays
ctcaatgtatgaaaggcattctcacatttctgactccattcgtactttactcccttcttcaacaattcagtcattggcttcgcaatcctggagaaatccggaataaatcgccgataatatcctgccaatcccagaaaactccgaatctgccgtacagtggtaggaagcttccaattcatcacttcttgcactttctcaggatcaactgatatcccatcctgagaaatggtgtgacccaaaaatttaatttccctcagccagaaatcacatttggacaatttagcatataagtgatgatcgcatagtctctgaagtattgtatgcaagtgcttagtatgctcctattcatttcttgaatataccagaatgttatcaatgaaaaccaccacaaacttgtacagttctagcatgaacactgaattcat

SEQ ID NO: 123852 - DNA, 416 bp, Zea Mays
atttgtgcgggcgatgagtaagactttcggggacctggttagggacaaggtggaagtctacgtcgatgacatcgtggtcaagactaagagagggacaaccctagtggaagacttaaccctggtcttcgacaagctgcgggcaacccgcacgaagctgaacccggacaaatgcgtttttggtgtctccgctgggaagttgctgggattcctggtttcataccaaggcatcgaagcaaacccagagaagatcaaagcgatcgaggcaatgaggcccccagcctgagtcaaggacgtctagaagcttacggggtcgttagccgcccttagtcgcttcatttcgaagctggctgagagagtgctccccttcttcaagctgctgcggaagtccggacccttctcttggaccgaagaggcag

SEQ ID NO: 123853 - DNA, 396 bp, Zea Mays
tagtgcttgccgcaatggtttagatatgagacagtggaggtggctggaactaatcaaggattatgatttagaagtacattatcatccgggaaaggcaaatgtggtcgcagatgcgcttagtcgtaaggaacatttgtgttatctgtcgactagttcattcgaaccacaatctgtcaggaaatggaacgactgaatctgagtatgttccaacaaaccctactagccaatatgcaattggaatcaactttaattaaccaaattgtggaagctcagagatcagatgccagaataactcatatcaaggaacgtatggtaatgggtcccaatacctgttttcgccttgataacaaaggtactctttggtttaaaaatcggttagtagttccaaaggtcccg

SEQ ID NO: 123854 - DNA, 500 bp, Zea Mays
cggaagttgatgaccattatgaggatatggaggcacaggctcttcgtcctgaggcaaggcaccaagcatgaactgttgaactatgtcgcactgaatagtccaggaaaccccatgaaaaccttcagccactgaaaaaacaataaactaggggacttcctgtagagatgtcacccttgctctaaccagcaatctagtagcattagaaatatcaggatcccacatgagcacccgaccaaatgacccaatagcattctgaatgtgctcgtttgtccagaaatctaggggaaacccaaggagcatcagccaacattcatgattaaaatataacgcttgttggttccaagccgcattgtgtctaatcacagtgaaagtaaagcccaaagcttgctgcggacccatagccacgaggttgtccctatcaaaaataaactggaacctcaccaaagcctgacccaagtgggagcgctgaacactcctaatccggacatgtctaacctcca

SEQ ID NO: 123855 - DNA, 3585 bp, Zea Mays
atttgcatcgtcactatatttgtataattccatgctagaatggttcaagcggtaaaatttaaaatgtcattgtcacaaccatgcgggggggggggggggtgcttgctgctgttatgtggggtgggagaggaggggatgggagggagcaatggctctatgcttgcttaggctaactccaacagagtacctatcgtgacacctaaatctattatagatatctaaatgacactatagcatctcgaacaggtaatttaaactcgatacccattttagatgtgatgtgggagagtacctatatattgatggccattttctcaaacgtgtatttgggcacaaaaatatttgggtctcgtctttcggctgactgcataacacgaacgtgtatttggattcccatttttgcatattattgttagagttagccttagattgaaaccgttacattacctatatatttatagcccctattggacttgtattaaaaacaaactagagcagtagtctttatagatttggacactcctttcctaacaaaccaatattctttcctaaataaactttattttatttactccaaacttatcaaaggctttctttagatttcatctattccatattctcctcaactggatggacttctggggcggcaggggttgcaacccctcactcacgcgcctcctttacgacacccaaggtgagattgcggttcacaaggggccggtgttgggcctccgttgcccgctaggcccaatgctgcagcccacatttaggcctatgacatctcccccttctccactcagcgtgtcctcgcgctctattatagtctagttgttgatgcagtttgagggaagaggttctccaaatgggattgcctagatcctgacaatgagacgatcgtggatgatgttagccaagatctagttgtcttggatcctgatgatgatgagctcaaagtagtaacgatagttgctagaggtgaggatcgatcggtgtatggctacgtcaagagtgaatatctgcatagcttaaggagatctctcaaagctatgtaccttgttgctgcgaaggatgaaggctgccatacgacgacaaattgtcaacatgatgcacatagattgtgttgttgttaggtctagcaagtcaccaaacatgaacttgccccgttgaagttgtttggcgagaggctcgagtgtctcaagtcatggatggtgttgatgtgttcttggtagcgaggaagtggcaattggcgatgtcgaagaagatgaaattgacgaaggaatgataccttgcggccactcacggatcataaggatgctgatagggaagctgcaggtgatggctgcagtcgttggtggcgtgtagaaccccaacactagtagtcgtagattcctcatttcgccaatgacgacgtgtctcgaagaggtcgagcaatagtggtaatgtcgtggggaggtagaattgtccgttgaagaagaggagatcttggtccatggactaagttgatgcagctctcccgcctatgatggtggtggtgatggcgcgtagctcgagtaccattgcctatgatggcgtcgtacaatgctgattttgtcgagggcattaggttgacacggttgaattgccttgctcatgttacatcatggctgcgatggagaccatgatcgtgggagaagtgatgggtgtcgaggcaccggtaggattggcataagacaggaagaacaagcaaattctatggtgctcaacggtcagggacattgacgaagatgatggtatgttcgtcccattagaattgcttctctagggtcacaaagttctagatgatgttgccatggtcgaccaaccatggcatgtcgaagatgacgtcgatctggaacgtcttggtgttgatgtgaagccaagtgttgaggcaggcttcctggcgagcaatctcattgccactgttgacaagctttatggtttggatgcgctgttccgcaaggttggccggcttggcaaagttgatgtcgatgatgttgtgggtggtgcctgttttgacgaggatgagcaccaagttggcaccttccaggaacatggtgtgtcgaccacacgcacactagagtcttggggctgatcatcatcatgaggccagggtcgacaccgtcgttggcatgacgagcgtgatgtctaacaagtgcttgcacttgtggccacaggcaaagggttcgtcacagttgaagcatagcccaatgcaatgacgctccatcatctcctctgttgtaaggggcttgaaggggtgaggtggtgtagccggcgtaggtgtcggatgaccccggtgttatcgaggcggatagggttgttgatggcacctttgaatcttggggaagccgatgtgtggaatgttgtagatttggtgttgtcagcgatgacaaccgcctgtcgcttgtatgctcatggtagggacatggccatctctatgtcttggggttctagagctcgacatgtcttcagtggctcgagcaggtcagcagtgtagacgttcacctgctgctgttcgtcaagtgtctcggtgcgcaccacgtgtgtcaagatgtgctccatgtagtcgtcgatggtgctagtcttctgcaaggatgcaagctctcgtagtgtttgcgtcgtcttggcggcccaaaatactcgttgacgcaactgcaaagcatgcccagttggtgacaactttatcccgcgttaggtgcatcagtgcatgtaccattgtttagtgccacctagagatgaaaagatgcataccatactcgctcgatgtcagtagtcttttgccctgtgaagaactgctcacagcggttaagttatggcagtggattttccttgctgtcatatgttgggagcgacaattgtggtagcgtggttggaggatggggaaggagctgattgctgtagactggtgagggtatggcagtgttaagggccccttggtggcgcctccctctcctagttggcgacgaacagtttgccacttcttccacaagctcgaggacggtcaatgaccttgctgtctcctccttgaggaaggcacgtcgagcttgatctatggcgtgcttggtctccacttcgagctgcttggtgacagcctcacattccagcttttccttggctgcggtggcgatctcgtttttggaccctccttgcttcatgttgcccaggcagacgtcgaccttggcaaggtgctcttgcaccttgtccatgtgcttggtgagatcagcagcgagggtctcgagccactccatttctgtggacatggtggaattgttacccatgggatcgagacggttgggggggggggttgttgaattccaagcaaactagagtgagagataaagggaggagcaatagctctagtcttgcttagattgaaacggatacattgccgagtatgtatagtccttattagaattgtataccaagcaaactagatgattccttatagatttagacttgtattccaagcaaactagaagagtccttacagatttggattcactattcctaacaaaccaatctccttttctaaacgaactcgatttatttattccaatttatcgaaggcta

SEQ ID NO: 123856 - DNA, 347 bp, Zea Mays
tacatttcttgcgggttggcgctgccaatttcgcccttcttcctgctactgctggaggagttcgggcttcagcttcaacacctcataccccactccatcctcaggcagcgatcttcgtccacctctgtgagatgttcgtaggtgtggcctcctgcacttccctcttccgctattttttcgtgctggtcaggtccgggaagactagggaccacatcggtgcctactactttcagacgaggccagatctggccatagtctacatccccacctttggtggtgcgatgtgggaaaactggcgtagcgactgggtgattgccagcaccgaggccaacgaccgcctcatcctg

SEQ ID NO: 123857 - DNA, 365 bp, Zea Mays
gacaaccaggttcaggcaaaagttttggaatgtagcaacgacctgatggtgatgttgagattgatgagaagttctgggagcaagattttgaaattcctagctgccatcaatgtggtggagtgctaaagcctgatgtgagattctgttcatcctgatgcttctaggattaatttcttcatgtatataagtatgctcagttgaagtctggtaagccacacctagccatctaggtttagtgttttttctttaagctaatccgcaccagggtggggctgcaatccccgttgtaggcttctattgttttgagttagcaatgtttagagtatgaaagaaaacactcaattcaacttgtagttgtatttttc

SEQ ID NO: 123858 - DNA, 383 bp, Zea Mays
caaagattttaaggactgaaacttaataaaactcactggaacaacagattgaaacaaagggctatgacaaaaatattttatggctttttggtggataggacgaacacaaaatatatgtagctaagggtaaagaatcctaccgtggcaactgaggctttgataccagatgatgcgtcacgatgcccaatctttatgacgtaggatcaatctttagataactagcttcaaagaagccaagataacttgcttcaagcagcgataactagtgcaacctgacaaataaaactcgaagccaaccaccgtttttaaccggcaacctgaatcgaggattcgccgaaccacactctcaaagaaccaaccaacacaaccaacaatcaatcgag

SEQ ID NO: 123859 - DNA, 416 bp, Zea Mays
ccggcagggacctactttttagcttctgttgatgcttcaagtgaggtagctaatgctaacatgttggctgatttgttggagaagcaaattgacaatattggaagagagcatgtggtgcaacttgtcacagacaatggagccaattttaaagctgcagggagaatcttgatggataggatcccccatttgttttggacaccttgtgttgcccattgtttggatttgctattagaggacattggaaagatcaaggacttaaatagctgcatcaatatggctaagaaagtgtcgaggttcatctacaagcatggtataattcacaacctaatgagagagaagctaggtggtgatcttgttaggccaggtgtgactcgatttgctacctcatttctgacattggtgagcatgcttaggca

SEQ ID NO: 123860 - DNA, 367 bp, Zea Mays
ctaagatgtgcttcatctagaatttgctggcggaccccttcattcttcggcacaactatgcggttgttgaaccatacaacaccttgatcgtcttctcggaagcaattggcttttccaacccttatcttctcacgtatatgtttcataccctcatcatttttttgtgcgtcaattatcctttgtaagatgactgactccagcttcaagtgatttgaagtcccatgatgaatcatttccaggttcagattctccatctcctggcataatgtaatgtcagaagtccccattgttagacaatggcaagaggccatgcgactgagtgcatctaccactacatttgccttgcctgggtgataatggatctcta

SEQ ID NO: 123861 - DNA, 441 bp, Zea Mays
cccccttaaaaataatctcgacctcgagattaagatgaactagggaagaggtggggaaattctatttgtagctcttcttatctctcccaagtagcttcatcttcaccatgatgactccattgcactttgcacatttttatcaccttatttcttgtaacacgagtcaaagtgtcaaggattttgataggatgctcagtgtaggttaggtcttcttgcacactaagttcttccattggcaactgttcttccgggacatggagacacttcttgagttgagatacgtggaatacatcatgtacatcagacagatgatctgatagctcaagctggtaggccatctccccaactcgcttaaggattttgaagggtccaataaagcgaggggataacttgcctttaactttaaacctcctcattccacgaattggtgacacctttaag

SEQ ID NO: 123862 - DNA, 1122 bp, Zea Mays
cggcactggtgacctgtcagaggacgcgactgctggcgccctggaggatttagttttgaggacaactttggctgggccactaaggatgcttcagtcgtgagatcgcccggcatggtcacccttgaactcttgtgatgttattgcatctccttaaattggtcgtggaacgagccccctttttcccctgccctttgtgttttttagcatttggtgcggaaaacgggctttgatgcgcgtatcttaggaccttgcttgtcacttcttgatcgtgcaccaggcggctctgaaagtgatttgcgagtttcaacaggtggtatcatgaacctctgacccacaccaatgctaggttaaccgcccttagttttcataccctgtgtgtcctctggggaaacatgaatatcatatcgagggcaacagggtcgggccgcgttgctagctggtcgtgtttctgcccgagccctaccatatcattatttgtgctcgagctccttgttcgttacaataggtccgtctagggaggtgcatcgccccttcccatgcattctgttcaccggaaggggaagggcgagtcatttcgtgctccctttgacggttgaggccatgatgcttagttggctggtcttattgtgacctcctttttgcaaggcgagctcctgattcccctgttcattatgggggatccatctaggggcacatcctatcttttcactgttccttcccacacattccattcatcagaaggggaagggtgagctataccctcgatggtcaagaccatggtgttcagtgggcttcaatcggttgatccgaatgtgccctccttttgtggagcgagcccctgagtccctcgttcgttataggggatccgtctgtggcgccccatctttttaatacttcttcccgcacattctattcattggaaggggaagggtgagttgtatcatgcttccttcgatggtcgagatcatggcgctcggggagctccaaatgggtgatctaagtgaggccccgactcctttcgtaggatcaaggcgtggggttcgctggggaccgtcctcatactctcaggttccaactcatatagttgtcggccccattcgactgggtccaacgactcacagc

SEQ ID NO: 123863 - DNA, 478 bp, Zea Mays
ggagtccttcgacgacgacgacgatccgatatctagacattggatgggcatcgactcctctaacaaagagaacgacgatgacgagaacgacgatggcagcagtgacgacaacaacgacgacagcgatggaagtggcaacgatgacgacgacgatgatggcggagcaagccaaatatgtgatgagatgccttacaacaagcgttgtcggctccatcatagcttattctggtaggaaaagtagtagtttctactaggatgaaacaattaaaaaattggcttttggatatgtaaaaaacatcctttttaatgaataaagcctagttcttgttaatatggttcaatcgatctgcttttctcatgaaatcttataactagtacttcaatcgatctgcactttctccgattccggtcgtaatctccaaattttcacctcataaagccaagtgaatgcgatttagcatccgaaaatactttccac

SEQ ID NO: 123864 - DNA, 279 bp, Zea Mays
gaaccagttcatcctcaagataacgatctagctcagatttaaacaacatttccattggccttttacttgcaattcgagcactaaacgaagataagaagtccatgttgtcaagtgaagatggtagttcttcagtgtaatcttcatcctcatccacatgatactcattcattaaatcactcaatagtcctttgacttcagcaaccttaacctcacaatcctttccagtcgtaccaagtaaccactcaaaacacataattagcattaaagttttgaatcgag

SEQ ID NO: 123865 - DNA, 1034 bp, Zea Mays
ctctaaatcactagacaagagagatttgaggctcctaagtttctttttcctaggatgcccatgcctctttcttttggctggtagttgtgcttttgatattgatggttcctgtgatggttcatcatgtgcaccctcatggtcttcatcttgataaacattttcatctggaacaacaccggtaataaattaattgccaccatcctcaagaatatcattcaattccttctctattggatctttgctcttgttgtctctcttctcccttagtttagaattaaatttcacaaagacaagatccctcattctatcatgcagtaatttgttttgcttctttgtgtggatctatgtaggcacagaaaattatagattgatcacaaatctatgaattcaagtgaatgtaaatccaaaaatgaattgaccaaaatccaagatattttattacctgctcaaagactgaccaggccctctcacaacctgaggagctacaagtcaaattgagaatccgtgttgctaatatcctcagatgtggtgtggttgtgccatggttcatccaccactttgctgcattaagccattaacatgaaaagttaattaattgtcatgtcaagagttaaaaaatagatttggtgtggtccatgattcacctggattgaaggtcttgtttctcctctgtctgactgcaatgtcatgcccaaatgctccttgttggtcttggtatatgttgagctcttcaattatgctatcctgagtgtcttcatcatcaaacatctttgtaatgcaagaaattactgcagctctaaaggaaccatcaagctcaatgctagacttgtttgggtaataaaagtatgggttcaagtagtactcagccaagtgcaatggagtcttcaacttgttatcccatcttttatcaattatgtcccaagcagctctgtatttactttcattattatcaaaccttgtagcaatttctttctttgcctcaagcatacatccatggaagaaacccatggcaggtacatcactgtccattctcc

SEQ ID NO: 123866 - DNA, 320 bp, Zea Mays
gtggcgtatgattgtcacagggatgtcgagctgcttcttttgtccatcaccagattctacctccatgaacctcgacgatttacacttcagacaatactttgtctctgcgtattcttttctaaataggacgtagcccttcaaacaagcatgtatctggtcatacgtcatcttgagtgcatgaaggagaggattactcggtcatctatagacggtgtatccttggtatgaacaaaaggtggcgtatgattgtcacagggatttcgaactgtctcttctgtccatcactagattctacctccatgaacctacatgatttacac

SEQ ID NO: 123867 - DNA, 531 bp, Zea Mays
ccaccatgatgcttccatgatagcagttggaccttcgacagctggacagagctccttgtgttcaacacgagatatgtttgctgatgacgatgacgacaatgctgaggacgacgatcctgaggatgaaagggacgatgacgtcgtgtccgcacatcacgacatgattggaccgtcgcagctacaggatgctcccttgactcagttgtcatagctcacccctcgtagatggcacccacatctcccctacaatctaggcactaatgctcttggggctaagggcaagggcaagactaggaggaggtgaggctggctatgtggacgacatggtatgtgttgtggactatgatgtggaatatttggactgtgttatggattatttattaatattggaccatttatgatgtagccgatgtggactatttacttattgtgatgtaactgccaggctgaccgaatgaccattcaccccacgcgaaatttcaaggaaaattaggtggacaaatggaggagtgtgtacgtatacttgctcta

SEQ ID NO: 123868 - DNA, 791 bp, Zea Mays
cttatcagtaaaggttttagccgtaggtaagacggcgggttgatttatagaaacccgtgggtctcttttgtaaaactagtccgccgaagctgtaatggccgactttagccgttcgatcctccatctatggaccagattagatccaggcttttatgaattagtacgcgatgaccgccgtcggatcccgaattcgcggccctgatttaatatgatccctgggaatgcctacatccaatcctagccctccatctcttatctgacggctggagtgcctctttcctctgctttccgccgagccacggcggcgccatggctagagcccacccaaccctgtggcctgagcactattccttgatccagacaatgctacacgaactatggagcaaggtgattcgaataaggtgattcttactggtgataaggcgatgagggtgtttgcccatggcgttgggcagatccggggtggtggagagctccaacgacgaattccggcctatgtgggccaagttcttggctaatgatgcaactcctgaaccctccgatcgatggcgaagctctaggtccaacccacaagcctaggatgtcaacatggtcgagttgcttcggtggcagccatggcggtccctagttttatagtggctagggtggagtctttatgggagcgttcggtcgggacgaacccgaaatcaccgcgcagtcgttgcgattcttctgtgctagcaacgatggggctcatggcggaggcgaggaaatcccatccagattccacgcacgtctccgccaggtttttt

SEQ ID NO: 123869 - DNA, 821 bp, Zea Mays
aagcatcgctgtttcactcgacatcaagagattaatggtgtacgacgactcactagtggtcataatccaagtaaacaaagactgggattgctcgaccgactcaatgaacaaatattgcacaacggtacgaaagctagaggacaaattcgaaggattagagttccaccatgtggaaagggatcacaatgtagtggctgacgcactatcgaagatggggtccaattaggcccaagttccacctgggttttcgtccaagaaatatagcaaccgagtgtcaccacagatcagatggaggaatgtcacgttctaagtcaggcagaggcagatccaaatgactagagagagccaatcatcaaatacataagaaatgaggaagaaccagatgacaaggctgcggcggagcgcaccgcgagacagtcggtccactacaccattatagggggcttactgtacagaagaggtgcaggggtagtccccatgaagtgtattcacttggccactgggaagcagttgttggatgaaatccatgctgggcaatgtggcgtgcatgcagcgttatggactctggtaggaaaagctttcaggtccgggttctactagccaacagctaagaatgatgtagctgagttagtctagaagtgcgaggcgtgccaattcttatcaaagcagcagcatctacccgcttaacagttgcagactattcctgtgacctggccgtttgcatgctggggactggacatgattgggcccttcaagaaagctcaaggggatatacacacgtactagttgccattgataaattcacaaagtggatagaatac

SEQ ID NO: 123870 - DNA, 716 bp, Zea Mays
ttactaattcatttattcattttaaatgagttctggactgggcgcataaaaaccagagaggtcaggggctaacttataagatttcccgagactcatattactgctatatggactgcgggttgaatctcaataaacccaggggttcttctccaaagtgggggtcgaaacggtatggtttagcttcggccgatggatcgcggatgaacgttcctgattagatcggcataactacgaaccggtatgcattgtggaccggccgatcccagatctacggatgcggtgcggacacccccgggatctaatctctaccacccgtcactcaatcaacggctcggatgggcgcccagaaatgatacgcaccaaccagatcaccgccaccccatgtgaatccaacggcccagacaccgtctaatctccaccgtctatctctcacccaacgaaccatggtcgtcttcttcctccccgcgccctaccatccccctttctctctcttcgtggctgtttgctcgccgacgaacggcgaatccggccctctgaccactattccccaacccgagatgtgctatgcaaggataggaacaaggcagagtgttgagagtgctcaccatcggcagtagatcgacgagctccccacaccatgaggtgtggcaacgcagcagtggcgcgccattggtgcaaagacacccgtcctctggtcatccctgcttccccgcgac

SEQ ID NO: 123871 - DNA, 621 bp, Zea Mays
agcaagtatttgagctgctcagccaacaacaactacatttgaaacagtcaaaatgcctgtttgctcaagagaaattggaatttctggggcacatagttagcgctgctggcataaccactgatccaaagaaagtggaagtcatccaacaatggcctataccaaagtcgaccaaagatgtacgcagttttttggggatggcaggatactatagaaaatttgttgctcattttggaatcatcagcaggcctctcactaccttattaaagaaagatactatatttgtgtggactgaacttgcagatcagtcattcaaggcattaaaaacagctttggcacaggcgccagtgttggtcattccaaattttgctaaaccattcaccatcgagactgatgccaatgggggcggagttggggctgttttgcagcaggaaggacatccagtggcctatatcagtcaagctttaggtcccaagaatttgggcctctccatctatgaaaaagaatgtttagccattgttttttctgtcgagcattggtgtccataccttcaacatggtgaatttatcattcaaacagaccaccagagcctgactcatttggatgatcagaggttgtctacac

SEQ ID NO: 123872 - DNA, 531 bp, Zea Mays
ccaaacgacgtagggcaactcccttatccactttcctgcgaacttttcatttttatcgaagactttttttcctgagtgcctccaatatcatcctgttagctctttcaacctgcccattggctcttgggtgtgccaccgaagcatatttgatctgaatgctcttttgttcgcagaaatcgaagaattctgaacttgtgaagttggatcctaggtcaattatgatactattcggtattccgaatctgaatattatgtcttgtatgaattccacgaccttagctgaagttaaagaagcaatgggtttgaactctatccatttagtgaatttgtcgattgttaccagtatatgagtgtatcctccttgagctttcttgaaaggtccaatcatatccagtccccagcatgcgaatggccaagttactggtatggtctgcagttgctgcgctggtagatgttgttgttttgacaagtactggcaggcttcgcacctctgaactaactcggctgcatcactttttgctgttggacaat

SEQ ID NO: 123873 - DNA, 833 bp, Zea Mays
ttaaggtcctcaccgtgcccatttttgccacgggtgcaaaggtctcatcatagtcgatcccatatgtctaactatatcccttcgccaccagtcttgctttgtacctatcaatctttccttcaggagtctgctttactgtgaagacccacttgcaccccaccgccttctttccttctggaaggtgaacaagttcccatgtcttgttcttctgaagggcaagcagctcttccttcatggcatccttccactttggatcatgtttggcacacctccaatcctttggaatagatattgtttgtagagatgcaatgaaagttctatatgcaggagagacactagagtatgagacatacttagcaatgtcatgtgcataacaataacgagaaggaggtttcccagcatttactctaggaactcttctttgggcaagaggtaattcttcatgttcagaaatgggagaaacagggattggagagacattaccagctgggtctggagaggagtctgaagagagatatgggactggagcttcaacacatcgaggttgtggttgctccccctgcttcttcgttcactttcgatagtatactataggttgctccccctgtttctcattcacctttaccccaatgaaacaatcatgttgctccccctgtttctcattcaacttccctatagtaggacatggaattgatccaacaatcactgcctcatcatcctctatctcctcctgaatattaatagttggatcaccatgatccccactactttcatctttactcaatatatgcgtagttatccctttctccacttctgatggaatcatacctcca

SEQ ID NO: 123874 - DNA, 706 bp, Zea Mays
ccaaggctgatcttcgaaaacatagctgaggcagaagctactagactagaggatattgatatattggaagaagaacgattgaatacagtaattcaatcagctaggtaccagcaatccctgaggtgctacctgctgatctcaggtttggggcaccaaggctgatcttcgaaaacatagctgaggcagaagctactagactagaggatattgatatattggaagaagaacgattgaatatagtaattcaatcagctaggtaccagcaatccctgaggtgctatcatgataaggccatacgacatcgatccttcacagtgggagacttggtccttcgccgaattctaacgggggaaggacggcacaaattgtcaccactatgggaagggtcatttatggtagcagaagtcactcgtccaggatcatatcgacttactcaaatggatggcacggaaatagcgaattcatggaatatagagcatctcaggaagttttacccctagctagatttcaaaagctatcggggcagcattgtattctgtaattggaaaatacatcatcaataaaaagacttcattctcaaaggcactcgaactatttattatcaatctgcatgcttactcggcttagggtgaccactataccctactaacggagcaatcggcttaagtcggcagtgacttaggacgatgcaacatgctcatgctta

SEQ ID NO: 123875 - DNA, 1531 bp, Zea Mays
caagggttgtccagtttgaccccaaagtaagactgtcaattgaaaacgaagttgttgttcgacttgttgactcattcatgaacccggtggagtcttccaagtcaaaattgaaatttcggctgacatctgcaagtaccacaacccctgtaactacgactacgagttttgtggcaaaagaatttgtcaacaacagcgatggatcatatactggtcattatgcggcagggggccttggttcatatggcatatgcgttctttttgaggacaaacagctgcctccatgtccattcgaggtcactgttcatgcaggtaatttttcagtcagtacagaaaaaggctcggcacatagaagaaaaggaaatggtcacacgagatagataattaagctctagtttgtgactgtctcgttatgtaccgaaatatttccaccattcccagtttctctgcatgtttgtcgagtactgatgaactgtatctctttgcagatgagtacttttcagatgttaagaatgacactgtttcggtgtgggaggatgaatccgtttccttcgacgtattgtcaaatgaccgcattgcaggaagtaaagcggagatagcgaactcatcttctgtaagttaatgccgtgaaacatgcgatggccacatcaaacatatatattctcattacttcacatcaaacatatcttgcgtaaagttaatgatatcccttttctctgaagccacttcacgggtcagtcctgcagttcggccaaacctaccgttacacacctttccaaggattctttgggaatgactcgttctcgtatacagtacgcgatgagcataacaatgtcgtcactgcaacggtcttcatatctgttctctgcagaccacctcagttcgtatctttacccgagaagttgcatgttactgaagatacaatcagcccactttttgggtaagccataatgtcttttacctaaggctgtcttcagcagcttacacatgctatcgtatatctcatttgttgtttcaaactttattctgtgaactatacaatctacggtgcaaaaaaaagtgttttgcacgatcatatacatgatttacagaagacattgcatacttaagattaacctcacctcttttgttctctttctaaagtaatcaaatgcgtgtatgttcttggcagtggattcccggggatgaaaatggtgtattcagatacgacagaaaatatatctgtcacggtgacagcacagtccgggagcgtgtcttttgatccagtgagaattaaacttggacagttttcagaagatgtactttcaatcagcagcagaggtggcaaggacctggtgttacaaggaactgtagaagcggtgaatggtgcactagactctctgctgtacactgggtactaatccaagatcctgactctcccctggttctttttttttttactaagatcttgccgttttcgtttgcgtatggtggtacgatccgcgcaggaacgaagacttccacggagacgatgtcgtagcgctaaatgcctcga

SEQ ID NO: 123876 - DNA, 437 bp, Zea Mays
cagagagaaactttacaacatcgtctgcattgtgtcagtttttcgtgaagaaaagtgtccagtttgtcggtgcttgctgctgatgcgttgaaatgttctagagttaatttccacgatgctggcattaaactagtgactttgacctgatatttcattgattcactgtttggagttgagaaggcgtagcatagtttgcagaaatcaatatctgactggttaagaagtttctctggaattgcaacgttagatggttgaatttatgcatgttcattctgtagaagtcaagaacaattttgccttgattattcatacgccagagtggatacattgcgtgtgttaaatatgaacacatgccaagccttcttgtccttgagcagttacggtagtttgacaaggccggtttggtagagtttctccttcagattctgtgtaaagtt

SEQ ID NO: 123877 - DNA, 406 bp, Zea Mays
caagacttgcttgtgtgtctatatattgattgaatatgcgtaagtccagagtgaatagggtcttgttatgaagccaccatgtttcatagacacatgctacaccagttcattcagatgccttctttaaagatatatgttgtctgatctgtattttttatttcattgtttccctccagagttatatgattattgtatggtgtgctattggcatacttctcttcgagtggaactgcgcatagattctaaagacttgatgttttggtactttttacagtcagttgtagttgtgatcattgatccccatttgaaatattcatttcaactttcaagaatactatcccctcttcaaaattttgaatatgttggactatcaatttggcactataggttgcagacagtgagcttg

SEQ ID NO: 123878 - DNA, 663 bp, Zea Mays
tgatgttattgacctccctcccaataatgcccaatcattcgtggattggtacttcacaaagctcaggctcgatgatcccctaatgaagaaattactgacttcagtgctagcggagggtccgctcttcttcaagctatgcgttttcagaaccctgccctccatgtaagagacgtccggattgaaggtaatcgcttttggattctactacatgtagatttctacaattcggttatccttcccaagaagcaccagcccattctgcatcaacgttttatcaactggagtgggtgtgaaggtattgggggtcgagagatgtcattagcactgagggcttgtgaacacaagaacatgaagaatatcatgactttccaatttgattggaacgatgagattattgctcaattctactccacattgtggatcaagcatgcagatgaggaaagtccctacaactttccttatatgaacttttttattgaagggagctggtacaaggtcagctatagaagatttgctcatatatttggattctctgataatgatatagctggagataagatcaaaattcatgattttcgccctcccaccagtgctgaggccaaagatctacatatttctgaaaatgatgagtactggaaatccacaaatccgcataagtactac

SEQ ID NO: 123879 - DNA, 411 bp, Zea Mays
ctttggttgataatttgcatttcaaactcttgtctgttttgcaagtccttgaggttggatttgaagtgcacttttaagaagggtgtttcttgtgttcttgactcccataaggatatcttattgttgaatttctcctttcagttgtgctttttgtgttgacttgttgaggtcatttggcccttctcattgcttggtgggtgaatttatttttgaccttgaaaatggcatatcagtcatggacatttgagttttgacttgcttgcatgacttagaacacttaccttatccaagaattgcaaagttgaaatttgataaatataatgtttgctacccttatcgtcgtaaaaatggttactacttcccatccactcattaagaaagttttgactaagcaacctagtgagctcttac

SEQ ID NO: 123880 - DNA, 748 bp, Zea Mays
cacgcggcccagctcgggaacatgcacgctggcatgcgggcccaccccgtcatccacccacgtgcgcccacttctttcgccagagtcgcaagttgatatcggggggcccacccgtcagcgtcttccctcacgcaaccataattacacacaccgagttcaccgcagatggggagatttcgatcccggggcagttggccgagctcctaacctagaggagtatttacacgaccccctcggatccctccttcttcctcgaccaccatcccggacccaagaacctgttgccgccataacgcatcaagctttgtcgcgggcagagtaggaggaagagcctacgccggcgtcgaagctcgggtagcgtgtctgggagattggtcgtactgtgtgggagggttcccattgcttttctcatggagatcgttggtgtaacgccgcaatttctcgtcgacgactgcatctccgccgtgaagccactcgcgccgtggccaagccatatgaccacaccattacctgttaggacctctacattcggtccgccttgtcttcctgtgcatttaacttatcagaattgaggaagggtgcgctggtatgatggcggggccctcgccggcagagcgccaccgcgaccatggggcaccgccgtggggagctcgtcgacgggagggatgagctcgtggccatcgatccatgtgccgacggtcgcgattagattagagataacccttcgctagataaaaatctgaccgtt

SEQ ID NO: 123881 - DNA, 349 bp, Zea Mays
acgaggtacccgatgctcctcatacaactgcaccgtgtacaaaggggcgtagggtaaccggcggagttaagcacttcccacaagatggaaggaaagccatagtgagaaaggaagttagagttgaaacgagtgtctcttccactggcgggggtgggtgaattcatctgcggaagggtatcaaaggtaaagattatggtggaaggaagaaaaataaaagagcctgggtggttttaaaaggaagcgggttagctcaagttttaattccttttagcttttataatgcatgcatgctggaagtaacgtcttctctccgaatataagggtgctttaaggcatcctttaaaaatat

SEQ ID NO: 123882 - DNA, 574 bp, Zea Mays
atttgtgaacgtattcactgacagatctccctccttgggttaactcccgaaattcttcttccttgagctggacgatccctaggggcacatgatgctcttagaaagcggcttcgaattctgtccaggtagcatctctgatggcagcgctgaaagtatcccaccaggatagggccatccgagagagttgttgagcagcaagatgaacacgctggttttcaggtcattcgatggcctctaacttcctttttactgtgtgcagccagtcatcagtgtcgagagggttgctagatccagcaaatgtgggaggcttgagccttaggaactctcccattctatcctgaggccttcctgcattcgggcgctggttctcgaggcttctagtgaggacctcaatgagtcgggtttggttagccagaacttgggctaggtctaatggcagctccgaaggtgcggggaggtgggtctcactcccttctccaccgacttctccatcagcacctacgggagaccttgctctaatccctgaggcggtaggcgtggttttatccgaagccatctgctagaggggagaaag

SEQ ID NO: 123883 - DNA, 429 bp, Zea Mays
gccacgtctgggcaggcgtagcgtaggtgcctgctgccatcaaccactaccgcgtccaggtccattccaaaagacagcctgtcgtcgagttcatcggagacaggcaggcctaaaaggctagtaagggcctgggactaaccagaccaggtcgtccaacacgctaggcagcccatcaagttggttctcctccacgccgacgccgctatgattttttcccttgcaaaacccatgctcgctaatgatggaaccgagaaaagaaccacagcgttctgactgagacacctgggcaatgagttgagatgattttttccagacagaaacctgctgcgcccacttgaactcgtaggatggtggctacggtctctacctgtagtagcctgtcaacctcgacccaatcgggttccttaacgtacaccatcttctcccggg

SEQ ID NO: 123884 - DNA, 320 bp, Zea Mays
tctggtcttcgaaaaagaagacacacccaagaagattgaacctcctactcccaaagcgtctactgaagaactggactttatcattcgacacgcttcgggtaaaaaattgtcggaagaggaaattgccgaagctaaacactatgcccgagaactgaaatacccgaaaggatccttggtgtataatggcactgatgaagatgactttctgtactgcctcccagacaacaaggaaatatctgtttgccgggagatggctagaaatatagggtttccgaagcttgaagttggtctctctgctatgtcaaaggatgacctcgcag

SEQ ID NO: 123885 - DNA, 709 bp, Zea Mays
ctggcctcaatcattggcctccaatgcaaggccaatcaataataatgaatcgaagttgtttccttttggcctggtggcggcctccaaaaaacacacggatcggttttggctgctaatgcagctgggaagggtcgagaatgctaccattagggacttgtggtgactgttttagttttgatgaggagaggaatttcgaggagtcgtaatactaggttttgtggtggtggtagctggagctggggttgtggaatggaaggtaggacaaacaaaaggtggcaagattctaattctacaacatctgggcacaagcgaaagatgggagcgcgtgagtggaatacacacgcacgataggtacactaccacggcagcctgcagggggaggagccggctacattggcacctgaaccactcactacccaatcttgcaattgcagtcacccactttgcctcccgcctttcctttccatcatggtctcgtgagtggcacatgcaagctcctcttctcagcctcaatgatctctcgcgctctctctctccatgcccatcatcagggcacccctttcaagacacttgagtcaattacagacggattagctccctaacaaattcactttttttcttaatcggggagtacacaccaccgcccattcagcctgtgtgtgacgtgcaccgaaccttgccattccggccctagcacagcacggtgcga

SEQ ID NO: 123886 - DNA, 752 bp, Zea Mays
ctctaatagattatcttcatttatgggaagttcactcagagtttgaactgcaacctggaagggaagataaacatatattcagtgttgcatctgatggcatatactcagcaaagagtgcttataagggtctcttccttcctgggatcaagtacctttggtcactatagaagggtgtggaaaacttgggccccatcaaagtgcaagttcttcatctggcttgtggcccaaaacagatgttggacagctgacaggttagccaagagaggcctgaaccacccaaacagatgtcctttttgtgaccaggaagctgaaacaataaatcatctgctggtgtcatgtgttttgcacgtctcttctggtacaagctgctgagaaagtatggaatacattccctagctcctcagccagggattattcactttctggattggtgggaagatgcttcggatgcagtaaatgggctcatcaaggagtggatttatcctaattatcttaggtgcctggatgctctggaatcaccgtaatagatgtgttttttaccacttgacacccagcctaactctgctccttaggcttgctaatgatgaagggagaaagtgggaaattgctggggccaaggggatatctcaccttgttgccccgctgccagattcttgatggctgctgtgagagcgaccttctaggggtgattttttccttatggattatttcttgtatgcttgttactggcccccgtaatggggttcttttgt

SEQ ID NO: 123887 - DNA, 602 bp, Zea Mays
cgaggttgaagagagagggatgacagcggcacggagcagtagagaatgatggcgtcgcggagttggagtggccgaggaattcaagcacgcgggaggagattacgtcaccacaaagcaattggtgagggcgacgagccgacaacacatgcgccatcagctgctggagttctgtgatactctcggcgtgcgaacaccaggaagaatcatgaccgtggctgtgaagggaatggagaagcgatggtagatgagctcctcccacctgcctcccagaccgaggcgagcacggtgacaagaggaaacagagattacgaagtcatgtggcatttgggaacgaacacaacacatagcagtagctagcatgcgaaatgagacctccatgttacccaagcaaaagatgcgtggcagtgcatggcgacccagcgccgagcactcctagcgtgagcctgcatgcacgagtggccatgcggccagtaccaaggaacggaggccactgggataagaacgagcacaacccctactaaaaatccaagctagccgaaaaggtcagtaacggaggttaggcagtggggaagattaggatgacgagatatttttggtttttt

SEQ ID NO: 123888 - DNA, 394 bp, Zea Mays
tggagaaattgaacctaggaatgattcaacatgggacttcacatcatttaaagctggagtcagtcatcttgcaaagaataattgacacacaaaaagatgatgtgggtatgaagcacatacgtgagaagataagggctggaacagcaaaatgtttcaaagaagacgatcaaggtgtgatatggttcaataaccgcatagtggtgccgaagaatgaagaactccgccagcaaatcttagatgaagcacatcttagtcgctattctattcatccgggaagcactaagatgtatcatgatctaaagcagcactactggtggacgaagatgaaaattgaaattgcacgctatgtggctaagtgtgacacttgcagacgtgtcaaggccatacacatgaa

SEQ ID NO: 123889 - DNA, 805 bp, Zea Mays
gctctggcagtaggactagtgagctgccacgtcttggcctttgcagcctggacgaggttgttcccatgggatctagggggatcaaccttggcatatgttaggttgtttattttatttgcaaataaattaaagccgagatgtaaaaggcttctagttagtgttgcactttcacgtgcagatcaagttagacagcaaggctattgccatgcaccccattaaagctggaggactagttgtcttcgaagggtgggggaatgtcatggggcggcagcccagagcatggaggccatatggataggctcagggttaggattggtggataaagcttagactagataatattgagttagttacttgggattagattagataagattgagttagttaattgagattagattagattgagttagttacttggggccaagtcttcctatctatataaggatgtgttgtatcttcttaagggggaatcaatcaatgaagaagaattagtccctctaatactctagtctcccccatgctgactccgcccggctatcttctcggcgctatttattcccctatggactaggaatcataacagtgctgatgttgatggggttggaagacatatagacagtactgatgttgtcagagtagaccagagtggtgcggcgcagaggagcttgcagttcttggagtaactggcgcaaccaggtggcgtcagcgacggctttcgccacacctcagtattcagcctcggcgctggatggggagaccgtgtttaacgctcaaaggactaggagatgagactgtcacccaa

SEQ ID NO: 123890 - DNA, 636 bp, Zea Mays
cttggggtttgataaatttttatcctttgattagtgtgagatggttgaggtaagccttctagaatgattaacatctaaccagggccttaatccttaagtgtggtgacttttgctctaacttactcacatgtgataatgggtttatgagtggtgttgggttaaaccctttagcttaacacctgagttgtcacattatcttatcctggcgcgtacacctgactgtcccacgggtcgtggcgtgatcgggcgttggtcagctttcatactgacaacgcacatgtgtaccctctctggagtagttattcaggttgtccggtcgtcagagcatgcgtgcccagtctttaactctcgccctgtcattcgagtgttagtctggtacttccgtaccgtcttcgagatgacctttagtatgactttcgagagcatttggtctttgaggggttgagcgtagttcctgacctccaggttgggcgagtcggtccccactagggtggcctcgtatcccaacctcttaggcggataggggacaaacgagttgaagaccttggtcaggggtcggccgaagcaggactattcacgaaggtcaggaaacaaatttagacatgttcttgaggttttgtgccgtacatgggttat

SEQ ID NO: 123891 - DNA, 490 bp, Zea Mays
gacggatgtaccctttttgctgtagttctgaaatctgaagtttcaattctgccaattcagtgggggccatgcggtatggtctcttcgcgatgggcgcagtgccgggaatgagatctatatagaactctactcctctttctggtggcatcccgggcaactcttccggaaatacatcctcaaactccttgattacagacatgctctccgctgttagattaaacatcattggatcgtttgcgggcggttgggcttgataggaaactacctttccttggtgatctgtgaggagaacagtcttgcttgcgcagctgatgatacccttgtgcttagctagccagtccattcctagaattacatcaattccttgggatggcaagatggtcaagtctgcaaggaacactaccccacttaagagaattctgacttgggagcacctgagtttgcacaggaggtctgatcccggggttcgggtgaccaaagggatagctag

SEQ ID NO: 123892 - DNA, 363 bp, Zea Mays
ctagctcccgcgctattcataattttgatataatccattgtgatttatggacatctcccattgttagtgtgtcgggatacaaatattatctcgttattcttgatgattgctcccactacatttggacttttccgctctgcctcaaatccgagacatttttcgctctttctaacttttttgcgtttgttcgcacgcagtttgggaccaccatcaagagcgtccagtgcgacaacggctgcgaattcgataattctcaggcccgcacgttctttctctcccatggtgttaccctccgcatgtcatgtccatatacatctcaacaaaatgggaaagcagaacgctctcttcgcaccctgaacaaca

SEQ ID NO: 123893 - DNA, 645 bp, Zea Mays
tgacgtgggatcaatggagttggaaaacttatatccttatctttccaacaatgtctaggatgtctaaaacggggtctgtatgtggcatggatgtccgtttttgtgaggaccactcctttagtccggactggattcacgaataaactggacttcaactcccctagagtttggaacttatcattgattgggcctttaccatatagttgacgcccatgtactcgtcaatctccccttcttggttttgagtcgtcctcgactcaaagttgttggtgcatgcataaggtgttgttgtagatcttgacatcatcctgccttgctccccttcttgaatttgaccctgttgtagcaaaacatacaaagaaggacaagtagaactggacatgatatggttagctttaacatagccctctaattgatcatattgtttcatgacaaaaggagattttatatttgaacaaatatatactcgatgtaccatatattctcctttccaattatatcttccaataacatgatatgtatgtttagataaccatggcaaatcagcactaaaagaaagtttctcctctaaattatttagattacatagaacatcaaattcaatatagcccaaagtatttaaagaagataacaatttcatctcat

SEQ ID NO: 123894 - DNA, 396 bp, Zea Mays
tggactgatagctgttattgtaagaaaactctgccaaagacaaacacttgtcccattcctttccatagtgtagtgcacatgcccgcaacatgtcttccaaaatctgatttaccctttctgtttggccatctgtttgggggtggtatgctgagcttcggatgacatgggtcccaagtgattcttgcaattgttcccaaaatcgtgccacgaatggtgctcctctgtccgagactatagtcttaggtatcccatgcagacgaattatttgatcaatgtagatctctgcatatttctctgtcctgtgggtggtgtggactggcaagaaatgcgcagtctttgtcaacctgtccatgataacccaaatagaatcatggtgcctggaggtattgggtaatc

SEQ ID NO: 123895 - DNA, 296 bp, Zea Mays
gacttcattcataagggcttggaaggttgctgacgcatttgaaagtccaaatggcatgactaggaattcaaaatggtcgtggtgtgtccgaaaggttgtcttatgaatatcctctgaatgaacccatacctaatggtatcctaagcgcagatgtagtttggtgaagaacttggccccgttgagtttgtctaggagctcatcaactactggtatggggtacttgtctttcactgtgcgctcattaagggctctgtagtcaatgcagaagcgccaagagttatctgccttcttaacca

SEQ ID NO: 123896 - DNA, 551 bp, Zea Mays
catgctgagtgcgcagcacgccactatctggatggtggttctcccgcccctgtcgggatttcagcacccttaccgttcaccgccccgtggtcgcttcgactatggtaccccagactacaggacccagatagatttggatccctagatcgacagagtcagagtatgtaataatgcttaattcagtgtcttagtctagtcagtcttagtcagagttagtttggttatctcttgttggatgcttgtcatgatgaacatgtaatgaagttggatctttgtaatgattgtcaccaagatgtgggtatcccctgcaacttgatgtggttattaataaagtcagttattttgttgggtaatccatttatttccactttcctctttatctgagaaactgttagtgaagatggtccattgtttagtgctatgaagatcttctatatatcttttcttatgctgaaagactgcagagtcaaatttgatatacgtgtgtgatttctacagatgtctgagaagaggcgcagaggtgcgaggcgtgctcagcctgaacagcaggc

SEQ ID NO: 123897 - DNA, 611 bp, Zea Mays
gtccatgttcaccggtggaacctccgactccagcgagggtgatttcaccgctccggtgaagtagatctccggctcgagccttgggaagcttcacaggactcagggggaactggtggtgggttcagtttaggtggatagtagctaggcaaggtggaccacaacgactgactttggtcgatgatgggggcggcggtgcttccttctccagtgaaatttcggtgaaggtgctcgactatgggcccaaggaagtgcagagagtgcaaccaagggtcggggtcagctttataggtgaaggtgagggcatggcactgtgttgtctatctgttgcacgcggcaggggcatgggcatggattgggtgcgctcccgactgccagccgaggtcaagcacgtggcgacactcggtgtagtccctttcaagcatccatcggctccaaatcctcatgaatttgggcaaacctcccaggtaagatctcttcccctctctatgctctatcaagtttgtgcagggcctagggagtttcatgttagaggtaaggatttgcttacctcctaaggtcggtttgtctcttagcccgaatctgagacaaaatccatgtgaaatcatgtcagc

SEQ ID NO: 123898 - DNA, 360 bp, Zea Mays
aacacaatagagtcctgtgcaacaggcatttcatcttccagactcatgtacatagtcaaagccatgacgccgcaggaactcaaacatgggttgctgcaaacagccctcaactcaatgccagacatagacaaggcaatgccaaaagatctcctggaccgtgaccatgagcaagccctccagtcgctaaacaagtatcaagcagcgacaaagatgtggagggacaaagcagtacacccaaaagagttcgaagaaagagacttcatcctcatacggaccgctagaatagagaacaaagggtaagtagaaccaaaataggaagaacccttcataatcaaaaataagacctcgccaagctcttac

SEQ ID NO: 123899 - DNA, 311 bp, Zea Mays
ccacagtatacagtaggctactagtaggagcattgtacaggcctcgttctagacctcgaactttcaaagggtttggtttggcgtggacgttggtgaaccgctgatcaagtcaagaacgagcgaggataaactgccaccaaccgcctctctctacaccctggtctacgacacttgcaactaccgcacggcggtgtatccgttcaccttttccaatttcttttacacacacctacccttttcactcaaaatataaattcccactagacatcggtctacgaaacgctaaaccgtcgattaccttcgtttaatca

SEQ ID NO: 123900 - DNA, 344 bp, Zea Mays
agattgtggaactacatgcgaagcgcgtggagcgtcgccatcaggaggatggttcccctaccactgttgggactcagcgcccttaccgctcaccgccccatcatcgttatgcttatggcacccctgactacaggacctggataaacttggagccctagatcgctagtgttgagtttgtaataaatgtttaagtcagtgtcttagtcttagtcagttttagttagtcagagtagttttcttatcatgtgtttctatgtttgtcgttgtgaacctatgatggatttggctctttgtaatgattgtcaccaaagtgtgtgtcccctgcaatttgatgtagttaataa

SEQ ID NO: 123901 - DNA, 493 bp, Zea Mays
attggctaaaaaattcagaatggcaagagaacgtctggctaacaataaaaatgaagaattcatcatcaggctaatcggagccagagaaggcgattctgtgcagtacaacttaccatcagttgaagaactcgccatgttagttgttggtgatttctctcttgacacattcaagcgtgacataattattgaaatgcgtagcaaagaacttaaacgaatatctgctttacacccagctttcatggctttacaatatccacttctttttccttttggagaacgcagatttcagattggaattatctacaacggtgtcaatccgtcagataaaggtaaacatactcacatgactatgcaagagtattattgccatcagtttcattaccgaaaaaatcagcccaacccatatctatgttatggattactatcaagtcaagcaaaggttgatgcccgagcttgtattgatgagagcagattagaatacatactacaaaac

SEQ ID NO: 123902 - DNA, 306 bp, Zea Mays
gcattttatctagaagtatgatacactggttctatgaatttcaaaattcatagagtagcggtattgctacaatggcactaaatattaggaggcgtgttatattgttatggtaaaaatccccaaaaatgttctaagatatggttttatctagttatatgtcttgagtggggtttgtactcagaatttctagcattacaggacagttgtatgatgaacttcaactgtatcctaaaatgtcaggtcacagttcaagcagagttacaagggatatatagctgcaactaaaagcagagcaacaaagagtag

SEQ ID NO: 123903 - DNA, 837 bp, Zea Mays
ggagacgatggattagaaagaggatgaggtgcatgaaaagattgtggaggtgatgatggatgtaaaggtactaaagtttgaggagacagagatggttggggatgagacaatgacgacgttggtggagacatcccttcgaggccaaaggatgaaatttttgatggcttgtccaagtgtcttgattccttctggcctagggatgtctagcatgtcgtcctcagatccttggacgatcgtcgtcacttctaccctgcaataatcatatgttatgtcgcttccatgaaacttgcatcctgggatcgcaatgtttgttcctactttcttcgtgcaattattgttaataccatatcttataactaatgtgcacgtcactggccttgttatgtcatcaactggataacagaacttatttcccgttaacgcgacagagcttgggacggttgtacaatcggtggaagccggcggttgagctgctgcaattatttgcagctgtggagtggtcatctgttgaacatacaccgcacttgccaactactgcatcaattccggtggaggatttgatagcatttaagacatcagctctttgaactctttctttgcctcctacttaaaataatccgacaactcttttttatatcgatcacgtttcttgtacaaaccttcccactgtggtccgaatccttccttccatccttccttaaacgagattcctcgtacacggccaggatgcccaaggttaccgagaccaaccgttaggatgtctctctccctttgtggcttaaatgatccttggctctgcttagctaccattgcatatatgtttttcgcagcttcttc

SEQ ID NO: 123904 - DNA, 377 bp, Zea Mays
cgagcatacagtacatgtacttcttcatgtaaagtattacagtacacttgcaggttatcgagggccacactaagctcttccacacgagcccgagcttttgctttgtggtgccaggcgatcgaacgcgagttgacgacccaatcaatggtcaaatcctgctctgagatctcaaaccgcaagcgactgacttcagctaacaattcagctatacgttggttgtcctgctctcatgccctgttcctatgacgtatctctgaccggagttgctccaccttagcttcccggtctccaattggatcgttggagccactactactcccttcatgtctgggggctaactgatgacgaggcacaccaaaaggtccagtagatttgcg

SEQ ID NO: 123905 - DNA, 582 bp, Zea Mays
atcaccttcgacatagtcgacatggtctaccctataacgccataatggggcgtggatcaatcaatgagtttgaggcagctatacacggactttatctctgcatgaagataccaggccctcaaggcgtgatcacagtgtatggagactagcaagcagcacagaatattgaaagagattttgttccaggccagcgcaatgttcattgcctaacagcagagcgcgaagacaacaacagtcctcacccaactaaaaacaaaaggtcaccgcctagttgcaaagcaatgacagaacaaagacagtcccccttgaccctgcaaccccaaagcaaaccgtcataatcaatgaagacctgtcaacgcatgaagaagaaagacttctctcctgtctcaaccacaacaaggacatcttcgcctggtccactctagacgtagtgggggttagtcgtaccatcatcgaacacagcctgggcatcgacccctcgatgcgcccaaagaatcaacggctaaggaaaatgtctaatgaaaaaacagaagctgtgaaggccgaggtgcaccttttactggaagccaaattcaatgagcc

SEQ ID NO: 123906 - DNA, 468 bp, Zea Mays
gctgcggcaccgatacacttattccacgtttgcagactcgttggttgctgacccctcctgttgagcaaggtaagaattggtaagagcttgtgtggcaagttgagagtgagcgccttgcattagctacatcctaatagttgtggagtttttagtccttcacttttttatcttgtagcctatgttcgtctgaccatggcaggattggaggttgatgatgcttctcgtaatataccacactctcctcgcaccaagggcatcatacaacactttgtaaggctggtgaagacgcacacggaaggtcttgataatgacttgcaggtgacgaatgaaaagatggggcaattggaggccacacagatcgacacaaacaccaaacttgcaaatgtggaagtgacagttgctcatattgacaagagccttgtcgcaatcttgaggcgatttgatgagatgcatgctaataccaatggt

SEQ ID NO: 123907 - DNA, 465 bp, Zea Mays
tacatggaaactgtaaaaatacttcactctcaaataagcccttagtctccagaactaaataaaatagagactaaagtagattcagaattaaaatttagtcctagagctaggcctaagcatcttcaatagttatgtaaacaactcactaaatatgaacttaataagttttcgagaaaaaatcatctacaacatttatgtaaaataggtttctaaatttacaaactccctataaaattgtattgtatccctacatttatcaatcccgttgagactccttaaatcaacattgatactatattcatcgcgaaaacaatactacgaccaccattttgggtcgtcccaccattccgttgaccacaaatccatctgcaacgtctagatgtagccaccgctagacaacctcttgtgtcgagacgttgtcgacgcacctcctgtgttgtctccacgtcgtcatcatgatcgtcc

SEQ ID NO: 123908 - DNA, 596 bp, Zea Mays
tgccccttcaccctccttcgccagagatcaatgaatggtaccagcaggcttatggggtgcccttcatgacaacagaagatgaagaagaagaagaggaagaattttttgatgatcgtgagcagtatgtcccgcctccccaccaaggggatccaggtcaatcttcttcatatcctcctccccaggatccatcgggtagctatccccccagctcagcccggggaagaaaactttgtagctaatttggcatctcagttctttgatccatctcctccgtggtaatttgtggttgatgtttctctccatttttggtgctagttgccaaaaaaggggagaaggattgacagcttggcttggtagccctcaggggcttttatttttgtaatgaacactgggtctgtaataactttattcgcctatgcttgttgtgatgcatgtgatgatggcctagagccataaacatttaatgatgtgatgccctttattgtaatagccagtactatctcatatcttatgctatacaatgatggatttgttagagtaatgctatttttatatcatcacatcttatttaattttgttgcatccctcagtgtttg

SEQ ID NO: 123909 - DNA, 310 bp, Zea Mays
agacgctgagcctaacgatagcattaggggtcagctgatgaagatagatttcataattatccaaaacttccccaatcatctcgttcaagggaaaccgcaatcccgctctgaaaaagctcttgaaaaccgctacttcatcatttttgggctctggagtggtctctcctccggcaaaacgaataagtttcttcttagcttctccgaagcaacctagcttcatcatcatgggtacatcagcctcagacacaatagatttttcaaagtccaagtggctgggttttgatgggatcagagtattgtagtcttcctc

SEQ ID NO: 123910 - DNA, 368 bp, Zea Mays
ccatttcaggtcacctgttgtagattcagtttttttgcttatccactttaacagactggggtacttatagaacgttttgggtctcaatattttaggtccattgttgcactcagtcttagccaaccgtgccttctctatctcaccacgcattctccctggtcggtgcactcctccctcgacccctttttcccatccaagtctttctgcagatttcccttctgattaagactgagattgccatgtagtatccacatcctgcaccggagaaatcttgccgtccggcttcatatgcatccattccccatgaaaaccatctgaaagcatggccagatgaaaccttgggcatccgaaacactagctatgagcaa

SEQ ID NO: 123911 - DNA, 381 bp, Zea Mays
gctgatgataacctgacctcagatcaatcttggagaacacactggctcctctcaactggtcgaacagatcttctactctgggcaagggatacttgttcttgatcgtgacttcatttaaagctcggtaatcgatacacatcctcttggtgccatctttcttttccacgaacaagacaggggcggcccaaggcgaggtgcttggtcgaatgtaacctttctctgacaactcgtcaatctgttccttaagttcaaccaactctggtccagatattctgtaagctctcttgaagataggggcggttccaggaagaagctctatagcaaactcaactttccgctctggtggcatacccggtaggtcctttggaaacacatctggga

SEQ ID NO: 123912 - DNA, 568 bp, Zea Mays
gtatccaaatcgagcggacgatgaataaagactatggcccgaatttcaggtgccagaccatctatgaatctattgacaatagcagcaacactaaactggggatcattagcaagcatttggtgcatcagagtatcgaactgttcaacatactcaacaactgtatcaatttgtctaatgtggaaaaattgtcgaataagatagttgtgctgatcacgctcaaagcgagcacagacagctgcacaaaattcagaccactgtgccaaacgtaacctcggatcggatgattacaaccaaaacgctgctgacccgacaaaatgcatcgtggcaattttcacccaaagctcacggggtatggtgaacacatcaaaataggactcacacttagctttccacattttaggatgatgtccatcaaattggagaaaatttagttgaggtaatgtagcagttaagcgagactgatataatgcccaatcaggatccatagtatgaacaataggagtatgaaaagcatccagtggtgaggttttggaagtacctttgaccggaggcggagttagggtggtca

SEQ ID NO: 123913 - DNA, 410 bp, Zea Mays
taccgtgtccgctgcgtgcccctgattcggcggatcagtcagttgaggctgatcgcgcgattaaccgcgccgatcgtcgctcctggagctagcgctcgccatatgttttcaaggccttgttgttctaatcagtaatcgtacagcctcggcatggcaaagtgaccaccggctgtgctatttttatgtatatatgtacgttatcgttaccaaattcgatttaagtgggagaaatgctcactgttagtttcactcgtgatgcacgttatgctccccctaccgctctcagtaatttgccacttaaaatctactacagtatgttatttgttcatggacacaacagtaggtgcacctgttgcctctgaacctcacatcatctgtccaatgtttctttgctgcacatcatctgtccc

SEQ ID NO: 123914 - DNA, 504 bp, Zea Mays
attaaccatcagctcccgttgaaaaagccatgtctgcaagtcagtttgaactgaagcatcagccaaggacaaacccaaatgacgcggttgatgcccataaagcacctcaaagggggatctgcccaaggaagaatgaaatgctgtattataccaatattcagtcaatgacaaccactgaatccattttgacgggcaagcatggacaaaactccgaaggaaggtctccaaacattgattaacgcgttcagtctgcccatccgtttgagggtggtaagatgaactcatccgtagagtagtaccagccaaccgaaacagctcttgccaaagtttacttgtaaaaatctgatccctgtccgaaacaatagaatgtggcagtccatggagccgataaactgaatccacaaataattgagccaccttaagagcagtgaatgggtgcgacaagggaataaaatgagcatatttgaagaacaaatcaaccaccaccagcacagtattagcacc

SEQ ID NO: 123915 - DNA, 626 bp, Zea Mays
ctctgattaccatcatgacatgtacgttccttctgtttcaaggtataccaccattagcattctagttagatcggacaaaccccatgcattacagaatctttaaaccatgaagcatgcaattggtaatcaactatcgctagggactgggacataattgcctctccactgacaacctccatcagaattcagaactgcagaatgaaccagcttcagaaggctctcttggtttctgggtgctgactgaccgaatcgtgctttattggtgacccttgccttcattgatggtcctattactactaactaactagatcactatcattattatcagacaactctgatggatgagcaccgatgttgaaactcagcaatcagcagtcgctgctgggtgacacctcagctaatgctgacgcttgtcgaagtgaaaacctgatggttttgctgttgtttccttcaacagtgttctaagtatttggacatagccacataagttgttaagaagctgttgttgcagtgcacagtttgtcttttttttatgtagaatagccactggtcgcttgttgtactatttagacatttctccaatagctttagttacatcggtctatcaggccttgagtccaaagtag

SEQ ID NO: 123916 - DNA, 602 bp, Zea Mays
aggtttcctcttctcctcttctctcctaggtgccatgaccaacactcctctccacctccaattagcttccctcctctccaccgctctccactaccacagggcctcctcctctacctgtcgttgccgcacctcctcagacctagctaccaccgctggggtctacccaccaccaccacttgcgcttgcccaatcgttgttgcctaatgcaatgcttgggtagcctagcatagtagtcgctggcgcctcctcccacatgtgacagtcacaaggtcctataggccgccaccattgttagcccatctgttgtcatcctagtggccttggcctaggcatggctagcttggttgtgggcaatgctgcaacaggcatggtcgtcgttgacatggctctgggcagcctaggcgttggtgctagcctaggtgcaccttcatccatcttgggcatcttctttaggccttcttcgtctttcgcgcctcctctagtcgttctcctaccctttaacattgtggctacccactccacctaggtcgtggtcctcacgactactaagatggttgtggatactgtctagaagcatgaacgtgtcatcaccctctcctaag

SEQ ID NO: 123917 - DNA, 424 bp, Zea Mays
agggtgagcaggtatgcagtgaggtacgcgactgtggggtcgtcctcaagcagctgctgaccttccaatgcacgcatcctagccatccaaacgggacggtctctctgaaagggtggaaagaatctgagcggtgtgttggccacttcttcttcataaatctgacacatggcccttaatgccttacgagcgacgacttggcaggtgtctttgaatctgtgcccagcagcagtgacactccattccacatggtgcggactggatccaatgtatacagccacgacacacttctctgtgccatgctcaacgaattcacgaccatcatactctggctggctcctgattccgaggcgaactatgcatgctttcaacaacttggggaaaccatcttcattttggcaaaagctggtttggcagcggacctcca

SEQ ID NO: 123918 - DNA, 492 bp, Zea Mays
aaaatatataaacatactataaagaaatatgaaaaggaatattatacaaaaaatgtgtccctcctctaaaatgtaaaacacaaacacacagctcccctcacaaatgtgcaaaagtggaccgatcaaggagtttggtgaggttatcggcaagctgtatgtgggtgtcaacatagcataagtctatgtctcttttctcataatgttatcttagaaaacaaaagtaggaatttatgtgtttggtcttagaatgcaacactagatctttggcaacaataatagcactggtgctatcacaaagcaaaggcatatgctgaaaaaccaaaccaaaatctctcaaagtggccatcatctagagcaattgcaaacaacagctagcgacaacaacacactcagcctctatggtggattgggctacgctagactatttacaaaaaggccaagaaatcaaagaatatcccaaaaactgacaagtcctagaaggtgacttgcgac

SEQ ID NO: 123919 - DNA, 525 bp, Zea Mays
ccggatcatcactggatgaggtttcgttttgagcgagaggatgtcaccattactgccagtcagatctgccagctctttggatttcccgagtcgacgactcgtcttcacagcctctgctacggcacttctgaccctcctcgtcgccctcacggcggtgtggctccgggtacagctcacgtcgcggctctgttccgcccgccctttttagatgggtcgcgacgttcaccggcagactttactacagcagccaagtacttatttgagcttatcagacggactcttctgccgaggatgggatacagggagcctaccacacatattcagctctggctccttggtgccctggtctcccactctgagtttgacgtcgtggatttccttatttgtgagatcaaggacaccgttttggatgggattcgtgctcgtagacagttgccatatgctcactacttatgccacatctttgcgcagctgattcagcctcctcggtttcagggcacacttgaggcctcacgcctcgttttt

SEQ ID NO: 123920 - DNA, 570 bp, Zea Mays
gcataccaaaaagacaacaaggccccggtgatcggctatcgcactaagtggccgacgggggacaagcgaatggttctacgtgaaagctgatgagaagtgattccagagccgaaggaggatgaagttgttctatttaaaagtttcttcaaggtggggcttcggttttctctgtatgatataataggagaggtcttgaagaggtttgaaatatatcttcatcagctgacaccaaatgccattgttaggctgagtgtttacatatgggctctccgaaaccagggcaaaagtgccaatgccgaaggtttttgtcgagtgcacgagtttcattatcatacgaagggcagagcagatggacttcacaaaaactttggatgttataatttttcataccaaaaagacactaaggcctcggtgatcggctaccgcactaagtggccgaccgggtggacaagcgaatggttctacgtgaaagttgatgagaagaagagggaataactcatgactatggttatgagtcctctagggttgagcttcgggatgacaaggccattatgcaatatgcaactcggc

SEQ ID NO: 123921 - DNA, 329 bp, Zea Mays
tacttggtctgatgtagcccttttccaataactcatcaatctgcttcttgagttccaccaattctggtccggacactcgataggctatcttggaaattgcggcggtgcctgggataagctctatggcaaactcaactttccttttaggaggcatgcctggtaactccttagggaacacgtcggggaactccgacacaaatctaatatcctcaatcaggttggcctccttgtcatctaccgacaaatagtgacaggctccttcttctagttcaggcaagtacagtttagttactacttcctttccggatggggacaccaacttgactgtc

SEQ ID NO: 123922 - DNA, 1057 bp, Zea Mays
gtgccatgctggtcatgttggctgaagattcctctgatgtagcccctgctaaaacactggttgtagcacccatccccgagtctggcaaagctttggatactcagaggtctgatagtattcgcccgaaacgtcctcgtcgaaccaatcctccaacttctcctgctgaggggaagaagaagaaaaagagacgtcttcatcgagtgtcatgcttgaatcaggatgtctgcccttctgctcctgctgctgaggaagtgccagtgccggtttttgctgaagctgaacccaatgggtgtgacccgactgatgctgaacccaatgggtgtgaccttgatgatgttgatcccaatgggtgtaatccagccaaagttgaacccaatgggtgtaccgtccgcattattgatgaagatgaggaagaggaggaggaaattcccttgattcggaagaacagccggcgctacatagccagcggggagagtagtggtgttccttctccagctttgtctggtctcgttggtctgcaagagttgtctctggcaaattttgatcagactctcgaagacatggtcccagaagatctattgtcagagccgacagatggtggaatgatggaagtttgcgctgatgtgcctgatgccgggttagagttatcccgagcagcgtctcgtgcctcgttgaccttggagcgcggtcttaagagtcgagaggctgatctggattgctctgttcccatggaagttgttgagggtccttcatccttagagatgacagctacagagagcttggtcctcaaggatggtgctagcgtttgcccagcccccgagggtgttcccggagatgatccggctcggatgggtagcgcgagctatgacccagcccccgagggtgtccgagtgggttctccctctcatacttccatggctgttcatgtagggtcttctcctccgcattctggttgcatggtagcagcacgggcttcggatcaggaagtagccttagaggtcggcgctcctgatgacagaattttgatttccgctgatgacactgagttggtccccac

SEQ ID NO: 123923 - DNA, 440 bp, Zea Mays
atcttcttcgtggtgactccattgtactttgcacatctttatcaccttatttcttgtaactcgagtcaaagtgcccagaatcttgatagggtactcagcataagtcagaccatcttgaacactaaggtcctccattggtagctgatcctcaggtaccctgaggcacttcttcagctgagacacatggaatacatcatgtacatctgacagatgatcgggtaactccagttgatatgcaacttctcccactcgctttaagatcaagaagggtccaatgaagcgaggggacaactttcctttaactttaaatctcctcatacctcagatcggtgacaccttcagatacacgtgatcacactccttaaactccagtagtcttctcctattatcagcatagctcttttgccttgattgtgcaattctcaaattctctcttatca

SEQ ID NO: 123924 - DNA, 420 bp, Zea Mays
agtagttgaagatatcggctttctagtcgactgcatcaatctgtagaatctccacttcatcatcctagttggcagacatgtaattagatgccatctaggccattttttggcatctaaattctattcccaaggcaccgacattagtgtgatgaagtgtaaccttgtcatcaactctcggtagttgttgaaatatgggtacaggctacaaagcatcactggtacaattgaaatcccctgtgagctgattgatcaccacttttgagtctttgactatttatataggctcaattctagcttataaaatcaaccacatctctttttgaatggcttcatactctacatgattgttggtgcatcttacttctaaccgtagtgaaaaattgaatattgcccccaaggtgagagtacccgcaccccgac

SEQ ID NO: 123925 - DNA, 351 bp, Zea Mays
ggatgacatcgcacccgattgcagtttcttattaagccccataccgtggttatgttgaacgaatctgctgcgacggaatatgctttgcttcgatgagaccccttgcacgtgtacatatgacggaacttctactgctccaaagaggtcaatgacggccactgcttggagaacgtgtaacctgatccttcaaatggccaaaatggatcggatcttgaagcacgtcctgatcagcaaagctagagacgtgaagcggtgaacacggccggatctctccactagctagatcatcatccgcaacagcactcgaacgactgaagctcttcttctgaacctaaacgtagccgatcgagc

SEQ ID NO: 123926 - DNA, 509 bp, Zea Mays
gcctggtggcctggaatgatgtcgtggaagggcaccaggctggggcatagttcagagcacatgatccccagtcggttcaaagtctcaacatacatgctgttgaggttgcttcccccgtccatgagcaccttcataagacgcttcgagcccaaaattggcttgacgacgagtgggtaggttcccagatgtgggattatctctaggtgatcgtgactatcaaagacgattggaaattctaaccatcgaagatacttacgaacggcggggtccaccgcgtgcacctcacagtgcattatcttgagacagtgtttgtcgctataggcttcgggtccaccgaacatcatgaggcatcatgtggtttcaggaaattgtccttcggtggcatcctattccgctgattttactgcttcatcaggctttgccttcttgcttggaggcttggtgatgtagcacttcaagagctcacactctcggagcttgtgacagatgattctatcatggggtgtcca

SEQ ID NO: 123927 - DNA, 619 bp, Zea Mays
agagatcgcaacacaacatcagatactctattaaagctaggatcgagccgggcacaagcaccaccaagcatctttgtccaggaaatataacaaccgagtatcgcattagggctagcagaagaatgcaaggcagtggagcagatagaacctaacccaagtgactagagagtactaattattagatacatcaaaaacgaggagccagatgacaacgccactgccaagcacattgcaaggcagtcggctcattatgctgtcataggagaagcgctatacaagataggagcagcaagagtactcaaaaaatgcatcaactcaggtgtcgggaagcgtttgctagaagaaattaatgtacggcagtatggagtacatgcatcatcaaggactcctgtagggaaggccttcagagtaggcttctattggccaacaatgaagaaatatgcaactgacctagtccaaagatgtgaagcatgccaattcctggcaaagcagcagcacttaccagcacaacatttgcagactattctggtcacttggcccttcgcatgcttggggtcagatatgatcgggccagttaaaaaagctcagggagggtacacccatgtgctggtggctataa

SEQ ID NO: 123928 - DNA, 351 bp, Zea Mays
cgacaatctgtcatcacctagaccacaggtattcccttcgtatggagcttcagtgctactgcccattcaatttcggtaccatctcagaacagaaaactgaatattgttcctgcatatttttgggactacgcagatcctttgtatggagtttcaagcgcatgttggagtgaaatttgatggtagtgtagatggttattctggtggaagggttggttacatgagatttatggagccacaaggggtcgattggtttacaatgcaggaaaatcttgtgtatcatggctacgaaggaaatgccaccttgtactatttaaaacctagccatacggcaccacaaggtcttgttttgat

SEQ ID NO: 123929 - DNA, 324 bp, Zea Mays
aaatattattagattaattatgaaatatagtttcattgtaaattaatctaacatgttaaatgtgaatagtatttaattgaattttggttgaacacgaaccactttaactagcacgtgacctataattacatccttcttggacagaagtatggtcagaaatcacgaataatatggcgaatggagacctagcaatgcttcgtcagaatgcttagagtatccttctataacgcccgaagaccggattgagcaatgaaccgaggcaggaggcacccactatacagtcgcaagcaaaaaagcatctaaaatgcagggttttaggtacct

SEQ ID NO: 123930 - DNA, 510 bp, Zea Mays
catccgggtagtacaaagatgtaccaggatttgaagcagaagtattggtggtatggattgaagaaggatgttgctgcacatgtggcggaatgtgatatttgctagagggtaaaagccgagcatcagagacctgctggattactccacccgcttaagataccagagtggaaatgggaataaattggcatggatttcattgttggtctaccccgcactcctgtagggtatggttccatttgggtgattctggacagactgacaaaagtggctcacttcatacctgtgaggattaattacatgggagccaagctagcagagttatatatggctcggatagtttgtctatatggagtgcctaagaagatcgtgtctgaccggggatcacaattcacttctcggttttggtagaagttgcacgagttcttggacacccacttgaatttcagttcggcctaccatcctcaagctgatgggcagactgagaggacgaaccaagtactagaggatatg

SEQ ID NO: 123931 - DNA, 571 bp, Zea Mays
aataatctgagtgaaagggaggatattaaggggattattcaacgtcgtatatggtctcgcttcggcattaggaggccatccactgcccttgggaatgatatacaagcatgctaagcggctttccatacagtatgcacttacataggcacaagggacttagtccaggagcacattgcttatagagtgtggccacttgcaaatgggtgggagatgccgaaggaggtgtcacatcggcccaagtgcattgaaacgaccgaagtgtcgaagctaattgaagggtctgcttctatatctgagccgagtcgctctacgcctgtcgaagctaagacaggaccgactaaagagccaaaactgaagaaggcagcagagcagctaaaggctctgagtccaccgcgcgagacggaattgccgaaggcatcaaggttcccaacaaaaactccgaggaagaggagaatggctagtgtgctagatgctgttgttggaacttgctaccaggtgcaagaggatccaacggggatgagagttgacgtaaacagggttctcgcacgagatggcaaaagctctgttaatc

SEQ ID NO: 123932 - DNA, 292 bp, Zea Mays
agctgttggtactgtgttgtttggcctaaccgtttccttattctagatatcttcttcattttagcatatagactccagatctgagagctcagagctggggatgtaccacataggaaggtaaaattctgaaaagacaaaactaacaccataacaaccataatgacaccatagacaaatatgtccatcaaatgaacgcaaattagcttcccgttttatttaattacacatactaactgagaagttaaagaatcatcattagctcaaataccatgaccagtaagtagtgttaaag

SEQ ID NO: 123933 - DNA, 434 bp, Zea Mays
cgtctgatgctgaccccaatgggtgtgatgtccgtgttgttgatgaggatgatgaagaagaggacgaaatccctctgattcggaagaacagccagtgttacatagctagtggggaaagtagtggtgttccctctcctgccttgtctgccctcattggtctgcaagaattatctctggcgaactttgatcaaactcttgaagacatggttccagaagatctgttgtcagaaccagcagatggtggcgcgatggatgtttgtgttgatgtgttcgacgctgggttggggtcatcccgggcagcttcccacgcctcatcgaccttggagcgcggtcttgagggtcaggaagctggtctagattgcactgctcccatggaagtgactgagggaccttcagccttagaggtggctgctgcagagaactcggccctccag

SEQ ID NO: 123934 - DNA, 285 bp, Zea Mays
cgtcggtcaaggaagtcgggaattcttttctccatggtggtggagagtgaggctgctttgcgggtgcaagacatccgtgtggtgtgtgactttgccgacgtgtttccagcagagcttccaggcattccaccggagcgtgatgcagcttttgaaattaaactgattctgggtacgcagcctattcataaggccccgtatcggatggctccaaagaagcaggttgaattgaagcggcaactggatgatctgctggctaagggtttcattaggcctagcaggtcgcca

SEQ ID NO: 123935 - DNA, 651 bp, Zea Mays
gagctggccctgatgaatcaaacaaaaaatttccggagattatcaatgttccaggaatgctccaagtcttcgccgtttggcgttgcgagcctgtatgcgctgggggatgccttcgtcttgacaatgaaagggccctcccacttgggctccagcttgcccctggactctgtccgagctgttcggacgagtacgaggtccccttcgttgaattccctcgggatgactgcgtggtcgcaccatgcttttgtttttgcttggtatttatttagagcctgtagggcgaagacgcggtctccatcgatgagatccttcgaagtgggttcgtccacgtcggggacagctgacgagactgtccgtggggacccatgttttatttcctgcggggtcatggcctccgatccatatagaaggcagaaaggggtgaacccagtcgccctgcactcagtcgtgtttagcgcccagaccgcttcaggtaacaaatcagcccacctgccctttttctcatcgaggagcatcttcttgacagctgtgaaaattttgccattggcgcgttccacaactccgttggactgcgggtggtatactgaggcgaaggcaagcttggtgccaatggagaagcataaatccttgaagtcttggctgtcaaactgc

SEQ ID NO: 123936 - DNA, 462 bp, Zea Mays
gtccacaagtacgcatggcctcactcttagtaaaacattggttttaccctttccttatgggcatggcctcactcttagtaaaacattggttttaccctttcgttatggctccttcctggggaagccatcgctagctgatccctactccggcctataaaaaggagatctcgacctccgagaaagtgaggggaaaacaaggacaggtcgaatagagagctcttggagacaacctgacggctttagacagagacgaacccacaaggacgaatgagccgaggagcaccgacgaggaccaggaggccgaagccccgccaagccaagacttagctaggactccaccttgcaacttctaagctccgcttccaccacaataagatatctgggagcctctcctccctctctcgactgcttgtaacccctactacaagtttaatcatcaatggtgccggtagcgcaagccat

SEQ ID NO: 123937 - DNA, 509 bp, Zea Mays
cagaaatctccatagcactgaataaatgatcatcttcactgatagactctcaaataaagaggaaagttgaaataaagggactacccaactaaatgactgactttattaataactacaccaagttgcaggggatacccacaccttgatgacaatcattagaaagagccaacttcattacatgttcatcacgacaagcatcaaacatatgataagcaaactaactctaactaagactgactaagactaagatactgaattaatcattattacagactccaactccattgatctatggctccaaatctatctgggtcctgtagtcaggggtaccatactcgaagcgaccatggggtggtgagcggtaagggtgctgaatcccgacaggggcacgagaaccaccatcaagatagtggcgtcctgcacactcaacacgcaattccgcaacctccgcccgaaccttgcccaactcgtcaagggcgtggtccagctcggtgttgagcacggtggcc

SEQ ID NO: 123938 - DNA, 323 bp, Zea Mays
tatgatgagatgaaattgatctatcaagcaaatcaagatcggtgctccagacaatgtttcttaccacaaatgccaatgattttctcttatttcttgatgtggtaaataagcgaggcgctagatccttggccctcatcccaccagcctaggcactatcccagaaggatgttttagagtcatcaccaatcacaatatttgttgatgctcagacttatctatacccataattcaccaatttcaactttgcaaaacccacacaaccaaatggtcccatactcataacctcccctaaatccatcaaacaaattacaaccatatatagc

SEQ ID NO: 123939 - DNA, 1029 bp, Zea Mays
catgttatttagatttgtttatgtattctaagtctgttctaaaaaaatatgaaatctcaacgtaaaaggtatagtaggtgaatagattcttaaaaatctacatagtcctctagttcaacccataatcttttgtcccctaatatttttcacattcttagcatccaaattttccaaaatattatccacatggcaatttataggatgaatcgttgtcttttctatttggaggcctctcatttcactcccacacgatggcaccttccaaggacgactagggctaccactgtgtccctgcgccacactccggctcaaccatctataatcgccgcacctcttgcctatctccccttcaatgctgcttcatcgtccaacatccatgttcttcttttccatctaacggtaccctccttagcacatcccgcctcacacttcaatgttcggtggagtgggtatgactacaaccacgacgcttgcgcctagtcgggcgtaggatctccatggcaggacgtaccccctgccggtgatgacatgttgttgaatcggttcgtctcaatgggcagagcggcatccctcctgctaggttgtcacatcatcataagaatctcttatagaatatatagttgacaagtgtttcaactaaacaacttttagcttttctacaaccatcaactcacatcgactttcccgtagtttacaactaaaatcagattttcaagaatctattactgaaccaaacaggcacttaatttaattcataaaaatatgtggatactacctatccagtaaagagtgatattttatcctatgacaaactatcttatatttaaccagttttcatagaataattattaatatttatgatacaaaatatgtttactataaaaatagattttatgataaatgtaatggtatttatttaatttggtatcattaatcttagtattttcaatataatcttagtcaaacttaagattgtttgaattatgacattaccatagtgacactctttgcagaactaggataatatgt

SEQ ID NO: 123940 - DNA, 1070 bp, Zea Mays
cgcgggcatgttgcaccgtcttaagtcgtgccgacttaagccgattgctccgttagtagggtatagtggtcaccctaagtcgagtaagtgtgttgattccaagtctaatcaaatcgaagtcaattgataaccaacagtttgaatgcctttgagaatgaaatcttttattgatgacatattctccaattacagagtacaatgttgctccgatagcttttgaggtcttgctaagggtaaaacttcctaagatgctctatattccatgaattccccacttctgtgccatccctttgagtaagccgatatgatcctggccgagtgacctccgataccattaatggaccttcccatagtggtgacaatttgtgttgtccttccccgttagaattcggcgaaggaccaagtctcccactacaaagaatcgatgtcgtatagccttatcatgacagcgcctcaaggtccgctggtatctggctgactgaattactgtgttcaatcgctcttcctctagcacatcaatatcttctagcctagtagcttcggcttcagctatgctttcaaaaccagccttggtgccccaaacctgaggtcggcaggtagtactgcctctgaaccatagaccatgaagaagggggtgtttccatgcagagctcgactgggttgagttcttaagctccaaaccacataaggtaactctctgattcactttcctgcgaacttttcatttttgtcgaacactttcttcctgagtgcttccagtatcaaaccattagccctttccacctggccattagctcttaggtgtgctactgatgcatacttgatctggatactccgttgttcgcagaaatcaaagaattcagagctagtgaagttggatcccaggtcagttatgatgctattcggtattcccaaacctgaatattatgtcttgtatgaattccactgccttggctgaagttagagaagcaatgggtttgtactctgtccatttggtgaatttatcgatgacaaccaacacgtgagtatagcctccctgagctttcttgaagggtctaatcatgtccaat

SEQ ID NO: 123941 - DNA, 521 bp, Zea Mays
ctggaatccagtgaggggaggagggccgctgatgccgaaggctcccagcacggaccgcacccacaaacggatcaaagggtgcaaaggtgcccaaaccgtcggatgcgaaggcaccaagaggatgaagacccaaatggagcatagacaccagtacaccacaaagttgccaaacctggtgggggccacccaaccaggtctgcctgtcagagtagctgccatgttgatgttttggtgtactcaaccgtgagggatgaggcgtcaccgccctgtaattaccccgttgtacagcatattccgaggaatgaggatgtagttggtaacaggggtatgaatgtacgttaggttatcgacccatggttaccctataaatacccctgccctgtagctagatgggacacgctcgacgagacgctacaattccctacctatcgttttgtcatgcatcatggttctcacctactcccgagtgttggggcccacctatcagtacccaacacatgtaaaacagtttggattacttt

SEQ ID NO: 123942 - DNA, 426 bp, Zea Mays
ctcactcagagtttgatgtcgtggattttctcatttgtgagattgaggacaccgtactggatggtctccgtgctcgtcgacagctgccttatgctcactatctgtgtcacatctttgctcagctgattctgccccccacagttccagggtactcttgaggcctctcacgctcctctttgggtcctaccgtccagcgccagaggatcctgtgccggcacctgctccagtgtttgatactcaggctgaggataccacctttcaccagttcgagactcagtgtgcagtagtccctgatgatgatgatggtgatgcctttggggttccacctccgcctccgcctcctatgcctccacgctcacatgatcatgaggctgggagttctagtgctacccctgctgcccctcctaccattgaccctgctcttgc

SEQ ID NO: 123943 - DNA, 485 bp, Zea Mays
agccgagcgcatcgctagacagtcggctcactacacactcattggggagacactatacagaaggggcgcatcgggtgtcctcatgaaatgcattctctcatctacggggaagcaacttctagatgaggtccactctgggcaatgtggaatacacggagcatccaagacactagtcaggaaggtgttcaggtcgggattctattggccaacggcaaaaagtgatgcagccgagttagttcagaggtgcgaagcttgccagtacttgtcaaagcaacaacatctaccagcacagcaattgcagaccataccagttacttggccgttcgcatgctgggggctggatatgattggacctttcaagaaagctcaaggaggatacactcatgtactggtagcaatcgacaaattcactaaatggatagagttcaaacccattgcttctttaacctcaactaaggccgtggaattcatacaagacataatat

SEQ ID NO: 123944 - DNA, 531 bp, Zea Mays
attaattttttcaattagaggttgaacgtcaactctcctaacattcctgaaatgaagaggtagaccaagatacttgcatggaaattttgagtatttgccagggaacacatccatcaggtctggccatagagtctgggggtaacgaatcgggaaaatttcagttttatcgatattaatcttcagccctgaacacccttcaaaaacttctagaatcctttttaggactttaaagtcctctttatctgctctaacaaacactcctgcatcatctgcatacagagaacatcgcagtttagcctttttggcagaactcgacccagaagcccagcatctgccgccatctcaatcatcctctgcaaaagatccattgccaggataaaccggaacggggatagcggatcaccctgacgtacgccatgcatgtgcttaattgcatttgtttgttgaccattgacgatgatttttgaagaggaagagcctaaaattgtggcgatccaattcatccacttctaggaaaaacctagagctccc

SEQ ID NO: 123945 - DNA, 745 bp, Zea Mays
gagtaagccgatatgatcctggccgagtgacctccgataccatgaatggcccttcccatagcggtgacaatttgtgctatccttctcccgttagaattcggcgaaggaccaagtctcccactacgaaggatcgatgtcgtatagccttatcatgataacacctcagggtctgctggtatctagctgtctgaattactgtattcaatcgctcttcctccagcacatcaatatcttctagcctggtagcttctgctttagctatgctttcgaagaccagccttggtctcccaaaccggaggtcggcaggtagcactgcctccgaaccatagaccatgaagaagggggtgtttccatgcagagctcgactgggttgagttcttaggctccaaaccacataaggtaactctctgatccacttccccgcgaacttttcattcttgtcgaagactttcttcctgagtgcttctagtatcattccattagccctttccacttggccattagctcttgggtgtgctattgatgcatatttgatctggatgctccgttgttcgcagaaatcaaagaattcagagctagtgaagttggatcccaggtcggttatgatgctatttggtatcccaaacctgaatattatatcttgtatgaattccattgccttggctgaagttagagaagcaatgggtttgtactctatccatgtggtgaatttgtcgatggcgaccagcacgtgagtatagcctcc

SEQ ID NO: 123946 - DNA, 641 bp, Zea Mays
gaaccaacagtgaggagcaggccaagacgtgaaaagaggcccaactcaaggttgagtgggctggaatggacccactagggtgtgtgcgttctgtttgccagtgagattggagaggggattaaaaagagaacaggggaaccttgagcgtgtgtggaggattttggagaacccttggccggctgcgtccggatggtgggctaatcagccctgtaatctccaccatactctatatttctgagatcttcgtgagaggagaagtgtgccgggagcggtgcacatcccaccccaatttagtgttctcacaactggtatcagattcatctgtccgatcctggcggaaccaccaagctacgtgctgcgtccgcagtacaaaacccgcgcccagaagcaatccgacgccatggagcaaggcatcgctgaattatccaagctacttcaagcgatgcagtcccagaatgaatcaatcaagacagctctggaagaaaatactgcagcagttcgtgatctgtcctcttggagacctcacatcgaggcggatgtgggcgatctacgggtggagatgagtcagctctctgcccaggtgaaagaaatggcggctattcaaggggattactatgctgcacgcaaggtgttcgacgagg

SEQ ID NO: 123947 - DNA, 759 bp, Zea Mays
ggatgataaggctgcagcagagcacatcgcaagacagtcggcccactacaccctcatagggggcgcactgtacagaaggggcgcaacaggagtcctcgtgaaatgcatttcctcggttactaggagacaactattagatgagattcacgccggacagtgtggaatacacgcaacatccagaactctggttgggaaagtctttaggtctggtttctattggccagcagcaaagagtgatgcaaccgagttagtctagagatgtgaagcttgccaattcttgttgaagcaacaacatttaccagcacagcagctgcagaccatacctgtaacatggccatttgcgtgctggggattggacatgattggacccttcaagaaagctcagggaggctatactcacgtgttggttgccatcgataaattcaccaaatggatagagtacaaacccattgcttctctaacttcagccaaggtagtggaattcatacaagatataatattcaggtttgggataccgagtagcatcataactgacttgggatccaacttcactagctctgaattctttgatttctgcgaacaacagggcatctagatcaaatatgcatcagtagcacacccaagagctaatggtcaagtggaaagggctaatggaatgatactggaagcactcaggaagaaagtcttcgacaagaatgaaaagttcacagtgaagtggatcatagagttatcttatatggtttggagcctaagaactca

SEQ ID NO: 123948 - DNA, 578 bp, Zea Mays
agagcttgtccttgccgacgaggaggatgctgccatggcgaggaacggcggcgcaagcgcgagctagacacatgaggaggtcgtggggatggcatcggagacaagccgatgcatacatacttgaggtgacgtcgtgcgcaaggttcaacgaagtttgtttaaaagttttaaggttagttattagcaatctgatgtaggtttataattatttggggaaaagaaattttcagcagcctccaataaaatgtttttggagagaattttttggtgttcttttagagttactcttaccccatctttcatcacagctatggcagcccgccgctctccaccccctctatttttgcacctacataccttatctatccttagactgtctccagcggataaaagttagtgtaaaataatggatgtagaattatagatgatactatttgacactatttacagagtaaaatttgaaatatgtgataaaataagagatatgttggaaatagccttcaccatcttcatactcatattaaaactccattttatgcaaaacattgctttggatgactatgagtgaattgttggac

SEQ ID NO: 123949 - DNA, 314 bp, Zea Mays
ccaaacccgtcgtgagtacaaaccttctgcccgagttcgccgtcatactagctccattttgcacctagtgactcgatcaatcgtgcaccacaggtcagcagggagtaacgtagccatggcgcgccgccgcggcctcacttttggtcgccggcgttcatccgtgggaggaagacgtagtgtgtgccgcaggatctaccatctacagttgagattagacagtagcataccggttcacaaatcgatctgggtcattgatcattctagcgagggccgagattagactggagagtattcctccgcatgggtgaatgggc

SEQ ID NO: 123950 - DNA, 553 bp, Zea Mays
cttcgcggtcatgactccactccacgacgtgcccctcgatatgcacgactcaccctagtggtgtgctcttcatagcacgactcctatccagctaaccaaatggatcagtacctgtttgcgaatttatctttcccaaagtggacacaatgattcgaaattaaggaaatctccgaattctcaatgtgcattttctggtcctttcttatggacaattccgttttcccattggcataaagacttgtttgactacgatccacgaaccaattcacatactcatcggatctatccttcgaagagagttgatccgctatttgcaggaacgaaagaccaaggaaagaaagaagaatgcaccaaaatgcaggtgctgcaccaaacactggtggttgtttcttgttgtaagtgaatgcaacgaaaagacccgaaaataacaaataatgagaaaattcatttatagacatttcgtgctcatttcctaatttctgcttagttattcccatcatccggtaaccacaggatgatcccaatctccttttagtaatagatctttttgata

SEQ ID NO: 123951 - DNA, 313 bp, Zea Mays
cgacgatacctccgccgtgattcgtgtcgctggtgtttgggttcgtgcgggtggcaagtagataacgtcgcggggtgaaagtgcatcaccgtcggtgagctggactccactccggctagccgccgtgcccctcccctgcacactgatctttcggatagggttctcaccggcgtcgtgctgtcaccatcgtcgtgcaccacgtgtcttagcacgagacaccttcgtggtgactcgttagctgcatgtccgacgatcaccggaatcactgccacggtgagagctactttttcccccgcaccgagctcactggccg

SEQ ID NO: 123952 - DNA, 308 bp, Zea Mays
ggtgctcggattttgttatggcagagaaggcactacgactcaaggtaaattctctggccagtgcccaccctgtgcagcagtgatgaccattagagcacatcttcactcgaacctgacgaacctgacctccttgtgccgaacaggaacagaatttacggctcgagattgagaaggcgcgggagcaattcaagagcctactgaacgaatacgtttcgttgtcagctacgccgacacagaaacggtaggcatcgtcccgaagccaccggccgtggccggcggcttgtgcactcgtgctagctcttcacgac

SEQ ID NO: 123953 - DNA, 530 bp, Zea Mays
gttgtcatggcagcataagaacacatccaaaatggcatgaaaccacatagaaaacttccccttcttcgtgaaaagaagagcaggaatgcaagattttacccgtccgtttttaataaagtaagaaatggagatcctatgtttgaggtgcattgcatagcaagcgacaatactgctccatgtacaacacttttgaggtctagcactatcgcactgagcacaccaccaccacatgtaccgttcaacacctcaacctgagaaccacaaatctactctattcaattatcacaactatttctatacaaaatatacatgcactaggagtctcattctatgaaaacatgaatccatttgcataggtttggagagttagggtttggattgagatgtgccttgagaatgaggatggagggaaagggtttgtcataggttcctccctccattgacaatgaagatggtgatgggtgttgtagccctaggagtcgagcagcatggtgatggaaaggggtggctagccttgtcgctaggaggat

SEQ ID NO: 123954 - DNA, 785 bp, Zea Mays
ttgctccgctgattgaaggctagtttgggagccacgattgaaggggttagaatcctaaacccaagggctagaatcccctttttattcaaagagtttaggatttacggtttaggttctagcccctacaatccaccccggttttacgcttcacaaactagccctaagttagacctctgtcctctgttgtagtaactgtcatatgattttgtattttggaattgcgatctgggatgtagaaacctttgcaatgctgggtgataagacaatggcgatgtcccctaaagttctcaggggcaggggagttcgtggttactttccatggagcttatcacagcaggttcagtcatggtgagtggcctaagttagcctccatgggaatctcccctttttatgttgcagagagcaatgtagaacaatgcctgactcattaagtcgttgtattctactttttttctgactcactgcttagtcaactatgcctgctccaataatgtattaatgtggccctatttttatcactagatttgtggaactagatataccttaaacatgatttattaggaatggtatatggtggaaagaaaaaaaattcttttttggtttaaacattcaattgtggaacttgatcagcagcaatactctttcgtgtgttcactctataaacaaattttaacatgttccagatcatatataatgcttcgacgttagtgtttttttcacttggcaattgctttccatggtgactcgcatctaagtgcatactgctgcagatggcaaaaagccca

SEQ ID NO: 123955 - DNA, 412 bp, Zea Mays
tgcccctggttgatagtcgcatgatattgcataatctctcagctcttctttctcagccttagacaacttttcaccaattatgttttcaaaattgaaatccttttcctccgaagtatcttcggcgatctccttctctttcccaggcactgtagccagggtctcttcagcggctgcagcagcttcttccgcggccatattcaaaagcattttgtcaatgtcaaaaaatgtgccctccaaatttgtatcttcgaccgttgcatcttcgacgagggtagcttcggtagctatagcatcttcggcagctggtgtttttgacgccgaggccggcggtggtgtttcttcaatggcttcaatcacagtaataatcctccgctttttcggcccagcagacttcttcgctgccgacggctcc

SEQ ID NO: 123956 - DNA, 554 bp, Zea Mays
gttttttctctggattcactacacaagtaagcattcgacacaatctatcaagaaagatcgcagagatcaacttaaggcttgaagacatcattaacaataaggagaaatacaagattgaagctgcacccaatgattttccattggtgacatggaaaccttctacggacatctctactgtggcaaaaagtttgtaagttcccacaacactactctctaaagtgtcgttcgaggagttgagtgtaaatagaactttgttaatgaccgctcaaacatgtacaaatattcaaaccatcatgtcacgtcgatatgacaacataagtgatctaaaagactgttgtttattgctttaaaacgctactaaaattatgtcaatattgttagttttatcaatttgggtatatatgaggtaaaacctgaatccgagttattggatacctgaaatcgaattattggatacctgaaaccgaattattggataccgaattcttatttaccttctgaatccctctgctgctctagttcaacttattgttcccttgttcttctttctttcg

SEQ ID NO: 123957 - DNA, 774 bp, Zea Mays
cgggccacagtggacagccccatggattcgtcggtgtcctcggacgatgccatgggggatgtgggagcgggcgaccgatcatacttagaggaagcttcctccgagtactcctagtcaccaaaatccttcgagggtggactcagaggatgtctgcgcttgccattggtgctgcgaggctagcccttgcccctcttgcccctgcccatggtcgtacggaaagtggagaagtgaagaagaagatagcaagtgatcaaggacgagtgaagccaacagccaggcaaacaagctatttaaaggggccgaggggtgaccgtccacttcctaccgcgctcgccgaatagtcgcaagaattcaatgagcaattaaagccacctgaaaatgagtcaggcaactggtgctgtttcgcgtaacatggcaccgattggacccaagtaaactactcaggcaaatgattacacctctccgtcacatcaagttactacttcaggacaacgcgataaacgctctacgcagggtagacaccccttgggtgtatcgcctgaaattttcaagattttatgaagaagtgatactcacaaaatatacgcaatgaatgtaccgcgacaaaaggagatcggctaaaatgggaggaagcccaattgtggttactgaagcgcaagtctaatcaacagaagcattaaagtacatagcagggtggtgttcagcttgtcactgatcaaattgattccagacctaacaaggcgtggacagatggcatcgtcttgttattcttaa

SEQ ID NO: 123958 - DNA, 301 bp, Zea Mays
agaccacatatttcaacagtggagccatcaccaaaacgaacagatccactaacagactcatctagatgtgatagtgtagattttgtacctgtcatgtgattgctagcgccagtgtctagcacccacacaccttcaggacatataacatgaattactttttcttcagaaagatggactacttgtgatgttccatgcactatactttgcacttcagctaacaggagtgcacctgtttctacacaaccagcaccaacaatcatattggcttctggctgttgcttgtgttcctttcctttctcct

SEQ ID NO: 123959 - DNA, 407 bp, Zea Mays
tacttccgtgcaatccatttgagtaagctggtatgatcccggccgagtgacctctgatacaatgaatggcccttcccatagtggcgacaacttgtgccgtccttcccccgttagaatttggcgaaggaccaagtctcccactgcaaaggatcggtgtcgtacggctttatcatgatagcgcctcaaggtctgctggtatctggctgactgaattactgtgttcaatcgctattcctccagtacatcaatatcctctagcctggtagcttctgcttcaactatgttttcgaagactaacctcggtgccccgaatatgaggtcggcgggtatcactgcttctgaaccatagaccatgaagaatggagtatttccatgtaaagctcgactaggttgagttctcaggctcc

SEQ ID NO: 123960 - DNA, 487 bp, Zea Mays
cagcgtactagtgcgcgttgtgggcaagtggctacaaaagcagcagaaccttctgcaccaaaatcagctaggtcgcaacgcaagcaaacacactaggcgatgctccgaacaagcttcgctgcgctgcgctgtcccagtctcggcagctgtctcgcttgcatgcagagcactgcaataattggcatggaacgacaaggctctgcgtgagacgcgagcatgctattttaatccagtctcggtggccatgtagtaggggagtgaggaagcaacttgcgaggcatcatcgcccatgtcgatcgttacgcagaggcaggcaaagggcaactcgctcctgcaactgttgtgtactaccagttcgttcatcctcaggcatcgcccatgctgatcgtcaggcaggctgcacccaggggggaggaatgagtgcgaggatcactgcaatgatgcggcgtgactgaaatcgcgaagcatatgaggccacacgccgggg

SEQ ID NO: 123961 - DNA, 334 bp, Zea Mays
tccgggtgacttaagttatatctcggtggaacccacattgcaagagcaaatagtaagggcacagattgaggataagggtgtccaaatgattaaggatatggtcaagcaaaaggcagagaaatacgagtgtttccgacaggacagcaagggaattctatggtttggagatagattggttgttcccaaggatcctgagctcagaaagaagatactagatgaagctcacctttccaaattctccatgcaccctggtagcaacaaaatgtaccatgacctcagatctttatattggtggaccagaatgaagagggaaattgccaagtacatatccgag

SEQ ID NO: 123962 - DNA, 411 bp, Zea Mays
gcataggtatccaactacttattatgtaggatataagagatggataggttagggaaagaatagtttggtgataagaaggttcatggtaaggaaagcttttcatcgcaaatgatgggtcttatctcatttggagatctggtctgcctcccttcttgccttgtcgacgttgatcttttcctttctttcggtcttggtgtctccagctaggttttagggtcatgtagatatatgtgggtaggataagccacatgaggtaggtcaagatctggtttgatgtttaggttggaatggatggtttagacaacccatcgtgtatgttaagtagttgtgtacgaccaagttgttataaggcatcaatttaggttaaaacgtagctagtagtgtctaatctatttcaccagtattaactat

SEQ ID NO: 123963 - DNA, 923 bp, Zea Mays
gcacaacactggggtaagtaaactgtgaagaatactagtgttgcagcatttgcccctaaaaagtgttaggaaaaacaccaaacatccccggttccgaagggaagcgatcactacaagaaggaaactgtggtccgctgggaagtatgaaccaaagcctctgtcacgtggtccttggccatatggcacacgaccagcatcttgtcgggaacgaccaccacatggtctcactgcctgaggcctagtggcaagaggcaaaacacatctaggccttgtaggacatctctgaataggctgagcatgaacaccatgagaggggcggttcatgtccttcctgctcgactcagaaactcgccactcatctctcttcctcctaaagtaaaaagaagctagatgcccatccctctcacaatactcacaatggtacctcacctctcttttgggtagattttgtttatgggagggggatttctttttggatggctgaagggctctaggaaaggaatactagaggtgtcgggaagggtgtcaagtgtgttcctaggatggttaggttttggtagccacacttgtttctgaggaggagctctcacaggctcatcaatcacactatctctcataggggtgataggcttagcagggtggttttgataagcttgggagtgggtgaaggtttctctgaaggtgtcaaaccactgcactcaccaaccttcccaaagcgagcgacactcccatccttagcagcaaagcctaaccccggtccgccagttcccctcttgaactgactgaccatcatgctcaactgggactcactacatgatatccaactcaagacagatcgaaggtatgtgttttcttcctcagttattgtcatgtcgtgtctgcaggactcaagggcagattgcgaaccctcacaaagtgcacat

SEQ ID NO: 123964 - DNA, 467 bp, Zea Mays
tctcggccgcccgatccaatatcaacggttgagattagatcacatcatcccgaaccggtacgcacatctaaccgctgatgtcaagatcgatgattaggattttattgcccgggattcaatcatggccttcgaatttccatctaacgacgcggatcacactgaccccaaaaggtacgcctgacctaatcactgcagtgcatgtcaagatctacggtctacacgacattgctccttagtttaatctagaccaccctacacagatccaacggctccgacgtgttcccctacctcagcacagccgcggcagcgcgataaaatccgtggcggcgctctcgcaggtgaactccgcacgaacgccgactctaaatatttaatgtcacgcgttctaaatatttaatgtcacagttgagtccccagtccctatttaatgaatatttgaataagtttagatatggttcatgttttgc

SEQ ID NO: 123965 - DNA, 367 bp, Zea Mays
agggtatagtggtcaccccaagttaagtaagcatgagcatgtcgcaccgccttaagtcgttgccgacttaagccgattgctccgttagtagggtatagtggtcaccccgagttaagtaagcgtgcaggttgacagtgaacaatttgagtgcctttgaagtctttttattgatgataaatttcccagtttacagaatacattgtcgtcccaatagcttttgagatatagctaggggtaaaacttcctgagatgttctatgttccatgagttcccaatttctgtgtcgtccatttgagtgagactatatgatccaggccgagtgactttagctactatgaatggtccttcccatagtggtgacagtttg

SEQ ID NO: 123966 - DNA, 361 bp, Zea Mays
cgaacatagcgtaatcaccaaggtaagattgagagatgagaagggtaaggcaataagaaacaaaagcacaacaaaggatgaggttacaaactcgcgagccaaagaagaagatacgactaggagaaggaaggtatgaggcagaagaggggcgattttaaagggcaggcatgagacaaacatcaatgtaggatatagaggtgtaaagggtgcatatgataataattaaaagcatgacaaaggatatagttaaggcaagactcgcaaaacgacgaggtggataaaacaatcaagggtaagataggtaaggttccaacagaagggttgaagtaacagaaattattaccgagggaagttatgagga

SEQ ID NO: 123967 - DNA, 614 bp, Zea Mays
aaaattatgaatatggtgatgagtccttcaaagttgagcttcgacatgacgaggtcgttatgttttatgaagattggctcccatgcgaggtagccaacgtgcaattcagagttgtggtagaaaaaaataagcactcgagatgtggttcaagaatatttagcgaacaaagttcttccaacacaacatgggttggggatgccgaagctaaaggacaaagggaacaagctagaactagtgagtctactgtatcgcttcaaatttcaagataccttcaacgacccctatgccaaatggctggagatgatcgaaatgatgtgcaacgaaattctaggaaattatactaagaaagaagatcagctcatggctactgcttttggtagttgagaaaaacaaagtttgaatcgggtaatggatgccctaggcttcgattacccaaactatgagcgatttgagggagaagctgaagctggcggagtgagaaataaaagggttgtaagtattctgaagaggcaagcaatgggatctattgaggaggacaaaaagaaaatactttaaaaaagaccggaggttacgggagggacttaaattgctaaactaaaaccaaagccctcgaa

SEQ ID NO: 123968 - DNA, 420 bp, Zea Mays
cggctggtggcgtcgacgaagggctcaggaaaacaacaacatatgacagcagggcgctcgggaaacttcagcgcagcggcttcgcgggctcaagaacgacgacgatgaaagtagaggcaaacaggaaatgatgctgtgcactagagaggagagtgggaggctgtgacctttataggcgagggagagaggtgggattaaagcaggaatcaacgctcctcgatgtcaattgttgtgccatattgattcacagagaaactgaagtcataattgctccattgatggagatttgaagcaaaagtcagacacaagaatcagaacggtcgcgagaggagaggagagaacgccggtgtgggagagcttgaggcggcaatcaaaatgccatttatggcccgttactgccagaagagaggagagtgggga

SEQ ID NO: 123969 - DNA, 416 bp, Zea Mays
ccttgatttcgttgctatcttttagctttcttggaacctgaggactcaatggaacatgtctggcagggcattctggggctgtttagagatcttgcttctttctccgcaaaggctgtgaagtctctctttgaattaaatttttgtgtattgctcgaggagatgataagttattacagctatgtgcaccacgatagtaatatggtactctacttcttctctttgtattacttagtgtaattttgtggccatgcacttgcagttaaggtgccttaactaccccgtaacgtgccaagtttcacgcgataattctaacatcatgtgtcacatatttattaaaaaaaaagtaaattggagtatagttgcatttacttttggagagtgcacaaagggaagatcttttacattcaagccatcgg

SEQ ID NO: 123970 - DNA, 657 bp, Zea Mays
ctgggagacaacggtagcctagaagtcaagccaatgctagaagacctcatatgcaaggctcaacgcctggacacggagacaacaaggcttatggaaaaagctcgcaaagagcaacttctggaccttaggacggatgaacaaggagttctctggttcaagaactgtctgtgtgtaccaaaaggagaggcacgggaagtcctgctcaatgaagcccacaactcagcttactccatccacccaggaaccactaagatgtacctagacctcaaaaccagatactggtggagagggatgaagaaggagatagcacagtatgtggcccggtgtgacacctgccagcgaacaaaggccgaacaccagaaacctgcaggcctactgcaacccctcccagtgcctgaatggaagtgggaggaaataggcatgggttttgtaaccggactgccgcgaacgcaaaaaggaaatgactctatctgggtaataatagaccgtctcaccaaggtggcccacttcattccagtaaaaaccactttcggaggagccacccttgcccgaatatatcttaaagagatagtcaggctccatggtattcctcggaagatagtgtcagatagagggacgcagttcacctcaaaattttggaagagccttcagcaagct

SEQ ID NO: 123971 - DNA, 384 bp, Zea Mays
gttggcggggcttcctcttttcggtcagtctggcatccttggctcttggtccgcttccggatcttcttggtgggggcaagcttctttaacttcttagcatagtccatcttcaaagtctggtatgcctcatgagtgttggcttcttcgccttccgccatctcgagactttcttggaggaacgccttttcttccttcaattccttgatttgttgctctaggctttccacccgggaatttaggtgggtatagtgggagaaaaggtcgtcatagtggttgtcaagggtatggagatatccggccatgtagactatggtagggtcatcttcattaggatctctccctgacaagacctgaagtcttttcctctaggtaggagtatttttg

SEQ ID NO: 123972 - DNA, 468 bp, Zea Mays
atttcctcttccgggtggccacaactggagccttcccttttgaggtgccctcgttggcccgggccttcacttgcttgcctcgatcatcaccaacattagtggagtccccctataggtagggaccatgcggcaaggtataattttgcccaaaacccacccgtgcgccaaaggccacactctgcaagcaacaaacccttccaccaaatcactaccactactcatgcgggctacgtagcagaaggcctactcatcctgatcccctttcatcaccttgaactgtgggaacgctatataataatgagagcacaaggtagcagggggcaaactaggcaacccttcgacgttgccaggcgccacataaaaccagaactcccaccagttaccccacttattctttgcacatggaacaatctcaataacttcagccgatgtctttccagtcctcggttgtaacacccctggtgttac

SEQ ID NO: 123973 - DNA, 719 bp, Zea Mays
taagcccaagatccctgtgacaaagttgaagatgttatatagaagaacaactttgctacagtcgagatggtaggctactgtgtaaaaatcgaagtaaaagggcgccaaagttgttttgtcaggcgccctgaatgtagtgtggcattctatagtaactaaagaagatccctggttctgagaaccttgccgccgatgatcgcgcgccgtgatccgagctcgtcgtagagattcacaccaaatttggagtacatgacaaggcaaaagatcttcagggggaggaacatgggcatttggctggcttatccacgacatccacttgccctgcgaccaccatgctgtcgacgccggggatagccatccatctctactgcgctatgtaattgggtgtttcaccatgttgctgtaagttgtggcaagcagccaattaccaccatgaaccattactccatcgtgtgccacgatgaacgcgctgccgtgaaatatcccgtcgccaacgtgagtgatcttatcccaaattcacgaagccgatggtcgaaccctttaaaacaagtgttccccttgttccgcctctctgttatgcgcccaacccacccttagccagcgtttctcataaactgtagctcgagttcttcgaatctcccaaaaccggtcaccattcgccgtgaggtgcttcgccatggacaaatcgtttctggttagttctcactttcttagccctg

SEQ ID NO: 123974 - DNA, 586 bp, Zea Mays
ctgggcgtgactctaaggtcatggcagcgacgagcacatgaattattataatggctttctccgctctaggctgatgctctctgatgctggatttccggtggttgtcaaggggggagtgttgcgttcttatttatgccacgaggacactacataacaacctagggtgaccctgagattgctatgaaggcagagtttgttgtaccgacaaaggtccctgaacagctcgaccgaagataggggaagattccgaccgatgggatccacacgttggtcatagataatgagagcgcaccgtggtgaagggtctggcataggggcctcatccgttaatggtgaagtgaggtgggtgtgggccacgcaggtgtggaaagagatggggagtgggccgcacagatgtgctctgagttgggccgcgattgggcggatctggcccaaggcgtgtaggtatgcttcttttccttttttattttccttttctattttagattttctattgcaaactagattcaaacaagattcagatttaaatttgggttcatgaatcaaattcatatgcacaataataacactccagcatgtatgtaat

SEQ ID NO: 123975 - DNA, 281 bp, Zea Mays
atcgttgtgatccccgagacctcccctacgtcctcgaccacctcaccggagcaatctcgccgccggtaagcccctccgccctttcttccgccgcggttactgtttaagttaggagaaggacctcgggttaggattagaagaacccggggggttttctgcaatgtcggtgactcatgtgaatagtagcccagggacttattcgtgagaaaaacttaaaacacccgccagggaccccagtgcaaagtagttttccatttaatcaattctgttaatctttttaa

SEQ ID NO: 123976 - DNA, 305 bp, Zea Mays
cagaaccgggctaaccggccgcataggctctagaccaccctatgaaacgagcactcgttccttagagctggcccccaggctgtcgggtcctcctgctttcgcatagaggtcctaaactgcaaccctggctgctcaattcagatgtcattatgcctagtgggatgggagctgggcaggtgggttagataaaacacgatcagaaactgcagggtgagaccgtggagcagtaggaaattgctatcatagaggcatatcttgagagggtagttttcctttatagctaatcatacatgggtgcgggccaa

SEQ ID NO: 123977 - DNA, 861 bp, Zea Mays
ggataatccgatagtattgctattcatcgtctgatccaacaactagatatggtgacctacatataatgacaatgcgacgagctctcgagtccaaaaaagtgaaaatccatataggttggcgttgggtgaaagatatcagatacaaatacgtatgtgccacactactcagataaattgacgatatagagtagaagcttgtttggatcgtataaacattagcacaggacacaatttagacaaaacctcgcaatcaagccacagaagtagcacaaaggcagtacattttcgcatccgtgaaatgtctgaaatgtagcggcagcaaatccgtgcactggtagaccagaagcgtctgtctcctgcccagaaattgaagggcctgaccacgacttaatcagtgcatgcattcagacgtttgggtcacatcagcagcgacattgtatattcgcctacctagtcagtacaagcagcgcctacccatgctccccaagtttcacacttcattgcggcaccatatttttttcgcagcacatacatacatacacacatctggaatatgcaagtacaatgtataatgtgtttttaaaaacttttaaactagttcacctcgccttttaaatagtctggcattactcttgaccacgaaaggaaaaactgggatgtatatacatacaaatagtaagtgtgaactttaattagagccgaattgaagaacaaaaaactagccaggttctccaccatgcgatcatgacagccatgagcaacattgaggcagagttctcaggtcactatccacagcataaaagtgagcgaataaataaacggtaacagtattaaacatggtagatgtgagaagtatttctg

SEQ ID NO: 123978 - DNA, 1175 bp, Zea Mays
cgcggggcccatgggtcagcggtgcgctgagggcgcgaggtgtagggatggcaacagatcggattcggaccggatattgcaaatattcgtccgcaaccatatccgcggttgctaccaatatccgcccgcgaccgtacccgcgagtagaaatttatatccatgcccgtgcccatcggattttggacgggtttcggatatctatcggatatgacagacacaatcatttattcaacaattcaatagcataattagtcaaatttcttcccaattcaacatcatacacaattaaaacttaataaaagaattattataggcctgcgagccacggttaggagcattagagcatggaagggccagccgtcagtggtgctatggtctatgagacttggaccacgaggcacagcgcaggaagccaacactgctataaggggcaaccaacaatgggaaattgggagcgttaggcgtggggtttatggtgttaggatctgttctttgctatgtaatatgggctaggccaaaaaatacactatgggtcgatttcagatatccaacgaataacccgcgggtagaaggtaatatcctaatccgtgcccactcgacttcggatcggattcagatctgacccacggttcaaaacatgtatccatacccggctccgtcgggtcggatatctgacggatatccaaatccataggtcaaattgccatccctagcggggtgcgctggccactagatctcagatcaatggctctggttccacgaaccacgcgaaccatttttttagtgtgcctcaacaacattctttttagtgtgcatcacgtcaatgacctccacatatgcgagtcttagggatgaagagtcatgacctccacgtatggattgaatggattcttcctgcgatggttcgaggctatgtccctgagcatgtctggctagcgcttttagagtgccccagcaacattcttttcagtgtgcatcacgtcaatgttgtgtggaaggagcaggtcatcataataggggagcgagtcaagcctgacttatgtgtccacatatgctgctcaccatataccacaaaaccaccttctggattggccacgagcctatctatttgttgactaattttggcaccagtcatcattgcaggtgggcagtctatcactacgacacctttcgta

SEQ ID NO: 123979 - DNA, 583 bp, Zea Mays
gtcgtcctcctcttctccatgtaatcctgcctctgcgagagcgataagctcactcaatctagatgtgtcgtcctcctcctcttccatcagctcaaccgtcgtcattttatcctgaacatatcttgcatgcgcctcatccgccaaatagtttacgccacatccaatatctgcaaatataatgagaaaaataagttagcaaagtcaagataaataaattgtactaacataattatagtatcatttttctcactcacttcccttgaggcgatcagcaagattatccaacatctgtttctcggctcgagccgcttcccattcccttgcatcctgtgctctcttctcatctgccgccttcaacctcctatactctgcacgcttcgggctgtcataaaaggcagatttcgtggccctacgcatgtcgcgtatgcgatcgttaatgtacgaatcgacgagctgagatccacaacgcatcttctgtcccattagtctcttggactctattgtgtgcatcacctctcctttgtcgtcgtaactctcccaactgcatttcctcgtctcctacaaaaaatagtaagtaccgcta

SEQ ID NO: 123980 - DNA, 590 bp, Zea Mays
tttcatcattatgttgcataaactcggcccttgctccaccttatgtgtctttcttggatatctgaccacaaaggttgcaagtgcctggatctcatgtccatccacattattattccttgtcatcacatcttcgatgaaacacgcttcccctacttggtggttgcgacacctccttctaactttgatttccttttagtggaagattatgttatttcaccaattgatttgtaagctttgcctacatgtactataaacaatgttataggtcctattattgttctctctgctagttcaccaccatggatcattgccatcatgggcatggccccttacccacccatagtgctaaccatctgcgaggatatgctacctagattgactcttcatctatggtcactaccagcaacccccgaccacatctctatcgatcacctctatgccactagttgttgttagcaactcactcgtggcatgatcttcactcgaccatcttcctttgacactatcctagttgttctacctatttattaatgaccacaccatgttcttctattttatacttcatgcttaacctcaatgccacgatgctc

SEQ ID NO: 123981 - DNA, 543 bp, Zea Mays
ttgttgtgctagttttggtcccgtggtctgtggttacgttttgtgaacttcagtaggtcgagttgcattcgttgtaggtaatggcggtattgcgattgaattctgcttcgcttcgcacatgcattgttagttgttcgtcgtagtgtagataatccaatgcctaatccaatatagtcgtcgaaggcacttggtggttattgaacgttcttagagcagcagtgtttgtgctagtgattattttgtagatcttgctgtgttctccatccagatttgtgatgttaaactcgggggactattggcacttgacatgtgacatgtccatactcaatcacggaattttcaaatccaccttctgccacttgacacacaatcagtgaccagctatatgcaaatgaataggggtactcagattcaaactgtgctggtttttgcatatcataattttgcatgaatgtagcattgcactattgcagtactagtgagttttatccctggttaatgaaatgccttgacttaccatttgccactacatttttaaccaca

SEQ ID NO: 123982 - DNA, 559 bp, Zea Mays
ttcgtgcctctatcttgtcctaagggagtgatacattggacaaaaagttttggtacggtgttctccaatcccccgcggaacctatcgcggggtcccgaccttctatgacaacgacgagcttgggggacggggagccgatgcctgagagttccctgcctttctggtgggtttcatcataatggatggtcggctcaaagaagctagtcacaaagacccttggtggaatcgtcgttcgtcccgacgccaccttcacgagggcatccgttgctttgttatcccatcgagggacatgatttagctcaaggccatcaaatttgtcttcaaattgtcgtacctatcgatagtatgctaccatcctggtgtcacggcattccgaatccttcatcaactgccatacgacaagctaggagtcccgggcttcgaggcatcagatgcccaactctacagcgaagcgtatgtcattcacgagggcctcattttctgccacattattggaggcctggaagcagattcaaatgacgtacatcaatcattccccatgggtgacgtgaagacgcgg

SEQ ID NO: 123983 - DNA, 888 bp, Zea Mays
caagaacaaaatccattgatatgtcatcccaaggcacactaggaataggtagtggagtgtatatgccatgagggttcaaatgaaacttagctttatgacatgattcacatcgaaggacatgtcactccacagtaggaaacacatcctcatattcctgtaatgcatcaaagacaatactttgcaaagtatagggtaagttgttagtagaaagaagggtgtccttgtacaggagcacaaagaacatggcattaggttcactcaattcttttagatcccccttcctagtcatcatgactaatccctcttttcccggtgtcttggacattggaggctgtggagttttatttggctgtggaaactcttccttactatttttgtggatcactctcaagtggttctcgctctcttgatttttcttctttagatcatccttcataatttcctccggtgtcaaagaaagcaaagagagtcgatctcctttgtacaagaaagacaacttgttggttctcccaaaaatctagacatcatgatcatataaccaaggtcggcctagcagcaattgacatgcttgcatagggaccacatcacattccacatgatcattgtacttcccaacagaaaaaggaacagttaccatgtggctaatacacaatgctccacaatgattaagccactacattttatatggattaggatgacgccttggtttcaattccaatctgttaaccaattcttgactagtaatattgttgcaactaccattatcaactatgatgcgacatatcttatcgttgatcatacctcagtatggaaaagattgtggcgttgtccattttgttccttttcagcagtcacacttagcactcgaagagaaattaaacaattatg

SEQ ID NO: 123984 - DNA, 847 bp, Zea Mays
cctccccgcacctccgcaactacccttagatctagcccaagttctagccaatcaaacccgactcatcgaggtcctcactcgaagtctggaaaatcaacgtccgaatggtgggagaccgcaagacagaatgggggatttcctgaggctcaagcctcccacgtttgccggatctagcaaccccctcgatgcagacgattggctatgcacgattaaaagaaagctggaagccattggatgcccggaaaaccagcgtgttcaactggccgcccatcaactttccgggatggtcttagcctggtgggataccttcaacatcaccatcagagatgctacctgggcggaatttgaaacggctttccgggagcaccatataccccagggctcattcagcttaaggaagacgaattccgggaactgactcaagatggaagatctgtcagtgaatatgtgcacaagttcacggagttagcacgttacgcgccagatgacgtcagtaccgagggcaagaaaatggcccgtttcctgaagggactcaggccagaactcaagacaattctggctagccaagacttccccagtttctctcacctccccaacaaggccatgcaagttgaaaggttaaaggaggaagaaaaagggcatctcaaaaggaaattcgaagtcctccgggctcagcagcaagaccggcaccagaagactcgatcctttggatttccacccaagggaccaagcttcagtagaccagctgggcccaccccgtcacagttcagtcagcagagtcagagctctttccatgccccctcagttgcaagcaaccaacccccggcgaatgcatgttggcactgcg

SEQ ID NO: 123985 - DNA, 580 bp, Zea Mays
tgttaccagatgaagtgtcactttttgcgccgatccaggcgccaatcattgcgttgagaaaccggctctaaaagcgagttactcccctctaccatcaaagggttaaagattagttgacactaaaccagacatagctcatcttaggaacactgcagaaacactgctttgaagtagtagattaggggataagaaaagaaaaaggcgagtgagagtctcattttcaaatgaataaagaattccgagtgaaaagtaatttctcatttactttcgttccctcttttgattccatcaattgcttgatttagaattgacattgcatcaagcgaaagggaactcagcctgcctaccctatacagttggtcaataagctacctcccctcctcgatgactaggggaggggggttcgccctacattcaaaaaagccttttctagctcaatcctatctttgctttaagcttcaactgggcttagagctttcttaaaaaactctgacatggaatgggtgcttagtcatctcaacggtattagtggtgctctctgcacagtcgtggacggtccacgacctggagcagggctagg

SEQ ID NO: 123986 - DNA, 323 bp, Zea Mays
ctccaccttagcagcaagatcattggtggagtgtgataccttagaagcgtagtcatcgtcgatgtccttgttgtcgccaccacccgcatcatcaccaagggccaaggtgcaaaggccttctacagtgtcggcgatgaagcacaacttgttgatcttgtcctcaacgtgcctctcgagatcctcgtcacttgaagaagaggctaactcattagagtcgtggtcgaagtcgctcaaggaggcaaggaaggcgagcttcttgatcttcgccttctggaggtacttctttttgagtgcctccttatcaaacctcctcctggacttgt

SEQ ID NO: 123987 - DNA, 274 bp, Zea Mays
tgtatgcacacactcacgccaaaacacacaccaactctcctctaccgtacacaagcagaccatgactccactctcccccaggcccgcgcacgctcgccaacacccgtgtcacctcccgcaccctccgcacgacacgccccagccagcctcccgcttctcgcgttcgcgccgattggctctcacaacgaacttcctccgccagcaaaccatgacctccatgacagtcgccagtcttcacgccatctgcaacctccatgccatgtcagtcgtcgcg

SEQ ID NO: 123988 - DNA, 1001 bp, Zea Mays
gtttgactgcccataagagcactaaaggatggatctacatcgcaccctcatagtctatgctaccaccttccttcgagtcggatgtggaggaggcactattacacgtcacaatcaaggacaactctggtgatgccaagtttgatgaatggttcatagatccaaatgaggacaatgagatgcaagactatgagcctaagaacctaaatagaggtttgcttgggtggttgagctgaatgaggataaccacccgaaagtgtcaaaacacaagaaacctaggtatggtgcaagattcaaatggttgtgaatattagatatttgatgaagttaacaaccccttggaaggaacagacatatcaaataatgatatataggaggacccccaagagcccaatgaggactatgactctaacaagatggtggagatagaagcctcgtaagccctaacacaagaaggacctgcaccagaagaccctaagcctaaggtgccccacctaaaggaccatgcaccagaattacctcttaacctaggatggagaaggaccgtccacaacaatgatggcatgactttatagttcccacatatgttttgtaacatactcgtcgacttagtactaatgaacctccaagttaactacattggaatacaatactaacacattaagggtagtaccagcccaagtagatggtgacgacagagatcaccagtgggacgagtatggcataaggaatacaatgtccacacattatgctctatccatttgaaacaactctgaagcaagaataaatgatgctaccaggatagccatgttttcattcaatgatctgaatcaagggtatatggccagtagcatcaattggtactatccgcaatgcccatccgagagaagcatcatgataatcgcgtgaagggtacgatagtagaagacaacatctagatggacacactagatatctgaagcatcatgataattgcaacccatccaggagaagtagttaagaag

SEQ ID NO: 123989 - DNA, 748 bp, Zea Mays
gccaaagaaggttgctactggctctagtcaaggtggcttggtctatctcaagtatacctttcgatacagaagccaatttgatgaaccaaacgatggctggctagatgctatagaggcaactagtgatgagctacttggagcctactcgaaggctgaagacgaagctatgacgatcgccttcgacgctcaagggaaaaagaggctaaacagggcttttgatgctatcgggtttgtctaccctgattactgttttcctgttcggaaacaagggagaaaaaggaaaattgctgcttcggcatcctctagtgcgtcgaaggcgaagaaagtgaaggtcttgacacgtagaccgagacgcattaagacggctaatgtgccaaagcttattgaaggtgtagaaattgccctttccgccatagaattaggtcctatcatgccactcaaaactcatacagatccgggcgaagagtcaaaatcagagaaggcagcagaacagctgaaggtactgagcctagcaactacaacagaactaccgaagccatcaagtgtttctgcagcgaccctaagaaaaaggagaatggctagtgtattagacgctattttggaatccacaaagatgtcagctcccgcttttgccgaagcttctagcgaaaaaactaaggatgcaaaagaagacgttgctgcgagcgcggctatcgctcctaccgaagctgggccaatagaactggtggaagaaagtgctcctaaggga

SEQ ID NO: 123990 - DNA, 377 bp, Zea Mays
actaaatactagttagtggttgcaactgcacaggatcaaataatggagtactctgtgggagatgcatacttgcaggcaggcaggctgcttacttgcattgaatgggaggtgccaagaaatgattgcacttgcgcacaaaggaaacgagagattgatgagaagccgcacgagctagccaacaagcgctgagttggcgccggcgtgctcctcgcccaacacgaaaacgttgttgactgacttaatggctgagcacccgaccgacggcatctctagtgtgatagagataccggacacggccaacctggactacgacgaccaaacaccaagcgttaggtatatggcatccacgttcatacacggagcgttaggagggttgt

SEQ ID NO: 123991 - DNA, 286 bp, Zea Mays
ttagattggctaagatatgcatccaatctcattttcattaatacacttatccattagaatctatttcatacctttgctatatatgttctcatattgacttgcctttaagtaatgatcaataaattcaatatgaagaagtaaattcctatgattaatcaaatgtttaaatagtgcatgttcctccttttaaataatgtgcactagtgttaaggactttacttcatgtatgtatgatctatggatgatgaactgtcttcattttctatctaaagaaatcatcatttac

SEQ ID NO: 123992 - DNA, 429 bp, Zea Mays
agagagagagattgaatgctaccttcacagaggaccaaagtaggaaacactcatagaaagtgatgatgacgtcgaggccgcctgcctccgtcgaccgtctagactctggaaaacattgccttctaatctcctgacacttcccccaggctagagcactttccagagacgcgaccaactcgactaaaagaggcaagtctggacagggtgaaggaaacaatgttgtagtttgacggctgagattgttacttgcaccatctgacaactctagaaatttgaactacttggccaccttgcttggtcaacaacagagcctactttaatattcaataatctgttaggtgttgggtcgtgtgggcggggtgttatgtgaggccgagtagcccatgtaatcgactacttaaacatttatgtgagaagagcagagcacga

SEQ ID NO: 123993 - DNA, 542 bp, Zea Mays
ccgccgtcgttcgtcgccattgtcgtctcctaacctccgtggtgtggacccaggcgtcctaaacggagggtagatcatgcgcaagggcttaaccgggcgtggtgacctgtagtgcggcggggatttctcgccgttgttgtaagccatcgtggatccgcgcatcttcgtgggcagggcactacactgcgaaattaacggtatggaccccttccccgtactcgcgctcatctctatcacgtgtagcacagacccccttcgaggatagtacgatcgggcctccgcgaggatctagccggccatggtgtcgccgcttccgggtgttcacgctcacgattagcgacagtcatcgatcggggcacggacggttgtggtcagagcgcagataacgtttcgggttggaataacgtgcaaccgtagatttcaatcggacggttcataaccgatcaagggcgggtgaatgagtaaccgttagatctagatcctagggtttacatcgtgtaccggttcgtgctctaatctgaaccacagatcggggattgaat

SEQ ID NO: 123994 - DNA, 468 bp, Zea Mays
aataactttatcttcggatgcaatgtataatctaaacggtactcctgcttgtggtgcttttaatacgggagccgaagacaaatattttctaatgagatcaaatgcttcctcttgttctatcccccaggtgtattcgatatcatttttaagccaaaggataggagtgaaggcattgatcttccctgctagattagaaataaaccttcgtaaataatttaccttactgagaaacttctacatttcaagcttacatgtcggaggtcccacattcagaatggatttaattcggtcaaggtctatctctataccatgttcatgaattataaattctaagaacttaccagccaacctccaaaagcacatttacgtgggttcattttagaccataccgacacattttatcaaaggctttgcgcaaatgagctatatgagaactaaactcagccgatttgactacgatatcatcaa

SEQ ID NO: 123995 - DNA, 619 bp, Zea Mays
agtaactcggcttgaagaaatttatgtgctagaagaggagcattaaaatgttgttattcattcggccagatatcagaaggcctttaggcgctaccatgacaaggttgtacgtcactgagcattcacagtaagagacctggtgcttcgccgcatagaatcgggaagatgacacaaactatcaccaccctaggaaggacctttcatagttgcagaagtaactcggcccggttcacatcaactaactcagacggatggtactccaatagggaactcgtggaacattgagcacctcaggaagttttatccatagtagcaccataaactctagatggtaggctaacacttgtaattcggtgacttcattctcaataaagcttctattttatctccacatacaagtgtactctcgcatgctactcacaaagcaattagcttaagtcgggaatggcttaagtaggttcacatgctcacacctacaaaacaaagggtgcatactataccctgctaacagagcaatcgactttaagtcaggatcggtttaagtcggtgtcacatgctcacgcttacaaaacaaagggtgcatactataccctgttaacgaagcaatctacttaagtta

SEQ ID NO: 123996 - DNA, 498 bp, Zea Mays
tttccaaccagcaagtcttttatccattttttccaacattggacaccaaagagacttactgacttttttattatcaatggggactccaaggtatttcatcggaaggcttccaacaggacaagtgaaaatgtcagcatacaaattagtgcactctttagcttcccctaagcagaaaatttcacttttgtgaaaattaattttcagccccgacatatgctcgaaaaggcagaggataaatttaagatttctagcaccttccaaacaatcttgaattaaaaagatagtatcatcagcatattggagacaacaacaaccatttggaataatgtgtgaaataagaccacgaatcaaacctttttcttgagctttttgaataatgcaagccaaaccattagcaacaaggttaaacaggaggggtgaaaaaggatcaccctgtctaacacctttatgagttgcaaaataaggaccgatcaaatcattagttttaatagccacttt

SEQ ID NO: 123997 - DNA, 319 bp, Zea Mays
gagatcctaggaggactcatattcttgaattataaatatgcaacatataaatctcatacctgataatacattcctgatgaatgatcactctcatgtgtagagagaatatctcatagatgagattatagttcattaatggaacctttccagaagaaataaagtctgtgtcaaacaccaaagtttgataatccctataaagggataaatacccatagagacccgaaaaggaataagatgaggtaccaaaggacttgaagttcaccgaataagcacatgtgcattccacgatctttactcatggtattttccactagatgtg

SEQ ID NO: 123998 - DNA, 324 bp, Zea Mays
ctagggtggtccatgtccatggagggtggttgccctcgttctgggttgcttctctcgtcgactgcttgattggtttttgttttctgctatgcctatgattaggcttattaggccaggtccgtatagcagggtggttgcggttaccatggctgctgctctcagttggttaacgtagcattatatcggggtcatgtcgccgatcactgcccactctctctctacttttctcctacagctacagtacgactgacgaaggcgacatgcatggaccgttgttttcttgccgccgttacgcgcgtgcgctttcaggagccggctcatcac

SEQ ID NO: 123999 - DNA, 847 bp, Zea Mays
ctgggatatgccgaaggagcctactgctaaatccagtgaaggcggcctagttcgattgaaatataccttcagatttagagagaagtttgacgaaccaaatgatgattggttaaaatgtattgaagctaccagcgacgagctacttgggacatattccatggccgaagatgatgccttgtccgcagcttaagggggtcgggagaagaaaagattgaacagggtgtttgatgcaattggcttcgtataccctgattatcactacccactgcgaaggcaaggaaagaagagaaaaactactgcttcggccaccactattgtgctgaagggtaagaaaataaaggttctgacccaccagccacggtatattgaaccggtcgtagtgcctgaatttggcgaagggacctcttcaactgccgaagtaaaacaagtgacccccaccgtgcggagtgctaaagaatcaactgtagtgtcaaaggtgcctacattcgggccagccgaagccaaagatgatgcggccgaagaaccaaaattggaaaaaacagtggaaatggcagaaattctgagtccaccagcaaaggcagaattgccgaaagtgcaaaaggatctgccgcaactcccaagaggaggatggccagcgtgctagacgccgttatggagagcacaaaggctttgagacctgctcctacaaagaaaattgccgaagctgttagagtccaggccgaagccgaagctgggccttccgcgccccttgagacgaaggctgtcgcgcctcaagataaagctgatcaacaaacttcatataccggcattgcagtggggcaagacatgacagaaaaagcaaaatctc

SEQ ID NO: 124000 - DNA, 466 bp, Zea Mays
cccacaaatattttggttcacatttttagtatgcgacatgagggcatggaattttgtggtaaggtcgtcatccgagcaccagacatcgtgctagaatgaggtattttttccatcgtggatgacataagtggcaataacatggtagagggggagcaaggagcgcaatgaggtccaatgagcgcctgggagatcacttgagaggctggccaaacaggcgcgacggcggacccagtcaccccaccccaagaggaacatgacgaagtgtggaggcggtggatgagtttaaagtggaggcaggtgttgaaccactcgtgatctcggacgcctaggccaccagcatttttgctctcaagcaccatgtcccaagggacaaggcatcgcgacccacatgcaacatccttgcccgactagaggaaattgcggcgacgttgatccagtttcttgatggccccttttgggagctaga

SEQ ID NO: 124001 - DNA, 408 bp, Zea Mays
aaccaaggtaggtgccaatggtggtggtggtaactgagcccatgcggcttgagaatgacttgccgaagcaactgatgtcgtgggttgctggttgcccacatactcagggatatatggcaaatagcatgaggcagtatgcaagacctgcttcgttgattctgccatgcttcggcttcagcgatctccttttgcttttggatcgtgacttggcacgtccttgttgtgtgtcccttatcctccccatagaataagtagaacaatctcctaggttgagtgttgaaccttcctctgaagcttcttcctcctctatcccttggagatggtggcatgtaagaggtttgctgcattcctgaagatagtgcgctttgttgattgccttgagtgtggttttccctgtcctcatttgtg

SEQ ID NO: 124002 - DNA, 521 bp, Zea Mays
ttgcgaagtctgtttgagggtgaggagctgaggataatgttgtttaactatagggagatgggtatcatcccgaaggttgaaccattgtaaggtgtgatgccctcgctgtacgtatgtaactataatttgtatgatgaggctgtgtgctttagctgatacggccatgcccgtaggggacttgtgcgctaggtctagcgcgtttattatgtcagtccagctgcaccctcaggcgacttttgtacggatagtcttgggaggaagacttcgatttttcgtacttgttgtgctagtccggctgcacccttaggcgaattttgcacgtatagtcttttggagaagacttcgattttgcgcacttgttgtgctggtccggctgcacccttaggcgacttttgcacggatagtcttttggagaagacttcgattttgcgcacttgttgtgctggtccggctgcacccttaggcgacttttgcacggatagtcttttggagaagacttcgattttgtgcacttgttgtgc

SEQ ID NO: 124003 - DNA, 500 bp, Zea Mays
gttaacaaactcgttgatgctaccttgtacttctcagctgcaattatttctagtagtagaacaagtacaaattggctccacgggtgcaagcatgtgtgcaggtggcactagtagacgatcaatgtatgccattgatcctagaggagatagtagcataggaaaacatagaaaactttgaagaaaagatgttagagatcattgcgaggcaatcacttgggttcggggtaccatgtagtataagtcacaaataatacaatgaagaggcacatgtggatcacacttaagaaacaacacaactaatggatgagggcatcttgcttcctccaccatatatagcattagtgcctaagatgatgagaacatttgagaaggataccaacccatatggtgacatattatctatgttttgggttcttagcaaaaagaatgacaacaataatgatgcttttggaatcaagggaaaggatggagaatctacaccaaaagtcaagaaaacattt

SEQ ID NO: 124004 - DNA, 396 bp, Zea Mays
gttgtacggtgcctagtggtagtttggcaaagggcaatcttttttgcatgatatattagatcctctaatgttgtcgaaggtgggggagttccttaatgcccacctgatattaaattgatccctcaaaatagccttaggtagttaggtccaacgaggaaggatagagttaatggaaggaattactttttgttaatttatgtagtttgctcttgaattcaaagttggtgtaagaacggcttttccagttttgctatttgtgaagcttctcattttcttagtttagtaatgttgattttcctagaaacaagtttagcaaattagcacaatggttacaagatgtgacatatttatgaggaaagattaagccaccttagaacaggcaagcttctctttgtt

SEQ ID NO: 124005 - DNA, 468 bp, Zea Mays
agtttgtgccgaagtaaatggttaaatgagtgatcttcggcacacaaggcccccaatagatgatgtattgcggtgtgtcgtttgctggtggtgattgtggctagtgtggatgtgttttgtggtgtttttgctagtgcaaatcgattgtttggtgtctatgcgtgtgtctgtgtggtactgtatggagtttgtggttgttgtagatcgtggaccagttcatgagctctcttttgtgcaatgttcctatgttcctcgggttggtgtcatggacatcttctttggctctaacagtggctctgtatctttgtaaacctcccaccgagcaggctcatacgtgagcgatggaattgggacaatgtgacagtcatagggttttttatagtgttattctttttagtattactatattatttgcctatttgaacatcaatttgtgttggcatattacttaaattaatcattttcttc

SEQ ID NO: 124006 - DNA, 319 bp, Zea Mays
tgctgaggcactgtgggcaacaattatggacattcctgataagtcaaaggataacgtgaaggcaagagtggatctggcagcgttatgtgatagaccaaacctagagatgaagctgccaagtggcggaaagacgtggagaaggcctaaggtcgatttcgtcctaagcagggcctagaggaaggaagtacttcagaggatcaagatgttgatgttccctgatgggtatgcagctaacctgagtagggggtgaacttatgtactatgcgagtcttagggatgaagagtcatgacttccacatatggattgaacggattcttc

SEQ ID NO: 124007 - DNA, 346 bp, Zea Mays
ctcgacgccatgtgtggttatcctgatcatgggagcatgtagtgttggggccatatcattcggagccatcctgccctgagggcgtcttgaggagtgctggaggaatcccatgcaaggcccccgtattatcggaccctagggctaaccgccatgggacttgggcctctatgcgtagggccccaaaaatataggttggagttgagtgaggctctatgggtctgccttctgctaatgaagtcatataggttgttttgacaccatatgggggtatgcctttcctagaataaagctaacagtggtacttgggcccaccataagcccaagaaggtccataggtgacaccaat

SEQ ID NO: 124008 - DNA, 528 bp, Zea Mays
atttccccaggtaccttgaattatatctcagtagagcccaatctacatgagcagatagtcctggcatagatgggtgacaagggtgttcaagtcattaaagagatgctcgaacgaaaggtggataagtacaaatgctttcgtcaggacagcaagggagttctatggtttgaagaccgattggttgttcctaagaatctagaactcaggcagaaaatattggatgaagctcatctttccaaattttccatgcaccccggcagtaacaagatgtatcatgatctcagatctttgtattggtggaccagaatgaagagggaaattgctaagtatgtacctgaatgcgacacttgccaaagaatcaaggctagtcatttgaaggtagcaggtaccttacagcctcttcccgttccctcttggaaatgggaggatatttgcatgtattttattgtgtgtttgcccaacacctcccggcaccacgattctatttgggtcattgtggataggttaaccaagacagctcatttcttg

SEQ ID NO: 124009 - DNA, 527 bp, Zea Mays
atggggtatctgacttaatcaggtcagcagtcgggatatccaaggcctggagtgttctggggaaggtgatgttgatgctactgccgccgtccactagaacctttctaacccggctttcttggatcatagggtcaacaagcagagggtacttgtcagggtgatcaaagttaagccactaatcggctcggcagaacatgatggagtgctccaaccactaatatggcatcgggtcactatgggttgccaccaggacctactggtcgattagcttctactgcctcttgctctctagggacccatgtcccccgaagatgacattgacctcccagtcaatgcgtaggaattggccaccaccatccccttcccgaggttgaggttgttcttgtgcggcttgctcccttcatggtgggtgcgacgacagtggttggaatggttggccattgccgactgagtttttgaagtccctgaaattacgtagggtgtggcacatctccttgtggtatgagcactgggcatctagaatctgt

SEQ ID NO: 124010 - DNA, 660 bp, Zea Mays
tttatgagcatggcataaaagtagaccctgaccgaattagagctattcgatcaaggaccgtctaggtggggcgccgaatcgacgtggtagcataccattcgatcaatgacactggaccgtctgactccaacagagacatagctttagttaactcagctaataatttgactgatgcagttgattggagaacacccatgattgcatacctatgtattccaagtattagggcaaatagaaatgttcggaggatggtttttatgtatgttctaactgatgatgaactttatcgtcaaatttctagggatgtcttgcttaagtgcttggccctaatgacgctacattggcgatggacgaagcgcgtaaaggaatttgtggtactcatcaactgactccaaagataaagtggcttttgaggagatccagtttctattggcctgacatgatagtcgattgttttaagtactacaaaggttgtcaagtatgccagaagttcagtgatatgcaattagtgcctaccgccgaactacatcctattatcaaaccttggctctttaggggatgggatttggactttgtaggtaaattcatccttcgtcatcgaaggggcgtcgatttgtgctagttgctatagattacttcaccaagtggaccaaagccgtt

SEQ ID NO: 124011 - DNA, 314 bp, Zea Mays
ccgagccacaatttcctctttcattaacttgtaatactgttttgactcgttgtccatcgtggtagtgtcggtatccattattgtcttgtcgtgttggtctcgttctagctgtagtctactcttctctatctccaacagctgatcttcacgacctttttggtctctatctatttccaaccttgcttctctcatttttttaacttcttcaatgaaaggatcagtttcgtcatcttctcgctttcttgctctcatcttttccttctcagctttccttcctggtggtcttgcaacgttgagttcaccaccaattttac

SEQ ID NO: 124012 - DNA, 417 bp, Zea Mays
attgagtcacccaattatgagaccctcaccatggatgagcttttgggccagctcaagtccaccgagattgaccaccagacccaagccaagattgagaacccaagtgcacccaccatggccaaggtctctagaggtggttcttaatctaacccctcaccacaggagtaggtggagagccttggggatgaggagctagcacttgtagccagtcagtccatgcagttccacaacaaccgctagaattagcggcatggtgggtccaaggacggttgcttcaactgcgacaaccctgaccactttatcaccagctgccccaagaatgtcaagtagaaggttgctcacacgaccaccactctggtcggcaaaagagcaagtgggagaacacatttgacaagcataagtacagggagaggttcg

SEQ ID NO: 124013 - DNA, 286 bp, Zea Mays
cgcaaaataataaataaattgcaatgttttgcagcttgcagcttgcactttacaatggcgtacacattacactgacagcagccacattacacttacatagtgacagaagacacaaccacatagggatagctgaacacataaactaagtaagtctgcaatagccaacagcaacacgccatgacccatgagccaacacagatgacatgtgaaaacacgatgagccaacacaactgacaacacatgtagaaaacaccaacacaggcgataggtgacacactgacacttg

SEQ ID NO: 124014 - DNA, 490 bp, Zea Mays
tgacaaccctctcaacttaggaccaagtgccttgctaagaaatgctagggggtgacctttttgcataagaactgcaccgactccgagtgcactggcgtcagtttctacgagaaaagtgctactgaaatccggtaatgcaaggacaggagcagatactagggcctttttcaatgtgttgaaagcaatatcatgctcactggtccaaataaataggctgcctttcttgagcaatgctgtaagcggttgacaaatgaccccgaaatttctgataaatttccggtagtacccagcgagccccaaaaagctgcgtaaatcgcgaatgccacttggcgttggccactcagcgatagcttggatcttcactggatcggtggccacaccttgtgcatcaataatatggccaagataagacacttgctgtcttgcaaaggagcacttagatagcttgaccttccactgatctcgagccaataattccaggaccagcttc

SEQ ID NO: 124015 - DNA, 572 bp, Zea Mays
attttgtattacacacacccgttcacctctatcccttggtcaagtaccctattctagggttaagaagcacttcaagtcatcacatcacacttgttttgaacttttagcctagtggatgcactctaggtgtaacaaacgtaatgacatgtcaatgcatatgatgtcatgcccaagttttagttcctgtaacaccagggttgttacactcttcatttcacccagctgaacacgcttgtgttcaatagctaaagccttgtctaggagcctctggaatgatggaaaggtatgagcaaccagtgaatactaaagtggtccattaagttcttccatgaaatgctcctgctttcattcatcgtctgccacttcgtctggagcatacagtgatagctaaacaaatttatcacgatattcactgactgactgtaacaccctaggatccccaaacaccctgggatgctactggacttcactaccaacaaccgaacactaagcaaaataaaatttggcagcgtctcctttgtaattataagcatcgcagaagcaaaagagatatatcaatacaaaatgaatca

SEQ ID NO: 124016 - DNA, 441 bp, Zea Mays
gtggcagcctccctgtaacccatccgtggcagaagcgtccgcctcatgagctgatatagaaacttggccgctgtggtgaagtctgccggagaacatcgcgacccatctgagaagggcagtcggaacaaagccgcgatgtgagctgtatctggagcaactccaccgtgagggcgtcgaggaggatcagaggtaccgtagcacaagctatgaagacgagtcaatgactcaggaaatccaaacagctggcgaatctggctggcatgaatagtgacatcctctcgctcaaagcggaacctcatccactagtgatcagggtcgatccatacagaagcataaaaaactcagacccattcctcaacatatctgccgttgatagtcagaagagtcagaagtccaagcaaataggagaggtgaacctcagagtcggcaccggctgctagc

SEQ ID NO: 124017 - DNA, 608 bp, Zea Mays
attttatattaattctttgttttttatttctctctttgtttttttttgcaattatctattcatggacacattagtttggtttatgatcatgttataatattttgaaataattttgacatagtggtactatacatctctcacttgcaatagcatccctcacttagtaattagcctttatatgagagatatatgtctttcttaggatgtgtgtcaccactttgtccgaataaattgaaactattttgtcaacattgtacaccaacatgaattgtccatgcaagtttttagattcttctagctaggttatggtattgtaataaatatctttacgaaatgcatcaaataattacagtaattggtaaactaggtctgaaaaatgcataaatgcacacaacatcataggttggttcaataaacatcccattaaagtttaaaatgatttggagaaagtggtagtatagatccatcacaagcatgaacatctcccactcagtaactaggctctatgtgagagatgtacgcattttcggaggatgtatgtcaccactttgtcataataaattgaaattttttgtcaacattgtacaccaaaatgaagtgtacatgca

SEQ ID NO: 124018 - DNA, 506 bp, Zea Mays
cgaacagagggtctcaatttaccgatgtccaatgttgattaagctttatcatatcaacatcatcatcttgcatttgatctcacaatgtggcagtgctaggtagctattctgttatgttcccctcatttcactggctcttgcgatcacctattatcaagcaatttgtaaacctggtagagacttccctggtatgaacataaaatggatgaattaacaccgagattaagagttgttattttactgtattcactactttactctttgatgcattaattactatctaatcttgagccttacccatatgtttgcatggtgcacctgttggttcttatgtggttttatcaggagaaggagttgcttgaaaagcacaatctctggactggagcaaaggatatcctacatgaaaaggtaatttctcatgtagatgattgtaatattactgtttccatttaatcttttatcttcatgtttaggtgattgaaggagttatgctcagcaaaggatac

SEQ ID NO: 124019 - DNA, 821 bp, Zea Mays
tgcaatactagtagcaaaagcttgaagttcgacctctgtactagaacgagatacaactgcttgcttcctggacttccatgcagtagtagaagagacaggaagaatgcaatatcaagggatggaacgtcgatatgttgggccactcatccaagttgagttcgagtaagcatgaacctgaagtggactatcacacacatagaataaactctgagatgatgtcccccgtaattagtgcaacacatgaagtaaaatgtccaaaatgaatagaagcacaaacaaacttactcaaaatatggtcctattaagcccggtgacagttagataaacaaggttgcccacaatatgtcaatatcgagagggatcctcaagaggtgcctcattcagtgggacaaagctgcaagtgaagatccataggggtgacaactatccgattatcagtaatacccaaacgagcaatgaggtcttgtatgtatttggactgagagagataaaagtccttgtacaatgcaaaacctcaatccctaagaaataaccaagaggacccaaatcagacatatgaaatggttattgagttctctcttcttgtgagatatgtgttctacatcatctctcgttatcaaccgacacgaaacaagggtggtggctaccctagaggggcaacgaccaggggaggagcgaaagcaagattagactcgtgatcccatgctagaggaggtattttcgtagaattagatgcatctattcatgtgtaggggagtaaatatatagtcctagaggtgagtggctaggaaaaccctaggcaccaataggctagacccaac

SEQ ID NO: 124020 - DNA, 448 bp, Zea Mays
cttggcacttggctaaccatattccaggttcattcccttgaaatctgggaaacgaatatttgggcagagatggatgtcctcaccctcccatcacctgatcttcttcttctcttagtctctcctgttgtggttctcttcttcttcggtttggatcatcttgatcagcaccctcccttgatgatccagcaccatcgccctccaagtcctttgccatcatctccgaacgcaactgcgccaccaccttgcccgtctcctccatctgcattgccaatatagtatgctcttcttctgccttccttgccaccgtagctgagagctcggcttgtccttccagccgatgctgtccagcttccaccgtatccaacttcttcaccactcgatccatcatcttcatcatctgttcccacttctcctctcccttctgctccacagtcgccatagcctccag

SEQ ID NO: 124021 - DNA, 593 bp, Zea Mays
attcacccctctccagagagcacatcgctgccttggcagcgctgttcggatgggatacatctgagctcgcataagcttgggtctatttgcctggtcgtgtttcctttctcttctcaatggaccagtgcaacttcctaatttggaatgtgagaggattgaacagtagggctaggaaagataatgttaagaccctagtcctggacatcaaaccatcacttgtctgtttgcaagaaaccaaaatgagcaacatctcggattttgatattttgtcaatttttggtactggttatagtaattttgttttcagcccagcacaggggacaagagggggcattttagtggcttggagagatggagttttcacccacagcaatcatgtaatcagagagtactcggtctctattcaactgcagatggcttcaggcccactttggtggttcacaggggtttacgggccacaccaagacaatcttaaacaggctttcctacaagagttaagcgaagtcagggcaagttgtgatggaccatggatcttggcaggtgattttaatcagatatgcaggtctgaggacaagaacaacccttgtatcaac

SEQ ID NO: 124022 - DNA, 861 bp, Zea Mays
gcttcttctttcagtaacttaactgtggtaaaaaaaaacccaaacaaatccttcatcgttgtagatctgtaggcctaactgtctttgattgagtgatgcatgtttcagtggatgcatgtcaggtcaactttgatgcttgtgcgtgcggatgaagcaaaaactgttgtggtagtttgtctcggagcatgtcggtcctactggcatgcagcaatagttgtgtttagaaatatatagcacagggaattcagtttcagtctgtgtctgtgtctagaaatatatagcacaggaaactgttgtggtagtctgtgtctgtgtttagaaatatatagcacaggaaactgtttaaatcctgaatgaacccctgtgtctgtgtctgtgtctgcctggaaacaggcacaagctacctgattctggtattccatacacctactagcaagtaccaacagtgtggatctctgaaatgttcctgcacaacttctgaagatgccagaatattatatgcagcactttgtgtgctcaatcctttttcagggtatatggctctattcattaacagagttaataatcatctgcggaacagtactctttcagctgtcttcttgttgtcgtcttatgtgtgtgcgcttcagtgagatgattgtgatctgtgagcatgcacagacaggatcggttgcatttatggctgcttgctaaactcatctgagctaagctaagtaaggtactaaacacgttaacccccaaatccagaccaggcagcaggtagtaacctaattacctaccccacccccaccacctgtatgcccaaacatttgcaaatttattatactcgtgtacttttattgccgatgaagtctgtccaag

SEQ ID NO: 124023 - DNA, 486 bp, Zea Mays
aatagcatctaaccaatcatcatttggctcgtcgaactgacttctgtagcggaaggtgtatttaagataaaccaaaccaccctggctggagccagcagcagtttccttcggcatctcccactcactcacaagaggccataccttggaagtaatgtgttcttgtaccaaatccctggaaccaatgtaagtacatacggtgttgaaagccattaggcacgcttgcacctcattcccaattgcaattgatggtcttctaatgccgaagcgcgaccatatgggacgttgaatgatgaccctcacatcctccctctaattcagatcattctttacagagaaccattgcttcatccaagagcctggccacttcttccgaaatgttggcacgagataattttcctcagagcagggcacgaagctataacatacgaagttgttatggtattgttcctttccggttgcctttgtctggtagtataactcatgaat

SEQ ID NO: 124024 - DNA, 425 bp, Zea Mays
gtgcttgtggtgttctcgtagtacgtagacgcgccatgattatggtttcttcgcacgtacgtagtacatggtgacaaaactgcatgattatagttagcgtaaatgacaaaagtgtaggctagctagctaccggtctctaagtatgcagtggaaaccccggccagtaactttatcaaaggcgctactaggtagggggtattagacgtacactggcaatagagagtgtgtgttcgtcaggccggagatcgagcaaagtttgcacaggagcgtacataaaaaaagagaatgcgcgtgtttagggttataattgcgctcactcggccggcctcaaaggcttaaccatctctactcatgcatgtgtgcgcatgagcatgtctgcatatgtcgcctgcagatcgaccgacctctagctagctcccgtcccg

SEQ ID NO: 124025 - DNA, 453 bp, Zea Mays
tttgtctctgggataggtcccacatgtcgatgactggtccattcttcttataacaagtgacaatggtaaatttttataacaagtgacaatggtggataattttcaccaactccactaaagttgattggtatagcaccccttgagaagcttcaccgaagtattgaatgtgatcctagatctactaatttggtggatctgaatttcatggatatagatcgtttgaccaaccttttgttaaaatagagctaatgaatgtgaatataaatgtatatatgggcgagctaggataaatggaccagcacgaagcctgcaattttaggtttgacacaaacacaacatgactcacaaatgttatacgtttgggccgacattgatctgtacgtttggtcgtgcctaggtcaacaaccaaccacatagatcgacacggtacgacccgtatatataaatactaaa

SEQ ID NO: 124026 - DNA, 370 bp, Zea Mays
ccccttaaaaataatctcgtcctcgagatttaggaggaacgagggaaaagatggggaaaatctacgtgaagctcttcttctctctcccaagtagcttcatcttctccatagtgactccattgcactttgcacatctttatcaccttatttcttgtaactcgagtcaatgtatcaagaatcttgataggatactccatgtaagtcaaattatcctgaacactgagttcctccattggtaattgttacttagggacacggagacacctcttaagttgagacacatggaatacattatgcacatcagatagattatcaggtagctcgagttgataggccatctctccaactcgcctaaaaactctaaagggtc

SEQ ID NO: 124027 - DNA, 472 bp, Zea Mays
gttatgcgatcacgtgtccaatctgtggtgctggtcgctagcggctgtacgagggcgctacagcggcaatcaccagcactaatgatacgcacgtgaaacgtgtatgggtggcgatggctcgaggtttgatggatagggaactctcggggtatgtcgccgctgggatttatagccatggcgaggggcaatcgggtctgagagcagagaggggtgagaaattagagctggactccatggcgttgcgcggtcgagtttggcgcccacggacggagttgatggtggtggtgggtttatatgctccaggaaggcagagtccgcggaggttgcaaatcccgaccatagcgcgatttgggagagaatctgttgcggacaacagaggcgagaggaaaacccggcggaaggtgaggcctccatggatttggtcgcaacagctcgatccggccgtatccagtcgtcctccgagcacccctgg

SEQ ID NO: 124028 - DNA, 892 bp, Zea Mays
gaggtgcatgcataggaaacttgggagcggtgaaaaaaaatacctctccattatacatgttttagtttatatacatgcttcatgctattttatcctattttcctaataaaaataataaataaaatcaagcatggtttgtgttgcgatttctactttaattaattatttctagtcgcaaataattaatagaaaaaatgtgtgcttaaatatgagaacatttttttacaccagatgtgttatgtttatggattaaatctggtattatttttctgcttttatttccgtagtaaataattagcagaaagatatgaaggctatattatgtattcttaaatcgctctaaatatttatattgtgttgagcttttaaactcacgatgagcgattaaattgtatagtgggtactcggacacgccgatcaggctgcgttattaatcggctgagttatggcatcacctatgcattggctgcgccctggcaacacgacgcagtatttgtgtcgtacgaacttggctgcgtcatgtgattgttatgtagcactctcgttcattcggacagcacccgttgagtcggcccgccatcactgagtcgcgtatttttcgcatgccctgtaggcactgtctatctgccgtgatcattgagccacaattgcgcctgttgcgcacgttgcgtggacttatcatgtaccccgattaccgagtcataattgtgcctgttgcgcttattacgaaggcttgttatgttgtcgtggccctgatggccgctcacgcgttgacgccagatacgctagagcttatactcgcgtggattatggtgggttgttcaagcccctaaagtcacattatgcgcaaccttcgtaaacaattttgtttagctctatattttatttgctt

SEQ ID NO: 124029 - DNA, 448 bp, Zea Mays
aagaaagacaaaacttagagagtttaagtgccacttaaaccctagaacacttaaaaccctaatagagaccctagaaaccctaattagtgctttataagatgacacctatttctatgcacttttggaccaaagtgtatatatcaaagtggtagagtaacaaaaattaagcaacttttacatttggagatttccaagttttgtggaacaaattggagtaaattgcaaaagatcccaaaattacccctatacttaaccgtgcaatgcagtgttaactagccaaattcaagacctaatatctcctgatctatgtggattttgccatgggtcactacaacaaatttgtagagttactatagtagtccaagtttgattgagccctagagctgtacagaaattggagcaaaatggcctagaagttgggatgtcagtcgtgtgttggtctgaaagt

SEQ ID NO: 124030 - DNA, 374 bp, Zea Mays
caggaacatgcttcgccatcatatctacaggattattatgagtactgatctggcatacctttaccaaacctttccaatgatatcacgaacgaagtgataacgatgatcaatatacttggatttctcagtaatcatctgttctttggtgagataaatagcactatggctatcacaatgaatggtagtacaagacttaatttcacatagctctgaatatatacctttcaaccataaggcttccttagtaacttctgcaatcgccatatactcagcttctgtggtagacaaagcaacaatatcctgtaaacgagctttccaactcacagcacaatctccaacggtaaagacataacctgaaagtgatctcctccgat

SEQ ID NO: 124031 - DNA, 373 bp, Zea Mays
aacatgcgagggtccggcttccgactcagcaggattcgtaggctcactggggtgcagttgcgaatataatatatgaacctcttcatgtaagttattgcaatatgtctgcaggtcttcgacggccaagttgagctcggctattcgagcttgagctttgtgctccttgtcccatgcaagcgaacgggattgaacaacccagtcgagtgccaaatcccggtccgcgaactgatctcgcagatggcggacatctcttcttaactcatttatgcggtcgccatatacgacccagatagccgtcctgcggcggagttccgcttggagccgacttacttcagcttcaagatcccctataggatcattgcttccgctacta

SEQ ID NO: 124032 - DNA, 373 bp, Zea Mays
tctgactcgacccacaccgagccgatggctattatggctggacaagagcttggcaaagcggtggagattcggaagcctgaaggtgctcgcccaaagcgtccacgccgagttagccgcccgactacccctgttgaggaaaagaagaaaaagaggcggcttcggtgactgtcatgcttggaccagggtgccggtccttctgctctagttcgtgatgaagtatcagcagaggtccttcctgaggttgatgccaagggctgtgatcatgcacaagctgctatctatatatttgatgaagatgaagaagaagaagaggaagaagtcccgctgatccgtaagaacagccgacattacagaagtagtgagggggtagtga

SEQ ID NO: 124033 - DNA, 738 bp, Zea Mays
gtatgaaccatgacattaaaaatgtggccatgtggccatatatgatgcaccgataatttagttcagtggtatggactagaccttctcaagtagtgggtaatgttcgagaaagagaaatcaggtagaaacacgtgcagattttcctgaacgtggatataaaccctctttgggaatttgcatgcggggcactcctgtacagaagatacaatttcaagtggagcatgcgagcaccggaaacattactaaaacatgtgtcactcccaaccgcctgcaatctcagttagtggtactgcactgtaagcactatagcataccaaaatagggtgctcagccagtcagccaaaccatccagatgtggtagcgacttgaacctaggtctcgaccatggacgctgaaacaaaaggatcgcggcttcaatggaggcactattttcgttcagaaagcaaagggacaatagaggcatcaacactgtcaatttctgagtgcacttaacagctaccacaacatgtcccatgtctggcccttcgctttgacccagccccaaattaacatggggtcctcatgcctctttcctgctctgctatacactgctgactgttcggtatggctataacgtgtagtgtccaatccaagaactgaaagcgcactatgcctgtctgactccggcatgcaccaaacacttggccccatcagaatctgatccagaacatatgcacgtagcacctcatggccttgtcc

SEQ ID NO: 124034 - DNA, 355 bp, Zea Mays
gagaagatcttacgcatctaaaagtaacatgagagccaaggttttacacctaaaccataagccttagaaagcattgatgatgtatactcctatttgagggggctagtgtttggttcccctgactaaagttttgtgtcaaatcaaatgttaattgtacatgggtttatgggttagtgggcaataaggccatttaactaaagattatttgctcaagagaaactggacaggggactcatcatgtagtttctgtccccaagttgaaacagttgatcaccttttctttacttgtctagttgttaaagtgatatggggagtggtggccaagtgccatgacacaacttatgtgcatggaaac

SEQ ID NO: 124035 - DNA, 734 bp, Zea Mays
cggtcaacatagagaggtataaggtgccaaagaagactgcaaagcgagctatgagtgaggcaaagagtcgagcctatgataatctttaccgaagaccaagtagaaaggaaggggagaagaatgactataagatgactaggatccgggaaaggaagacgagggacctcaaccaagttaaatgcattaaggatgagatggatcaactcttggtgaaaggacatgacatcaaacaaagttgacagaagtattttgacaatcttttcaatgctaagaatgagagtatggacaccaaattggatgactcctttgatgatttaaatagatgctttatacgcaggatccaagaatcagaggtcaaagaagttttaaagaggatgaaagggggcaaggcgatgggcgaatggtatcccaatagatgtgtggaaatgccttggggatattggtgtttggctaaccaagttgttcaaccatatttttcgatcaaacaagatgcccgatgagtggaggaggagtacattagttccaatcttcaagaataagggagatattcaaagttgtaccaaatattgagggattaagctcatgagccacactgtgaaactatgggagagagttattaagcagcgcctaagaggaatgacatatcaccatgaaccaatttggattcatgcctggaaggtcaaccatggaagcaatttttttaataagataggtcatggagcggtataaggagc

SEQ ID NO: 124036 - DNA, 448 bp, Zea Mays
aaagtactaaagagctgagtgagttgaaagaagaacaaggggatgagagtgtgttagcaatttctatggttgttgttatgggagtgaaggcaacataactattaggttgtgggcatcagtatactatcagcaagtgttggccctagttgattcaaggagctctgccagtttcatgagaaatcaactgatgaagtctatgctaggggtgcaaactttgtctaaactagttcaggtaagggtggatgatggaggcaaaatgtggagtaaatacgtggcacccaattgcaaaatggatgtgtggaggggtgacttttagtacacacttcaagatattagctccgggaggctatgatctaattatgggtatggacccaaaaatggatggagttaaatataatggtagaaccgttcatttgcaaggggtatgccatagttgcaatcctatcca

SEQ ID NO: 124037 - DNA, 303 bp, Zea Mays
tttattagtgtgcctttgtttgaattatggatgagcatcttttggtgttgttattctccgtggagtttcttgccagagagtgaacggttttatgcttttgtagtctagtgattaggtcaaacttagctgtgtattatatacatatgcatctcgatcaatcctggcccacgtactatctattttcggcacgtatacattgcttgtcttcatcgaccagtatacactagctagctagtacactactgcaacgaggcctcaactggccggatgcacacttggcgccctccgatccatagaactgct

SEQ ID NO: 124038 - DNA, 408 bp, Zea Mays
tgctaacagagcaatcgacttaagtcggcaacgacttaaggcggtgcaacatgctcacgcttacttaactcggggtgaccactatgccctgctgacggagcaatcgacttaagtcggcaacgacttaaggcggtgcaacatgctcacgcttacttaactcggggtgaccactatgccctgctaacggagcaatcgacttaagtcggcaacgacttaaggcgatgcaacatgctcacgcttactcaactcagagtaaccactatgccctgctaacggagcaatcggcttaagtcggcaacgacttaaggcggtgcaacatgctcacgcttacttaacttggggtgaccactatgccctactaacaaaagcgatcgattcaagtcagcaacgacttaagacgatttcaca

SEQ ID NO: 124039 - DNA, 405 bp, Zea Mays
aacaagaggagtttattcgactaaaacaaggagatactgtgatgcagtatctcaacaagtttaatcatttatccaaatatgctattgaccaagtaaacactgacctgaagaagaagatttgcttcatgagaggactcaacgaccggctccaacagaaaatggccacctgcctagatattacttatagcagagctacgagcacgacgctggcagtagaagccaagaacacaggccaaggaaaatcaaagggatttggaggtgacaggtctaattagggacctgagaagcgaaccaggttggtaatccgaccttttaatcagaatcgttcttcgcctcgtccaccctcctacccgttcaaacagcctgttttcgttcgtcctaccactgcccccacttctacaaatc

SEQ ID NO: 124040 - DNA, 904 bp, Zea Mays
cagaaatccttgaagtcttggctgtcaaactttttgccgttgtcgactgtgagttcggacgggactccgaagcggcagacaatgttttgccagaagaacttttgggtggtcttcgacgttactgtggatactgctctggcctcgatccacttggtgaggtattcaacgacgacgaaggtgaatttgaggttcccttgagccgtaggcagaggtccgataatatccagcccccagcgttgaagtggccatgtatgggcgattagtttggtgaattgcgaagggttgcttgagcgaggggaaaacttttggcatgcttcacaagacctcgcgactcgattcgtagtacagattattgtgggccagtagaatccttaacggatcaccttggcagtgagggccctaggtcctgagtgggagccgcaagtttcgctgtggacttcgtgaaggatttgaatgccttcggtttcagtcacgcactttagcatgggctgactgatccccttcttgtatagctggcccccgagtagtgtgaagtcccggcttcagtgtttgaggcatttggcctcattgatatcacttggatggtaatggccttgcagatacaaagttattggggcccgccaatcttcagccatgatgagattgacaatgcgatggccttcggcgtcattagttgtttgtaagccttctggtttgcggacagctggtgtgtcgatgacgtggtagaacacgtcggagggaaaggccgcctcacctttggccgctgccttagccaacgcgtcggcctcttcattcttggtgaggtccacatgctgtagggtgaagcccttgaattgtttctcgagattgcggacagctgtgagatattgcatgagcgcggggtcttttgctgagtattcttttt

SEQ ID NO: 124041 - DNA, 518 bp, Zea Mays
gttcggaggcagtgctacccgccgacctcaactttggggcaccgaggctggtcttcgaaagcatagatgaagcagaaactaccaggctagaggatattgatgtgctggaggaagagcgattgaacacagtaattcagtcagccagataccagcagaccttgaggcgctatcatgataaagccatacaacaccgatcctttgtagtgggagacttggtccttcgccgaactctaataggggaaggacagcacaagttgtcaccactatgggaagggccattcgttgtatcagaggtcactcggccgggatcataccggcttactcaaatggatggcacggaagtggggaattcatggaacatagagcatcttagaaagttttacccttagcaaggcctcaaaagctaccggagcaacattgtactctgtaattggagaatccatcatcattaaagttttcattttcaaaggcattcaaactcttgactatcagctgactttgattcaattggacttgtt

SEQ ID NO: 124042 - DNA, 372 bp, Zea Mays
taaatatttatattgtcaaataaaagcaccagcaatggtacctccatgttcatgtttataattatctgtgattcttgcatatttcaattactatacttatttgttaaggttaagaagtattatcatgtgacctgccttttgtccgtctgtactacttgttcgtagatgtgcatgcttgtccctcttgcactgcttgtctgttacctgcaacaatctttgccaaacggacacagggaacctatgccccgctggactgcactacacgtgggacaggtaatgcaggtattgcccccgctggttgtggctggccggtgtgcaattcaccaggctgccaaacgagcccttaggatgcaccgacaagtgtatcaggtg

SEQ ID NO: 124043 - DNA, 432 bp, Zea Mays
tcattccgaaggttgaaccaatgtaaggtgtgatgccctcgctgtacgtgtgtaactatagtttgtatgatgaggctgtgcgccttcgcacatccggctatgtccataggggcgttgcgcacttggtctagcacatttattatgtcggtccggcttcacctgtagtcggtctttccacggacagtttcttggtgtagacttttgcacggatgtaatgcgcctgcgattttgcgcgcttgttgtgctagtccggctgcacccttaggcgacttttgcgcggatagtcttttgaagaagacttcgattttgcgcacttgttgtgctagtctagctgcacccttaggcgactttttgcatggatagtcttttgaggaagacttcgattttgcgcacgtgttgtgctagtccggctgcacccttaggcgacttttg

SEQ ID NO: 124044 - DNA, 647 bp, Zea Mays
ctctacaaccattcattcgtgttcctacgctcccattatctatttccattcatcatgcttcactctacacccaaacacaagccactcactcaagaaccaaacaaaactagaacagcggtaccgaggacaagagcatttctatcagaacctagaagagtgccacttcattcaagtaggctctagaaccaaacgctaacttatctccacacatttttcagggaagataggcaatcactgcaacagtcgaattcaggaacatagtgttttccacgccaaagaaaagatcaaatgtttcgctaaagaatcagcaagcattcaggacggctcagttcaacaaattttcactcattcaaactgagcaatttgtttcaaagcaaaaacatgatatatttcaaacagtcgttaggctctcacgataatgaataaaagtattaacatagttatttaaaattgctagtcctcagtaacaggcaagcataacaggggctaaacaagggtttaggctaacattagccattggaaacataattcgacgccaacaagttacctgcataagcatgtttgatgtactagcaaactgtaactcgataacaaggaaaacaagaacagaacatacaaaaacttaacatacacaaccatagaacgtg

SEQ ID NO: 124045 - DNA, 448 bp, Zea Mays
cttcttcctcatctggtgcgagtgcgtcgtcagccgatccattgtctgaggataccttgaatgatttggtggcaacagagttgcagccgggccacaccgtggagttcggcacttcgaggatctcctcggttctcgtgcaggagatgcagcagcttggatactttggtgacggtgtcgggagggttccgggcatagaagagatcccagagcctgagggcgaattggttgtgtttgaggcatttttcattgccggccttcgtctcccggcgcatcgtttcgtggcggaggttttgtggaggttcgacgtgtaggtccaccagttgacacctaatgtcgtggttgccctggcgaagtatatttgggtggttgcttcgtacggcggtctgccgtctgcggaggtctttgccaagaactattgtctgcactggcaaaagaggaaaataggaaa

SEQ ID NO: 124046 - DNA, 621 bp, Zea Mays
tggagaaggcgattccgggtctctgcggtggagaaggtgaatgcgacggcggtggaacgacgggggggggggggatctctatgggttcgacaaccgcggtggagaagaagttcacggcggcgattaatctggggttcggcagccgcagtggagaagaagcagacgacggcgattgagctagggttcggtcgccgcgagcgttacgggtgagttgagctggaaaaaatgcgtcctcggttgctggattcgtggggccgatacacaaaaaatgctggtgaaatcaatacgaaggcccatggaccgacacgtggattactgtatcgtaaacggacacataagacatcgtattatcaatatttatgtggggactagtacggctgcccagattgcgggaacacaatcttctcgtgggcccggatgcccgaaacatgcgcatacccaaaagtgtgtaaatcgtaacacgaatgagcataacacgtagttataattgacgtaagcaggtagtacagtgagccaaaaggtctgcgcacctggtcggtgcggccgtgcggggcggtccgcacacctggtcggtttctggtcggggcttccaccagttagagagagcccagggctctaaat

SEQ ID NO: 124047 - DNA, 458 bp, Zea Mays
tcatccaaataaaagtcaaatgtctactcatcggcctttggaattacttcacatggatttatttgggccaacatcgtttgtgagtatcggcggtaattcctattgccttgtgattgtggatgattattctagattcacttgggtttactttcttcgggataaatctaatgtgtttgaaacattcaagtcatttgctatattggctcaaaaccaatttgattttgatatcaagaaagttagaagtgacaatgagtatgaattcaaaaatgctagaattgatgaatattgtgatgacaagggtattaaacatgaattttcttccaaatatactccggaacaaaatggtattgttgaaagaaagaataggactctcattgatatggctaggtctatgttagccgaatacaatgtgtcggattcttattgggccgaagcaataaacaccgcatgtcactcat

SEQ ID NO: 124048 - DNA, 321 bp, Zea Mays
cgcaatgagtacatcaacaataggtacgagcaactacatgatccagttaaatataatcagttgcaggttgatcttatccaccatcactaggcgtggcttggatcgggagctacttaagtatgtagtttatgtttctaccatcaataaaaggtcgtagtgtcatgtgtaatgtcgtaggttctgtttgtcccaagctactatgtgtactgcaaacagatgaacttcttcacattacttgttcatcaatgtgtcatgctataatgcagctactgcaatatgattaagcaagtctactattattcgagaagcactacaatgcgc

SEQ ID NO: 124049 - DNA, 1347 bp, Zea Mays
accccctctagcttcaaacaatacggaacaggccaatgcactattcctgagagtcgcaagacatcgcaaaatccccctcacctccgttcaattcacaacttcacatccccgagcctcaccggtcaccgcacgctccgacgagccagagtccctggacacggcgggctatgacccggacactacccaaaacctcgttacaacgtgttccccgcgacgacgaactctctggaactaggaaacagacagcaaaaagtccacaaggatctgaccacggacccagcagggaaaggactcggtgagtggtactccggcgaggccggcacagtagatctggggtttagaactcgaagagctttgcgggctcacagcaaggatgatgctcgcgccaaaaggacgggagaaacacgaaggtaaccagtcgacagggaacagcagcacggcgacgatgtctggcgacgagcccaccgttccagttcactacaagcagtagagctcaaaagggaaactccgtgagcatcacatgcactaagtgatcctggaacacaaacatatcaaccgagaaacactttgagaagggctgtccacgaggagatgaagagccggccggcgtgatcaccagaatggtggacaacgaagacgacgacgtggggcgagttcaggtaggatgagcggcacaacaaagttcactacgagcacggggacatggatggataaatcactctctggttaaggatacgagtcatgagaaggcggggagaacactactacaccggcggccacggtaacggaaagggcacggtgaacatgcagtgtttgcccatctcactatgcacacacagagaggctaaaggtttcatgaaactggacacgcgacctcataaccgtagcacacgcaggaccaaaatcacagcagggcagtaactgattgacagagaagcaggcagacagcttagtcaccactaggagataagctgcagacttctctagcctcagatatttgagtgctcaaaacttatccttacccacaaatgccaatgcctgtttcacttacccaaactgaccagaacagcaagggaacacagtggttgagatccttccatttctccacaacctgaactctcattagttacctacaccgagcctttcatttgcccacattggcttactgtcaaacaccacccaaccacagttacaaagtcccagctgaatccagggagtgagaagctttaaaacaccccgaactccagatctccaaactgaattcgagcagactgaaccaaagtttcagccacctgaactaacttgacgcccaactgaacccccatcttttccccacttttatcacac

SEQ ID NO: 124050 - DNA, 444 bp, Zea Mays
ctcgaaatccgtgaccttcttctgtctctgtctgtcgaacctacaaaagttagaaacatatattagtaactcattcaatatttgaattattagttagaataacaagtgcatgtagtcactcacttatgaagtcctattgaagtcgagaatggctccaccggaaactcctgtcgcaatttgaactgtcgagcaactctatggggcaagtggtactcaacagcataaaaacatatgaggggacacctcattaggtagaggtcctcgtctattgagcacatgttgctcaactgtatgctggcgaaatatggatcaagatacgattgccaggtcacctgcaaaagttttacaaagcacatctaagtttatagtcattttaccaactgtttaaggaaaaagataaaagtagacaactcaccatcgaaggagtaagtgcgtcgagctcgt

SEQ ID NO: 124051 - DNA, 454 bp, Zea Mays
tagaccaccctcactggaatcgtcggtggtctccttcggcatatcacagctctccataagtggccataccctgaaggctatgtgctcttgaatcaaatccttcgtgccaatgaaggcacatgcagtgctgaagaccttctgacaggcttcaacatcgccatcaatttccaccttcggccttcggaggccgaagcgagaccagatggggcgctgaatgattcctttgacatcttcccttgcctttaaatcatttttaatgtaaagccactcctccatccaggacctgggccaccttttacggaatgttggcactgggtggcttgcattagggtaagcaataaatccataacaaccgaagttgttgtggtactgttccttgccagtaaccttcgtctcatataaaagctcgtgcatactggagaagcacttcgcgcttggctctagcccctgactc

SEQ ID NO: 124052 - DNA, 583 bp, Zea Mays
cgacaaccttggtcggatatgcaacgcccatgctgctcatgctgatcggagcgacgacggagcgatggatcccaagtgcatcgagttggctcggctcgcatctatcgccgtggactccgccaagaccggggaaattgtgagaatgccaccagccctttcgccaaaagagtaccccgacttcatggggaaggaggacaccatctcttacagatccgaaaagatccttgggaggctctaccggtcagtcctaggggaaaatgacgacgattttctgtcacgagacgcatgcatttcagatgagattcgatacgacgccgacctagaagtccttggcgcctcagactttcttcaggatgcttggcgatgcaggtgcctgtacgaagcccgactgaatgccctgctcgatcaatacgatgtgcgcagtgaggctgagctcgtgacaggggagatatggtcacttgctggatgtagcaagaagtatctgcatcaattaaaagagaggatcaactatgcgtactccaaactccaccaagagttccggagcatctttgagagcattgatgcctctactgacaacaaaaac

SEQ ID NO: 124053 - DNA, 478 bp, Zea Mays
cctgaatggagccagcattagtttccttcggcatttcccattcatttgtaagaggccatactttgaaagcgatgtgttcctgaaccaagtccctggtaccgataaaggtacatacggtgttgaagaccattaggcactcttacacttcattcccaattgcgattgatggtcttctaatgccgaagcgcgaccatatgggacgttgaatgatgcccctcacatcctccctctaattcagatcattctttacgtaaaaccattgcttcatccaagagcccggccatttcatctgaaatgtaggtacatgataatttgccttagagcggggcacgaagctgtagcagccgaagttgttgtggtattgttcttttttcggttgccttcgtctggtaagataactcgtgaatattgcagaagcatctagcatccggctctagcccctgactcttcatagcccatataaaaacccccactttga

SEQ ID NO: 124054 - DNA, 469 bp, Zea Mays
ggagaatagtgcctcagttgatgatccacgcaattccgatgttcgccgccgggaagtcgggaggcaccgcccacacctgtcgtgtggagaatatgggaggaagcgttgatttttcggtggacggctcagattgaatgtgtgttccccttcgcaggtttgatctgagcggttggatccgatctgatggccctggtgggatcacgactatttaaaatatgggtcgtagatctcagaacgtacggttctgattagatcatgtgtaacgtttcggccaggatctatgttgatcgtagatttttgatcgggtggttgtaagctcatgttgctcaagatccattttggaaggtaggatcgggatccattgacccagactgcgtaccgattcataaccacgccgctctaatctgggccactaatatctgatcggttggctcacaacaaaagttaccctttcggtctagtaaaattg

SEQ ID NO: 124055 - DNA, 443 bp, Zea Mays
gtcttgccatacaatacaagaacccctgaaaatcggactaacaaataaatcagctgaaaggatcaaagggttcgagggaggctccttaatagcttcaggaaattcataaacgtgttcgctcttcttgtgtcagaggccggaaagaggctaatgctgtctctgtaataaaaatcagcacatgggctcagaacatccaagccccgtcatacatatctcgacggtgtgatctgacatgaaaaaagtcaatccgtcgtttgcttagctttaatccgaaacgacttctactgtttaatatagtgttttatcttttattcttttatagattacagctaaagctagcagtctgaacacctgactttaatccgaagtgaacagtttagaaaacaaagttagttaattgggtcctctccttgcaggaaaaactctatgcagtgagctaaaat

SEQ ID NO: 124056 - DNA, 367 bp, Zea Mays
caccaagctatctttctggcaccttcatcctcaaaggaggacggaaaggaacccaccatcacgacaactcctttctaccccgacatccttttcatcagggggagattggaatcatctcccatctccgatgacaagccgaccgtgcagggggaagaacctccccagcgtgaagcacggcgacgaaggaacgagcgctggaatattcggcgacatcacgaggctggggagcgggacccagcatagcccgtatctcgggatgaagtttcagaggtaggagaaacccttgacgagcgggtataccgagaaaggcagaattctcgccgacgtgatcaccggcaagctcaggaccgagatcgtgaacaagccg

SEQ ID NO: 124057 - DNA, 547 bp, Zea Mays
gtaacaaatatttttgttattttattactattattattaactttttgggtcgtgttctaacgaagatcatttcgacagagtatattattaagcaaggttctaaagatgcaacaagatctggaggaagagaaaaacaaagctgtcattcaagatttggctgaaaaagttgaaaatcacgaagccaatctgaaaaagaaagacttcgcaattcaagatcttgaactcatggtcaaagagcacgaaggtgcattagaaaagaaggattttgttattcagaccatggagggctctttggctgaagtccaaactgaaaatgacaaattaaagaatgaactgctccttcagtcagaaaaattcgagcaagaaaagaaattttttgaagcaagcctgaaggctgaagtggataaatactcaaatttacagaaatcctttacagaacttcaggagaaatgcttaagcttcggcatccgatgtgtgcagcggctgaaggacgtgtttcactctgtcggagctagctcttcgaaatttacaccttcagctgaaaacc

SEQ ID NO: 124058 - DNA, 346 bp, Zea Mays
aaaaatgatattttatggttgtgtttgagtatatgggggaatttagaggagaccgatgtgggagagggaaagtaggagtggaatcttggtgtgtggtgcgatagtgggatatagaggacggaatttagagaaaactgttgcactcagtctagtgggatgcagtgcttggtgcctcgtcttcgacaactactagtccaaggtgagacatcacctatccacaacaacagccaaacctcgcactatagtttgacgttagtggtgcgagggttgtagagacctttaacagcttcgataattaatgacgatacatgattattatgactgccatatgttttatagatttaat

SEQ ID NO: 124059 - DNA, 372 bp, Zea Mays
tcctgagagagacaagcgaaggagagtggatcatctcaggagataaggtcaaataaatcgtctcgggatgtgaccaagtggtcccaaacacaccatccacaccattagcattatggacacctgcacctacttatacctctatgtatccacctccttatgcattcgcatacccaactccaccttatatgcctaaccagatgtggggagcacctatgttgcacacataatatccatatggaatgccacgggcatgggggccatcccaaacttcagtatttgaccgattgagtactcctaaatctggtccccaagcacataatcaacaagaatgccgaaatcctcgattacaaaggttgactaatccaatagagg

SEQ ID NO: 124060 - DNA, 624 bp, Zea Mays
gaaaggcaattggctgttgggatcgatgggaggaataaccgcagcggcagaattctgactcttccgcttgggcgccatcacaatctcgtcggcggactgagcggaagcaaaatcaaaggaaagcagaggaggttcggaggcaaaaagtgaggctagggcttagaatgcagaggtgtgcgacgacatgatacaaagggggttttcccgggtcggacactgtttctaaaaagtgcttagtcatcactcggtcattatttctaaaaacgccgacgtggcctgatacgactcggctgttacttctaaaacactgacgtcgccagttatcactcggccgttatttccaaaacgctgacgtggctcgaaacgactcggttgttacttctaaaacgctgacgtcgccagtcatcactcggtcgttatttctaaaatgccgacgcggctcagcagggctcggctgctacaatctaaaatgccgacgtcgccaagaaccattcggctgttacctctgaagacaccggcagtaacttagccattctttctctacgtaaatgcaggcggaattaaaatacgacacaacaattacaagtatttactcgagcgttatctcggagaacaacggctgcg

SEQ ID NO: 124061 - DNA, 523 bp, Zea Mays
aagtctggttggcttcatatcacatgctcggtgctgcacggacttggtacaaccagctcctgcgtgatgaaccacccctgtcatgggggcgtttcaagcagctcatcgggataacagtggaggattatcaggagaggttctgggatttactggcccacaccacgccactcactccggaacagaaggtacaactcttcacggcaggtcttccagagcgtatcaagatcgatgtcgaacttatggctcctcgggatctcaatcatgcattaagtttggcaagagcatatgaacgaagggctcaggcactcgacgtccaccagacatcaactactagcaagccgtcgaggcctccccagtggccgtcatttcctattccagcacaacagtccactataacagtagcagcaccaaccaacacgggggcacaacgtccatttaagaagctcacccccggcgagatggctgagcgccgcaaacagggactgtgttacaactgtgacgaacaatacgttcgtggtcatcg

SEQ ID NO: 124062 - DNA, 346 bp, Zea Mays
gtcagttctggcatggcattctagccccttttaacctaggacaccttattcctagtcctgtggaggcctcctttgtagagtggtagggaggagtgatcaatgagatccacaaagacaagaagggcttcaacagtgctatcatccttggggcatggtgcctttggcttcataggaaccgagtgatcttccatgaggagtccccttccattgcgaaggtgttgagatccttccttgatgagctcgcttgctgggttctagctggagccaagcagctggggagcattggtttggttgaccgtgtttctgctttgtagatgtcgggtcctgcgtggcaggtctccttgtc

SEQ ID NO: 124063 - DNA, 350 bp, Zea Mays
ataagatgcaatggcttaatgattgtggagcgttgcgtgttagccacgtggtgaatgttcctttttctgttgggaagtacaatgatcatgtggaatgtattgtggtccctatgcaagcatgtcaattgctgctaggtcgaccttggttatatgatcatgatgtctagatttttggaagaaccaacaagttgtctttcttgtacaaaggagagcgaatctctttgtttccattgacactggaggaaattctgaaggatgatctaaagaagaaacaacgagagagcgagaagcacttgagagtgatccacaaaaatagtaaggaagagtttccaaagccaaataaaactcca

SEQ ID NO: 124064 - DNA, 708 bp, Zea Mays
agaactagcatgatactgttcatgtgggcattccaaactaaataacataagtttgacaaactaactatgtgccaactgtcaacccttagtgagtgctaaccttggggagggttccatgcattgcatattattttcacagattctattcatggctagtatgatatgtcgtcgttttgtcgctaaggtaagagaggtaagagtaggaccatggaggccggggctagttggttgtcctcatgtgtgggtcaccatgcatgttgtataaggaccgatagaatttattactgcaacttagaaaggatagtggtagcttgtcattatttttcgattaccattgtcgcatcatggggatgggctagaatgaactttttctgcaggtacactaacctcgatgcgagtagttcgtctagttgtgcgatagtgagagaacgagtatgccaccgcttattacgttaacatgaataggttgtgaggctgtaagttacgtgcatgcattggcacaatcatcatctctttcatttattgcatcgctgctctttgaagatatggtaggggtttagtctaataaccgatattttttttcttatcctaattctcacccatctaacattgtaacagattgcccgccgtaggctcaccgctcataagtctacgggaggacgtgtgcctcgtcaccagttggctgcgcgtgtttctcgtcgccgcagc

SEQ ID NO: 124065 - DNA, 370 bp, Zea Mays
ctagggatttgtttttacattaaaaatcaatttctcaattagtttccctgttatatcaaatatctggactgagcgtcatttaccagagagctccagggtaaaaatataaaaattctacagactcagactgcgcctgcccaggactgcgggttgatatgccaaaagttggaggggctctttacaaattatcttggccgaaggggtatccttcacctagagtcgtccgatcacaaccgatcggatgggattagaaccatgcgctatataacgttgcaacctgccctggcaacccgatccaatatcaacggatgagggatgtccacgcccccgatccgatcctaaccctgcacccgcgatccaacgaccaagt

SEQ ID NO: 124066 - DNA, 321 bp, Zea Mays
agagatcaatttatgcaaagccatgttcgtcaccatcgcaggtactaaacctatggtacagggatcagaggtgttggatgaggtggctcgcagctttggggtatgtattgataacatgtccatccaacattcctcaccggaggatttcctacttttcctgccggatgaggacactgcctccaggattttcaatggtggcagattattcactggacctcgtttctgcttattgttcaaaagatggtctcgtttctcgcatgcttctatgtctcgcatgtctcacttagtggatgtgcagattaggggaatccctgaacatgc

SEQ ID NO: 124067 - DNA, 735 bp, Zea Mays
ggaattcagagatcttgataaactaggacaagggtttaaatcggccgatcctttagaggagactgacataggagacggtaaaactccaaggccgacttttgtaaacaagaccctagagaccgatcctagagacgagatgatcggtctattgaaggaatattcagattgctttgcttggaattacactgagatgcctggattaagtcgagagatcgtagagcatcgactgcctattaagtccggtttcagacctttcaagcagaaagctagaacatttcgtccagatcttctcccacgaatcaaggacgaaatccaccggctgctagaagctgattttattagaccgtgcagatacgcagaatgggtctccaatattgtgccggtggagaagaaggagtcaggtaagcttagagtatgcattgattttcgcaatttaaatagagcaactcctaaagatgagtatcccatgcccatagccgacacattaatcaataatgcatcaggaaatagaattattagctttcttgatggtaatgccggatataaccagatcttcatggccgaagaggatgcgtctaaaatggcctttatatgtccaggcttcattggtttatttgaatgggttgtcatgacatttggtcttaaaaatgctagtgctacttatcagagggctatgaatttgatcttccatgagttgttaggaaacactgtggaagtctacattgatgatattgt

SEQ ID NO: 124068 - DNA, 523 bp, Zea Mays
ttcgcgcgtatgtatgagctctattcgaatgttctttgctctgaaaagattccccctgttcatggttacagaagggcctggagttgaagcacgaatcatcgaagcgcagcaaaactgagacacacgtcttacttcttcacaagtactgtcctctctattcatcatttagatgtatcatcaaattgacatagtaacctatgattcgtgcagtgaaactttgtatcgagagtgcatgtcttgatctttattttatctcactcttaatgacgtggtagcattgaaaacgacgcgataaaactaactcttatgttggccaggttcttggacgatggacatcttcgggagcccattctgctccaagcaagccgtcgcctcatgcggcggatggacggacatactcgactcctccagctgcacgaaccatatcctggaaaccggcaccgccgctctgatcaccgtcgctctcgcgctgcacctcctcgtcgtcaggattactacgaagaccagagcgtccgcacgccgc

SEQ ID NO: 124069 - DNA, 644 bp, Zea Mays
cacaaatccccctggcatttcatggcattcaacctgcagtccttctcaaggtcgggatatgtttggaatgttctggcgaacacattgaggtgctggtcgttgtcggtggtggtcggaatcgccctagcctcatgcgcaggcagctgggctcgtcggtggcgaggagtccttcctgctcacggcggtagagctcaattaaaccttttggggagcttcactaggtttagtgtgcccggttaattgaacaatggctcacctaaggtctctagccatgcacgcctacaaggttgcgagatccatcgtgggtgaactggctactccgacaaagtagagcataggttggggcttcggggagcttcacagggctctagggaagctatcgacgagttcggtttgggtggagagtggctgggatggcttggccatagtggttggggctcgggtgcgtttgtaggcggtagtgctccctgttctcatgtgatcaccagcgattaaatctcgggctcggttcataggtgggggaagagatgctactaaggggtcgaatgggatttataagcgagggcgcggcttgggtgcggtggtggccaatcatgggcatgggctaggcgcgctcccgagtgctaacccacatcgaacacatg

SEQ ID NO: 124070 - DNA, 603 bp, Zea Mays
gagaagtgaggaccctgcactagctagtttttacgaagctatggaaaggaccaatgttgaaaagattactgatgaaatttagctgggttgtctggagattctagtgacagtgaggattttgatattgagagtgacagcgatgatgccgaagatcggccatggaggccaagccatgttgtgtttgggaaatctactgttaagaagggacaaattgatgggatgaagggcaaatatttctgtgatacaactatagtgagggctggaggagagaacactgttcctcttcctaaagttgatgaaatggtagttttcaatagttttatgaaggttggtcttcggtttcctttgcataaaatgctgatcgaagtgcttaaaaggttcaagatataccttcatcagctcaccccaaaacttcaattagaattggggttttcatttaggcaatgaggagctaagggctggaaccagacgccaactgtttctgcaatatacacgaattatcttaccagacaaaggcaatggggaaggaacaatatcacaacaactttggttgttattcctttgtatactgctctgatgcgaggtgccctgtgccaacatttc

SEQ ID NO: 124071 - DNA, 276 bp, Zea Mays
cggaagaggggaccgatgatgcaattctctttttcgctcgtgcttccaagccagaaagcagtaatcgggataggcaaagccaataacaacaaaaactatattcagccttttctttttgtggacgccaaaggcaatattcatgccttcgtcttcggctttcatgtaagcccccaacaaatcatcagcggttgccttgatggcctcgagccatttgtcatttggctcaccgaattgacttctgtagcggtatgtatatttcaaataaactagacaacc

SEQ ID NO: 124072 - DNA, 578 bp, Zea Mays
cctgagtgttgttatgttgtgccacctgttcttgagatttgtagcagccccgttcttgaggcttgtgatacatgtgagatagttcatagttgctttgccctatgatgctttctttgaaaatattgaactgtatgctacacttgatgttttttgtaaaaatagatgagggttgttctttgtcgtggcaagtgattgttttgaggccagtgatgttactgtggccagttatggtgcatatggttgtttgttgctggttctttgaaaatgttcaattgtatggtacacttgatgttttattgtccaaaaaactgagggttgttcttttcagtggtaagtgattgtagtgagggagtgatagtgcatatggatgtttgttgccagtgaatagtgcatgttctttgctgtggcacttgatgttattgtccacatacatatgccagttgttcaaagctgaggactgatatatgccagctgcaggtttccacatacatatggttgtttgttccctatgccatgtatgatgatatttatgtattttttgcaaatgaacaaaaaacttgcagatgcattgaactatg

SEQ ID NO: 124073 - DNA, 505 bp, Zea Mays
agcacagtatgtggcccgatgtgacacctaccagcgaacaaaggccgaacatcagaagcctgcaggcctgcttcaacccctcccaatacccgaatggaaatgggaagaaataggcatggatttcgtcaccggactgcccagatcacaaagaggaaatgactccatttgggtaatcatcgaccgtctcaccaaagtggcccatttcattccagtaaagaccacctttggaggagcagccctcgcccgattataccttaaggagatagtcaggctacatggcattccacggaagatagtatcagatagaggaacgcagttcacttcaaaattttggaagggccttcagcaagcaatgggcaccaagctggatttcagcactgcttatcacccccagtcagatggtcaaacagaaagagtcaacaaggtccttgaagatttactcagagcctgcgtattagccttcgacagagattgggagtctagtttaccgtacgccgagttctca

SEQ ID NO: 124074 - DNA, 463 bp, Zea Mays
gaggccggcctcagcttcagaacaaactccgcctcgcccgaccttggctatgtactcccagcgaattcagcaggaggccactccttcaactgtgtcgcgcacgtctacgaatcccgaagcaggctcgatcacggcatcaggaagacttctgcctcgctcgagcacggcttcggcctcaatattatcaatgaaagggcgcccaatgtcaccggaaacagaggagctgacgtattatctaggggctttttgccatactcagcactgcaccaaccactacggcatgggcaacttccccatcaggtaggctcaggtacgtgaccgagccctcggccttggcctcagctctctgcatagtcaaatatgcaaatacaggaaccgaacatctccatcgggcacaagtaaacaacaggtttaaaatccataccaaaggctataccagctacaggggctcggctacacctcc

SEQ ID NO: 124075 - DNA, 416 bp, Zea Mays
tggacattggaccgctttctattcccctcctgcacccaccacattcacgcaagaactgattcgcactagggtttcaccctcgctcatctcgcgccgccaggatccccacgactagcgccaccgcctgacgaatctgcaccatacgagcttcggccatccccgcggtatcttcttctccctctcccatgccctgatttgtagttccctaggaactcgctctcgtttcaacattcgttctaccgagttgttcgtccatgtatcacctaatctgtggcctctagatcggttaatctcgatgcattcttagttcaatcgtcggtttagggtttcattttaggctgtgattcgattttccgagtattgtgctctgtctcggttgaacactctcccgactttagatcctccatcagtatctg

SEQ ID NO: 124076 - DNA, 429 bp, Zea Mays
tttaactaagtctgaatttcagtgtaatgggttcatctttggggcctggtaacttccaaacaaaaaaggattttgccccaggtcaccacatcaattttgtagatctatcaaaggtgaacaactttgtttaagggattaaacattgttgttatgaagaatttggagataaatacacccaaagttaggctttcaggctgtttgaagtctgaatttggactgccagtgggtttgagcaaactttgagctcaattctaagcatgatctagtaagaatttgttttggaatactataacaaagatgaagatggtatgttagactaccactttgctacagagccttgcattggttgccaagcgaatttaggagaaaatccagcttcaggtcgctctgtcaggtcgactgaagatggatgccattgtacagtgatct

SEQ ID NO: 124077 - DNA, 618 bp, Zea Mays
tccccaaagcgtgtcgaacaatgtattccaagtcaccatggggaggtgcttcgggagcaggagatttagatttttcaggaacactctcttccaccagccctattggcacagtttttgaaggtttggctttggcaagagcattagccgtgattgcagtaactgtttctcttgcatctttcatatttctctccggatacttcggcagaagcagaaactcgcgctttcatggattccaagacagcatctaaaacgctagtcattcttcttttccttggagtcactgttatagtactcgatggcttcgacagcctgtaacaactagtgggctcatcacctttggctgttctgctgccttttctaattccggctctttgaccgggcctgcactagcttcaatcggcatcgcaggagctgtttctatggctaaggtgcagcctctgcactttcaataagctttggcacatcgaccgtcccaataggcttcggcctacgtgtcaagacctttgccctcttaggcttcggcgcactagaagaggttgaagcagtaactttccttttcccccttggcttcgaagaggaaaatagtaatcggggtaaacaaacccaataacatcgaaa

SEQ ID NO: 124078 - DNA, 404 bp, Zea Mays
ttcatagctcgagagggtgcattagagacacaatatggatttcttgttttggtatacatagagtaccaagacaaagtaatcatgtgaacatggactaaacaaaactatcatgcttgcacataggttaatcattaaaaaccacatagcatgacttacaaaaagatacatgtttatccacatacaccaagagagttaatcatggtggatatatcaaatgaaaagctacccattgaatgattcaagagatataacctataaagcacacaatcacgattgagcaagcatgattatgatcttggaaatcatggatcactaattgaaagatattcaacacaagcaatctcaaagtataactactccaaggataggtatagcaggacaatccaacttagaagcaatactga

SEQ ID NO: 124079 - DNA, 338 bp, Zea Mays
cgcacgtttcctaacaggtggaacactcaccatatgtgttttgtgcagctaccagagtatatgttgccctcacaaaaagtttgtgttgttccaacaactagattagacatgggggctatatatatcactccaaccgccattttgagtagtgtgggagctaggaaacaatactagagagtccagacttcattcctatagctctagacacccaagtgattagagaatcactcaatgattagattaaagtgatttttgtgaagggcttagattagttagactgctgttataatgctttctctaggttaacccctagttgatagaagtgaggctagacacac

SEQ ID NO: 124080 - DNA, 460 bp, Zea Mays
gttcttaatggtgacctcattcagagctcgataatcgatacacatccttttggtgccatctttcttctccacgaataggacaggggcggcccaaggcgaggtgcttggccggatgtaacctttctctgacaactcgtcaatctgcttcttaagctcaaccaactctggtccagatactctgtaagctctcttaaagatgggggcggttccaggaagaagctctatagcaaactcaactttccgctctggtggcatacctagtaagtcctttggaaacacatctgggaattcggacacaaccctgatactctcaattgggtctgcttcactgttttcgacagccatctgataacaacttcttttcttcggctcaggtgggactaactcggtcaccactacctctcctagcggggacaccaacttgattgttctcttatcacaactgataactgcctgatat

SEQ ID NO: 124081 - DNA, 461 bp, Zea Mays
atcagaggaatcttcagccaacatgtccagcatggcacttatttctgcgtcactcggattcaaaggcatctcgaaatgaacctgcctctcgtcgtcggggatttcgcaaaatgaagcaaccaaagcctcaacctcttcgggagaaggtcgctctttaaggcccaaaccgctatcaccagtaggaggatttgacacaaaactgatgaaggccttggaaggaggcagattccaggctgagtatgcaacaggagcaccaatattagacaccttgcctctgagtatcatctcaagccagctcaccaaatccacagcaggaatccttctgttggtaacccgggttgaatcagcaaggcctcgatacagataagctggatacgctctgtcttttagtggctgaatgttcttgaaaacaaaatcggcaaccacagcctcggcagtcagacccttctccttcaacaatc

SEQ ID NO: 124082 - DNA, 1289 bp, Zea Mays
cccgggttagtcacacacagtctaacactaattaatgttaccaaaaaatgcacgcagcatatcactcaggaaacgaaggaggaagatctgcccaaaggtgttatgtcagttttactgcttaagcatcaggtaaccttttctctaatatcagttatgcagttgctatgtttatgctggaggccctattcactttcatgttcttttatgtttggaagaaaatagcattggcgtggatgctttcgaaagagaattgttcacattgtccaggtggaattttggcagatgatcaggttacttctcacttttcctaccatattcagatagcttttgattcttcttcctaccaggttcctttatgtttagcaattgacttcttgtgatacagggtcttgggaagacaatttcaacgattgcccttatacagaaggagatggttaagcagtctaggttcatgactgctggttcatacagtacaaagtttgtcccaaacagtgattatgacaatgacagtgatgttgtgattgacatggacaagaaagaaccgaaagatgaacccttgaatgagctagatggttctgcacgattgcatgtcgccagcagtcttaagctctgtgatagtaagccaaacactgctactgataaagctgaacctaagaagaaggccagagtgaggtactctgcatcaaacttgaggtcgaagactaggccagctgcaggaacattggtcgtctgccctgctagtgttcttaggcagtgggctaatgagctctctgtgaaggttatggaagacaataaattgtcagtcttggtttatcatggaagttcaaggactagagatcctaatgagttggcaacatatgatgttgttgtcaccacgtatatgactgtggcaaacgaagtacctaaagaaaattctaatgatgagcgaaagaaatgtgaaatggacggaatatgtccagaaatttccatcggcagcaaaaggaaaaagcagagcaagccaaagaagaaaaacaaacctagcaattcagaaggtggcccacttgccagggtacgatggttcagagttgtgcttgatgaagctcaaacaataaaaaattaccggactcaagtgtctagagcttgttgtggactgagggcacaaaggagatggtgcttatcaggaacacctatacaaaacaaaattgatgatctgtatagctacttctgtttcttgaagtatgaaccttactcaaaatttagtaatttcaaatatatgatcaagcaccaaattactagagattcagttcgtg

SEQ ID NO: 124083 - DNA, 382 bp, Zea Mays
ggctactgaagccaaagaacctgcgcttacgcagaagattgaagagccggttgtaatgccgaaggcatcatcggccaaattagctgagccgaaggccgataatattgaagagaaagaggtcgaaagaacaaagatattagaagttataagcccttcggcagaagtgacagtgccgaaggcacaaaaagttcttacagcgacccccaagaggaaaaggatggtcaacgtactagatgtgctggagacgataaagacttcaagctctactccagggaaaactgccgaagcttcaaaaacgcagactgagacaaaactaaccgaagtcgaagctgcaaagagccaggtcgagatcgaagctgggccttcagagcccggcagcccg

SEQ ID NO: 124084 - DNA, 639 bp, Zea Mays
atgagtctacgtctaagttttctgagtttgatgactctgggagttcggttgtgtggacggaagagtcttcggatgaggacttggattactttgcggccttggatgtggctgcagcggaggcttctccgcgtgttacggatgctgaagttttgcctggtttgagtgctgggcgtaggcggcaaagggcggtggcgaagcgtagagtgagtgaagtggatggtggtcggcttcgtgtgggcagggctggcaagcgggaattgttgtcctcgccggttgggacgagtgtaggtgagggggagttgtgaagtctttttgagggtgaggagctgaggataatgctatttaactatagggagatgggaatcattccgaaggttgaaccaatgtaaggtgtgatgccctctctgtacgtgtgtaactatagtttgtatgatgaggctgtgcgccttcgcgcatccggctatgtccataggggcgttgcgcacttggtctagcacgtttattatgtcggtctgactgcgcctgtagtcggtctttgcgcagacagtttctcgatgtagatttttgcacggatgtaatgtgccttcgattttgcgcactcgttgtgctagttcggctgcacccttaggcgacttttgc

SEQ ID NO: 124085 - DNA, 340 bp, Zea Mays
gtctgaccatctgtttgaggatggtatgctgagcttcttattacatgagtccccagtgattcttgcaattgctcccagaagcgtgccacgattggtgctcctctgtcagacacaatagtccttggtattccatgcagacggactatctggtcgatgtagaattctgcatacttctccgccctatgggtggtacatactggcaggaaatgagttgtcttagtcaatctatccacaatgacccaaatagaatcgtggtgccaggaggtattgggcaatcccacaatgaaatccatgcaaatgtcctcccatttccaagatggtatgggaaggggctgtaaag

SEQ ID NO: 124086 - DNA, 302 bp, Zea Mays
ctgatggcatgctttatgtttgcagtatttctatgtacattacaacatttgattattcatcagagcctcactttttatcatcctttactccttcaacatttgtagtttttatgatctatttggtatgatgggatcgttgggtctaaaatgacatgtatttattgatttcaatttagcacaaaatgtttgtaagtctagttgagattctattatacttgatcggctagcaaggtttgcaaacccacttattacactgcaaacccaattattacactgccaaagatttttttaatgaaaaacca

SEQ ID NO: 124087 - DNA, 644 bp, Zea Mays
tgactgataaaggcaaagacatcgtcatcggtgatcctcgcacaccgaacatatcgcaaggagggattgctcgaaaggctccagacaataagactaacaagtctgaaggcactaggggtgggctcaattgagcagtcgagcacgactttctgactcgagcatcgtggacggttcgacacctgtgcgcggacggtccggtgctcaaacaaacggtccgcttactcagccagacagtccacccatacctaggggtgttagcctccacacaaagaaaaaaagggaacataggggcaaagcaaacataacacacatggtcgactggttaaagccgaccctacttttgattaatcgctctccaaatatgctagcaagaaggccgttctacgcgatcgaccaacaaagaaaccccaatcacccactaaaacaaaacggccaaataaaacagcccgaaaggtggcacaacaagcatcatctattcatctagtaatgtcaggatacttttcacccacctactcatcgttgatatattatcatattcaaatgtggaacggtacaacgatgaacccatgggacttgcatagtccctttgtctatttaggctgggggcacctccattatataccttttgatctattgatcagatg

SEQ ID NO: 124088 - DNA, 411 bp, Zea Mays
agcaaccgcatctgcgatatcagcatctgacacaggcacatcactgaccacaaagatagacactgcatacttcaagtcctcctctgctttttccatcaaactgttccaaccaatcacacaaggttgttgatgatgcgttgtcccagtttcagacagaggggcctcgtcatttccaggttgatcagattgcccccaacccggatcagaaccaccctagaagatgacttgcgtttccgatggcgcctgcgtcgcgagcgaggcgggagggtgcccagcgaagccggcctagccgcagctccaacctccctgggtggagaatcagaaacatgtgcatccactccccctgctatcatcttgtgatgtgctggacccttctcaatgcctagaggggagattctacgccagatatag

SEQ ID NO: 124089 - DNA, 358 bp, Zea Mays
cggacgatggtgatgatgcctgctggacctggcatcttaagctttaggtaagtgtagtttgggatggtcataaacctaacgtagcatggcctctccagcatggtgtggtaggtgcctcagaaccccactacctcaaacatgaggacctcatttcggaagtcggtagcagtcccgaagccgacggacagatcaatctgcctaagggagtgtaccctctttccaggggtgatgccatgaaatggcgcagccccgaccctaatctaggaattccaatccccatgagctccaaggtgtctgcttagatgatgttgaggttgttgcctccatccatgagtaccttggtgagacgagtgtttcc

SEQ ID NO: 124090 - DNA, 371 bp, Zea Mays
tcaagaacagccaaatttggagcatgttaaaaacttttgtttcttgaagcaaatgcaaattcgaaagtcaatcttgtctcgcaactcctgtctagactcatttattcgaactcttgatagttgttatgttatccaatcggtgtccgaatccgctttctcgatagtcgatctatgttcaaatacgtagtccgaatccgcattctctagcggaatctctgttgtgcgaacctctaattaattcttatacaaatcgacttgttttctctatatcataattcatctctatctatcaagtgtattctaaagaattctagaagtttaaagcaaatactcacataaaaagataaatcctatacatgctcgaaattgct

SEQ ID NO: 124091 - DNA, 462 bp, Zea Mays
cctgcaactgagcaagaattgcagcagtatccaaatcctatggtctttgaagcataacaacatccttaacatcatctctaagaccatccacaaattttaaagtgtagtacaatggttcaaacatggactaatatgcattaagtttatctaccaattgggagaactcctctacatatgcagccactgtcccagtttgccgaacatggaacaattgccggattaacaattggtgttgatccttaccaaagtgttcaagaactaggtgcccaaattccccccaagaaatgtgaataatcctagactctactaactgaagcaagcgagcagcagggcctatgaactgcatggatgcaacattgatccacatccttgggtttaccgaatacatgagaaaataatcttcacacctagtcatccacacctaatcttcacacctagtccaccatcgaaagatagaaagtt

SEQ ID NO: 124092 - DNA, 306 bp, Zea Mays
gcctctcgtcgtcaggaatttctccgagtgaggcaaccaaagcactaacttcttcgggagaaggtcgcactctaaggcccaaactgctatcaccagcaggaggatttgacacgaaactggcaaaggcctgagaaggaggcaaattcgaggccaagtatgcaacaggagcgccgatgttcgacaccttgcctctgagtatcatctcgagccggctcaccaagtccacagcaggaattcttctgttggttacccgggttgagtcagccaagccttggtacagataagtcggatatgctctgtctttca

SEQ ID NO: 124093 - DNA, 366 bp, Zea Mays
atcctgcagacggcgcacctgtccaatccattgtcaaacagtgcacccgtgcctcgcggcgtactgtgtccatcatcccttatacgagaagcttcccctgcacgccgatgctatgcagatctcggatgtcagggttcaagaagattgctccagcagcaaacattagtggctccagtactatatccattgtgttcttgggcccacatgtcagggctcagttcccttgtacatgccccccttagctataaaaggggaggcatgcaatgttgacagggggctctcagacccaacatagactctcagctctcaagcttccacagcaatccaacacacagtggagtagggtattacgctccggcggtccga

SEQ ID NO: 124094 - DNA, 495 bp, Zea Mays
gaaagcaacaagtcaatacaaggcaaaacagactcctaagcctatcaaatgctttgagtgtggaaaagaaggacactttgcccacaactgcaaagccaaaccaccaactcccttgccaaagcactcaaggccatttgctttcaatgctcattatgttctaagaaaagtagcaaatgggaaagtcaaatttacattcctaggtccaccaagcaagagtagacctagacaaattttggttgcaaagtccttgattgagaaagttaatggtcctatgcaaaatagggccctcaaaattgaagcttgatttatttgttcatgtaggtgaactacaagaccggtggccagtgggagccattgggtaattgacagtggatgcattcaacatatgactagaaacccacagatgttcacctcacttgatgaaaatgttgatgaacaagacaaaatcacttttggggataattcaaagggaaaagttcaagggcttggcaaggt

SEQ ID NO: 124095 - DNA, 508 bp, Zea Mays
gatgtgaggaggcgagatctggaatttgttgtgggtgaccaagtccgtctcagggtatcacccactaagggagttgttcggttcggtgtctctgggaagctcagcccgagatacattggaccgttcactatcttggcccgagtgggcagcctggcttatcgcttgctactgccggattccatggcaggggtacacccggtttttcatgtctctatgttgaggaagttcttgcgggatccggaccatcagattgagatggaaccaattgcggtgcagcaggatctgactctgagtgtcgtccagtgcgtatattggaattctcggagcgtgtattgaggaagagatcaattaagtatgtcaaggtcttatggactaatcagtctgagcgcgaggctacgtgggaacttgaggagctgatgcggcagaagtacccggaacttttcattgtgggtaagtgttgttggttcattaatcttttcttttgtcattccgatagaagcgtcagaat

SEQ ID NO: 124096 - DNA, 574 bp, Zea Mays
ggctaatggaatgatactggaagcactcaggaagaaaatcttcgacaggaatgaaaagttcgcagggaagtggatcagagagtttaccttatgtggtttggagcctaagaactcaacccagtcgagctctgcatggaaacactcccttcttcatggtctatggttcggaggcagtgctacctgccgacctcaggtttggggcaccaaggctggtcttcgaaagcatagccgaagcagaagctaccaggctagaagatattgacgtgctggaggaagaacgattgaatacagtaattcagtcagctagataccagtagaccctgaggcgctatcatgataaggctatacgacatcgatcttttgtagtgggagacttggtccttcgccgaattctaacgggaaaaggacggcacaaattgtcaccgctatgggaagggccattcatggtatcagaggttactcggccaggatcatatcggcttactcaaatggatggcacggaagtggggaattcatggaatatagagcatttcaggaagttttatccttatcaagacttcaaaagctatcggag

SEQ ID NO: 124097 - DNA, 472 bp, Zea Mays
tttatttagagcctgtagagcgaagacgcggtctccatcgataagatccttcgaagtgggttcgtccacatcggggacagctgacgtaactgttcgtggggatccatgctttatttcttgtggggtcatggcctccgatccttatagaaggcggaaaggggtgaacccagtcgccctgcactcagtcgtgtttagcgcccagaccgcttcaggtaacaaatcggcccacctgcccttttttcgtcgaggagcatcttcttgacagctgtgaaaatttttccattggcgcgttccacaactctgttggactgcgggtgatatactgaggcgaaggcaagcttggtgccaatggagaagcagaaatccttgaagtcttggctgtcaaactgcttgccgttgtcaactgtgagttcggatggtactccgaagcgacaaacaatgttttgccaaaagaatttctgtgcagtctttg

SEQ ID NO: 124098 - DNA, 382 bp, Zea Mays
agttgactcaagttcgactgtgctcctaacttagaacctcgtagttcgaattaaaatttaataatgtgagttgttccattatagaattattgctgcttttgttcatgccgaagatacaatttttgctcctgtacaattctacgctcgtggctaggattataaaaatcaaggtctttctaaacgtgacgttatattttagttattaaattaggaaccaatctagtagggaagtaatcagatagaatatggataatactagtttgggtcggataagaattaattagaagccgacacattagagatctcgcttgagagtacagattcggataaaaaatttggatatatggattgaacatcgagaaattagattcggacacgactc

SEQ ID NO: 124099 - DNA, 618 bp, Zea Mays
gccactggagccggggcaattcgtggctccgtgggagcagcaggacttacagccgcggctttctccggggaaggactcgccgatggagtggtcggcgctgaaacgaagcaatgcagtaaggcgttacactccagtgctgattatggtctgacagcataatgtcacaaacgcataggaagttcagagctactaccagttggaacagctactggaccaagagcaaatgcagattgaggaggactagaagcctgtccttggtttgcaggagaatcagtggcggccggagaaggggacagagtggtgcctagatcgaagtaaagaagacgagttcatggcaaggattgcaattatgtacgctgccccccaccaacaagttttacagtcatcagtatactgtaccgtaccgcagaactggtgcaatgatgatgatgcaatgcaagtacggggcacggaaatgcccgtcacatttatgcagtgtagagcagataaatagacacgcagacatccgaagcagcgttttcagttagaaagtcgcagcaaagggcaaaagccaaggaggagatggagaaacgcccagccaccgacattgcagcttgcccatctctgactggaaattca

SEQ ID NO: 124100 - DNA, 1169 bp, Zea Mays
cgggttgattctgaaataagaaagggtctcttttgaaagacgaccaaggccgaaggggtatcgcatgatctcagccgctcgatctgattcaatggcccagattaaatcttcctaactctgtaccggcacgtgcgccaaccgttggatcgagatccgatggcccggatccatttaaccgaacagctctcctatggtctaatcatatccgttgaacaccagatggatggcttagatcttggcttcaatgtgacaacaggagatctaatcttcaccgtccagtgagcgatcaacggtcggtggtaatccccctaccctcgctcttacgcaatcggcacgcggcggcgcccgagcatcacacggtggttcttcaccggtgtagtcactgccccgcgccccagtgctccattcttcaatccaatcaatgcaatgcgaaccaagtagccagataatctatagaacacaagcttaccgtgcggcggattcacggtgctatcctacctccgatgaggaattggaggtgactcagtcgatccacgctcccctagaagctatgccctggttcccagcaatctgaagaacccctccaatcaccaaccgagcagccagcgttagcgtaccgaggttttcccctgtggcaaccccgctttcttttctctttgtgcatggtgacagagcttggtgatttgttgacgcgaggcggtgctaggtttctgggagaggcgagcacgagcggatatatatgcgccataggggagaatctggatagaggtggtgagcaaccgatggtgaaggcgaaggactgcggcggcggcaatcttcttctctctccctctctttctgtctctcaaccgcggtggatctcggtgagctggggagcgcgagggcgcagagttttatacactgacccgaggaggtaacgagcaacaaccggcgacatttatgtagttggatcttcggtcgttccgagctaatgccgcgcaatggggaggaaggagtctgacgtgagatccgtgaggttgaggattgtgctaacaactagggcccacccaacagagacacgaagtgtgaaacgcgggcgcagagtgcggatggatgaccggccgagcggctaagggtgtgggtccacatgtcggcgcagtggggaggattggctgggctggcaacgcaag

SEQ ID NO: 124101 - DNA, 651 bp, Zea Mays
gtggatgaacttgagccactgttcactccagtcgccgagtccgcctagctcacggctgattcggatgaactcaccggagttagccacattgagatcttgcgccacgtgctttggtgctttaaccacgtcgcagtgagtcaccttagcccacccgttcatcgccggtgagcttgccacggtgaacgcgacgaattgcttgcgccaataacctcttccctcttcgactgccaccgcgccaactccaaatcacgagccaccgtccccaaatcctataaattgagcacaccctcagctctgctatgtaattatgcacccaacacacccactcgtgcctccaattactcaccagagagcctcaatttgaaactttccccaattcagtccagagcaccccgctacgtgagcttgccgtggccagcgtgctacaggtccgttcatgccctccgctctcccattttagtacccttctgttctcctgatgctcctcgacccattcaattaagctagactgcgctagatcattgggaacacctctgttcatccatagttcgtgctgtcaccgtggacagtgtgattaagagctcagatcgtgcaattgatcgaggggaaacgattattaggtgttgaattaggagtcaaccaagttagagc

SEQ ID NO: 124102 - DNA, 394 bp, Zea Mays
gcgcaaggtcgcgaggtggctatcaccggcgaggatgattctgaagcgtccgtgagctaggcggacacggcggccggagtgaatagtggctcaagttcatccacacgatgatatttactaccccgagcaacaatcggtacttcgttgagcgcgaatcgcaacggcgacgaggatcctggcgcgggatcaccggtggtgggatgaactgaactgatctgatccgaacactgtaccatcgaaaacctgattcagagcgcctaacagacagagttgcaacgcctagatctcggattttcgcgtaagaacttgctaatctgtctttaacaaatttgtagcacaattaccaagctacaaatggattatagcaactatccttgatcgagcactagatcct

SEQ ID NO: 124103 - DNA, 726 bp, Zea Mays
ctagcagactcaagttccctaagcgtgctctcatacttggatctaaactctctcctgtcacgagcatccttcctaagcaacttatcctgactagccaaagcagtgttcagctcttctatcccatcggcaagatcatcaacgaaaggtagtaccttagaagtagtgtcgtctccgatgtatttgtcgtcaccggtgccgaccgcgtcttcaccaagtgtcatggtgtagaagcctcctgcggtgtcggcgatgaagcatagcccgttcagcttgtcctcgactcgcctctcagtctcctcgtcgctcgaggaagatacaacatcgttggagtcgtggtcgatgtcactgtgggaggcgaggaggcacactccttgatctttgccttctgaaggtacttcttcttgagcgcctccttgtcgaatcctcccttggacttgtacttgccggaggagtactttcccttgtgccgactagagtgatggtcgtgcgggccaggctccgatttgcccttcttggggcagctagcaacaaagtggtcggggtcaccacagttgtagcatccgtccttggacccgccacgccgcaggctcatacggttgctattgaaccgcgtgaaccggctggccacaagtgccaactcctcatccctaagcgtctccacctactactctgtaatagacaacaaagaagatagagcaaacatagcaggtgaggagttagaagcag

SEQ ID NO: 124104 - DNA, 454 bp, Zea Mays
gaaggaacttcactactttccccactggctacatattgccgactgttcttctgagtcaaagggacctcatcttcttcctccccctcgttttcatcagcaacacagacagcacacccattgggatcaacgacagatggatcacacccattgggatcaccgacagatggatcacacccattgggatcagcgacagatggatcacacctattgggatcagcgacagatgaatcacacccattggggtcagcgtcggtaaattcaggcacagacacttcctcagcagcaggaaccgaaggaccaacatcccgatccaagctagatactcaccgaagacgtctctttttctttttctgctcatcagcaggagaatcaagttgattggctcggcaaggatgtttcgggtgaacactgacaggcctctgaatatccaaggttgtaccagcttccgggagag

SEQ ID NO: 124105 - DNA, 817 bp, Zea Mays
tctacttcggcaatttgctttgaagacagctgctttctcgaagcatgtcgaatgatgaattccagctctatatgaggtgcttcggtggcaggatgtttagatccctcgggagctctctcttccgctagttctattggcccagcttccgaaggcccagcttcggtaggagctcgcgctcgcagcaacaacttctttctattcacatccttagttttttcgcaagaaggttcgatagaagcgggagccagcatcttcgtggattccaaacatcgtctaatacactagccattctcctctttcttggaaacacttgatggcttcggcagttctgttgtagttgctgggctcagtaccttcagttgttctgctgccttctctgatttcggcttttcggtcggatttgtacgagtttcgattgccacgacaggacatgattctgtggcagaaggggcagtttctgcaccttcaataagctttggcacatcggccgtctcaatgcgtctcggtctacgtgtcaagaccttcactttcttcgccttcgacgcactagaggataccgacgcagcaattttcctctttctcacttgtttccaaacatgaaaacagtaatcagggcagacaaacccgataacatcaaaaactctgtttagcctgtttttccctcgagcgtcgaaggctaccgtcatagcttcgtcttcagccttcgcgtaggctccaagtagctcatcactagtttcctctatagtatctagccagtcatcgtttggttcatcaaattggtttgtgtatcggaaggtatacttgagatagaccaagc

SEQ ID NO: 124106 - DNA, 328 bp, Zea Mays
gctgaacagatcccagctgaaagaggaagtgagaatgaagatgaagaggactacactattctaagcccaatgaaacccatccacattgaatttggtaaatctactgtgacgacagacggcatggttatgatgaagaaattgggctactttggggaggccgagagcaagcttgtccggtttgctggggaagaggtgattccagaaccaaaagatgatgaaatcgtagtctttaaaagcttcttcagggcaggacttcgtttccccctgcatgagatgattggagaggttttgaaaatttttgagatatactttcatcagttgacaccca

SEQ ID NO: 124107 - DNA, 1008 bp, Zea Mays
cgtgtatatggattttgcatacaagattatggctacatataacagacaaaaaaaggatatgcttacaagaatgacgatggaacatccgtaaatggttgtagaaacgttcgtaacgctcctagtatgccacttcttggcagcttggcataaatcattgaaaataagttggcaccagtccatctggtggaaacgatccatctcctcggttaaaagaacctcatggttggttattccccagctggcagtagggaacaacaacctattgaacagtatcaagaaaaaggatctgatgcttaaatcatcgtcagaccctttcctcagacgatcttgaagagctgcaaccccaaaatcttctttcgataaaccaagttcagctcttaaattgttggcagcaacagcttcatcgatgcccaatgcagttcctccaccagcatttggtaaccccaaaataaggtgcatcgtatcctttgtaattttcagctccttccctaggccggctcgaattgtcatgtcattatcgtcgagcttttccatcagccaagctaaatgtgatctgttgccgagtgcgtccagtctcatattaagaatactggaaaatcccctccgtgcaattgcttggcgatgtctgtcatttaatatctggatgcttactaatacatcttgggggttgcatctcatgttaagcctctgctgaaaaaaagtatacaatgaatatcgtaaacatttacatctgcataatcgcaactcaatatttagctcaaacctcaacacaacatgatttcacgcataaaatgatatattgccatagaccataaatctctaacctgtcgggggggcactactttcctccgctttgtgactaccttcttcaagactttcctaggactgtcgtcgaagttacgcttcttggataatggcataaagtcatcatcctcatcagcagcctgccttgattcgtgtctaacagtctccgccggaacacggggtatgtcaacgctgaagcactct

SEQ ID NO: 124108 - DNA, 763 bp, Zea Mays
atcctctctcacatctcggctagggttaggtcatctcaccaagccaccgtgatgcagcagctccgtcacagcagggcatggcagatggcgccacctcttacctccgcagtccgccaggcaaaggaaggcccaccaggtggctgcgcgagtgccaagcgtggatggggtgccaagcatggatgggcgtggccaagagctaagaccctaacttttggtgaatctcatggccgcgctctccttcctctccacactctgtctcggcaccgtcccgcactctcgctctcaatgccaccatcgccactgacgaggcctcgtctccgtcggcccctgttctgcccaccggcagtatgacagatgaaccccatgtctctggcggagggaatggcgaggcaaagcataggtaggcactgaacggacccgacacagcctgatccagttaattggcgttgcgctcgttctccctgttcagatctgagggttcagtttggttgtctcaggcagcaacggtgtcacgaacgcgacatcaaaggtgaaattcttttcgcgttcaactaatccccctatgtcattcgatgataatcccttgcttactttggtaatggtttggctattgcacatagactattgttgctctgaatgttgcacggtgtcttcttcgaagaatactgggttgattcggctacaacatttaaatgcagctaacccttggtgcttctccagtagtccagcgcatgtgcttcagttatttgtacaagaacttttt

SEQ ID NO: 124109 - DNA, 273 bp, Zea Mays
ggaaaactggcgggccgaatgggtgatcgccagtaccgaggctagcgaccgcctcgtgcttccaagtgagggaccgaggctcgagaagaagcaatggagagctaagccgccgttggcaccggaatttgagcctgtgttaggcaggatcgaatctctagcgtccgatggtctgacgtcgatgcatgtggtcggtgacttcttgcagcgccggatcgcgccgctgcaggcgagggcacgcttgagctgttggttttctggcatgaacgaccccag

SEQ ID NO: 124110 - DNA, 458 bp, Zea Mays
caatcggcgaggacaacaattctcgtttaccaacctggtctactcggagatggccacgctccatccccatacgacggtgcctaccacttcgcgaaaatttacccacactatgttttcccaccatccttcgctgcctatacccagtactcgcactaggaagatccccagcaccctccacacgcggcgaagtctccgccgcagccacatccaacgcaacaaaataatccaagccttcatccgaggactcctccgtccaaggaaacgaactcccagattcaccgtcagactcaaaacactcagacacagaaccaaacaaactatcatcggcacgcactacggttgaggccgccacaaaattagtattgtcagtagcggttgcttgcacaggcccaaacgtcagaacctgcgcagcaaccgaggttcagtatcacagagacaaaagtttacacttaaaatcc

SEQ ID NO: 124111 - DNA, 486 bp, Zea Mays
ggtccaggcgaaccttacgggagggttccacattggtgacgaatgcggtgacagtccgtccacagcgcctcgcggcaccgcgacggtgagcaggagagctggacgaacgagggggcagaatcgagcatggatgggttctacacgtggagcgggttgaggcgaactcggaggtggtttgcttaccggtgaaaaatggctggcgcctgttgactatggtgtgggtacacccggcgacggacgaagcggacctcggtgagcaatccgccatggacccaagcatccatgcccccaaaatccaccagtaagcacgaaccgtgacttcacaagcttgcaacctgacggtggccgacactctctctacgacggagctctcctgggcggcgtgaaaacctcagatcctggtggctgggttgaggagcggatgaggcggtcaagtacccacgatttatacacccagatgcgctacgatcggggaaattgggtaaa

SEQ ID NO: 124112 - DNA, 587 bp, Zea Mays
aatgagttagaacatgcagctgcgagctttcctggataacctaggacatcgtcatcaaatcgaggcaacacaagagcctataaattcccctaggcacccgatacttctgtaccaccatgtggagtctcgcacacacttatgtcctcccctaggatgtaatagggaatcatgaataataaataaatatgtattagatcaatgatatgcatgaatgtttgttattgtgcatgtgattgagtcggatcttggtaatgattggtgctgagccgaggatttctgccctggctcaattcaaaaacttatatggtgaaactctagctcctatataagagcataattcctagttctgggaaaaccctgtctgtcccttacctcttctatcttctcgcatagagcgaaactgattaaggtagatcaccctatgcccgtcctaagtgtcctggggcctcctaacttctacctcctcagaatattgaaccatgtaggaggagtcatactcattgatgttttctggagttctaggtcaagcatcatctcggattgatctcccatacatctctatttgcatttcttggtgagcttgttcg

SEQ ID NO: 124113 - DNA, 979 bp, Zea Mays
tccgagggtgacccgtgaaggagaggagactgaagccaccgagacagctccgatctccgaagtcatgagacaatcgggattagttgtgacggagggagccattgacgaaggtgcacctactgccaaagctgaacaagctgatatcgaggaagaaaatgctgatgaagacgaggaagactatagcattctgatcccatcaaaacctagccacttggattttgaaaaatctactgtgtctgaagccgacgtgcccattatgatgaagctgggttacttcggagaagctgaaaagaagcctattcgttttgctggagaagaaaccactccagagtcgaaggacgacgaagtagtggttttcaaaagctttttcagggcaggattacagtttcccttgaacgagatgattggagaagttttggataattttgagatttttcttcatcagttgacccctaacgccatcgttaggctcagcattttcatctgggcccttcaaagccaagggatggacccaaatgctgaagctttttgccgagtgcatgagctgcattaccaaacaaaggccagagaggacgggctacatgaaaatgttggttgttataacttcgcgtattgcaaggatacaaaggctccagtcctcagctatcgcaccaagtggccaactggctggaagagtgaatggttttatattaaggctgatgagaagaaaagagggaaactgatgacgatggtgatgagcccgctgtccttaagcttcgggatgaccagacccttgtgcaacatgaagccagggtcagcatgtccgctggccataccagaattcagagtggtggctgaacaaatccgcaccagggatctagtgcaagagtacctggccaatagggtatctccaacgttgagtaaatggagtatgtcgaagctaaaaggaacaaagaagaagaatgaacttgttcgattaccctaccgcttcaagtttgag

SEQ ID NO: 124114 - DNA, 487 bp, Zea Mays
ccctagtccatggccgagagcataagacaagaattttgcatggaggagattaaaaccacgaccaattttgcatggaggagacgatcccagaggctaaccgaaggtgacgattcaaaacccgagatacacaaagacgatttggcaatatcaaccgacccactataataagaagccaccaaggcgaggcacactcccctcggaggctcgggggctactatcgaggagcggatcctcgggtccccaggaggccacgagccaatgggaagatagggaggaacccaccttggtgaactcggcccccgaatgacccttgcgcactactcccgaggtcgagcgaggcgaaacttggccaagggttcatatgagccatcagggagccactcgagtggatcttgtgttaggccgaaaagctggtctcaccatcaataccatgcacgtcacattaattgtgcttggcaccaagccacgatgcgggagagagccattc

SEQ ID NO: 124115 - DNA, 618 bp, Zea Mays
gatgagggtacttgttcttgacagttacttcattcatgctcaataatcgatgcacatcctcttcgtgccatccttcttctccacaaataacactggcgctgcccaaggcgaggtactcagtctaatataacctttctctcacaattcatcaatctgcttcttgagttccaccaactctggtccggacactcgataggctcttttggaaataggggcggtgcctggaataagctctatggcaaattcaaccttccttttaggtggcatacctggtaactcctcgggaaacacatctgggaaatctgatactacactgatagcctctgatggtttaatctcttcaatatgggcggtgacttggtgacaactccatttccttggtcctgacaagaccaactctactaacacttcttctcctgatagggatactaacttcaccgttctcttatcacaactaaggctggcttgatacttggttaaccaattcatccctaggatgacgtctatagttgtatcctggttactcataactatcaaatcggcggggaactctatcccccttatttgaacctttgcactagggcaaaatctattagtttgggtccttccaccaactga

SEQ ID NO: 124116 - DNA, 281 bp, Zea Mays
ctaggccaaagaggcaaagaattgttactgtgacagaagtcattgaagcaacaccaccaagagcttcagctccgaaggtgccggctattgaaagcatgacagctactgaagctgtaccttcggaagttgccgcagcagaggccggagccgaagatgccaaatccgaagagactaaggccgcaaaacccgaaaaggaagagatgaccgaagatacttcagaagatgaggcttttgactttcaaaacttagttggccaagagctgacaaaagctgaaaaagaa

SEQ ID NO: 124117 - DNA, 413 bp, Zea Mays
cttagtgtgtacatttgggctctttgaggccaaggaaagagtgccaatgccgaagggttctatcgggtgcacgaactccattatcagacgaaggctagagccgatggtctgcacaaaaactttgggtgctaccactttgcataccaaaaggacaccaaggctcctgtgattggttaccgcaccaagtggccgactgggtagacaaatgagtggttttacgtgaaggctgatgagaagaagagggagaagcttatgagtatggtaatgagtcccttaagactgagtttcggcatgactcgaccactgtgcaacatgcagctggggtctccctgccaactcgccgaagtgaaatttagagtcatggcggagcatagggacttggtgcaagaatatttggcaaatagaacattccc

SEQ ID NO: 124118 - DNA, 475 bp, Zea Mays
gctggttgcggcaaagatggaagggcgtataaccacaaggcggttgcacgctccttgtgcgtcgattcaccttcttcgcgcttcgggccagcttgtatgacatgtgaggcctggcccccatgtcataggatgggaaccctggtgcgcatcgggggagaccttgcccgtgacttgtgttggggtctctcctttcggcgacctttctgccaaagagcttgtgttctttgtttccaaactctccagtgggtcggtctcgtcgatcccatctttcttcgtgcagctgttggaggggcctagcccccgggctctacctgtggtgtcctgtttcatccttcaggcggccattgtcgcctacttccgtgggatgtccgtggaggtgatgttctttcccgcttcttcctccagcattcggggggaagaatgattaccagcctcgtggaggtgggcagcgggctgagccatggctccatcccac

SEQ ID NO: 124119 - DNA, 573 bp, Zea Mays
tgtaatgatccggttgcacccttcggagacctgcgctaggatataaccgtatgtcttggcgaggactttgtacctttgtgatgcgcctgctgtgttaatccagctgcacccttaggcgacttttgcttggatagaaatatgcgtctcttggacgacttcacactcttggatgttgttatgcacttgttgtgctaattcagctgcacccttaggcgacttttgcttggataaaaaaaatatgtgcctctaggacgacttcgcacccttgggtgctattacgcacttattgtgctgatccaactgcacccttaggcgacttttgcttggataatgtctgtcgcacgcaacgactgtttacactctctgttgcggtgactgttttagcgttgaaagtcgaagaccgactccgcagtattttttgacatcctgctgtcatggtatctccctttttgtgtgggggatatttgtggtgatatattacatggtgccgcctcattaaaaacctcaccctctgcgaggaaaagggtgtgggcccgactgaaataatgtttgtaggtgttacaaaggcgcgaa

SEQ ID NO: 124120 - DNA, 371 bp, Zea Mays
gtggaagagaccctccagtgtctttgaaatccgaagtttcttggggcttgccggatattattggcgtttcataccaaaattttccagcattgctaagcctttaaccagactcttggagaagggtgttcttttcgtctggtccagcgattgcgagatcagttattagacattgaagaacaagttggtgaacgcccctatcctagctttgcctgagagtggtaagcgtttcacagtttttatggatgcttctcgaattggtcttggctgtgtgttgatgcaggaaggcagagtgattgcttatggctcaaggcagttgaggaagcatgagcggaattatccaactcatgatctcgaattggtcgcggtggtct

SEQ ID NO: 124121 - DNA, 742 bp, Zea Mays
gcgggggcgacggatgtagacccgtggtaaatggaccatgctgggtccaggcgggggcacgtgaccatgcccgcctggtgtcgaaggaggcgatccatgtgatgtcacaacgtcggggggtggctggtcatcactcgagtgagatggagtgaccacgggtggcgaggaggaagtcccacctgcaacaacagtagagcaaggcaccgaaaccatatcgtcgtcaaggagaaagtcatgggaggcgtgggaggaggcatctgaggtggctgcaaagggaaaagtgggtctcgtcgaatatgacatggcgagagatgatgatgcgacgtgtcgataggtcgaggcagcggtaacctttgtgcgaggggggatatccgaggaagacgcatgccgtggagcgagggacgagcttatgtttggaggttgcttgcatgttggggtaacagaggcacccaaaaacacgcagatggttataggttggcggttgattatgcagacgagtgtatggaatgtcatgctgaatggaggaggatgggcgcctattatggaggtagcaggtcgtcaggagtccctcggcccaatatgcgaggggtagggaggcatggagaagcatggtgcgaatggaattgttgagtgtgtggatgatgcgttcggctttgccattttggggtgatgtgtagggacaggaggagcggaggtgagtgccttgagcagcgaagaatttggtggtggcagtgttgatgaa

SEQ ID NO: 124122 - DNA, 417 bp, Zea Mays
acgatacaaaaacagaaggagatagctgaggctgaagcacgtcagaaccaatcgaagcaagttctacatactgcttcatgttactcccatacattcctagagtatgcgggtaaccaacagccattctcacaacctatagtttcagtggcttcgacagtcactctccagctgcgtgggtcttaccacaaccacctgtagtggctccaacttcatcccataatcagcagcctcaggggcagtgccaagttcagcagcagtgtgacacaagagaggagtctgaagcttggacagttaacagtactgttctagagtccagacatatttattgaagcaatagaggggttggatcaagaacttgatacacatctattgtaattttaatttcatttgctctactttcttgtatcagaaacaatt

SEQ ID NO: 124123 - DNA, 577 bp, Zea Mays
caaattggggagttgtgagggacgattggaggtgagggctggttcactgggtgcacaattacttagcggagcaggctggaacaccaatttataatttccaagggcggtggctcctaattttgccatggggtgctggcggccggagagaggggatgagtcaccgctgcgatctaccgtggcgatcactggttgaggagctattacggtcacaagtgagctattacggctagcagcgatgtggtgaaatggtcacggtgtgggatgatcatggcgaacgacgtacaccacgacgatggccgctcggccacatcgccggcgcaagtggatgggcgacagagcatccatagtgcttcgagttcatccactgtaacacctcaggtgttacttagggtttccacttaagactacacaagccaagcccatcatcacatgtggaagaaacttaaggagaagagtataagaatcttggggaccatgtgttaaccaagaaaggtgaatgaccaagagcattacccaagcctttggtgcacttatcactttggacaagaggggagtaaaccctagacccctcttgaac

SEQ ID NO: 124124 - DNA, 403 bp, Zea Mays
cttttatatatgatatttaggtacacgtgtgttactatgatttttaaattaattaccttgtaattgattcaaaagatccatagcaaaagtacgtaagcttaccaaagtttaagagaacttacccaacaaccagccttcatcatgtgctttaaaagttaaggaattaatacataaggaatacatcatgtgcattacaagttaaggaattaatacataaggaaaacaaaacaggaacaagaataaagcatgtctggttgcaaatctagatttgccaggcgcataagaaaaaacataatcaaccaaaagtgaaatactaacatccaacatcttcgccatcctcatcctaccatttgtccagtcaaccttcaagaacacaggtcctttttcaggagccttggccacc

SEQ ID NO: 124125 - DNA, 436 bp, Zea Mays
gtgtctagacctagtgtacatctaagtgcatagcaaaagttgtcaaagcgttcttttaatttggaatggaagggagtagcactttacgagtcattcgttgcagaatcaaatgggatcaagtgcatgtccgacacatttttataagctaagagagactatttactcaaattgtaaagaattgagtaacttgaaatgcttttggtgttctaaggtagagcacaaaaatttagtgtaatttaccattaagcgttgtcaaatagaatgcagaattctgtgaaatatttgtggtacaatactaccacaaaaatagtgctgtctttgattaattcaatgtgttgctctatatcctaagttataatctgacaacttgttttgatgccttgatccaaattaatgacatggtcttctatattcagtttttagcttacaaggtatt

SEQ ID NO: 124126 - DNA, 418 bp, Zea Mays
caagcttcggcataccccattcccttagcgttgggaatattctgttggctaagtattcttgaactaaatccctagtcccaatatgttcagaaacaactctaaactcgcccacagcatctgggcatggtgcccctggcatcatgttgcacagaggcctagtcagcctgaaggttagctccagcggctctgaactagcgtctcctttttctcatcaatcttaacataaaaccattcagatttccaactggtcggccatttagtgtgatagctaaccaccgatgtgttcatgtctttacgataagcaaaattatagcagccgaagttttcatggagtctgtcttctctagccttcgtctgatagtgaagttcatgtactcggcagaaggcttcaacaagtggctccaccccttggcttctg

SEQ ID NO: 124127 - DNA, 515 bp, Zea Mays
gtcatgttgtgcgatgaaaaggctagattgattttataggtcgtacgaaaatcgttctattaagtgtatacgtcgagtgtgttaaaaatatcctatgtaggcagagtgtagtgtattggttaggcgaagagttttagaataaacgagtatgaggcgtgcaattaagtcgagattgaagtgcaaatcctacgcaatgtgatgggattcgtgattatatatgagttatatttgttgatgtgacgagtagtttagaaaatgctcgtttgcatggaggatgtatcattaagacatgagtgtcagagttctttaatattagtggtcgcgccacattgcttgaagtgtctcgagtgcacgccatgatatggttgtatgcgagacagggttatgcacatgatgagtctagtaaaaatccatcggtgtcggcatgatttctgttgtatggcggatcgatgccttgccttgtcaatcattacattccatgccccatgggataaataaatgtcttgttgatcgat

SEQ ID NO: 124128 - DNA, 574 bp, Zea Mays
cttggggatgaggagctggcgtttgtggtgagctggttcatgcggttccataacaaccaccaaaactggtagcatggcgggtcgaaggatggatgcttcaactgtggtgacctcgaccacttcatcactagatgtaccaagaagggcaagaaggaggttggcctgcgtgaccaccactctggtcagcgcaagtgcaagcggaagtacacctccagcaagtccaagggaggattcgacaaggaggcgctcaagaagaagtacctacacaaggtgaagatcaaggagtgtggtttactcgcctccctcagcgatctcgaccatgactatggtaacacgacctcttcctcgagcgatgaggatactgaaaggtgggtcaaggacaagctgaataggttgtgcttcatcgccatagaggcctttacatcatggaccttggtgatgatgcattgggtggcgacgactaggacatcaatgatgcctctgtgtctcaggtatcacatttcaccgatgatcttgccgctgaggtagaagagctgaactactttggcaaatcagtacaagttgcgtaggcttg

SEQ ID NO: 124129 - DNA, 352 bp, Zea Mays
aggtcctgttgcatgaatcaaaggatggcagataccagacgatgggttctatgggtgtgctactaacacttcaaggccgaagttgtgtgcaggtccaggtccccgtctagaggtaggtagtctcaaactgtagagactaccccctaggggttggaccaccaactttttctttggtgtactggtatctagtctcgacacgtcgagcctacatcccaggtggccaagtaccagggagaagttggtaacgctacacacaacgacgacaaataacatacagataagttccagtttcaactccattaaacggttcttaaagtatattatacaaaatcaaaagttattacacctgctt

SEQ ID NO: 124130 - DNA, 716 bp, Zea Mays
caatccaattctactcattcaaccaaaacaaaaggtgagacaaggtttagaataagaaggatattataacatcaaggagttgggtaagaattaccaaggagttagacaagacatatttgttggtggccaagagtgaaataagataaccatgaattattaaagtgaggataaatgatacaaccaaggatatgaagtgagttagggagaaaactttatcaaggagacaaaatagagaggcataggtttaatatatcaagatagatattgcgcaagggtggcaatacaatggcacgaaagcaaaagtataagaattcaatagggagaaagcattatcaaggagaaaagtagagagacaaagggttcaatatatcaaggtacatattgtccaaggatgacaatacaatggcaagaaaacaagagtagaagaaatcaagggttatataacaatattatggattagaaaacaactacaatataacatcgtccttatcgatctagtcgaaaacttagcactatagaactatcctatcaacctaaccaagaagaatggcaatagatccaagagatctataacgaaaacttcttgcggggtggggataagaaagagaatggggcatcttcaatagcttataaagggttccttccgatagacttcacttcaagttccacaatcctagcttgatcatcttgtagtgcttctgagtagagtcttctaa

SEQ ID NO: 124131 - DNA, 655 bp, Zea Mays
gttcaatctagcaaatttgcataagatatttaacttggtttgaaccaaagacaagcttcttcacgccgcaaggggttatcttgcctatgttgagttaaacacttgattgctcattctctagattcaacactaggattgcattctcatgaacaagttatatgctaccactagatcatacaaacatagaagcaatagtggtaccatataagcatcaaaccatttgattttcaatgaatgagcctaatattgccatagatatgcctagatgcactaaacaagtccttatcaaggtttgaatgcacatgccaaataattttacctttgctttagtcgaaggagaggcatgtcataagataagagtgggggtgcatcaactcatgttggagaagtcaagtatgttcaattcattccttagcttgcaaaatctcttctcatcaagtggcttggtgaatatgccgctttgatgatctcttataaaatggtgtctcacatcaatgtgctttgttcttgagtgttgaaccggattggttgtgatctttaccgcactttcattgtcacgtagcaatggaacttggttgaacttgatgccatagtatttcaatgtggccttcatccaaagtagttgtgcacaacaactccccgcactaatgtactc

SEQ ID NO: 124132 - DNA, 548 bp, Zea Mays
ttaatgcatcgtagtctgggggctcataggtcatgagcgctatgcgaccgaggggtctgtaggtcatgagtaagaagtggaccggcacccacgctgtggctcggtgctatgcatggtaaatgcgatcagtcgtttatgacgggtcagtccggggccggtgcgggatctactcgagtggttcccttctgacacgtccatcctccattgtcgggctccaccacgcccgaccccgggctcggtgacgtggggtactggggttcgaccgagggtgaatccttcgagggccggcacactttccttttccgattgactaatggatccaagggatcaagggctctttcctcaacgcgttcactgaccggtggttcctagtgacgggagatcatttcccccacaaatatagtaagatggtttaggaattgaaggagattagtattactgtattagcataaattctctcccatctaatctagaaatacaaatataatattatgtttacatgtgttaacgggaatgaggatgtagcaccaaactgtaacattataaag

SEQ ID NO: 124133 - DNA, 358 bp, Zea Mays
cagcaaacctttgcccatggagtatggtgtaatctatcatttggaggatgatggaaggattgttactaatcatgaccaaatgcaggaggtgctggatgggttcttctccagtctcttgggtgctgaaattcagagaccattcactcttgatttgctaaattgccacagaaatgcagttgatctgagcgctttggagtctcctttctctgaaaaggaggttcaggatatgattgcaagtctccctaatgataaagcccttggtcctgatggattcacggggaggttttataaatcttgttggcacatcattaagacagatgtaatggctgccctggaaactcttcgtcatggaaatgct

SEQ ID NO: 124134 - DNA, 770 bp, Zea Mays
ccgagttctatttcttcaccgcccgaagtccacgacggcgaacagcgcagggccgagctatggtgagcttgtaccggccggattacttgatgacgggtgctctacttcagttgaaaccaaattcaaggcgtaacaatcatttcccctctactaatttcacgaacgacgctctaacctgctctgtccatggtgaccgtatgatcaacggccaaaccaacgcgttcccggtgatctaaggtagcttagctcaatcgagttggtcgaggagcatcagggcacacaagaacactaaaacgagagggaagaggctatgagcggacctgagatgagctgaccacagcgaggtcacaccgctcggtgttcttgagtgatttgggggaaatcccaaactagggagttctagtggatgattcgaggcacgggttgcttctctggttgcacaattacatagcggagcaggcggggtcagcaatttataggcttccacagtggtggcgtccaatttcgtgaagatgtgctggcggccggagaggaagaaagttactggcgctcgggattagtggctttcaccgtggcaagctcccaggcgatcaccgggcatgcacgatgtgattcactgcgacgtggtcaagctctttagcacgtggcgcacgacggtaatcggccaacggcggtgaggtctatctgaccgattcgacgagcaagtgggtacggtgagcttagctgtgaccgagcccgagtcgatccaggcgccaagatctttactcgcc

SEQ ID NO: 124135 - DNA, 461 bp, Zea Mays
ctgattctccgtccagggtggtcgccacttgagtgtagtaaactcgcccagttttccttggatttttgctcgccggagtgtttgccacatttcccttgccttgagacggttcccagtagtctgttgagaatttgatttattctgctttagatagggatagtccttgatgaagtgtccagacttcccacaattaaagcagctattagaagaactgggtagggcggggaaacgagcaccaggggcactcggctgattttctgagcagggggagtggggcggataaaaactggttgcttgaaaggaaatgcgggtggacgagcagaagagccatttgggttgaaaggacaaatcaccaacctcgaccgctttttagacccttgagatgatccttcacccctatatctctttgtttttccctgtcccgaattcttggattccatcgaaagcgttgtgctcacggc

SEQ ID NO: 124136 - DNA, 461 bp, Zea Mays
gatcttttcagattggggacaaggtgcttctgaagcttcagccatatgctcaaacgacagtcgtcaatcgcccctgtcccaagctggcgtttaaattttttggccctttcgaggttcttcagaagattggagctgctgcctatcgtctgaaacttccagagggatgtttgattcatcctgttttccatgtcagccagcttaaacccttcacacccaattatacacctgtgtttgcagactttcaagaatttccagatctgagtacacaggcgctgcaacctgagagcattctggaccgtcgtttggtgaaaaagggctctaaagctgttccccaagtgcttgtgaagtggactaatctaccagcgtcttcggcaacctgggaggactggtacgtactcaaggcaaggtatccgtcggcgtcagcttgtggacaagcatcagctccaggggagggacttgtc

SEQ ID NO: 124137 - DNA, 478 bp, Zea Mays
cggatgtggcatgggtcgtccgatccagatcgatcgggtgagagtgggtttagggtatttaaatctggagcatccgaattggatcgaatatcttagatcgcgtaccggttcgtgggggagtagatttaatctgggccgctagcgtttgatcgcacaaccgaggctactccatacctcttggccgcgtctactttgcaaaagaaaccctagggttattatgaatccacccgctgtccactctgtatacaaaagaatcacaagcgtgccttgtaaatttataagcggacccctgacctctttgagattcacgcgcgtagtacagaaagcttgaaaatagggtaaggatttatagaaaatgatttttaatgtttaaataattctaggaagttatttaattcatagaaaattcatttttactccattttaactcattccagttgcattaattgagtattaatattgtttatcacttggtcac

SEQ ID NO: 124138 - DNA, 376 bp, Zea Mays
catgaatctccctaactggttctggggggaggctgtggcaacggttgtatacatactgaacagatcacccactcaaggaaatgaagggagcactccatatgaggtatggcatggaacaaaacctaccgtcagtcatcttcgtacattcggctgtgttgcacatgttaagcaaggcaacaagcgtctaacaaaacttgaagatagaagtacacaaatggtgttcattgggtatgaaagtggcagcaaggcctggcgtttctacaatccaagcacaaaacgcgtacatgtgtcgcgtgacgtcgtgtttgaagaggatcgcgcctgggactggaatgaggaggagaagactgggataaatgtcccagttggtgctgag

SEQ ID NO: 124139 - DNA, 399 bp, Zea Mays
cgcaaaacaatatctagtcccaaattcttcttggaagccttgtccaaaattctcattaaattctcctatgctcaacctagaagccatctgcgttgatgacctctcttttcacctggatctagtaatcttttcctttgtgaatcatgttgtgactttatcatctgaatctctgaatcattcatcgagatctaccccgtcatcttgttatcttctataaccccacttctcaagtattaaatatggatcagtctaatatctcattatgatcgttctcatactcttctctgaggatcatgatgttgttttatcgattctatctctaagcagtgtatccatttggttcaatggattatgttgttgactttagtatctcatgtctcagcaagttgccaatcttga

SEQ ID NO: 124140 - DNA, 445 bp, Zea Mays
ctagcagtttcttggaatttttcgtgggtaattagtgataaacattatgagaatcatgtagagctttgtcatatctttccaatgagtacttatgcgctcaattcggagttacaaattaggagatatcgccgtttgaacccgggtatgtggctgtcccaagaaacagatttctgcaggtgggcgtacagcagtagtattagcagtttatggggatttttcgttggtatttagtgataaacagtatgagaattatgtagagctttgtcataccttttcaacaagtacttatgcgctcaatttggaattataaattaggagatatcgctgtttgaatccgggtatgttgctgtccaaaaaaacagattgcagggtttatcttgtggactgttttggactaattagatgttggaatttaattataaattatatacaaaacttgtgggga

SEQ ID NO: 124141 - DNA, 514 bp, Zea Mays
gtcggttgatttgttgcaccagaacagatcagtgcatgtcagcctacctggatggcagttgcgacgttgcttaaatgccctgctgccaccttgtgcgctctctccttggaagctcgtgggtcgcagcgattccgttccgcttttctggccgggtggttcaagtggcaggcagtggttgagctacactcttcattcctgtcctgggctgtcattccgtcagtatccttgggccccgatgtttgggcctaaaacgaattcctgataaattctaaaaggctcgttgtggcactgtttgggcccccaatgttctgctgccaccttgcgccctcactccttctgtgagttctgtccacacacgtgactgcatggcccatcgagccagcccacgccgcctcaccctgagccatagaactgtcacattttttaggaaaaaaacattgaaagttgttggagcagtagcattttatttaggatttaaagttttaggaaaatatcaagtcctatgtgttcgaaa

SEQ ID NO: 124142 - DNA, 372 bp, Zea Mays
ctaccctcaaattctcccgaattatacggacttgttcttctgcctcttgaatcagttcaggcccaaagaactgtcttcctctagtctagtccaaaaatagaggagtcatgcatttcctgtcatacagagtctcgaacggtgacatcttcagactcgcatgttaactagtatatgagaactcagcataaggtagactcttgtcccaactactaccatgctgaagggtacaagctctcaacatgtcttccaatacttgattagtccttttagtctatccatcagtctaaggatggtaggccaaactaaaattcaacttcgtatccatattctcatgaaaacttttccaaaatctggaggtaaactgtgatcctc

SEQ ID NO: 124143 - DNA, 594 bp, Zea Mays
tagtactgctaaaggccctattagtagttgttcaatctgtctgggttgctccatctttcttgtggatgagacctttacggctaatcttgtggtgattccccttgagtcttttgatgttattctaggtatggattggttaactcaataacgtgcagtgatatcttgtttctggaagacagtgtctttgcaggcaccatcgggtggagaggtgatctttttagggagtgctccgaagtacactctttccttgttgtgccagctgtttccagatcgctggacaaggaaatatggaatttttttctatggggttgggtagtgaggctgcatttcgagtgcaggacatccgtgtagtgtgcgattattctaacgtgttccctgaggaacttctaggcattctgccggagcgcgatgcgacgtttgaaatcaagttgattcctggtatgcgcctatccacaaggctccatatcgattggctccaaaggagcaggttgagttggagtgacaattggatgaccttcttgctaagggtttcattaggcctagcaggtcaccatgggctttccctatgttatttgttgagaagaaggctaaaag

SEQ ID NO: 124144 - DNA, 546 bp, Zea Mays
cccaaggcgagagcacacccaggtaaaaaaatatcgttgcatggacataactactcctgacctttacgaatctcgacggagggggaggtacctgcacgattcggtggtggccaggcccaggctttcccgaaatgatggcgtcgatgttgctacccacagtacaagcagcgtttgcggagtagacgaactccggcgagatcctccatggcacaggttcgatctccagagccggcgcccgggaccctggtgacggtgtgtccgattcctttggtggctgcttttagttctctctcggcaagggtacgagcggtagatggtgatggctgtatgcctcaagtatttatgcaccagagggggagatcggctggtggtacctggctagcatcttgtgcggcatgcagcgatttggtcgcaaggttgttacgaggatagagatgctacagcagagccccacatgtccacgagccggtgcccgcgagcgtccttccgcccgacatgcatggccctgtacgtgccgatagcaaacggatgcatgcaagagaattc

SEQ ID NO: 124145 - DNA, 777 bp, Zea Mays
aaaaaacaatcggataaaggaaggacaggtcgtgtttttgaagcaggacaacaagtgtttctcaaacttcaaccttattgtcaatctttcgtaacttcccggccttatcccaaattggcttttaagttctttggtccatttaccattgttcgcaaggttaatcctgtagcttatgagttggctcatccaccaggttgtggtattcatccggtattccatgtttctcagttgaagcctcaagttggttccaatacacctgttagcttgtcagtacctgatctgtcaactggtttgcaagtgcctgaacagatattggactccaagttggtttggcgtggaggcaaagcaatttcccaggtgttggttaaatggtcggattgggatgtctctctggctacgtgggaagatgaagctgtgctgaagcaacaattccctgcaacaccagcttggggacaagctgtctctccaggggggaatatgttaacaactctaagggtggaccggaccaggaagggacaggagatgaagctgttggagatgaagggaagctggaagttgaagctgtccagaaattaagaagaggtatgcgagcaaggaagctgaatccaaaatacattggtgccaactggatgtaatagaattacagggttgttagactgtggttttgctttttgttctcaagtataaaaggaaagcatctgcaatattgtaaagtggcttttggcattagacacaactgaacttggaaagcaagaaagaataaatcgcatactctgt

SEQ ID NO: 124146 - DNA, 604 bp, Zea Mays
gttgtgtgaattgtgatgatgctccttcaccatatatatgcaacttgccatattattcactctctctacataaaactatatgtgcatgcgttctcaactgcctgtctgtccccactcccatgcacattttctcacacaaatctctcgatcactttggaagccaatcatatgggcataaaactacagctagtgctcttgaggatccatttcattggccacagctaagaatgcgcgcgcgcgtgtgtctattattattccactcaaagtgcggcacttaacatcatatccttgcatttgtcatctatcagtgacacacacacataaccccagctgctagctagtagtgttagtgtataaatctaacctatctagtagctagcctacccttttatctaataatcttggccgccgcctgatgatgtgtgaaagaaaatacgcagaccatgcatctctacatcatatagagacatagtttttgctagcttcagatctgatcgagtgaggtctgaggtaagctcaacggtagcatgacacagcaacttgttgcactagatcattgcgtcaaataaataaaaaaaacgatgactagggcgtgttggtcact

SEQ ID NO: 124147 - DNA, 636 bp, Zea Mays
tggagatcatggtttggagtcttggacatggagatggttaatacttaatagagccatgaagatggttaatagagccataaagatggctggtggatagtgtgcacatagcacggtacaaaggaggagggaaggaaggcaaaactgtaagacactatggagagttgcgagttgtgtcttctatcgaagcttgttcgaatggacggagactctagccaaggtaggtatatgtatatataaccttatccactttaagtgtaacctctgttttggtactctccatggtataattttaattcttgtttcacatgtaccggaccttttctggcactaggatagatttaccagagtagacgatgcttctccagtgttgttgtgattgctttttgtgtcctgatctgtaaccagcacacacgtaatttaactgaagctttctactaaatcaccaccgactgtaaacttaatttcacaaacacggattatatttttcattcatagttactgatgtagtgatgtgtgttgtctcttgagtagggtggtgcggggccattattagttggtatgtactgtgtttggtggattgacctgttggttctgaatttttgataaatacactggccatgtgttaccttatttggc

SEQ ID NO: 124148 - DNA, 521 bp, Zea Mays
tattgcatcagacgaaaggtttccggccggggacttattgccaaaacgacggagaatgaaatgcatccgtcaaaagtcaaaacgcacggtggtttagaaatactacgtaccaccgaccccgtcactgtttccggtaaaggctagccgtggatatgtggaatccttaaacaccagagagcaagatggggcgtttctccatcatgcaaacagcaaagtgaaggaagcaagacggatgcagcgtgagtgggaggaggccgggcccaaacgcaatgggatgactcgaaagctacctttgctgatccagcgtgtgcgatacaagatttgttgcagctagctggcgcttaagacctactaccatgataattaaccgaaagcatgcaggctctacgttactaaagccaaagtgcgtgaaccgactgtttgcccatgcctaacgaaggactaaaggttaccaccggggctccacgagatctccggggatctgactcgaactcgacctgagcaggacgcgtttggtttgg

SEQ ID NO: 124149 - DNA, 320 bp, Zea Mays
tcagagttggctggactcgatgcaacttttatcaccttgtgagcatcttattcggaggcgagcaccctaatcctcctcgctggtagtggtgcaacagcggaagaagcagacggaggttgttgcgaaatggacggggtttgttgctagagtgacaactgcgagaacgctgttgcgcgaacaaatatgatagagatgggatatgatctggtaccgcgagttgattttgagaaaatacaaggggttatttgtataaagatgacacgagacgaccgttgaaaatattgctttaatatagtagagatcttatcgtctggctgagt

SEQ ID NO: 124150 - DNA, 539 bp, Zea Mays
gccaacttcgagcttcggaaatcctatgtttcttgccatctcccggcacacaaatatttccttattgtccgggaggcagtacagaaagtcatcttcatctgtgccattgtacaccaaggatcccttcggatatttcaattcccgggcatagtgtctagcttcggcaatttcctcttctgacaattttctacccgaagcgtgttgaatgataaagtctagctcttcgggagtaggagattcaaccttcttgggcacttctttttccaggactggagcgatttacaaaggttcttgttcaatactctgtctcgcttcagcaggccctgtttcaatgggcactgaaggcccagcttcgacttcagcatgaattgtagtagcttcggcagtctccttcacaggagcaagagttgatgcccttgttgattccaagactgcgtccagcacgctggccatcctccttctcttgggagttattgcaggagctttggataccttcgacaactctggctctggtaatgggctcaacatttttggtagcc

SEQ ID NO: 124151 - DNA, 351 bp, Zea Mays
gaactttgttttgggcggataaggaaatcggttgcctcaactttgtgccggagactgaatatagtacttttgcagtaattatatatttggtactgccccttataattacatgtttcctcgtttggactgttcttgaagggaatcctatagttgctggaaacgtattctctcgccgagcctccttacggatgcaccggatttagggactatctagatgtatatctaaggaccaaaaattgacacatattttatgccacacttttagcagccattgacaagtatatatatgtagtagtagaaaaatcttaccataattatggccgatcaaatctgtctaaccccttgaacgtg

SEQ ID NO: 124152 - DNA, 752 bp, Zea Mays
gttttagggtacccctaattatagtctctgacaataataagttatagtgcattcaaacaccccttaggaactgtatacaccgttactcatcgttgtactctatagtacaattaaatgagcatctgcatatggatttaaacgccagcgcggatgccagtatgtggcaccgtgatgcatacatcagagaagaaaccttaaaccgtccaattaatgagcccttttatggttattgttcacgatctttactttcacctgaactaggaacaaattaaccttccttttacacactcagagctaccagtaattgctaaattaccacccacttctttaattaagagcctattatttgataaacatgtattaagtgcctctttgggatggctccggggagctccggctcctggccgaccaacgtccggcagtccatgtgcgcaggcgagaaacgctgcagcggctctggcttcgttaattctgtgaaatgcgctctcacagggaatgaccccctcccaagagccgcaagaaaatagctccgttgccagagctagtgcagttggaagagtcgaaggctgcgcattttagagccctcctaaatacgccctaagctagttacttaaaaatagctatatttggctagccaaccaactgatgatttagccaaaaaatccattagctcataagtaaacagggggcaaaaagactggtgcatgcagcacacattagaatgcagtcgttgaaaataagccatattaacg

SEQ ID NO: 124153 - DNA, 805 bp, Zea Mays
ggaggtctaggcatcggtaccccttgcgatcaggggagtaccaaggaaaacacagtgagtggaacgggacacaagcttgtgaggggcagtggcaaaaaggttaggattgcatgcgcacccaaatacacgaatgtgatcgtaggagggagaggtgccaaagagagtaaagtagggatgaggaaccgccttggtggggtggcggttgagcaaatatgtagcagtggccagcctcttgacctagtagcgggcgggaagggaggcctagaacaacaaggaacgcatgacgttgttcgcggtgcgaatcatgtgttcagccctgccgttctaagaagaggtataggggcacaacatcctcagctgagtgtcgtgggagtggaaggaacgggacgtggagttgtcaaactccctcctgttgtcccctggacagcccggacggtgtgtccaaactgattggaaacccaagcggagaagtgagaaagggtggggaacgtatcagatttcaagcgcaagggagaagtccataagtaatgtgagtagtcatccaagagcaaataatatttattgccagaaacgctgagtagaggggatgtccaaacatcatagtggacaagataaaaaatgtctgctgttctagaagaggaggaagaaaaaggaagtccgacatgtctacctaactgacaggcatgacacaaatgaccaaaagaaccccgactacaagggatgacagaactgctagatagcttcgacatcacatcacgcccgggatggccaaggcgacagtgccaagtgatggacgatgtagcag

SEQ ID NO: 124154 - DNA, 982 bp, Zea Mays
caaatttgaatccttgcaaacattatgatgtggccgccttatcactctgatcaagtgtcatgttgaatgcaaccatcataggggcccaacaaacctccatcatgaatcttaaaattgttgtatcagtgataacagaaaacacagaccttcataaggccaaagcttgagctacatccaaagcatcagcagatacgaaactactgtataacaatggtgtgtgttattcttactccgacttttcacgctttagtttaaatttgtcttgtatgtttttatgagcatgtcatttgctccaactaccctgtgatcagccttttccccattaatgaagctaactggtaaatggtttgtgttattgttactccgacttttcactctttagtttaaatttgtcttttatgtttttatgagcatgtcatttgctccaactaccctgtcatcagcctttttcccgttaacaaatctaactggtaaatgaagttagatttagacatttgtacgttgaaaatctcataaattaactaatcttgaatcaaagatgtttgttattatttgcttaccttatcctttgaccatagtattgtgagcatcagtgttgagcatgattacagaataagcaagaacatatgtagtttccgcactggtaaaggagcttggattgcatttgtagtatcgttcatcaaacttttccatgactcgatcaattttatgttcttacccaggcaacctgaagcctcacaaataatacataatagcttcaccaaagtcctacctttgaagtttactccatcaacatatgcatgcataactttgatgctgtcgccgacaccgacaccagctgcttagtttattccttccaaacagcacaagtattaacattttttggtttattattgcatttacattttttggttatagtattaacgtctaatatcaaaggactgctattgtggggggctctaatggcatttcttatattgac

SEQ ID NO: 124155 - DNA, 405 bp, Zea Mays
aaagataattggacctacacagaccgcttttattccgggtaggaacatcatggagggagtggtagtcttacatgagactattcatgaacggcatcgaaagaagcaaaatggggtaattctcaagatagactttgagaaggcttatgataaagtgaggtggagttttgttcaacaaactttgtggatgaaagttttctcagataaatggtgctcttggattaatgctttcattaggggtggtcatgtggcaatcaaaacaaatgatcagttgggacagttttttcaaacgaaaaggggctacgacaaggtgatcccttatctcgtgtcttgtttaatattgtagttgacatgttggctatattaaccaatggagcgaaacaagagggtcaattatccgacttggtg

SEQ ID NO: 124156 - DNA, 400 bp, Zea Mays
ccacagctggtatcggagcaaattccaccacagagaaggacaataaaccatgaataccaatttttaaaacctaaaacttgcttagaaactgttacggatcgtcaggactagatcgctagacctaggacgaaaggccttaggcatagagggagaaataggtggctaattaattaggccctgtgggccaatacttatatccttaaggatgccctaaaaaggcaccctattttcttttgagaggcaacgtttcttacagcatgcatgcattataaaacacaaagaggaaattaaaatttgagctaaccccttaaaatcatccgggctctctttttctttttttccttccaccataatctttatctttgattcccttccgcagatgaattcacccacccccgcc

SEQ ID NO: 124157 - DNA, 351 bp, Zea Mays
aaacaagccactcaagtggggcttcaaatataaatcaggatttcagaattctgaaatccaaccctctcacaaagatcaaacgcgttcaccatgttctaaaactcaaattcacttgacccaaataacaaagtggtgcaaggacccctagaacaccctggtgaagtttgaagacaaacccaagtcggttgacatgacttggcgtgagatttgcgtcgggacgaagcagtcggacaaacccacgttggtgacatgataacgccccacacagaccagaaaacccctcgacttccacacgaaaatgttagagtagagtcggggggaagaaatctctcataaggatcctgttgaaat

SEQ ID NO: 124158 - DNA, 478 bp, Zea Mays
caaatatccgctgctttagagtctatgggaggggaatggtcttcacaaacaccgactactgagggtagataccaccaacgagataatacccttggctgtactcgtcaccattcaacgtgaagttcatattttgtgcttcaccattgagcacgccagtgaacaacaacgactgtttgagcgcgttgacgtcgttattcgaccccaacgtcccaaaaatgcatgccatatcaacaagtcatatgagaaaaacacctcaagcatgatcgttggggatctaatgtccccctctgtaaattgccctctctatccaatcagatagttcctacactttcaacgcatgcaatctatactccccatcatatcatgaaacccctttccccttagttaatagtcatatgagattgctaataatgggacgatgactatactccttgctaaagcatgaaataatacctgtacataatagtttgaggcactt

SEQ ID NO: 124159 - DNA, 583 bp, Zea Mays
attgtcactcaatttcaaagtttgaaggataggaaggttgtcttgtaatatgtaagctttctatgctatttaatgttgttatctacatatttaagatatttccacgagccaattgattatgttaagaattgaataataccatcttatgacattatttgttgtgtgagttatgatttagtttactaattgtgtaatgtgtatgttccattatatgctatgaaactacttctatgtgatattataatcaattatatatgcctaaatgctattaggatatgctttaggccataaaaaatttgagtaaaatttcgaatagacattccctagatcctaggccagcccctggtttcaatacaaaattaccaaaagattggtatatcaactttacctgtgactaaaaatactacatattagggaacaattttacatttttatactagccacattatttaattattataaggttataacattcaatttgcatatgaaatatatagtgttgcattgtataaagttctatgtttacctactagcaaataagatccttgagagagcatgagaataaaaacaaactggtttcaag

SEQ ID NO: 124160 - DNA, 330 bp, Zea Mays
tttgatgtttttactccccttgaatcaacaacattggtttatagccatcgaatgaagatccaaagttttaaatgagatggggccacttcagccaaggtgatggggaagatttgtgaccaggcccatgttagggactgtctcacatgagggggagcgagtaggccatcctgggtagacttctgctagttcacttgcatgaaaataaggacatggagatctcatctcttgcaaattttctagtcctttttagtccttgtaatgatttgtaagaatgaatcatcaacctggtatcagatactcatgattcactagaagaaattaacaaaaaga

SEQ ID NO: 124161 - DNA, 614 bp, Zea Mays
cgaagccatctgccagggggagagaattactactatgcacatgccaaattttttcaaccatgttattttattcatcacacaagttcattacaagcatacaattaccacaagccatactacacgcgagtgctctctaaggtgcttccgaactccctttctaaggtgtccccaaattccttgagaaggtcgtcaaggttagctagggacatatcctcaacgtttgacaagttttctatcctggagggaggcagtgctggtggggcttcctttttctgctcagtctggcatccttggctcttggtcctcttccggatcttcttagtgtgggtgagcttctttaacttcttatcataatccatcttcagggttcggtaggcttctcgagtgttggcctctccaccttctgctatttcgagaatttcttggagggacgccttctcctttttaagttccttgacctgttgctctaagctttccacccgggagtttaggtgggtgcagtgagaggaaaggtcgtcatagtggttatcgagtgtgtggagatatctggccatgtagactatggtggggtcatcttcagtaggatctcttactgacagggcctggagtctttt

SEQ ID NO: 124162 - DNA, 464 bp, Zea Mays
ggagcatcgagtgccacgttgtcgagtctggctgactctggaggcacatccccttcagccgggttgtcgttcccttgattgtgagactattggattcaggacggacgacacccccgaagcggcagctatgaagaccctgacgactttctgtggctactagggatggcaacaggtttaaaacccgcgggtacagagattacaaacccatacccacgagattaatgttaaacccgtacccacacccgctacccacgacgggtagcgtatgttacccaaacccgctaccccgcgggtttattgcacccgcgggtacacccgcgggcacagtcatataataaatatttattaaactgatagcacataataataaatatttattaaactgataaaaacatgtaccaatcttagccaaaagttctacgagttccctggcgccggtagtcttcttttatatcatttgattg

SEQ ID NO: 124163 - DNA, 710 bp, Zea Mays
gaattgcaaatcggcagagagggtctggatgcaggaaagcaagaactagggcacggaatgtggagacacggaacagtgcagtacatatagggttttcctgggccagatgccgtttccaaaaagtgcccagtcatcacccagcggttatttctaaaacactggcgtgccacgtcatcactcagctactatttctaaaaaagccagcgtgccatgtcatcactcggccgttgtttccaaaacggccgacgcggcccaaattgactcagccgttgtttctaaaaacgctgacagtacttgacttcactcggctgttacttctaaaacaccgacgttgccgtcagtcactcggctgttacatctaaaacgccgacattgccatcagtcactcggctgttacctctaaaacaccgacgtggccctgccatcattcggacgctacttcagaagtgctaacgctgtcaataataactcggtcgttacttccgaggcatcaacgttgcagataaaacgaacggaagaatgattcgagaactccaagttactgcttaagcatagcagacggagaatatcatgggcaataaatattgcgatgatcatcaaccgaccaggaggcaaaataatcaacacaggaggggacgaaatcgttcttcataaagggaagctacagaacttacaaatcaactcgttatgagttgatacttccctactac

SEQ ID NO: 124164 - DNA, 6909 bp, Zea Mays
gagaagtgagtggagatgagcttttttcggcttagattttggttcgggtggagaggagctttgtgcggctaattctgagttaggaaaactaaatattaatttacaacaattgccaccggttgaaaacaaactttgcatgccattcatgtggcgttctcccatagccagaattgctagggctcggtgtccgaccactatccggtgcggcggtgcctccgatcaggtcatagggcaccagccaccgcgtacatccactcctccattcctcaacggaagtttctagaagaggtgacaacgaacctgctcttatgttgtcgtaaaggtcatcggcacccaactgcctacgacatcgttgttgctgctcctgcatgcacaagagtcgggccgatggcctctacctccgatctgtgccctctcctcttgccacaaagctaacgtatgtgaacatcctctcctccttgcttccccaattaaatctagaaagatgtttcttacttagaaattacaaattaatgctgctacaattttggacaggaagaattttacattagcttgttgcagtttttgccttgagagccttgaccaagcgaacatgaattgattattgtggtccgtagctagatataggtggtgcaattgctaatcttagtagggattttatggaagtttcttatgacacatgattgatggagagcaatgaaactagtccacactattttcaacacataatagtcttggaaacatgatacgaattccctactaagactagctaccttaacaactgcaccttaaaaagaaaacacactgctgattacttgtggctctagctaagctgatgatgctttgatacttcaacaacaatttatttgacaacatgttaggtagaatcatttttagtaataaatcatacaatatgcgtaacttgttcaacacttatatgtcttgctatgttctgaatttgcgctgccatgttatgagttttttcattgctcaagattgccatgttcttctatgttgcacttgaattgctcacttttaaaattcattttaaacaacctcatatggagaaatgaacaaaatgaatgttgtagataacaaaaagttatgcaactttaaagttgatatgcttttatttgaataatttctttaaataaaattacatttaaattttttaaatatttgaatcatatttaaaattcaaaattttgaaaccacctcagatgaagaaatggccaaaataaaagttgtagagcttgaaaattataaaacttttttttgatgaaataggatgggtgagaacccctagtgaaattaatatttaaaagtaaaaatacaacgagttaaaaagttgacatcaaaactattacattttgactaatctaagtaattatgccaggcacatatgatagagacatttttttcttctgcactctaagaagaaacaaatcaaaaagatctttgaaattattatagtagttcattactgaaggatttatgccttagaatagccaagcattcctttgagtccagattgaccacatcataatgatgatgatgtccattgcaaatggcaaacccaaagcagattttattgcagtgatggtctggatgtgggagcctcctctttggaaagtaactccaatttttggtacaacgctttgcaaacccacaatggaaaaataggtgcttcaccgattctagcttctgtagaatgcaaagtccaaatactcattttaaagtataataagcataatgtctagaatgaatattttaaatgaacataagtgtcttattgatgcatttgttagacaaataacccgcaaggactgagatatcgagctcgagcaatggcagccacaaacccgtttgtccactatcctaatggtcgtcagcacccgaccgtctcccacattgttgttggtgctagatgcatagtccaagctctatgttggatgtatgcccactttttcacacatatagtgtcgaagccaagttccaatatgtctcggcacatgctcgagctttgaccgaggtattacgtggaggccaacccaacacaaaggttaggacgccagacccaacacataggtgcccaagtgggctaggacgtcaggaagtggtgtccaatattcaatttcaagctggctccactagtatgagcatcctctcctccttgctcccccaatcagatctctattccccttattctcccaattagatatagaaagatgttgcttagatgttacaaattaatgcacatgacttgattactatggcaaccattatgtgctaatatatacctaaataggtgttgcaattgacagtcacattgaggattttatgaaagtttcctatgacccatgatttatggagagccatgaaactaattcacattattctcaacatacgatagttttagaaacatgcatataaaattcgttgtgatctttggtgtgctcgaatatcaatagcatgtatgcatgagctcaaatacatatgtgtggagctttccaggtgcatcttacaatgttgcacatttaagaaaaataaaacattcatatgcatgccaaattctagctttcggtcacccatggttcctagaaatgaataagctaacttccaatgcacaataaaaccaatgcttccaagaaattaataatatgaactatcagtaagtgagaagtaattgtagatgagctttttcggcttagattttggttcggcaggagaggagcttttgtgcggatggttgcgagttagaaaaactaaatattcaccacaatttccaccagttgaaaacaaactttgcatgccattcatgtggcattccccacaactggaattgctagggcatgttgttcgatcgctccccggcgcctccagctaggttatagggcgccagccatcacatatatccactcctatattcatcgctagaagtttctagaagaggtgatgacaaacctgctcatatgttgcctacgatgttgctactgctcttccatgcacaagagtcaaggcgatgacctctaccttggatctgcgccactcatcttgtcgtacagccgacatatatgaacatcctctcctccttactctcctgagcagatttggaaaggtgttggtccctaagaggttacaaattaatgctactacaatttagatggcaagaattttacattaacttgttgcagttttttccctgaggcccttgaccaagtgcacatgatttgattatcgtggcaaccattatgtgccatagctagataggtggtgcaattgctaatataataacagtggggattttatgaaagtttcttatgacacacgattgatggagagccatgaaactagttcacactattttcaacacataatagtcttggaaataggatacaaattccccgttgagactagccttaacaattgtagcttaaagagaaacacaagattgattactagtagctctagctaagttgatgatgctttgatctacaactgtagttcatctggctacatgttaggaataatatattttagtagaaaattgtacaacatgcctaacttgtttagcactgatatgccttgttgtgttctgaatttgcctgataagtgctgccatgttatgagtttttagtgctcatgatcgtcatgttcttctatgttctaatttgttcattttcataaaattttcatgcattgttttacttgtatagatggccaaataaaccatctgatctgaacccgcataagcctgaccaagacaggacccaatagttgtcaggcgagcaacacacgagtgtgactaactaacacattgggttgtgttgcacctactcatggctacacatgtgcctcggttataaccttggtcataaccccataaaccttgagccttactaggttggcccattgacacacgagcccgttgtgcttgaagcattgcaaatctattatgccactaaggttgtgttcggttcagctttctgaaccagactcgttgccaaaaatttggaacttcaaacaaatgggtacaacaacataatagattcctgaaaatcgacatatttctctagttcaattcagaatcaccttttaccccagatttttagattcctattatctatgctataagctaccattctcttataaaatatataattgatagttgtttcaaattttcagtttttccacaatcgtcccttcacagcagttttctcatagctcacagctagaatccgattttttaggaatctacagttgaaccaaatagacccgaagttacccctaaatagaaggaggctaccaccctacccctgcatagatcaggggtgaagtcactgcctcacccctgcacaaatcaggaaggatgatgcatcaccctatccatgcggtcggatctaagggaaggaggcccacaataccacctacacatggatctgagggaacatgtcaccatggatcttggtgggcattaatgagaggacaaaccgagaggaattaatagacattagtgagagaaggaacattaccaattagaggacatatttcgtttcgagaggagatgtgacattaaattgactagggagtatgatgtaggagaggagctcgggaggtgatttttctagggataggatctgggaggtcatcgattgggattaggattatgagaggagagggaataaaaataaggtgtccgagtgagagttcgatggggtggtgttggtatatactatataagctagggtttaaagtagtgggccatgttgcgtcaggctggcacgtgtgccaaggggatggcctaggcattgtgcaagcgtcggctaggccaacataagcatgacgattatggcaaaacatcaggctatgggtcatgttgatggctaggactcgagccttatggtcatctatagttagttgtaatagtaagcagaccctatttattattgcatagtcatgtacatttcattttctcatcttcatgaatgctagtgaatatctagttggttgtgacaataattaattttatatatagatggaaaaagggacaaaaaggaaaaccattgcaaaattggatgccagtgcacatatagcgtgaatagacatggtttaggaagagatcactagctactagctagaatagggcataaggtcacacacaaatcatgttaaattttgaagaataaactggcagggatcctactatcgtggacaacatagaaataggtggtaccgatgctcacaaagctgaatctagagcagggaagactttgaagatccatgacccaaggttagcggtgaccctgaaatttggacaatttttagggattattttggaagcaccctggtttttaagaatccagtttctagaaattggtttctaaaaaaaagaggtgagggtgtttgaaacccggtttctaagaaaaacaatttctaattttttgatacacaatgtctagcctatccttcctctataaattgggtgagggtggaaataaatgtaaatgtcatgaaataaataagggcatgatgtaattaaacagacaaactagttttagctgggagaggtcaccttctggattttaagaaactagggatctagattctataaactagagcataaaccattatgtttggaatcactctagtttccataaactagtttcttaaaaatgggcccttaagagttgtggaatgaaaaggttaaggtataaacaaatacatgttttcttttttagttgacgaggattaattgtttaaaatggattggcatttgccttttaattataggtcactctagtttgtaagaagtacatacatgcaccactagaatatgaacatagattatatgttatttttcttacacaccaatgattccctcatgttccaaggctaatggatggagctatcaattgatgccatagccatgggcaatagatgtgagatccaaaatgggtcaagtgaggcttggaacccaaggcattgagttgttcttttttagtaattttatttaatattgcggtgatttgtcaatgttggccttgggctagagataaatagttcattgattgaaatactagctgaatttagcctctaggaaggctagaggttaagctaatccacttttagagctaaacactttttgcagctattagttgaatttagtacactaaatgttctagatagagctccatttagcccgcaaatcaggcgaggggaaccaaaaaggactaccaaactagctgaccaaagataatcatttataaattgatgtgtttgttagactatcacttgttagttggtatttatagtatcttgttcatcttttttgtttagatatgtgtaaaattccctgatgtttaacatgttttttgcccacccgctaaattatttagcgcactaaaggtcatagcagactatttagaacactgaataccagtctattgttttctcttgtatagaacccgttggccatacaaagtatgcaaactaaattatagttggactctaaacaagagcttgttgtttgattaaaattctaaatgactggagttttttttggacatgtcagtttggacctatagttgtatactttgaaataacatttgtttgttcacttgttctataaagaaattatgtaagcttagagcctagactagaagtgcattttccttgtgttggttgaaactgcacctatatttttactatcatcaattctaatgtattataacaatatagtaccatcatgagcttttccaattattctagaaaacaggtcatgttcctctattatccatttaaggtttttaaaaagacaagtaatcagttttgatgtaaagtttgcaagaacttacacatttatattatttatttgataggtcatgaagcataatactaataaaagtattg

SEQ ID NO: 124165 - DNA, 351 bp, Zea Mays
agataccatatgccatgaaaacgtgcaccaaccataaaaagacaacacgaagggtaaatttcttctttttaactctcatacgcttggactcctttccataacttcttcacctctttgtttaatggttgcaccatcacattggaattctatctaagattttttgttcaggcatgatgaggcataggaacatgagcatatacttcatacaaagaggtggaaggttgtatagaatagcaaagacaggccaacatgagtatgaagctacacttacatcaaaagccgtgaaaccatcagtcaccaattaggttcgaatatatatagggtcattggcgaagtctagatcaaagttct

SEQ ID NO: 124166 - DNA, 572 bp, Zea Mays
taaatctcatctagatgagttacatgcctctgctggactttgctactccttagtatgcaaaatactttgtattccattgatgatacatccattgctttgccagcggttgttgctaaccttttacaggaatatatggatgtgtttccctcagagataccccctggattaccacctgtgtgaggcattgagcacaagattgatttaattctaggggcgagtttgcccaaccgtgctgcctacaggaccaaccccgaggagactaaggagattcaacgccatgtccaggaccttctggagtgcgggtacattcgtgagagccttggtccttgttctgttcctattccaagaccttctagaccattgcggcacccctccatgagttgtcaaataatggagtgtcatttcattggggaccagcacaacaacaagctttttatgccctcaagttgaaactcacacaattttaacaagacatttgagcttgagtgtgatgcgagcgacattgggattggaggagtgctcattcaaggaggtaaacatgttgctttctttagtaaaaaattgcatggtcc

SEQ ID NO: 124167 - DNA, 857 bp, Zea Mays
gccgacctatggacttttttagccggttatgggggaagaggatctccatctaaagattccattaatcatccattgtggcggagaggaatttcagcgattacaattaccattttgaagcaaagcaaagcgggtagagaggataggcttagcagacattacagcaggattacatactaaagatgtcacaccaggcctgtatctgccttcgctttgttcgtggagaggaactgtgccacaaccaggaatcaaccttgcatgattggatcacttgtcgaagtggggtgagctcgcctcttaatacctttgtgttccggcgtttccaaaggtgcaaacaacataggaggataaagccaattaaaccctgtccttgaagagcatgggggcaagcaagttcgaggaggtgggagcagtgcatatccggggaatggcgatgccagtagcaatctagaaggttttggcaaagctaatgtggaagagcatgtgtgacattgtcttgggttctaaggcgcatacttcacaagtgtcagaatctaggattttctttttgcgcaagttcactcgggtttggagcctgtctttagaggtgtcagggatatgatccccaatccctagggcccatcggtcagcgagcacaccggggaaaagacctatggaaactagggcccgctggtcagtcgaagttattgttgcagaaatgcatagtgatgcagagaagaggaaaacatagaattcaggtttccctgagattatcaagaaatgcgactttcatattttacactaaatgctactcatcaaaatataacttcctaccaaacgaggacaatgttgcatcttgttgcacccaagtataagatttg

SEQ ID NO: 124168 - DNA, 1658 bp, Zea Mays
atattatctatccctttttcttctactatattaaataatacctctgcttcgctcaagttgcctcctctacaaaaactagtaatagctacaccataggtgagtgaattaggctccaacccttgattcatcatgtgctcaagaaggtcatataccttaataacagtgccattcctgctatacccactggccaatatgttatatgttactacatctggttttacattttccttcagcatctgctcaaatacttgccaggcattttccatttctcctttcagacaataaccattgatcaggcatgtatagtggattttgtctgggaccaaacctcccgccatcatttcagttagtagcttaactgcctcattcatgttcccaagcttgcaataagcatccatagcaatgttataaagaacgccgtcaagatggagtcctagatctctaaatttctggaagtgaacaataacttcagatatcatgcctagcttcttgaggcactgtagaaggtaaccaacaatgtaacaatttatctcgatgccatgggataccatggcttcaatataatgccacaccttttctaagttacccattttgcaataactacgaatgagatagctataaccatatagatcaggggtagatccatgtctggtcttgatgtccaagactttttcagcctcctccagtttcatttctttgcatagtccatcaattaccatattataagcgatggactcaattgcaaccctttcctgggtgatctcatgaagaacagtgtatttgcttaccatgttataagctagatcgtactttccacaatcacaaaggccaattataaatgatgagtatccatgtgcatcaggtttcattcccatttcaatcatcctaacccacacttgaaatgattcttctgccttatttacttcaaaaaacgacctaatgactatgttcaatgattgagtatccagcatcaactgaaagcacttcatttgatcataagctctaacaaccatatctgaatcaccactctgggatacaaatttgataaggaaactgcaagcccaaagtgtaggaacaaatccaagcctgcaaaggtgacaaaacatctctactgtttcttgtacgtcgtggctgttagtgtatgccttgattaagcaattgactgcatatgagagtatgtgagaagtggcacaagttttgctcaagtgaccaataagtgttaagatttctgggtcaccattagcagttcccgaaagaatctcacaaaacaaggataccaacatcttcccctggaatgaatgggataaaatttgtatgatctctgagtaggttgagaagtcatggttaaaaccaaggctatgtatatctttaaagtaggcaaatgcaactgcaggcttcctccttaggcagcggagagcctgcacaacactgtaagagctcaaagacttctgctgtttctggataggctcattatcagaagcataattcagcctttcatcaccgcttgagtcatcatggtgaactgaagcgagtacggagtagttgcaagaaggaacttcccgcgataaatccttactgtgcctgaaccattcagcagtgcatttgagccaccgtgacaggatcattggagatataaatctttgtgctcttctaacgac

SEQ ID NO: 124169 - DNA, 405 bp, Zea Mays
atcaagtggcattgatactatcaaaggaccatttgtttttcgttggcatttcttgtggatattgtggtcagatgtacaatacaaattagtagtatgagcaaagtcctttgatgaatattttaatgggtctttttctgggcacaatagggggatatactctctgttacctgtggtgacgatttatgcaaattactgatggtgcattgcatagatcaattgtgtattgcatgttgggggtggcgggatcactctggtactataattggggatatggaagtgtagcagttttcagtgtgtgcataacttttaaatgtttggaggatgaattatgacatgtgatttattcttgtcgtttcttgttctgaatgtagaacatgatatcaatagaagattcaatgtatatgg

SEQ ID NO: 124170 - DNA, 465 bp, Zea Mays
cttaaaaataaagtcagcaactacagcctcggcggtcagacctctctccttcagcagatagatttcagcaagcagaaccctagcttctgttacttccaaggcagtaggagactcaatccaactcggagtgcgcacatctggctgtctccccgaccgaggggggagggactttccttggttttccacaataaaccactctaggcgccaccccttaatactgtccttaagcgggatgtcaagatattttgttttcctcccgcggcgcatctccagactcacaccacccacgagttggtgctgacccccagccatcccaggtcgatagtgatacagataattccataaaccaaagtgggaaagaattccgaggtaggcctcacacagatgaaaaaagatagaaatttgcaaaatggaattgggattcagatgagtcaggttcagattaaaaaagtcaaggagaccacg

SEQ ID NO: 124171 - DNA, 790 bp, Zea Mays
tgctaaagggctctgcgggggtgctttacgataggatgtggggtcctcacggccgcggcgtcgtccgagagagagccgaccaagcgccggtgcaggtatgtttgtctttgacgatggtggtgtgtgtgtgctcgttgtctgaaacattgttatgctgtctttgcaggcgatgagggatgaaaaggtagaacacctcaccggccttgagagctcggtggcctgaaaggacgctacggtggagacgggagcggaagagcaatcctcactcaaggaaggtgatgcggagggtcctacgacgacgggtacttctgcgtaggttgaaagaatatagtaggaatggtttgacagtcttcgctatgtacatgatacttaagatcggctgctgcgcaggttccgacgtctaggcctacgcaaccaaacttttatgataacgataacgcgaatcattagcgtgtcgaagtgtgataattcttagtagtgacgcatctgatgactctgatgttgagtcatggtctcggagggtggggggttggtgagctcgtttgccgggatggacaacgactcttcggaagatgatttagattattttatggcactagatttatctatagcggagtccccgtcgagccccccctcacggcgacggatacttcggtcggggttgccccttgcgaaccgtggggtcaaaaaagattgaggtgttaaaacaaagtgtgagaatgataggagagccttctcaaggtattggagtctcccgaaggcatcgccgaatggggatggacaggtctcg

SEQ ID NO: 124172 - DNA, 437 bp, Zea Mays
tagtttttttctgacgagtttttccgagaatctgtctgtgaggagaatctgagtattgtggaggttacacccggagtaagataaaagagtccataaggtttaggatctagtaggtgaccgatttcttctatcgcgacgactcgaccgattgtgttttcatgtcgattttggacgattttcactaaagcgattttcggagaaacaggctaaaaagctgcgcatttggtagtccgcaacagcttctgatggccagaatcaggaaaaatgctgaaacaaacaggcccgaaacggacaggaagcgagatatcgacttcttcggtgtaggtgcaataatgtatggtgacatggtgctgggagtatgttgaacatgacatgtattgtgcgggaagaattcaaatccataacacttataaaaagatggatctaagcaatacttc

SEQ ID NO: 124173 - DNA, 474 bp, Zea Mays
cttgatatgaacctgctcaaggctgtcatgcatccagtaagcctttgcactttcttctgtgatcgtggtgcttccattctcatgatagcctcgatttttttcgggttggtttcaattcctcggtggctgacaatgaatccgagcaacttccctgctggtactccaaagacacatttttctggattgagcttccaccggtatcgccttaggctgttgaagaccagctgcaaatcttcaatgaagttttctattttgatcaccacatcatcgacataggcttctacctgcttgccccagtgatcggctaagcatgtttgaatagctcactagtaagtcgctccagcgttcttgaggccgaacgacatggaggtatagcagaaagctccaaacagggtaatgaatgctgttttttcctcatcctcttttgccaggctgatctgatggtatccagagtagcagtccaggaaggacaac

SEQ ID NO: 124174 - DNA, 602 bp, Zea Mays
actcgcgaagtgccatcgcctggggctcgaggagttgtgcagtcgcgtcgcgggggcgtgttcaagctgatggggggaattggaaggcagtactaaacctctagatgaccttaatttctcgacggtgtgcgcagatcacggagaacccgcctcgcctcgcaaaccagccacaccaccatctccaaccaccggtaagtcgcttggaacttgctctattggacctccgcctcacatatccgtagtttcagacgccggcgttccgggatggccatcaccggtgtgggcaccaccgtgggcgtgtgcgcgccgccgtgaggttggggtctgaggttggggatggtgtcataaccgttggatcgatctctgatgctccagatttgatggggtcggtggacacccatttgcttgatctggtccgttgatggaatcgggcggatgaagttcttccacgtccggctgaatcttgggccattgatctctgatcctagcgtccagggtgcataccgattcgtaataaacactgatctaatccgcatcgtcaccttttaatcggacgattctgggtgcaagataccccttcggtctgtgcattttgcagataa

SEQ ID NO: 124175 - DNA, 827 bp, Zea Mays
cttatatgttccttacctgggtctcttaccaagtgacaagggagagcacatccaatccggttccttgcggactaccagcgccaccgtcagcctcacacctcggccacctcatcggaagccaaggggtgtaacatagtaaattgggtttgcgtgcttgtttttgcagagcaggaagataagaccaagcgattggcgtaccttgtgatactcctcgccgacgaagggcctgaagaagatctgggcatctgatgtatggcagcagcgactaaatctaccatagatgtagtaccgcaaagaatatgaactgtgggaatataatgaatgcatgctcacctgcacagctctgttcaacctcttgattggcctggaacacagatcaccgcatgaattttagcaaagagatcaaaggagcagaaaaaacagaacaaactttatttcttggtaggttgataatgcaagtaccaataaaattttagacaaagacatgtcaacgtagaccatttaaaactaagttattgagaggctaacccatagtctaacttctgaaactagtttccgaatcatactgcaattctgttgattcttcatcataactttaactgtctcagcatcacatatcctgatcccacttgcactgcctatccaaatgccaccactgtggggaggatgaagaatagaagggctacaaagattcaatgcaaagcacacctgactgcaggcgcatatccagtaaaggacatgggtgtgctcatgtacgcataataatctttgaaagggatcgaagttggcatgtgcatgtacacacatgtaattagatggactcacag

SEQ ID NO: 124176 - DNA, 329 bp, Zea Mays
tgttgaggcaagaaagattatggcaaggaaaagacttcatccaaaatgtttaagtcttggtttatctcgagattcgctttgactgttatttccatccttgtcgatgttgatctttccttctccggtcttggtctcattgatttcgaggtgagtgtatatcatgggagttgaggaatatggttaagatagatatgagtgagatagactacatgatgtaggtcaaaatttggtttgacgctaggtagggatagatggattatacaattcttcattactttattggttgggtcagatctcatgtatgtggctgagttggtttaaggcactag

SEQ ID NO: 124177 - DNA, 622 bp, Zea Mays
attagattgaagtcagctgaaagtcaagagtctgaatgcctttgaaaaccaaaactttattgatgatgaagtcccccgattacagagtacaatgttgcttcgagaatttttgaggcctcgctagggataaaactttctaagatgctctatgttccatgagttccccacttctgtgccatccatttgagtaagccggtatgatcctggccgagtgacctctgatacaatgaatggcccttcccatagtggtgacaacttgtgtcgtccttcccccgttagaatttggcgaaggaccaagtctcccactgcaaaggaccgatgtcgcacggctttatcatgataacacctcaaggtctgctggtatctagctgactgaatttctgtgttctatcgttcttcctccagcacatcaatatcctctagcctggtagcttctgcttcagctatgttttcgaaagccaacctcggcaccccgaacattaggtcggcgggcagcactgcctctgacccataaaccatgaagaacgaagtgtttccatgcagagctcgactgggttgagttctcagactccaaaccacgtatggcagttctctgatccactttcttgtaagcttctcattc

SEQ ID NO: 124178 - DNA, 423 bp, Zea Mays
cctcagcagagggtcgcactctaaggcccaaattgctgtcagtcacgggtggattggacacaaaaagggtgaaatctttgggaggaggaaggttccaagccgagtatgcaacgggagcaccaacatttgaaactttacccctgaggatcatctcaagtcggcttaccaagtcaacagaaggaattctcctatcggtaacccgggttgagtcggctagcccttgatacagatatgccggataggccctgtcttttagcggctgaatgttcttgaaaacaaaatctgttaccacagcttcagcagtcagacctctctctttcagtaatccgacttcagtaagcaacatgcctgcctcggccacttcctgattcgtgggagactcagtccaactcggagtacgaacgtctggctgtcttcctgacc

SEQ ID NO: 124179 - DNA, 634 bp, Zea Mays
agttcgacgaaccaaataatgactggttgaaatgcattgaggctactagtgacgagttgcttgggacatataccagggctgaagatgatgctttgtcctcagcctttgggggtcggggcaagaaaagattgaacagggtttttgatgcaattgtctttatataccctgattactgctaccccttgcgaaggcaaggaaaaaagagaaaaactgccgcttcggccaccactgttgtgccgaagggcaagaaaataaaggttttgacccaccggccacgatatattgaaacagccgtagtgcctgaatttggtgaagggaccttctccgctgccaaagcgaaacaagctgctcccatcgctcggagcgctaaaggatcgattgtagtgccgaaggtgcctatagtcgggttagtcgaagccaaagatgatgcggccagagagccagagttgaaaaacacagtgatgatgccaaaaattctgagtcctccggcaggggcagaactgctgaaggtgacaagggctcccgccacaactcccaagaggagaataatggcaagcatgctagacgccattgtggaaacaacaagagcactgactcctgctccagtgaagaaggttaccgaagctgctataac

SEQ ID NO: 124180 - DNA, 283 bp, Zea Mays
cttgggggttgtaatgtgttgcttaatggcgtggtcgtatcatcctcctccccttgaaaaggagtcgtcctcgactctgaagtgtcttcactcgtatatggtaagagggcagcaacattgaatgtgttgcttacgccatagcttggtggaagatctatcttgtatgtattatcattgatcttggcaagaaaacgaaatggaccatcccctcgtggcatcaatttcgatttgcgttgatcaggaaaacgctccttacgcaagtgaatccaaaccaagtcccccg

SEQ ID NO: 124181 - DNA, 634 bp, Zea Mays
aaatttgtgacagatggatgaataagcctaaagacagaatttcaaacttattgatctttggttgtggtgctttgttttgggctatttggagaaccagaaatgattggttttttggtgaaaagattatacttgacccggctaacataatatttctctattgcttttggttggattcttgggctattcgacattaagagaaggaaaaaaagatggtggtacaaggaagtcaactaatcagaaggatagtaagtgaggcgatgagcagggcctttggatggtgtccgagggaccgtcgcattactgtttgaagactccttttggcactacatgctccttctagtggtcatcgtagctcaagttcttttggatgttatgttgatgggttagttgcatctaggatggttttagctgggttgctgcctttggcctgtggcctttgtaaataagcttggcttaaaaactgtggagctttctggtcgggtgctagtggagtctgatctttgcatatccttgttagattgtagaggttagttccactagttgctacttttgctgatgggttgctctccatcatggtggactgtaatgactctttgcctatttcctaatgaaatagggggctctgccccttcgt

SEQ ID NO: 124182 - DNA, 681 bp, Zea Mays
tcattttgtggacgaagccaataataccatgtatcaatacaaatcaacaaataactaggatataaggtacgaagtatagaggaaatcaccttggtacttggtagagatagaggatggaggatgatatcaatttgaaatacatgactgagattgttgttgaggtgtgtgctacactggcttcatagtttggtgtgaccaatgttacctagcgttgcaacactagctaaagagttgttttggatatctagtgatatgtgtgcgtacaagcacaccccatgtcttctattctttttgcatctcctctttctatgctccatccaccatcacactatgctccgcacaacgctaatgccatctccaacgtcattatctctaaattaaaggcaactcatcctttgaccaagcgctctcgtcttcactaactcccaccggcttccgtggtggtccaccgaccaccgctacactcatccaccaccaatgctaatttaactatttaagctatcatatttctctcaaaccaacattacttctactagcattgtccaactgccctctttcactacatgatgccaccccacctggtcccactaccttatcgatcgctaccacaaccgatcaactagcctcccaagacttcccattgcaagtggagaacatggaatccacaacctaaaaccctaa

SEQ ID NO: 124183 - DNA, 285 bp, Zea Mays
gtttcccgaataatgatgccagcctctgatgcaaacttggcagcttgaacaggttcatgtggccttttttgccttcctcaatagctatgggcagtctcctttgcataactttagtcatcctgtccagttgttttcccttggttgctgctctgggtctccttggtgctcgctgtgtaggagctacaaaatataattcgcttttattgaataatgaaattgttttgtttcatgcaaatcagcaaaatagatgccttatttgactgaaaaaatagaacttgccttccg

SEQ ID NO: 124184 - DNA, 562 bp, Zea Mays
cttgtttcaccaagcaacgcctcattcgacttctagccgattaaaaacctattttactaacaatcaagccgaatatgaggcccttttatttggcttggagcttctaaactgtatgggagtaaaacatgtgaaggcatttggtgattctcagctggttgtccaacatgtattagaagagtatcaatgtttagatggtactctaaatagttaccttgaaaaatattggggcataattcattcttttgatgaattcagcattcgacacatatccagggttgagaattgcagagctaacaatttagcgtaggatgcatcaggttatcgtaaaaagcgagggatatttcacaacataaaaaatctgataaccggtgccacaccagattcccaggtctcagaacatccgggtgtgggagccgaaccgtccgacgttgctaggaaagttctcctgattgatttggctaataacaaagctgatgcaattgattggaggacacccataattagttacctatgaaatcctagtgttaggatggataggaacgttcagcgtacaactttcaag

SEQ ID NO: 124185 - DNA, 910 bp, Zea Mays
agtacatagaagagcaagtagtttcagatggtatgaactcttcaccggtttcatccaagcaatcagatgatccctgccggataactccactcgccctcgcagatgaagatgatacagtggcatgtaaggtcatcgatagccctgaagtggatcatattacattatcagaaacattcacggacattgatctacctaatgtggtaaatgagtcagtaatcagcagcgaacatgccatgccagaaaatgaacagtactatttccatccagaaactacttttggacaagatctgtgtctcgacaacaatgaaattgtaggggaaaatggggaagttccactatgcagctcaaccactgtggctataactcctgaaccaactgtaaacagagagatagaacatgagtttcatcaagctgtgtatcaggaaccatcgaattcattcaatagcagtaaagtttttggagatccactagcttctgactccagagatgttgcaccgtcagtcatctcgagctttgattggatgcttaatggtgcaatgcagcagtcattcaatgtctttccttctcatccaactaatggaaatgaacaagaaaatggttcttctgaagatgcgccaccacttcctcctcttccaccgatgcagtggagaacaaacaagatacagacatgctcatcaccgttatctgcaaagatcgggagaccaccaaggccaaaacctccagcaaaacaacaagaaagtgaagctgctcatattcttcaggagaacaatctccacaaaggcttgagtttgcagaatgaagtagcgcaggcaactatttctagtgatcatgagacaaatcaactccttaacatggattttcatgaaaaccatcaccaggaaggagatgaatatcatgcccaggattccaa

SEQ ID NO: 124186 - DNA, 378 bp, Zea Mays
tgtttttagaaataacagctgagttaaattgggccgcgtcggccattttggaaataacggtcgagtgatgatatggcacgccagcgttttagaaataacagctgggtgataacgtgacatgccagcgttttagaaataacggctgggtgatgactgggcgctttttagaaatggcatctggcccgggaaaaccccatatgtactgcactgtcgcacgcctctacattatgtgccctagttttgcttttctgcatccaggccttctctgctctcttgcaatattgcctccgctctgctcgccagcaaggttgagatggcgcccaagcggaaagcccagagttcgtctgccgcaatcattcctcctatcgatcccaacag

SEQ ID NO: 124187 - DNA, 770 bp, Zea Mays
gtctgacttgattcctctatttgggtatccatgtgtttcgtggcttttgcttgtggttggggtgaactaatcatgtatccaaacatttttctattccttttgttgttcttcattccattcatcgaatatctctgtgactcatttttctcgttcatagttgttaaggtaggaatattgtcgttggcatcatttacttaatttccattggggttcatcatctagtcagagagtaaaagagaaagtgagacaagattacataagaggcttgtacgatatgaagataaatggcgaacacaactttttgatttccaagattagttaaggaacaagggtggtttcatatttctcctagcttcatcatactacaagagcgtacaagtgttataatccttaacatagatcattttgaaccttataaattacagagcatgatatccaaatcatctttttgatccaacaatatttctttgagcacaaattgagagaaagacttgagcgggattttagggcaactagaatagagcatcatattgtttgcatatagcagatgacaccatactttattctctttgtaaagggcaaaacacaataggtgcgaaagattctccaaatttattcatatatcacttagcacaattacaatctctcaaaggggcaacaacttgacacttttttgtgagacatactccttcttctagctaaatgatatattattcttccttgtcagatgtaccaatcttcagggctggaggtcgattgtcttcaactac

SEQ ID NO: 124188 - DNA, 499 bp, Zea Mays
cttcgcaacaaccactttatctttggagctgattgatgggtaccacaaatcccttcatatacttcggccatggctaatatagcatcatatgggcccaaccacttaagcaggacgtcattgactgttcggcggtagagttcatcactcattaaaacatacttgaaagttgtacgtcgaatgttcttatccatcctaatattgggatttcataaataattagttatgggcgtcctccaatcacttgcatcggcttcattatcagccgaatcaattaggagaactttcctggcaaccccagacagtccggagtctttattcggacagtccgcgacctagggaattggccctgcaccggttatcagattttcagtgttgtgaaatctccctcgctttatccgataatctgatgcatcttgtgccaaattgttagctctatgattctcaactctagagatatgctaaatattgaattcgtcaaaagaatgaattatgccccaac

SEQ ID NO: 124189 - DNA, 925 bp, Zea Mays
attttgcagagtagctaccattcgaagataagctgaaaatatgtctatcctcagtgttaggctgcagcacaaaatttgcgagaatattccagaggtgtagataatctacaatggcaccaactgtaagagctcctttgatgtctgcaatccatcgtctgttcaatagggcctgctgcacagttcttctgttaataattctttttggaataatgctgaataatcttggagcaatatcagatacccttttgccatggatccatttatctatccagaacatggtgttggtcccattccccacctcagagatcaacaccttggagaagaaggaacgggccatgctaggaacttgaatggacaggctagaccaagggcgtcttgggtcagttttttgcaaccaaagccatcgcatgcggagggcccagcagagctcaggaaggctagcaatacctagacctccaagctgcaacggacgacatacttttccccaagccaccaagcaatgccctcctttcacctcttttcttcctcgccagagaaaaccttttcgtattttatcaattgcttcaatggcccagtgagggagatcgattgccattgccatatagaccgtcatgctagtgaggacatgctgcactaaaattcttctccctgctctactcatcagatcggccttccagcttggtaggcggtctgcaattttgtccacaaactgctgagcctgattcctggataacttgtgtaaagacaaggggagacccagatatctgcaaggaaaggttgcaatctcacaaggcagccagctccggagttcctcaatagtctcctcggggcatttgatagggtacacatttgatttctgtggattatagcaaaggcctgacgcatcgccaaaaagctggaggatgtcaagagaagttgaaatatc

SEQ ID NO: 124190 - DNA, 396 bp, Zea Mays
ttcccctccctcatctcctgaagctcatttctcccagtcgaggatggaattccatgccgcatctcccccaaccattgaagcttcacgtgttcttacgttcactgatgagatggcaagggaagagatcaatttacgaaaagccctgttcgtcaccatcgcaggtactagacctgtggtacagggatcggaggtgttggatgaggtggctcgcagctttggggtatgtattgataacatgtccatccaacattcctcaccagaggattttctgcttttcctgccggatgaggacactgcctccaggattttcaatgggggcagattattcactggacctcgtttctgcttaatgttcaaaagatggtctcgtttctcgcatgcttctatgtctcgcat

SEQ ID NO: 124191 - DNA, 512 bp, Zea Mays
ctgatatgcgtgcccagatgcagcaagaacgccaggagatgcgtcaggaaagagaagatatacgccaggagttgcgccaggagcgagatgagatacgccaggaaaggagggcacaacaacagcaacaacagcagcaacagcagcaacaagtgccactgcctccaccaccaccaccaccagtcccaccccgtgataagcatagagagttcatgagtcataagccacctacatttgcaagctcacctgatccactggacgcggatgattggctgaagtccgttgaaaagatgctgaatattgcacagtgcacggaccgggagaaggttttatatgcttctggacgtctgacaggtcctgctgctgactggtgggattcttatactgctgcccatgatgctgcagatactattacttgggcggagtttagtacacagttcaggaactaccatattccagctggtatgataaagatcaagaagaaggagtttctgtcgctgaagcaaggaagtatg

SEQ ID NO: 124192 - DNA, 426 bp, Zea Mays
attgcgtgcattgctaggaatttcatcatcaagatgaacctcttcgtgaggcaaatcaccatcagggtgaattaatcagaggagagttatcacagaccacatgaatctgcaatcagaacatatgctttgactaaggccaatggaccatatccgcaggcgtccccgagaatagatcaaatgccaataagtcaaatgtggatatgatattaatcccgggtatatccacatctacatcaggtagaagcattcaaaccaatatggttactcctcaacgatttctggcaaactccatatacacaggagtacactctgaacgacgagttcagtttggcttttgtgcgtttaatagaatattgaggcattacactatatgggcattcctccccctaatgccgagatgttctaaaagcatacagataaaatccc

SEQ ID NO: 124193 - DNA, 777 bp, Zea Mays
aagcatgtcgaataatgtaattaacatcttctgctggagcttcgaagcaggagctttagcttttttctgtcacgacctgcccctctgtcatactggtatccagagtttgttgttcagccttatcctcaggcgcgacaggcttcgtctcgctaggcactgaaggcccagcttcggcttcggcctgggctgtggcagcctcggcaactttcttcgaaggagcaggggtcaaggcttttgtggtctccatgatagcgtctagcacgctggccatcctcctcctcttgggagttgtggcaggagcctttatcaccttcggcaattctgcctctgccggtgggctcagaattttcggcatcatcactgttttttgcaattctggctctctggtcgtatcatctttggcttcgactgatccgactgtaggcaccttcggcactacaatcaatccttcagtgctctgagcggtgggagcagcttgttttgcttcggcagtggaggaggtcccttcaccaaatacgggcactacgaccggttcaatatattgtggccggtgggtcagaaccttcattttcttgccctttgacaagagtggtggccgaagcgacaattattctctttttccttacctttgcaatgggtagcaataatcaaggtatatgaagccaattgcatcaaacaccctattcaatcttttcttgccccgacccccgaaggccgaggataaagcatcatctctggctctgctatatgtcccaagtagctcgtcgctaatagcct

SEQ ID NO: 124194 - DNA, 380 bp, Zea Mays
cgacgatgatgaggatgacgacgacaacgaggacgaagaagaacaagtcaacgaggaagccaactacacccagcaggactacttcatggggtttgggcctatcgttgaacattacacattaatgttcgagacagggcactttcccaacctactgcaagacgtgctgcacgcgctacgaacctgcgtcctccccttgtacgaaacaaggcgagtgagcgagcctccccgggcttgctactacattactcacatccacgtcagggtgatggatggaggggataggggattcaggactctgtctgctcatgagtccctgacaccgctatccacctacgctgcttcggtcagcgatgctgccagacggaccctgtggtctctca

SEQ ID NO: 124195 - DNA, 1082 bp, Zea Mays
cgggttcttgctttgcagaaggttgtgtgtctcaatgtcgatccacacccaggcaccaaactcggtcgtgtgacatcgtccacgcgcacctacccctgagccactaatcgtgtcactcctctccaatgactgcattaatagtcatgcattgggattaggtaacccccaatattacaccaatttgactcgactttttagttaaaaagttgatctttttagttgacttgagctgttcgatcaaatctgcagtcgaaatcatgtggaagtgttggacatactcacacgtggtcaggcaggcacaaacacttagggacaaacgaaacttaggtgcgcgacacgatgttaggtgggaattgtagcgtctcattatgcgtttcccatcagtctacagaacgagggtatttatagggcattggagggcaagtagacttaagtgcaattatgcccccggttacctgctacattctcagaatattccatacaacggggtcattacagtacaacaaaacccatcgacccaactacacctaatactctaccccgcttgggggcttacaagtggggccaccatcatcgggtgaagcatgagcttggttatatgcctcctccaggatcttgccttcgtccgtggtggcttgaatggcgatgagccccctttcttgcatgggcctctacatggtcgcccttggcgaggacgaccgagggcctccgtgtagatacgacgaagtccccccgtttcgcgggggcacccaaatgtggttagctctgtctagtgcagtttaatcgcggtcgggctcgaccttcgctccaacagtaccccccacccgagggatcgtttcaagttagtgagctggccttgaagtattttttcaggcaatggtcgaacgatgccttcgatcacgagttgagctgacctcaaggggtgtttttgtgaagcaacagttgtgatgtgacctggcgactgctgacattttactgtgcgtatttttgttttttgatgggttttgttgggtataaaatctggtgtggggcctgtagggttacttttcttttgcccgtcctcaaactattgcgcaccaccg

SEQ ID NO: 124196 - DNA, 275 bp, Zea Mays
aaaataataagctacaaaaataatctgccttccaacgggttaaaatattctcacctttagactgttgtaggcaaggctatctgcgagttgatcattcgtcattgcagataagcctagttcaagcttcgaatatcctacattgtttgtcatctcctagcagacatgaatatctttattgtcaggcagacaataaaggaagtcatcttcatcatcaccattatacaccaaagaccctcgagggtactgcagatccctggcgtaatgttgtgcttcag

SEQ ID NO: 124197 - DNA, 375 bp, Zea Mays
tgttcaatcactcatagtcaggatattcaaaattcaatgcatccatcacccaattcaaccttcgcttcggtcgagtgccgaaggccgcagtcatcagctgtccagctgatcttcttttttagtgtaattacccaaaatttcgttgcacatggcttctatcatttctaaccattcttggcatggccctttaaactgtttctcaaacttgaaccgataaggcagtcgcacaagttctttcttctcctttgtcccctttaccttcggcatgttccattcactctgcgtcgggaacaccttataggccagatattcttggactagatctcttgtgctgatctgctcggctaccacccggaattctgccacagcttcttg

SEQ ID NO: 124198 - DNA, 363 bp, Zea Mays
tatatttgtaccattatataatccatgagtttaaacattgctaaaatctacccaaccaaattacatctacactgatgacctctcctacacccattcaataaatcgcactcatatataacacatctttaaaccaactgttcatattactagataatatctattttactcaatcaaatccaataatcaatattacttcctcttcctcccgtcgtcaacctctacctcctctccctccctgcaccaccgcgctgcccctctgagacccagtcggcccccttccctctgtagattcgctagctgcaggcctgcagcaacacgccaacgcccagctctgcttgcaggatgccatgccatgcctcgatg

SEQ ID NO: 124199 - DNA, 494 bp, Zea Mays
gatagttcagatgagcattaaagaaactgtagtactccaagaaatgaatgacaataggtctgtaggactgcagttggaggtgtgtagagaatgtgcatgagcctatgtaagattgacaggtggttgcactcgcactgcagatagatggagagaaatgaaatgcatgcatgtatgggctgcctgcctgcctgctccttttgactatatggcatgcatggcagtgacatggtagcttcacagtcacaggacacgcacgctcccagtgcgtggacgcagacgcagtgccgttgcactcaacggaaaaggttgtgatagcttcgcttcgtccatgctccagctccgcctcaagaagaggtagccgaggagagcacgcacccggtcatcagctcaagctgcccattggacggtctagcctgcaggccttagccacaagctcatcgatcgtcgcctctctcttttcaacattcttttttcctaataatcctgcagaatca

SEQ ID NO: 124200 - DNA, 337 bp, Zea Mays
cggcaccttgagatgcggtgggcggacggagtgtcccaaagcgctgctcgccgtagcggcgtcggcgccgttgccagggatggatgcgagagggatcaggaggtgaacgttcaggtcatgctgcggtgcaggtgagttactcgagactgtggaggaagggttttcctgctaccgctaattggatgccgaaaaggaagaaatccaacgagtcgcttgcttttcttcagctcgagtttctagtttatgtaaatgttcaaaggacctggattctaagtaggatcgtttttgtccttgtattatcagattgtagcatcgggatgctatcgaattttataaa

SEQ ID NO: 124201 - DNA, 633 bp, Zea Mays
tggtttttaagagcttttttagagcgggattgcggtttcccttgaatgagatgattggggaagttttagataattatgaaatatatcttcatcagctgacccctaacgctatcgttaggctcagcgtctttatctaggcccttcgaagccaaggagtggacccgaatgctgaagctttctaccgagtgcatgagctgcattacgagacgaaggccagagaagacgggctgcatgaaaactttggctgttataacttcgcatatctcaaggatatgaaggccccggtgcttagctatggcaccaagtggccaaccggttggaaaagtgagtggttctatgtctaggccgatgagaagaagagggagaagttgaaaacgctagtgatgagcccgctgagtttaagctttcggttgactaggcccctgtgtcgcatgacgtcggggtcaccatgccaacaagttgtggcagaattcagggtggtagccaaacagatcagcactagagatctagttcaagaatatttggctaacaaaacatctccgactttgagcgaatttagcatgccgaagctaaaaggaacgaagaagggacttgtgcttgtgcgacttccttatcggtttaaatttgagaaac

SEQ ID NO: 124202 - DNA, 621 bp, Zea Mays
cagatctaaaaaccttcccgactagagttctggatgctgcatgtactccgcactgcccgacatggatttcatctaacaattgcttcccaatagccgagtgaatgcacttcatgaggactccggtcgcacctcttctgtacagtgtgccccctatgagggtgtagtgggctgactgccttgcgatgcgttccgctgccgccttgtcatccagttcttcttcattttttatgtacctgatgataggctctctccagtcattggggtccgactctggttggctcaaggtgttgcattcttccgtctgatctgatagaatactcgggtgtgatatttcttggacgaagatcccaggtggaacctaggcccgactagatcccagcttcgacaacacgtctgctaccgcgttgcggtctatttccacgtgatggaactccaacccttcgaatttgtcctccaattttcggacggctgcacagtacttgcccatggaatcagtcgagcaatcccagtctttatttgtctggcttatgaccactagtgaatctccatataccatcagcttcttgatgcttagtgatacagtgatgttcaatccgtggatcagtgcttcatattctgccg

SEQ ID NO: 124203 - DNA, 519 bp, Zea Mays
gatcttgttaatttcttgtcactttcctcagtaaaggatttttacttcaacccttccgttggaaccatacatatcttacccttgattattttctccacttcgccactttgcgagtcttgccttaactctatccttggttatgcttttcacgattataatctttacccttgtcacttctatatcttaccttgatgcttatgttatacctatcctttaaaaccttctctcttccatctcaattttatagttttattttacctattttcattggtcatatccacttccttgtcgcttgcgagtttttaactccatcctttgttgtgctcaagttgggtattacctttacctttcttatctctcgatcctaccttggtaattacattatgtccgttctctaaaatctccaatctcatatcccaatttgagagtggtgttttacttacctcacccttggctatatcctcttctttaccgcgtgtaagcttgggcgcaactccattctttgttgtactcatacca

SEQ ID NO: 124204 - DNA, 287 bp, Zea Mays
actggatgctgcaccgagtatgtatgtccttcgtccacccactcgactactaacgcggtgctcaccatgtcagtcgtgcaggagatgcataacaacagatcttctgctggctgattcggcgtggtggcttgagtactggtggtgtagtcaggaactttttcagtgcctctagagcttcctgtgcctctgtggtccactgaaacttgtccacctttttgagaaatttgtagaatggcatgcctttctcccctagccttgatatgaacctgctcagggctgccatgcat

SEQ ID NO: 124205 - DNA, 352 bp, Zea Mays
ccagggccttgggtaacacctgggtgttacaggaagggcctctgccgctacatcatcaggagccggagcagaagggcctacaccttggtccaagcatgacagtcgccgaagtcgcctcttcttccttttttcctcaacaggtgcagtcaggcggctcactcggcatggacgctttgggcgggcacctacgggtttccgagtctccacctcttcaccaagttcttggccagctgtgatagccattggctcggcgtgggtcgagtcagatgattccccagccagcaaactaagcacaacatctatctcctcgtcatcagcgctatctagcatctcaaaatgaggctgcctctca

SEQ ID NO: 124206 - DNA, 526 bp, Zea Mays
gctcattcttatgctctcctctttgttgtgacctggtaaaacatagatcctagatcgttgttgcatttccctaaagaggcttccacctccaatagacaccgtcaaattgaagtgagaaggcaggcacgagcttgtacaacacaggctccatgctcgactctacccactcttgttgttcctctaaaggactcctacattgctcgcttgaaaggtcccctgctaggcgctacagtctccacatgcacgtgtcttacctctgttgtgttttgctgatccattgttgttttgtgttccttcagacaacaatccattcctttcttattatggtgggccgacgcatgaatgccctttttgcggcgccttcttttggttccaggagcgtgtcaagagtgcttctgctgtaactcaacggaggattgtctacaacctttgttgtaagggtgggcggatcaggttggaaccttacaaaaaaccacctgaacctctgcgaactcttctgaggtttgatggcgacgctcgctcaaaa

SEQ ID NO: 124207 - DNA, 494 bp, Zea Mays
tgccgatgtaagtacacactgtattaaaagctacttggcacgcttgcacgtcatttccaagtacaataattggcctcatgatgccgaagcgagaccatatagggcgctgaataactctttttatatcttccctttcactcagatcaaccttcacatagaaccattcttgcatccaagagcctggccactttttccgaaatgttggcataggatagctggcctcgacgcgatgcacgaagctgtagcagccaaaattgttgtgatactgctctttcccagtcgccttcgtctgatatgatagctcgtgcatattgcagaaacacctggcatctggctataaaccttgctcctcatggcccatataaaaacccctattttgataatagcttcaggggtaagttggtgaagaaaaatttcaaaagttttcagaacttcgaccaacattttgtctagcaggaactgaagtccggctttcataaagcttctgaaaatca

SEQ ID NO: 124208 - DNA, 566 bp, Zea Mays
cggcgatcgacggccttgaaacctagatccgagcaccttctgcaaagcaaggcgcagaaacttttctcaccccacctcgtagcgtctgcccgcaccaaatgcctcgcagtcgctattataccccgcgtcgcggagcgagggggtggaaaaaggagaatcgatgtgcggctggatccccgtggcgaagaatacccagcaccgatggcttgaactgggaggaggaaaaggaataatgacaccaccaaaaacaattacttgaacaccacgaacaccgccgcagcggatggggtggtgggtgaggcgacgaagaagggaaaggataggggtgtggcggagattggcgaagccgcaagccaggaacagcagcaacgggcgtgtggcgactgctcgaactgggattattacccacgcgctgcggagatggggattgggttcggatcgctgctgccattgtgtgcagccaataaaaaccaaacccccttttttcctctccgcccccgttcgttcccttttcgcctggggggtgctggctgagaggctcaggcttcgtatttcttttgttttgt

SEQ ID NO: 124209 - DNA, 438 bp, Zea Mays
atcttttgaattttattatcagtctaaaatacttatttgttgtttgtttataatggctggaaatattcattattactgacctgacccataagacctagctgattgctcaagatagttatgcaattaagggtttcattctaaatattcataaacctgggatcctatgttgcatggcaaagcacccaaaatcattctgactttatgcttgataaattgataactggcatattagttgttacagtcaagcatcatgattatgaatctagattttattaatgagtcaagcatcaagtacttatgttaaatactcttgcttgcatggacttcttgagcgaaaacactatgtgacgctgtttgcaggagacatactttgctacagattctcaaggagacaacaacacaaaatcatgtatgatgctttctttcttcattgatttt

SEQ ID NO: 124210 - DNA, 386 bp, Zea Mays
cgagtgtctcctccattgatgggggtgggtgaagtcatctgtgaaagagggttagacgtaaaggttatggtagtggaaaggaaaaacatgcacccgggttgttaaaaggaggtgggttagattagattcatctacacatttcgttatttattattaaccctatatgttaccttcatgcttagatgcatatttccttagtttctagtttcttcatattttcataatgcatgcatgctggaaagaacgtctcctcaccgatcagaggggtgcttcaaaggcatccctacaattttaagactggcctatgtggcctacttatatagccacctgttttcccccactattcctaaggcctttcgtcctaggtctagcgttctagtcctgat

SEQ ID NO: 124211 - DNA, 1167 bp, Zea Mays
gtccgagataactcttttgcacaaagttggcggaagaaatagctcaactctgtaagcgctagccagacatgctcagggacatagcctcgaaccatcataggaagaatccgttcaatccatatgtggaagtcatgactcttcatccctaagactcacagagtagataagttcacccctactcaggttagctgcatacccgtcagggaacatcaacatcttgatccactgaagtacttccttcctctgggccctgcttaggacaaaattggccttaagccttctccatgtctttccaccactaggcggcttcatctcttggtttggtctatcacataacgctgtcggatctactctggcctttacgttatcctttgacttatcaggaatgtccataattgttgcccaaagtgcctcggcaacattcttttcagtgtgcatcacgtcaatgttgtgtggaaggagcaggtcgtcatagtaggggagctgagtcaagcccgacttatgtgtccacatatgttgctcaccatatcccacaaacccaccttctggattggccacgagcccatctatctattgatgaattttggcactagtcatcattgtaggtgggcggtctgtcactatgacacctttcgtaaagttcttgatgtctaggtagaatggatggtcaagagggagaaattgtcgatgtttatcgaacgatgaatatttgccacccttctttaaccaaattaacctaagtgcttccttgcaaattgggcatgggaattttccgtgaacacactaggcacagaatagcccatgtgtcggtaagtcatgcatggagtactggtaccaaacatgcattttgaagtttgtcatcgtagcttggtcttacgtccataccccttcctcccaagcacgtaccaattcatcaatcaaaggctccatgtacacgcccattttattcctcaggtatacaggaattatcaacgacacggatatgttttgtctttgaaagcataaaccggggggagattgattaggataacaaacacgggccaacatgtgtatgagacagcactcattccatagggattgaagccatctgtggccagcgcaacacgtacattacgagtctcttcggctttctcatgatgaatggcatcaaagtgtttccatgcttca

SEQ ID NO: 124212 - DNA, 397 bp, Zea Mays
tctgtaaacaatttgttttaaatcacaagtgaacatacataatttcaatcatgggtttggtagtgtttctagtcctaccagggatctgccgaagggagtatgggtgaggggaggagcaggccgggctacgacctggaggtggtgctggtggctgcctcttgggcgccatagtcgcagggaacggcgcactgggatgtgtattccagctcccgtgaggaagctggcagaagatatctgctattgcttgcctttcttgattacaaagtcctaattatataggcctaaggccaaccgactattccacaatactaggagataaaagatttatccaactactccataatattaggagataaactgctaagacttatccaactaaactgattacttatctgat

SEQ ID NO: 124213 - DNA, 1430 bp, Zea Mays
cgcccccaaaaagaagatccagaagaagaccgctaaccagggatgccagatagagaagaagaagaaggcctctctagccctacctccccccagaatagatgactggtccgaagaagaagatgtatccctagccagccttgatgatcttctcaaggcatttggagacaccttagacaaggaactcgctagtacctcgaagaacgctctcgtgtagtcccacttgtagtaatcttatgcttgtaatgtgatggtgtaatgaataaaataacttggttgaaaacaatttgcatgtgcatgatagtgactctcttccctggcagatggcttcggataaaaccacgcctaccgcctcagggattggagcaggtttcccccgaagagccgaaggggaagtcgttagagaagaaagtgaaacccacctccccgcaccgccacccctacccttagacctagcccaagttctagccaatcagacccgactcatcgaggtcctcactcgaaatctggaaaatcaacggccgaatggtggaagaccgcaagacagaatgggggacttcctaagactcaaacctcccacgttcgccggatcaagcaaccccctcgatgcagatgattggatgcgcacgatcaaaaggaaactggaagccattggttgcccagaaaatcagcgtgttcaactggctgcccaccaactttctgggatggccttagcctggtgggacaccttcaacgtcaccatcagggatgctacctgggcggagtttgaagcagctttccgggagcaccatgtgccccaaggactggtacagcttaaggaggacgagttccgagaattgactcaagacggaaggtctgtcagcgaatatgtgcacaagttcacggagttagcccgctatgcgctagatgatgtcaatactgagagcaaaaagatggcccgtttcctgaagggactcaggccagaactcaaaacaattctggctagccaagacttcctcaacttctctcacctttccaacaaggccatgcaagttgaaagagctaaggaggaagaaaaaggacatctcaaaaggaagttccaggttctccgggcacagcagcaggactgtcaccagaagactcgatcatttgggtttccacccaaggggcccaacttcagtagaccagctggacccactccatcacgattcagccagcagagtcagagctctttccattctccctcagtggcaagcaaccaacctccggcgaatgcatgttggcactgcggtgatccaagtcacttcaagaacaactgtccgcagctgaagccaccaggacccgcctactccaactcggtgaatggccccaagaatacctcggcatccgcccccaaggcgccctccaccgtcagccagcagaacaagactccgtaccaagggagggcacgtgta

SEQ ID NO: 124214 - DNA, 499 bp, Zea Mays
cctgtgcttctgaagtccactgaaatttgtccaccttcttgagtaacttataaaatggtaagcctttttctcccagcctggatataaatctgctcagagctgccatacatccggtaagtctttgaactttcttctgtgatcgtggtgcttccattctcatgatagcctcgatcttttctggattagcttcgatcccccggtggctgacaataaacccgagtaactttcctgctggtactccgaaaacacaatttttgggattaagctatgacaccccagtgtcacttagggttcttccttaagctaaccccaacccatgatcacatgcaatctcaatgaaaggataaacattaaaaatgagatcaaagaattatgttgaagtctacttaaaccctccttaaagttttcatgaattctaaggaaggaaaactcttaaaccctaattaatcctaagtgaaccatttaagcataaagggtaaatgggagaaacccttgggag

SEQ ID NO: 124215 - DNA, 277 bp, Zea Mays
tgaaatgtagcaggggcattagtgagcccaaaaggcataactcttaactaataatgtcccaaatgtgtcttaaaagctgtcttaaactcttcaccctctcccattcttatctgatggtacccagctgtgaggtctagactggtaaagtaacgagttcctgctaattcctccaaaatttcttctaccaatggcatgggaaatctgtttttatggtcaagtcatttaacttcctatagtccacacaaaatctccatgaaccatccttttttgactagta

SEQ ID NO: 124216 - DNA, 388 bp, Zea Mays
aacagaaatctcgtcctcgagatttgtaagaaagggatacaataagtttggcttgtagtctagattttaatttctaattagttctagtaccaaaaggttttttttatcaatttatcaggtgattaggaaggcatatgtatggcaaccccattatgtaagataaaatatgtcctagaagtatgagtaggcttgggtaagaaagagtagggtaaagaaagactccatccaagattgtggatcttgattcccttaaggatccaacttgatccttgaaggcttgagttgatgcttatccttcttttgatgtggttggtcttctttggcctttattcttggagttgtcatccgagttaaggacatatggctaaggacatatagttaggatagc

SEQ ID NO: 124217 - DNA, 587 bp, Zea Mays
aattttgcatgtgagggaggcggtgatgactaaaaaatgtttgttaacacaatattctttaggttggcaatgtatttgcacatgcaagatttgtgagataaacaaaattttgcatgccacacgcatatgttgttcactatgtaaatagctaaaaggtagtgttcaaacaagatcaaggcttacatacttttgcgagcactattcatttatgtgttccaacgaaccacctgatattgttgaagctttgaaggatgttgatcgggtcattgctatgcacgaagagctcaacaaatccataataaaaatcaagtttgggagctagttgagagtcccgacaaactgcaataccattggtagcagatgagtgtttagaaacatgcaaaataaaatatgacattatggtgaggaacaatgcaagagttgtggctcaatgttatgctcaagcagagtgtcttgacttcggtaaaacatatccctgattacaaggttgaaatcaataatgatcttattcgcatatgcttattctcacaatatcaaaccacatcaaatgaatgtaaatagcgcatcctcgaatgaactcatcaatg

SEQ ID NO: 124218 - DNA, 791 bp, Zea Mays
tctgtggcgcaggcctaccagtgtgctgtgcgcgttggggcttttactgggctgggggatcgattgtgctctgggcggtcctagggttggcgaacgaccggtgttcgcctgccaggtcatgggcatgcgccagatagccggtcatggcggggaactagtcacggtgtggtcggccagacctgatgtcgtggggttgaagacgagcggtaaccgttggatgctagatgaacgcccaggattaggtcgtcaaataacgttttgcttgaatcctatcgtcaccgtttgttggtgatcggaccactcctaggcagttttgggtaggaaggatttatggccgttggatcgtgattgcgcagatgtaggatggcgcatctgtcatggctcatcgtggccgttcatcgatgaatggaagggcgaggggtaaccctggcgttttaaaatccagagcattgatatcaaatcctagggctctagatgcatacctcttcattttctaatctgggcccttgatcttagatcatgcggccagaaactgtggataccccttcgttggcttatttgttaaagagaccctggcaaacactggaatcaacccgccgtccagtgcaatagtgctctgagtctctggaagttttgtagattagcccctatcttctctgcaaattgttgcgcagtccagtgaatgagaaaaatagataaattgaattagaaaatgaattattaatataaaaacaattgctagaatttatttaattcgtagaaaattcatttgaagtccaaatttatatatt

SEQ ID NO: 124219 - DNA, 315 bp, Zea Mays
caccgtccagcggatatgcctccatatgcatgaccttcaagagctgcacctcatcgccatgaagtgaaacctatggtacctctagggcaaccttgaattcagcatcatccttcgtcgctcctccaccaccgaccttgttgtctacactgatgtcgacatggtcgggtgccctgataggcgctgatgaggacatcacccccatacaaataatgaaactgggggaggaccatcaaggacttgggaaatgctaagatgttaaggatgagaagctaggatgttcacaacaagagaaaaccaagtctgactcaacttcgt

SEQ ID NO: 124220 - DNA, 435 bp, Zea Mays
aaacaatacacttataaacatgtagtagggatagcaattttactcgcggatttggatatccgatccgatggagtcggacatagatatatttttgacaaatgggttaaacccatatctaatccgaagtttggcggacatagattcagatattacctcccacccacggattatccttcggatatctaaaattagccaatagtttatttttgcctagctcatattacacagcaaagaccaaaccctaactccctaaacccgacacatgacgctacaattttcccactgttggccaccccttcttgccatgttggcttcctgccctgcgtcccatgcccccttccaagtctcgcaagccgtagcaccgctggaggctggccgacgactgctccttctaggttctataccctgttgttggtcgtagttcgcgcatcatag

SEQ ID NO: 124221 - DNA, 357 bp, Zea Mays
ttacaagttgatgactagttgaagtctgtggagaagatgctcaatatagctcagtgctccgacagggagaaagtactctatgcatcaggtcaccttactggccccactatggattggtgggatgtatattgcgctgctcacgctgctgccaacaccattacatgggtagaattctccactcacttcaggaattaccatatccctgctggccttatgaagattaaaaaggagttcttatccctcaaatagggagggatgtcagtaagtgaatacagggacaagttcatctagttatcccgatatgctcctagtgaagttgatgatgatgaaaaaaagcaggagctatttctggagggt

SEQ ID NO: 124222 - DNA, 1391 bp, Zea Mays
gggggggggcttcccctatcagtcagtttttttaaagtgaagtagggtgaatgctcatccaacctctctaatatttgaagaaagtgactactctacatgtgatactaacggtccccaggaacgaggtaccccaaatagacccattacttgtagtatcccaacaagggtgagaggccacaggagtaaaatcgagccaaccaactcccgccgagcagtcgtgcgaggcggatggatcgaccaactcctagcaagcaactaggcgaggcaaagacataaagactcgtgatggagttcagtgcgcttgtggaccccgactcaatgaccctctatcacacaccgggcagagactcacacacgcctaaacccgtcgagcatgaaaatatggtgggcgctcatggcctacgctagccatgatgggacacattgccacctaacgtcatcccaactgacaccatggcatgccgagcgaacatcgaggagtcagcacagatgagacgggggcacccccatgtacgaccttcaacatatctgacactgcgatatgggacccaccaaaggccacgacagggagcatcgtcccctttgtatttgcagagtcccccaaatgggacgcgacagagcaacacaccataccgcacgtgccctcacgcacgtgtcagaagacgacgtcaccagaaggactcttgtagatggcgggccccactctcatccattttagccaacccatccctctgaaagccttctcccttgaactataaaaggggtcggctgaacaggaaccaagacagaggaaagggcaatagcattcagtagaagttttctccttcctcgttctctcactctcaattgtaccccttgtaacacatttcgccccaccagcaccttagagcaatataagatcaacactacactagacgtagggcacatgcctaaaccaatataaatcctcatgagtctcctgatcacaaattggagtacgtccacgctagccccttgtcgaaccataaattctactatgtccctagttctcgaaaccacgacagttggcgtgccaggtaggggaattgttagcgtgcgaagagacatctccactctgttggctctgtaattcgctttcaccagtggcgtgactttcacactaggaaggtgcatcaccttcggctctctcgacttctttgccacctctatcagcgagttccgcctcctcgattccacctcacccgtcgatgccctcacccagggcatgggcgatcttcggctcacaggaatcatccacatcatcatgatagaggaagaggggcatacaaccccccatgtcgaggcgcttgctaactgtgcaaatgcgctcctcggttcatcctccatgagtgaggaccgagagtaagtgccaa

SEQ ID NO: 124223 - DNA, 612 bp, Zea Mays
gtaacattctttctgttgtcgtagaatattattcttgcaagcactggatggttattatctcttttctctatagaaattatgagcttctgtattacctccagttgcgttgtcatggttctgagtatggtttcatatcactgtttacttatttgtccattttcgaggttgcagatacatgtttttgacatatggacatgagctgttgttgcatctgactggcatcttattgtcttctattctatgatactataatatcgatgtccttgttctcctcatacttctcacttggatgattcagaaagttgataatacatttatttattgtttgattggtcaaggcaaaatgtgaagatactgtcttgattggggtggttattattcagaatcttcactttgatgtgtttattcttgtgttatccgtgttcctagataatgtaaatatagtctgaactttcaggtgcttgagttgtggcttgaccatttcattatgcaattcagtcgtatcagactggggatagtgtggggcgatcatagcttgctggacttgtgaagcatttctgcttgatgcttttgtaccatgctgctttgtggcctatgatagatgtaatgaac

SEQ ID NO: 124224 - DNA, 387 bp, Zea Mays
tggaattcatacaagatataatattcaggttcggaataccaaatagcatcataactgacctaggatccaacttcaccagttcagaattcttcgatttctgcgagcaaaagagcattcagatcaaatatgcctcagtggcgcaccctagagccaacgggcaagtagaaagagccaacgggatgatattagaagcactcagaaagaaagtcttcgacaagaatgagaagttcgcaggaaagtggatcagagagttgtcatatgtagtttggagcctgagaactcaacctagccgagctctgcatggaaatacccccttctttatggtttatggttcggaggcagtgctacctaccgatctcaagttcggagcaccgaggctaatctttg

SEQ ID NO: 124225 - DNA, 272 bp, Zea Mays
ctgctgagccgcacgcactctctccatgagggaggattgaataagcatccgagtctcctcactagcggtgccgacataacacaaagcgatccccaaacggtccaaatcagcgatcaacggcaaggccacttttggaaccccggacctgctaagggcatcagccactacattagccttccccgggtgataatgaatggacaaatcataatctttaatcaattcaagccaccaacgctgcctcaaattcagctccttctgagtaaaaatatact

SEQ ID NO: 124226 - DNA, 674 bp, Zea Mays
tgagcgtgatgactaggattcaagagttgaaggatcttggtctcaatgttgtacatgtggtggggaattcaattgagtgtcgtgttctctcattttgtcagaaggaaacctacacttgggagcatgttgggatgattgatccgtcctagccctcaaatgaggcaattctgatgccgaaggtgaaggcctagcttcaccaactcttctctttgattagtgattggctaaaatggtgttagattgaggctttctccctgaccgagcctcgttgtgagttaagctatgcaacttggctattttacaaaaaaaagtctgatcttgttgattttgacctaaccattctagacctcaatgttggaattgcactgacttttgcataacatggcttgggtagtgaaggacagcgacaggccagaccgagttatttcccagtgctacttgccaaacaagcacccaaggagtatgtcccctcttggcctctaaacactccctatccactaaagaagcagaggtggaggatggcctgagttagcaacttagatgaagacgaagatgtgtctcctcatccatctcaaagtcccaggcgctccaaatgcccccaatccatcttgcgaatcaagactcctctcattctctaggagacaaggtagaggtgtcaaaaaagtgaagaccat

SEQ ID NO: 124227 - DNA, 733 bp, Zea Mays
attaaaattataattgaggatatagagagtataacacatgtattagaaaaactcatacacttgaattttgtcacataaattggacaataaaataattgtgtgaaacacatcagcaacaaatggggcgtctcagtcctagtcatattatggtatgccgatgaactcatatcaagggtaaatgttgtcaccatcctcactgcaaggtagatcggctcttagcatggccggacagtatgcgcacgatcacagaccgtccgaccctccaacaaactgtccatcaccttacgtcggatagtccggagtcacacagagcctaccttaagactcgcatgcaaagtccagcacgatcgaacctgatacaataccagaccacccggtctctccatggaccgtatgatcaccaaggttggaccatccgggtgtgcatacataggatagggtatcgcgcatcaggcacaatcatcacacttcaccccacctgcagcatgccatcacccgcacaagaggtcgaatgcctttcggcccctatgaagccaaaaaaattacaggtcgctgagcttgtttggtctgttaaggctaaatctgctgctcgctctcccctgcattcgacacaaaaggagaaaattaagtccgcacttaatgttgctaggtatgataaaatatttgatgagctacttaagaacgacaacattaaattgtcgcacccaattcctccgatagaggcattgaaaac

SEQ ID NO: 124228 - DNA, 323 bp, Zea Mays
gaagaaaaggttcatagaattatccataatatgaagaaagctcaagcacgacaaaagagttatgcggacaaacgacgaatgcccttatattttcttgaaggagactatgtctacctgaaggtatcaccaatgaaaggcgtatcgcgtttcggagttaaaggaaaacttgcaccacgatatattggtccttttcttattctggaaagatatgggccagtggcgtatcgacttcagctccccgaaacattgtctgctgtgcacaatgtgttccacgtgtcacaattgaagaagtgtcttcgggttcctgatcgaaccattgaaat

SEQ ID NO: 124229 - DNA, 600 bp, Zea Mays
cgatggatatagatgtagttcgcacattgagatcacattgagacacattgagatcacaaattcagttctcacattcatttcagagatagatgtagttctctgaaacattcggttctcagacataaacacaacagacacatttaatctaggcagaaaaatagatacatttagttctcagacagaaacacgatagacacattcagtttagacacaaaaatagacaaacacattctgttcacatttagtgcacattcactgcctcgaaccccgacgccgagcattcaacttctcaattatatcctcctgcaaagcttgatagtacatgtgttgaaggggttggcattgatcaaggttgatggccaaaatgcgctcctcctcttccttctctttttttcagcctccatgttcagacgttgcttatccaaagccagtctttccctctccaactctatcattgtcttgcggtgttctcgagcctcctcaaccttcactttctccaaactaacaatttcatcaagtcggacctttcgctcatcttctgtctctttgaacaattcaattttctgaacataaagatcatgcatcttggaagcgtactcg

SEQ ID NO: 124230 - DNA, 942 bp, Zea Mays
ctccggagtcgacaacttagaaagttgcaccgtcatcaagaacggcctcccattcacaaatttaggaggaacaacctccttcttgtatatcgggatattgattttaagacgtaatgattgtcgagtatgaatcattccatcttcttcccatacttcgaaattgtctatttgggaccgtgtgcgtactccacgagatgctgattccgcttttgattgatttgtcataactctctgcaatttttgcaggtagcgtgccactgattctgacggtttcttgacatcgtcagtggcgattcgctgatgaattttctttgaaatagttggcccttcaacattggtgtcaacctttgcttcctttttgatgtttgcgtcgacattctgaggaacaaatttgtctacgtccccctcgtcgagttccttaacaagaggtgatatgattgtttcaacgatttttgtggaggtcggtgctatattttcctgcaccatggggtatggaatgatcgaactatctttctgttgcattagtgttggattcgacgttggtgacttatgacgcgatacaccgcttaagattggctcatcacccaacttgatgtcgtgtcgatgccaaaggaccaactcgttcattgcctcctgcaaagttatgatcccctcaactggaaagtctatctcccaatcttcacaaccactgtctgtgatctctagaacttggaccacagcattatgtggcgggacaggattatccttgtagttaacaagtcctggtcttaccaaaccagtagcagcttgttttgtttttgtcctagatcgattgattggaatatgaagaaagcaaggcttgtcctcaacaatatcgtctacagggtacttggtgcccgatatgaattcttgcacaaatcctacgctgctagggactataggtggactcatgtggcctgtcac

SEQ ID NO: 124231 - DNA, 412 bp, Zea Mays
gaaagataaagcattctggccaagctgcttgattgcatgggacaaggtgtgcaccccaaaggaagatgggaactaggaataagtgcgtaaggctcaataacatttatatcctagtaaaaatgatccataagctacactcggcatctgattcctcatgggcagcatgggtacgagatcacataagtttgacaacattagagggtaatatatgaggaacgcattggggcattttgcgagcgctcctaccatgcaacacaaacttttggcatgatgcatggtgtggagaagatgatctggcgacctgcctaccagccttctctcattgtgtgaacaatgagactagtgtatagagtgttgttgctaatggactgcgtaaggctaatggattgcctaccagccttttctctcgtcg

SEQ ID NO: 124232 - DNA, 389 bp, Zea Mays
cttttcagcacttcgactagcatttgttgcaagggaaagcgaaggtcatccttcatgaaactttggaatacaaccaatttgtctgcctcaggaagaggaacagtgctctctcctctagctctcactacggatatatcatgaaaatatttgccctttattgcctcaatctgcccttttttaacagtggatttttcgaagacaacatggcttggcctccatggtcgatcttcgacgtcttctgcaccactatcaaaaatcaaagtcatcgctaccctcagaatctttggataatccagccagaatttcactggttatcttttccatgttggtcctctccatatcttgataaaacccagctagtgcagggtcttcgcttctcttatcttcgg

SEQ ID NO: 124233 - DNA, 1666 bp, Zea Mays
aagacatggggtttgaatatcggttttgtacaggactatgttttgctgaataaaaatgcacctcttaccatatttctcatttttctaaaagagagtggcaggagctctgccttgcattgaagggaaataagatggttttgtctgaatggcagacacgcctcaacataaaataggacaaccacaaatttcatgagagagccaacctgcaaagaaacaaaaacaagacacaattgttgtggcggccaatgatgtcggtgtcacggcgggagagggcgtggtcgaccgtatggagacaactggggcagtattacaccgtgaagttgaagccgaacaacttgctcacccactggtgccgcaggatcgttgagaggcgttgatcaggcaggaacttcacgctaaagtggttggtgcagatgagtaaccggcgcccccagagatatgggcgccaatgacgcacgacttgcaccaagtcgatgagctctcgttcgtaggcggcgatcttctggtgtcatggcacgaatggtcagctgaagtaggccagtggtcctgcgccctactgaaggatagcgccgaaccctatgctcgtcgcgtcacactccacgacgaacaaggtatcgaagactggcagatggaggaccgacacagtggagtgtgcgcgcttgagtgcggtgaaggtcgtctcagccttcggtgacaagtggaaggtgtccttccctagcaagctggtgagtggcgccacgatgaggtcgaattcctatatgaacttcctgtagtaccccataaggcccaggaaggtgcagccaagacgtgacggcctccaccttgtctccatccatggctacgccatctacggagatgacgtgccctaggtatgcgacggacgtcatgccaaaggagagcttgccaaagagggagtgtgcatggaggcgtcgaaaaaggcgtgttgcagatgagttgaccacgagtcgttgtagatgagaatacatcaaagaaaacaaggacaaaccaacggagtaagggctgcgtgacttcattcatgaggctctagaatgttgcctgcgtgtttgccaacccaactggcaccaacagaaactcaaagtggccatggtgggtgtgaaacacggtcttctcgatgtcgcctgtgtgcatgcggatctggtggtacccggagcgtaggtccagttttatgaagaaatgggcgccatggagctcgtcaaggagctcatcaacgacggggacgacgaggattgggaacttgtccttcaccgtgtagtcgttgaggaagcgcaaggagtcgatgtagaagagcaaggagtcatgcttcttgacgaggagcatcgatgtggagaaggtcgacgtgctaggctaaataacgccctagaccagcatgtcgacgactttgcactccaattcgtccttatggacctacgagtagcggtagggtcggacagcgactgttgtcgtgtctggctgcaagtgaatgcaatggtcacatgcacgagttggtggcaatccagaaggcatggcgaagacatcgatgttggcgagaagatcgtcaaggagtggtcgcggctcaggcagaatagtgtggagggctatcgacgtcgttgcacaacattgagagccgacacccttccaatggacctgttgacccgtgcgcccaaag

SEQ ID NO: 124234 - DNA, 585 bp, Zea Mays
gtccttgccgagcaaccttgtgaggcggagcggacgaccaagtcaatgccaagcaaccttgtgaggcggggcacgcgaccaagtccctaccaatcaaccttatgaagcggagcagacgaccatgtccctgccgagcaaccttgtgaggcggagcggatgaccaagtccctaccgagcaaccttgctaggaggggcgggcgaccaaatccatgccgagcaaccttgcaaggcagaacggatgaccaagtccctgccgagcaaccttaccagggactagcgtaagacaaggatggaccaacgatacgagcccatgttggtgggacaagacgggtcatcaccaaactagttccgagcctcgggtacagcgttggaaggtctctaacagatgttagacgacacctcgccacgtactgtctcaagcgaaccaccgctagcgaataggactagtcaatcccaatggaagggatctcagcatcagagtctctacagtgaccagaatatctaaaaggatgtaatggatacaccataccgggtgtatgcctacacacatcgacaagtgacatatgcccatgatgacaggcgaag

SEQ ID NO: 124235 - DNA, 902 bp, Zea Mays
tgaagctgaagctactagactagaggatattgatatgctagaagaagaacgattgaatacaataattcagtcagccaggtaccagcaaactctgaggcgctatcatgataaggccatacgacatcgatccttcgtagtgggagatctggtcctctgccgaattctaacgggggaaggacggcacaaattgtcgccactatgggaagggccattcatggtagcagaagtcactcggccaggatcatatcgacttactcaaatggatggcacggaaatagggaattcatggaatatagagcatctcaggaagttttacccctagctagatttcaaaaagctattggggcagcattgtattctgtaattggaaaagtacgtcatcaataaaaagacttcattctcaaaagctcttgaactatttattatcgatttgcatgcttacttaacttaggtgaccactataccctactaacggagcaattggcttaagtcggcagtgacttaagacggtgcgacatgctcacgcttacttaacttagggtgaccactataccctactaacggagcaatcggcttaagtcggcagtgactcaagacggtgcgacatgctcacgcttacttaacttagggtgaccactataccctactaacggagcaatcggcttaagtcggcagtaacttaagatggtgcgacatgctcacgcttccttaacttagggtgaccactataccctactaacggagcaatcggcttaagtcggcagtgacttaagacggtgcgacatgctcacgcttacttaacttagggtgtccactattccctactaatggagcgatcggcttaagtcggcagtgacttaaggcgatgcaacattctcacgtctactcgacctagtataaac

SEQ ID NO: 124236 - DNA, 685 bp, Zea Mays
ctctatgggttctaaacagtagcgttgctattgttccatagcatatagaacaataaaaatgactgtgtggtgtgcgccatttatatttatgtgtgctagcgcacacgcactgaacaaagatttggagtaagagcggttggtcgctttgctcgaaagcaacaaatcgattaccaagacgttccaacttgaaagaaatcaatgtcgcctgccaaataataaaatgagcactagtttatttgaacatagttgtagatgtaaacaaaatagattgttgtggaagaccgtttggcttatccaaccaagaggccgtatactacacgaaaaccactttaatcaggccaagatagccaattatagctaattaagtatgtgtttggttggacatataagaaggaatggaagagagcggccacattttttatagtgtttgatgagagtcacgcaagtatgagatgaacatcgaagtaatttttggtggtggtgtgatcctaaaaatcaagtagacgaatatcgtcctcgtctcatactattttgacctaaaactaaacacattataaagaaacataaaagcatttccgtgtggcaagtccaatattagcaggtaagatgtgcccccagatggccttccccaaatgcataaaataatcacacagtgatcatgcgggcctatccatttgtggatata

SEQ ID NO: 124237 - DNA, 328 bp, Zea Mays
ataattcttggcgaagacctctacggagggctgaccgccgtacgaagtcaccgcccagacatacttcgctagagccaccacggcgttaggtgtcaattggtggacctggacttcaaacctctgcaagacctccgccacgaaacgatgcgcaggtaggcgaaggccggcgatgaagaacgcctcaaacacgactaactcgcccgcaggctcaggaatctcttccgcccccaggacgcgcccaacaccgttcccaaagtaccccaactgctgcatatcctgcacgcgaaccgaggaaatcctcgaaacgccgaactccaccgtgtggccc

SEQ ID NO: 124238 - DNA, 405 bp, Zea Mays
ttggatttgtgtaccctgattatcgctacccgtcgtgagggcaaaaaagaaagggtgcaacttctgggaaggctgctgcttcggctgctccacgcgagtccacaccgaagaggaaaaaattgaaggtccttactcaccggccacgctacattgaaccggccacagtgcctgaatttggcggtgagacttcttcagctattgaagccaaaggacctgctcttacgcagaggattgaagaaccggctgcaatgccgaagattgacaaaattgaagaatcgagaatcgaaggggcaaaaacattagaagttctaagcccttcggcaggagtggaggtgccgaagacacaaaaaggtctaacaacaacccccaagagaaaaaggatggctagtgtactagatgtgctgg

SEQ ID NO: 124239 - DNA, 720 bp, Zea Mays
ataaatgatacgctttatcggcgttcaaattatggcattctacttgttgccttgccattgccaaagatgaagtgatagatgccttaaaagaagtccatgttggagtgtgcggagcgcaccaatctggacctaaactacattctcaacttaaacatttaggctattattgcatgaaattcgcaaaaaggtgccatgggtgtcaaatacatggcaactttatacaccaaccacatgaactgttacatcccactagcatgtcttagccatttgaaatgtgggggatggatgtagttggactgattcacccaacatcatccaaaggacataaatttattttagccgccactgactatttctccaaatgggcagaagttgtggcattaatagaggtaaaagctaaaaatatagaaaatttaataagaactaatctcatatatcgatttggtgtgcagagtagaatgatatctgataatgggtcaaattttaggagtaaacaagtcgagaggatgtgtgccaaatttaaaatcaagcatagtttctctactggatataactcgtccgctaatggtcaagcggaagcatttaataaagtgttatgcaaattgcttaaaaagatggtctcacagaataagaggcaccggcatgaaaagctactagagtccttgtgggcgtatagatttacgacgcaaacagcaatagggatgaccccttactcgcttg

SEQ ID NO: 124240 - DNA, 552 bp, Zea Mays
aaatcttactacgaaaattctagtggtatacttagccaatttagggtcaagtatggttaagttaaatggtcagattattttagtgccccactgatttccttttagtgtcttagtgaatgttgattacgatccttgctgaattcattggggtgagattcattatccttactaattctctcttcttctcttttctcttatgcttttaaggtagacttgaactacactatggctttataaattcccaaaaattctgtaaaaggtacattaacttcccactggtgtataactctcagtctcaaaaattgaggcaaaaaagttaagggtttactctgtacaaaattatcaagttgtagggcatagggggtgctttgaactacaactctcttctaacagtgaattaatctctaaagcttatttttgcttacatttaggtgtaacaatatgactttgtaccatgttttagccactaatacccattggtcattttattgtgattttctaaagttcttggccaaaggggtgctttctactaccactatacttgaaaaatgt

SEQ ID NO: 124241 - DNA, 421 bp, Zea Mays
ccggctatggccgcagccgccgcgggccggtttgcgccgttgtgtcggggaagaaaggatacaggtcgttgatccatcgactaacgaccgcgatcagttcgcgcataacgattcagcttgggtggttcagggtcgtcggatcgagatcgtgcgggtggggcgcagtcgcgtggatgatgcgcctgaaccatcgatttccaatcctacggttagcatcgcataccgattcagtaaaacctagatctaatcctagccatagaagtaagatcgttcggccttggtcgaaacataccccttcagccagggaattttgttaaagagaccccgccaaacattgaaatcaacctgtggtcctctcaactgtagatctgagtcttggaattatttcgcattaaaccctgaacttctctggatttatgcg

SEQ ID NO: 124242 - DNA, 1680 bp, Zea Mays
caaaatatcaatgtaacataagttcacataataatatcaagggaaataccaacctcccataataacaagttctaagatgacacgtccataatcacaagcacacaatcaactaaaaccacaagttctaaaatggcatgtgacaaccacaagcacacaatcaactaaaatggcatgcccacaacaacaatgacagaagtgtcactctcaatcccccttccatttatgatttctcagtaatcatcatccaaatcatcaatatcagtaaccatcatctcaatctccctttcttgctgcggcggatgacaggcacaagggcgcagaggcgacaggcgggtgtttatacgcctaaagctagtgctttacgctttttgtgaaacgttttagtgcttcaggcacttagcagcgttttgacgcttaaaagacgcttaagcgactttttaataaccacgctcagtatcttgaaatttgacctgcccccataacatgtgtaggctgaatcagttcatattgacaatgccactcaacaagtaacgaattgtgtcatgctgatccaaaacattactagccaatgccagaacaattaaatatgaaatttcgtcacaactttggcatataacacaaaacaacaagagttcagtactaaattgaaaaggagtcttattcttaggtatcattaggacaaaatttatgaactcattcacttctaaaccttaagcaaatcaaaagagaagctgtactgaactgctgaaaaaaattgtgcactcgaatgctttatccaccagattttaaactgataacagaaggcacttacttctaataatcatatcaactatagaatctcgagtacaaaaacaagtagctaatatgttttgccagatctactccatttcgaaacaaatccacagcggaaatatggcaaatcaaaagggcaagatacagccaaaacatgtcacctgcttgtacttcttttggcgacgtccatcagcggtctcgatgacgaactccgtggagaagatgttagtgagtttggcgccgtatccgttcctcccgccggttgtcttcttctcgttgtcgttgtagttgctactggtgaggaggtggccgaaaatcatctctggcacgtagacgccctcctcctggtggacctcgacgggtatcccgtcgccgttgttgtatacggagatggagcagccgtcgacgtcgatctcgacgcggagcgcgtccatcttgggatcccgctgcttgttgtcggcggcgttgacgaggatctcgtcgaagatcttgtagagtccagggacgtaggtgacggagcggttcaccatggcgccgtcctcgtagacccagagcgtctgggtatgcttctccaccgagccaatgtaggtgtcagggcgcagcaggatgtgctccagctgcgtcttcttctggtacatttcctcgatggtcttgcccccgccgccggcggcggcgttgtggccggagctggagtgtaagggacccgtcatggcggcgatgcgctgcacacggaggtcgtgtgcctgcgcagctgcggtagggttgaggggtgcgtgaggcgttggggtcttggggattggggatctggggctagaaagcaatgggggttgaggggtgtttatcgaagccgaagggcaacggtgctgtccttctgggattcgaaatttg

SEQ ID NO: 124243 - DNA, 429 bp, Zea Mays
cttcaattcttttgccgaccgatgccatgtcatcagccaagctcttcattttcatgaagtactcattcatggtggagctcaccttcgtcgtcgttgccagcgccatgcgtgtggagatcagacgcgcacggctttgagaggcgaacatctcttcgatgtgcgcccatgcagatgttgctgtcaccttcatggagacttgagcagcgaagtcccgtccaagattagacaggagataactcaggaccgtctggtcctttgctacccaggatgagtactctagattgaccaccagagggtcaccttccttcgcatcggccttcgccgggaggaaccgatctggagccgtcgtcgtcggctcgatgaagccatcgagttgtgcccccttgatggcggctaggacttgtgctttccaaagcacatggttgttgc

SEQ ID NO: 124244 - DNA, 458 bp, Zea Mays
ggtaatctcctccctgccgaaacgaaccagctccttctttgcttcactaaaatatcccaaattcatcagtttagacatatcaccttcggtaacggtggatttcccaaactccaagtggctggatttagttggcacgacgttgtaatcatcttcagattcaaattcctcagcatcgacctactcagcttcagtggtaggggcatcctccgatactactagccctaaccgttgcatcactttagagattggagcggtttcggcaccttcggcttcctctccgttgcgagtaaccctagctgttgagcgtaccctagccatctgatgattgaatttcttgttttttgatgaaattgaatttttttttaactttgccgaagctctttcttgttatgaagcttgagcaaaatgagtagcttcggctatggtcaaatttttggcagcaaaacagtgcaatagca

SEQ ID NO: 124245 - DNA, 617 bp, Zea Mays
ctgatcctgaaattgccctggatgctgttggttgtatgatgaagttggtgctggcatgggtggttgatgcaggacccgtatggctaaagagtgttttgccgaattaactgaagctgaaggttgtgggattagatgttggatgtggacatattctgggatgtatggagaataatacgaagcagtgtgaaggacctactttggcgaattctgtcttgcttcggcttcggcaatttctttttggttttgaattgtgactttgcaggttcttgttgtgtgcccgttgtcctttccacagactaagcagaatagtattcttggctgagaatcgtacctccccccaaaacttcttccaccccttccacctcttagagctggtggtatgaaggaactcttctgggttcctattgactgggcatgattttgttgccctggaggatggttatttttgtcttcgcctttgcttggattgtaaatggtcctgacatgccttggattgaatcgcccaccaaagccccttgtaatttcagagtatctgaaggcttcttctttcctttgtcgaaaatcattgtcctccctgatgtattcatccattttctgcaagatcttctctagagttt

SEQ ID NO: 124246 - DNA, 367 bp, Zea Mays
tattcatagctcaaccaaatcatcggactagcgcgtagagtttatgtgccactttagcttccacataccactttggcttccacgtaccgctttagcttccgccctcggcttgcagcttcaactttatgtgatgcttcgcattccttcgtaagttataaatactcaatttgctagattctagggttaagaaaaccctaattctcgagtgttgttctcccctgttgtcatgtatcttctaaaagtgcctctttcacttctgacgcactctcgtgccagatttttcaaacacctcgcacccacatgaattctagaggtctaccattgaagcaaaggatttgaagatactaatagtgatgaagcttctccc

SEQ ID NO: 124247 - DNA, 430 bp, Zea Mays
ggagtggggagctaggtgagcatgtgagagaggcatggttttctcggcctttggagagtcgaagaaggttgggaggcggcgtgagcagttgggatcgagaaaaaaatcgagggacagaggaggcttcgagcggagatgtgggcaataggatggacgatgtagattaacggtagacagattttaaaatgggcatatcatataactttgattccttttgaataatttattttataaaacaactatgtttgatacgaacagaggatagttgtagcaacacacgagcaccttattatatcttttgagtatagaataacaattaatgtttttgcatatcaatgtgttttaacagactgattttgtaccaatgcacggattaaaaccttaagaacataaggttgaaactcccataaatattttccaaaaggaagcc

SEQ ID NO: 124248 - DNA, 730 bp, Zea Mays
gtacgatgtgctcatcttcaaggtagtaccagacaacctgaagagttcctgccaaagtcggctggtaaatatcctatctctgtctgacacaatcgatagaggtagtccatgtagcttgtagacgaaatccataaagagctgagctactttgagtgctgaaaaaggatgcagcaatggaaggaaatgactgtactttgaaaatgtatccacaaccaccaggattgtattggcattgttagaacgcggaaggccttccacaaaatccatgctgatcacttcccatgcctgggtcggtaccggtaacggttgaagaagacctggatatcggctgcgatcaggcttggcctgttggcaaactgtgcaagaagtgacatactgcttaatcagagctttcatagatggccaggaaaaaagctgcttaatccatcggtatgtcacaggaaagccagaatgtcctccgacaggactatcatgtagggcttccataatttgctgctgaagaagtgtgttatttctgacccaaactcgccctttgtatcgtatgatgccagaatttagagtatattgtcctgaagtatggggactgatcaacatcgctactaacagtccttgagcttggtcatcttctttgtacccttccatgacctgaagcatccattgtggagtagctgaagagagactgaataattcagagtaaggacgacgagatagtgcatctgctgctccattg

SEQ ID NO: 124249 - DNA, 701 bp, Zea Mays
cgacttggtgaatattcttagtgtcagataactactacccgttatctatattcgaaaatttagatctgggcgaggaacacatggaccaaaccaaacgagatgagcttcgatatattaagactgtgcttaatttgattcgattcgaaactcgataattttatccgtagtctgaacagggaaacaaattaattatgaatactcaatatcagctctaattatctcgctccaatttaatctcgcatcaacactcttgtcgccgagcttctaataaaattcacttgggtcaaaaatcacaagagtggtcgacactccaaattcatgttctcttaatccataaattttaaacatacacaagactcgatatttcgcgaaataaatatgtgaaatcgatacaacatcaaaattgtgatcctttcggaatcgacgtcacgcaacgttcacgtgggcgaaaggttgtgcgctgtctagacaccggttagcacctgccacgcgccacgatgccaggccacagagagacacgtgtagcacaagcgtgaaagaatttcaaacgaagtttaaggaaccagatctgatgtcaaggattagagtttggcaagacgtcgatggctcaatccaaacaatattggattcgatgtttcgaaagataaagtctgaattttgtaaaaataaattagtgacaatttagacagatggagacaaac

SEQ ID NO: 124250 - DNA, 454 bp, Zea Mays
aaaagaattccgctgtcctataaccctgtttagccttgcaatttcatttcagattgctttgttgaatttgtgtccgtgttcgagtcttgttgctggtttaggtcgtgtcgtaatcgtagttcaaccgctccgtcgctgttatttgtttccgccgctatcccatccacctttcccggattacaagtcgagacaccacattactcgatttgccctcgctagccgccttgtgtgaactctcgccacgctagccctagattaggttgcaagccgcattgcattgtagcccctccttgtttcataatctagcgattacctattgcttatacctaggaggtttgtgcccctgtgctctatagccgcctctagccgccgctacggttcctaccaatttgtgcccttgaaaaccataacttgaggtaccttccataaaacgggcataacttttcgctcggtg

SEQ ID NO: 124251 - DNA, 479 bp, Zea Mays
ttctgaagctgatatgcccatgatgatgaagctgggctacttcggagaagctgagaagaagctgattcgttttgccagggaagaaaccactctgacaccgaaagatgatgaagtggttgttttcaaaagttttttcagagcaggactacggtttccgctgaacgagataattggagaaattttggataattatgaaatatttcttcatcagctgacccctaacgccatcgttaggctcagtattttcatctgggcccttcgaagccaggggatggacccaaatgctgaagctttttgccgagtgcatgagctacattaccagacgaaggccagagaggacggactccatgaaaattttggttgttataacttcgcgtatcgcaaggatacgaaggcctcgatcctgagctatcagaccaaatggccaactgcctggaaaagtgagtggttttatatcaaggatgacgagaagaagaggg

SEQ ID NO: 124252 - DNA, 638 bp, Zea Mays
gggcgccttcctgatctaacggacaccagaccggtctggtgcaccttcgaaccaggtgccacgtcagcaagccgttggccagtgcgcacgtgttgaacactagcagttggaggtggtccggtgcaccatcggaccatgaacagtgacggtctggtgcaccagcgaatcggtccagtggtatccaggcctctgtagacgctgtccggtgcatcaccggaccattccgatgagacctagaacagccagataaggttcttttgagcctatcttaacaaatcagatgtgcgagcatccatctttgtgggacacggccaagaagctatataccatcgtgattgtgttcatccaacaagggttgacataggcagtggttcaaccttcgcaactgtgggtcacccaccatcgtggggaatggtctcccgccctttgcgtgggaagttcacatggaggcatctctgagctaggaccgaggaggtctagaggacgagaagaggcaaaacgtcgggcatctttccaccatcgaccttcttcgcaagagaggtgttactgtcatgggggttatcgacaaactacatccattagggtgtggttctgctcatgacaaagaagctccccttattcaagatggcgtcgaacgc

SEQ ID NO: 124253 - DNA, 892 bp, Zea Mays
gggaacagaagaagagaccgagagggagagaaggctagccgccatgggaaatcggtgttcggtcatcgtgagggcctccaagctttgccgagaagcttagccatggcgcagggaacgtttatgtggcccctgctggcggattgggctgttcgtggctctggaatcgctcaccggagcaaccccaacgccgcagatccgccatgaccgtggatgggtacctgcgcctcgacgttcgccggtaagttgccctcccatgggtttgccgtccaccgctatacgagtagagcccattttacggaagtattgtgcgtaggaattaggttctggcgtggtccagccatggcgccgccgtggatccctggccgctgttctttttggtcgggggcaagaagaagcctggtggactgttgagagtgagatgggcgatccagattcggttaggcatgagagatgaggggagttgagcagccgccgttggatcttatgctagcgcgccagattagaaactgaggatacctcttcgtgcgaattgatctggaccgctgatcgcagagcgtgcggccacagatgcataccggttcgttgtagccggcttttaatctgggccgttgaatcggatcggacggccgaccttgcctgctaccccttcggcctcaacaatatgcataagagaccccagaaaatccttttatccacccgcagtcctggttctttataaaaccgttacacagaagccctagaatttatgaataaaaccctgaactactctggaatcgtgtgtgcagtccaagaattaaagaaaacagtaaaaagagatttagaaatcgattttgagtataaaaataattgcaaaaacccatttaattcatagaaaattcatggtaaatccttt

SEQ ID NO: 124254 - DNA, 341 bp, Zea Mays
tgtcagacaacatagttgacttattgttagccaaaggatccaagcccaagaaaggtaatggagactcaagaaatatatcagtgaaggtgatcaacaactgttgacttcacaactgaccagcttcatcaagcactagcatgactccgtttggccacatatgttgaaaaatcacatgtgaggcgatcgaggcacgactagagctattgtcaggttgttaccagtcagctgaggatgacaaagtacccctacccacaatgctgaattaagatacatatgctcataatccaatccaatatgtcacatgatctgcgcacatgtttataatcttcacttgatcttga

SEQ ID NO: 124255 - DNA, 433 bp, Zea Mays
cttaaccatatcatgcacctcaaagtgagaaacatgcccaaaccctaaaatacccctaattaagccattttagtgcagaagggaaatttgaaaaagggaaatgaaaaatgtgaaatcatggccagaaccaactataaaacttgaaatatacttggtaagctacaaaaactactagaaaagtttggccaaaataattgttcaaaatccccaaaaaggccatgcaattcagatttctgaatttcagccctcacctagaactcgggcgcgttcaccttgacccctaactcaaaaccttaagctcccattgacaaagttgtgctaaattaacccctctgcaacgtgtgtgaagatggcatcgagattcgtgccctagacacgtcaagtcaaggattttatctcggattcacgcagtgagacaaaccctactagagcg

SEQ ID NO: 124256 - DNA, 502 bp, Zea Mays
agaggatgtcggggtagaaaggagcaggtatggcggtgtgcttcttcccatcctcctttgaaggcagaggtgccgggaagattgctcgatgtgtcttccttcctcggcatggcacattcacttcctttttccgagtgatctacgtccactccttagtgggtgagttggacaacagagttctttgggtcggagaggccccgactgactggccctccatcctccgagggcactcgagccctggcttgcgagggggcatcttcccctgagatgtgagcaagggcatggcttacgggcttgcatcagcttctctcaagatttccaaggtgggtcttttctcgggcgtatctactatgcggcaccgagttccccctttgtccgctatgcatgagatggttctgaagcggaacatagctcctgggctgagggcgatcttgttcttgaagacgatagccatggagttagctttgaccaacgacacaccccgtacctggcacgccagctg

SEQ ID NO: 124257 - DNA, 859 bp, Zea Mays
acattgagtttcggcctcgcactgcaataaagactcaagcactagttgacttcgtattagaatggaccgagcagcaagtaccagacaacccggaggctacagaagtatggcgaatgtattttgatggctcgctgaaactgcagggagtgggtgcagggatcctcttcattgcccctggaggtgaacaactcaaatatgctctccagttgttattctcagcatcaaataatgcaacagaatatgaagctctgatccacggattgaacattgccatatcactgggcattaagaggttgatggtatacggagattcactggtggtcataagtcagataaataaagactgagattgcttgaatgattctatgggcaagtattgtacagccgtccaaaaactagaagacaagtttcaagggttagaatttcatcatgtggaaagagatcgtaatgcagcagcagacgcgttgtcgaaactaggatcgagtcgagctcaggtcccacccggagttttcgtctaggaggtgccacgcccaagcatttcctcagatcaggcagaagagtgcaatgctttgagccaacaagactcagactctaatgactggagggggcctatcatcaggtatataaagaatgaagaagaatcggatgacaaagccgcagcagaacgcctcgcaagacagtcagcccactacaccctcataggggacacactgtacagaaggggtgcaataagagtcctcatgaagtgcattccctcggttactaggaggcaactgctagatgagattcacgccggacagtgcggaatacacgtagcatccagaactctggatgggaaggtcttcaggtctggtttcta

SEQ ID NO: 124258 - DNA, 440 bp, Zea Mays
tccaatctttgtcttctcgccactcgaatattctgcacagaaacaaagggagaacaaaactataaatccatcgcaggttgcacaattcacacaatatgattggttggtgggcgcaacagctgcttatgtggcacgacatggggcacctgcgtagctatcgccctcgtcagctcgatgcacctcgcacttcaattcacaagaagttatacaggctggaccagtgtctgaaactacacttacaaggctaatgaggatacaacgtcaaaagtaagcacttacaccgaagaagagttcgtgatgggtggaaggcgtagccaaagtgggctgaaccagtgctcctcacgcacagaacctacaacacatgagccaaggcgcatgagtggggccacctacaatgtgctaggaatcacacgtcgctacatcaggggtgagaacaccac

SEQ ID NO: 124259 - DNA, 555 bp, Zea Mays
gttggattgagttacccaggttgggtaaattgcagttgagtactaattgttggtgcacagatgattctgaatgtgagtcacattgccattttagtgcacacttgcatggttgtccagttatccctggagttttcaggggtaaattggttgtccagttatccctggcttttgaccatagcttgcagggaaggtttgcagccaggaataggggagcagaaagaagcctttgtgcactattcagttctacatatgttcagatgtctctattgcttgcatttttgcattggatggcctgcaatttatttcagtctcaaccctacaatcttaacaatatgagagagagcatgttcatggagaggcaaccagggccatcattgcaattaacgcgacagaagtgtggtgacactatccattgcttattcagtcaggaagtacatgaacagctttggatttattcaccactgccagcgattactttgcaaacatatcagagggcacgattttggcacccagtatatattcttgagtttgggttctactttgctgcaccgaaat

SEQ ID NO: 124260 - DNA, 587 bp, Zea Mays
taggtttcaagatttgattcaagaggcacttgcttataatatttatccaacttggactgggtggaaactaccgaatgaggtgaagtcagaggatgaagaacttgttacactagcttttgatttcaaggaacaatcttcatacaaagctccttcggttggatgactcagaatgatagaggaaaaatgcaatgagatatgtgggaattaccttaccatagagcacaaagatatgtattctatctttggaagtcgggggaagcttcagcttaataaagtcatgaatgctattgggtttgaatagccagattatgaagatcccgctgttaacattgaggttggggaaaaaataaaaagagttgctaaaggtagcggggaaaccttgaagaagactacatatgctgatatagagaatgatgagttagagtgggacaaagagtcatctctaggtaccaaaaagaagaaagccatgacttcgaaaaaatcaaccaatgtgcaagggcaagggaaagggaaaggaagtgctacgaccacctcttctttgggttgcacacggattcttgagttaatgacacaaccattaccattct

SEQ ID NO: 124261 - DNA, 486 bp, Zea Mays
aaaacgaaggttgaatagggttatggatgcagttgatcacttgatttcaacctcctaaaggcataaaaaaatcaagacaacatagttaaatcgggtttcaccttcttccttttagcccaccattctcatagacaaggtgaatcgaaggaatgaagattgtatggggcttgtctttgaccccttcgggtgtccaagacaagacaacataatgagatcgaagcttaacctcgtctctaaattcatcttctttgaggagaatattaaatttagagacaaagtggtgacattaatcggtaagggttgcaatggtcaaataataatatgaagaatgtaaacacaaacatcgaacacgtcatttaatatcatagacattgcttacttccttcggcttctttcactattaaatcagaaattacaattgtaccttcggtctcgcaacacttacaagacgaaggaggagcaatagcttcatagacaagaatcaat

SEQ ID NO: 124262 - DNA, 430 bp, Zea Mays
tcctcccactcacctcgtgcgcgctctctgcctgtgcttcccagcgctgtcacatagatctgctcaccaattccatgccaccacgagatccccgccttcgccctcagcgtccccgcaatctggtgaccttggcacgccattctccttacttctccccccgctggtgagctcggcagctccctcttttctctatgttcatcagtcaagcattttgttcatacctcttccaaaaatctaaattccagtaaaaatcatttgaatctgtgtgtggttgtgtccccttacacctctcttgcaggatcatcagtccctacatggtttgaatatgtagaaaggcttgattctctacacacccacaaccttgcacaccatctgttttaataaaatgcctaaaccaatattcagagctcaaatcaaccccaaatttttt

SEQ ID NO: 124263 - DNA, 359 bp, Zea Mays
tatagagatataaatagaagaaaactcccccaatcctaatatccaatggctcaaatcaaccgacactcgaaaagacccatccagactccaaataagacaaactagtagtcgatcagaatcgtatcgatgagctctatgcatctatggcctccgataatccataggacaccatttttggattatgaacatgatttagtttttatggtattgcatccccataatccaacattctccccatctacaaactcagatgtgcatgcatgtagtcgtgtcagaagctatggaaataaagaaaaaattgcctatgttaaaggatagaacaaaggaggtggttgcagaagatgctacactataccaaa

SEQ ID NO: 124264 - DNA, 711 bp, Zea Mays
gcgagccatcgaaatacattcaccatacttctgtagcctccgggttgtctggtacttgttgctcggtccattctgatacgaagtcaactagtgcttgagtctttattgctgtgcgaggccaaaactcaatgtcgtgagctcccagttcacaggcccacttggctattcttccaatggcttctttgttgtgaagaatatcccctattggaaacccagtgactactatgactttgtggtcgtcaaagtagtgacggagcatatgagcagttagaagtactgcgtacaatagtttttgaacttgaggatacttctttttagagggtcccagaacttcactgatgaagtagaccggatgctgtactggatatgtgtgcccttcctctgcccgctcgactactaacgcggtgcttaccatgtctgtcgtgcaggagatgtataacagcagatcttctgccggctgatctggcatggctcggcatggtggctttagtactggtggcgtggtcaagaacttctttagtgcatcgagagcttcctgtgcttctgtggtccactggaacttgtccaccttcttgattaatttgtagaatggtaggcctttttctcctagccttgatatgaacctgctcaaggctgccatgcatccagtaagcctttgcactttcttctatgattgtggtgcttccattctcatgatagcctcgatttttt

SEQ ID NO: 124265 - DNA, 309 bp, Zea Mays
agctcaatgatcgacagatactggtggcaaccaccagtgcccccgccccctatcggtggtcagaacacccgatcacctttacccgggcagatcaatggctcaacttcgatcatccgggcaagtattcgctcctcgtcgatccgatgatccgagagagcagggtagagaaagtattagtggacgggggaagcagcatcaacgtcaccttcccctggacactcttgggcttgggagttacgctcaaagaactccatgagtcggacactcctttcttcggcattgtgccgatcgaaggagaataccctcttg

SEQ ID NO: 124266 - DNA, 808 bp, Zea Mays
ccatttgcgcccacagatgcttttgagcgcctactagaatcaaacggtccggccgggtctctgcgaatttttattttatttgaaaaaatcttcgtgctttataaagctttcgtgggggagaaggagtctgaatttcgtcaggatctggtgcagttccacgtggggattgatttgaacgaccgtgattataaagcgcggctcacctttcgatcaacctagtattccttgcttgcttcggtttaaaacccaccctaaccagatgcatctttcgatcagctgtggggggaatccagttaacaacgactgcatctgaaatctggggagctgtgcaaaaccactggcggagcaatgtgactgggaatccagttaacaatgactgaatctgatctggggagctgcgcaaaccactggcggagcaacgtgaccgaacatgagcgcggcagccttccagtgcatcaccggccggccacatgtggacagattagcgcatgcgtaagtgcgtaacccatgtccctaagcagtattcaagcggggcacacgggtacagcccgcctcggtttctgcgctaaggaatcgagagaggtcttattcatttcttctcaggccatatccccccaccccgatcaaggcatgtgtatctttttttttacgtaaaatatctagcaggacatattttcgcgtgatagcttatcgtgcgcacacgaatgaccatgccaccgtgctttgattgataggacctgagctatacactgttaacaaattcttataaacagtcttatactatatgccagcatttagcgccctttgc

SEQ ID NO: 124267 - DNA, 278 bp, Zea Mays
ccaactcctaagtttataaatcattacagtccattacagtgtacagatcattagttcaatacaactcataagacataagactagtaggttgcaagactaagcattttcatcatccctagctgattgtgttgttggatcatcaagccacaggttgtcgtgctcatcttcaagttcttttgtgtcttcctccacactgtgttgcaggtgagcatcagcaagttcccaatctttgatgcaggataatatctctaccgtatcaggagctagacgacgtcgac

SEQ ID NO: 124268 - DNA, 350 bp, Zea Mays
tttcatttggtgtacctaagaaaatacttcttaatcatggcgtgcttagacattgtgctttatatgtatgatcctgccttttaaattggtatatgtgttgcaatgatcatcatgtgtgaagcatgcctaggttgcttttaaaatgttatatatcttgaggcatgcattgtttccactaggcataagttgtattatgtcatctattcaattggtatctttttgtgatgcaattgatatattatgcctagaccatggtatgttgtgagcccctctagttctaagggatgctagaatgtgcaaggtgcaagtcattcaaagacttgatgcacaactttaggggggcacacata

SEQ ID NO: 124269 - DNA, 608 bp, Zea Mays
tggactaaaaaggagttagtatgaattttctatgagtaaaatgagtttctagaattatttatatactaaaaatcattttctataactatttatttattttctctgctccctggactttgcgcacaaaaacagagaagctcgggggtttaaactataaaattccccagactcaggtacaaccgaggggtactacgggttgattcttaattaggggttcttttgaataacttcacacccgacggggtattgttgaattgtggacgcccgatcagggtcaagggcccagattagatcctgatcctaacccaatcagtatgtaacaatgttcgcatgatcgtcgattaacggcttggatcaaaaggagtaaggcactatcacctacaccgtatagattagatcagacggtcaacactaccccgaccaacgccttaccaaggatctgctcctgaccgtccaaagccagatcgacgtcatgggtgaaacaagcgaacgggtcacacggtcttcaatcccagccgtccatccgttgatcaacgatcggccgacatcagttttaccgccaccacacgcctctcaccggccagacgcgcagggaccccccttcccgc

SEQ ID NO: 124270 - DNA, 492 bp, Zea Mays
agttccgacccagcacgacgataaaaactcaggcactagtcgacttcatatcagaatggactgagcaccaggtcccagaaagcccagaggtcactgaaatatggaggatgtacttcgatggctcgctgagacgggaaggagcaggttcagggattctctttatcgctcctagaggtgaacaactcaagtatgcactccagcttttatttctagcattcaataatgcagcagagtacgaagcactggtccacgggctgagcatcgcggtttcactccgcatcaagaagttaatggtgtacgacgactcactggtggtcataagtcaaataaacaaagattgggattgatcaaccatctcaatgggcaaatattgtgcagcggtgcggaagttggaggacaagttcgaaggattataattccaccacgtggaaagggatcgcaatgcagcggttgacgcattgtcaaagctaggatcctgtcgcactcaagttc

SEQ ID NO: 124271 - DNA, 299 bp, Zea Mays
aatatggtacattcgacctagtgaatccttccttccgaagggatacacaaagaatggtatgtttagcgtaaatatgtgcaacatatttctaaacatacattacttatcgacggagttcgagatagaggatatgaattgaaagagaatttcaattcaaagtaaactatcttgagtatcttggatacaaaaattgtctatatccaacgtatattgaagaaattcaatataatggaatcatagtcatttgattctttcagatcatgagatgtgctattgtatcttgcaagagcatccggccg

SEQ ID NO: 124272 - DNA, 1302 bp, Zea Mays
cagacacgtgtgaacaggaaagtagggaaagtggctaaactagaaaaaagagatggtttcctgttattagctcctaaattagtgggctgattccttcctattatgagctcctacattggggggctgttccttcctattattagttaccaaagtagtaggtccttcctattatcacccactaaattagtgggctgaaggctatatattcttgtaaaccacatatggaggaggcacgcaataaactatttcctaaccccttctctctcaagcctgcggttgaggagtttatcctcacccgagaagacagacgtcggctacgagctacgtagtcgtggtccggccagtcaggggtttgatgcccttaacaaccctaaaaccctaaacccaccgaccatccgatcctatgagtcgggagacacacgggtggtggtcgttgccaagaacatggaagaacgctaggaatttctcgctgacatccgcgctcgtctcgagcaagctcaggcatttcagaagcatcactttaacaagacccatcatgttgtttcgtacaaggtcgatgattgggtgctgctacgacttcgtcaacgcccggttgcgtcgctgccctaggccacctctggcaagctcaagccacgctacttcgggccctaccacatcaccgagatgatcaacgaggttgccatctgcctcgctctcccacctcaggctcgcctacacgacatgttccatgtgagcctcctgaagaagttccattgcgttccaccagaggctcccccgccacttccactggtccacaacgacgtcattactctagagccggaacgtgctgtccgtcgacgagtcgctcgtggcatcgagaaggtcctggtccactcgaagggctagtctgctgcatcggccacctgggaagatgtggtgtcgttccgcgccaagtatccaacatttcagctcggggacgagctacctctcggggaggggagagatagtttcctgttattagctcctaaattagtgggttgattccttcctattattagctcctagattggggggatgttccttcctattattagttaccaaagtagtaggtccttcctattatcagctcctaaattagtgggctgtcggctatatattcttgtaatccacacatggaggaggcaagtaataaactatttcctaaccccttcttctttctcaagcctacggttgagtttatcctcatcgaagaagacggacggcagctacgagctacatagccttggccgggccagtcaggggtttgacgcccttggcatcaat

SEQ ID NO: 124273 - DNA, 410 bp, Zea Mays
gcccatttaccaattctaccactcataatcgggttttggaacatgtatttgatcacattggtttgaccggaaacgatgcaatgagtagacaacaaataacatctacacttggtgcatgcataaaacaagcataagcataacttctcgatgaaagtgtacctcgtttcagcatccaccagcctctgacttaggtaggctaccacatgctcctttcctttggtctcttgcgtcagaatagctccaataactttatctttagctgtaatgtataatctgaacggtactcctgcctgtggcgcttttaacacgggagccgaagacaaatactttctaatgagatcaaacgcttcttgttgttctgcccccaggtgaattcggcatcatttttaagccgaaggataggagtgaag

SEQ ID NO: 124274 - DNA, 566 bp, Zea Mays
acttggtctgtcaggctaactgaagaacaatccgatggtacagtaaccggatagaatcccaagttcagccccctcgccaccgatgagccgcgcgcggattcgtgctatcgccaccgtgattcatgcacagatcagttggatagcgccgggggtcagtaaatatcacgccgtggaaacactccggccaccgtacccgagcagaccacgactgattcggatgagttcgccagagacagccacttcacggccttgtgccacgtgccttggcacattcaccgcatcgtcgtgactcgcattagccgttcattcattgccggggagcttgccacagtgaaagccactaagcttgcgcgctagtaaacttcttccccttcggccgccagcacatcttcgtgaaattggacgccaccgcccccagatcctataaattaccgctctcgtccactccactatgtagttgtgcaaccactgaagcaacccgtgcctcgaatcatccactagaactccccaatttgggatttcccccaaatcactcaagaacaccgagcagtttgacctcgccgtgg

SEQ ID NO: 124275 - DNA, 1049 bp, Zea Mays
gcggagcggggaaaagaagaaatggctgtcatggttgattccctcttgggaaactagtctggcctcggtaacctgtttgggaggaagggatgagctcgtgggttgtggccgtggccctgcttggcggagaggagcctcgggttgagggcaatttctcgctggtgcttagatgccaccatggagctcctacgcaccatcaatagaagctatcgcgatgtaattcaaggtaaggtatatgccctatcgttcatcatactcccttgcatgttctgcgcttgtgttggagcgggtcgaggtgttgggtaatgtggtggtgccttgccgcggttgagcgccgccgtggcaccacgcggtgtcgtagtcaagaatttgagctcgatgttaggatttgtgcgttaggccatgtgattcggggtggtcatggcttcgttcaccctgggtctgttgtgagattagaacctagagtcgcctatccatgtgccccagttgggtttgcggtggtgctctagctcactgtcacagtggacggagggaagaagaagacgagactcagattgttgatacgatgatgggcggaccagattagtggagcgcaacactatggccaggtgcaatggtgtccgtagatcatctagcgagcgaacgagattaaaaaggaagaaaacgattcaggtacatgaatcgtggtctggatctatgatcctacgggcacaactacttactggttcagtggatggatcttagccattgattgaacaatgtgcggtcaagatcataatagagacgacgttgacctgagtgctccaccaccgtatatcccagatcttgcggccaatagcgcataccagtttgatgtggcgttagatctaatctgggccctcggttttgatcgaacggctctggagcgaagattgtagatggaatcctggggttttataaaatcaacccgccatcccaagtatgttatgaagcctttaatttcggtcccttgttttttataaagtgcaccctgaactcttcagaaatagtggccccagcccagaagtgag

SEQ ID NO: 124276 - DNA, 565 bp, Zea Mays
gaaaaccatgaaggaaagcattgctgatgtcaatttgcctggtgtgccatccacgagagactgcaagggaaagaacgagacgaacagtagccggtttaacaaccggactaaaagtctcatggtaatcgatgccatactgctgtgtgaatccccgagcaacgagccgagcttttaatttgtcaatggagccatcaggatgttgtttgacacgaaaaacccacttacaactgataatattttgaccagggggtttaggaaccagagtccaagtgttattctgccgaagggctagaaattcatcctgcatagcctgacaccatttgtcatctgccagggctgttttatatgacgagggtgtagtaaagaaagcccgtcgacttggattataaaggatagttccatcagcatgaatccgaggcttgtgaatattatgcttggatcgagttaccatttgtggagctgcagcatcaataccagatggaatggatacaaaagttgactcttctgccacaacttcagggggtgcaggcgcagcagatggtgaagccaagcaatttgttggtga

SEQ ID NO: 124277 - DNA, 373 bp, Zea Mays
gaaaaacatcatgaacatccgcaagatgatctgataactccaattgatatgccacctctcccactcgctttaagattaagaagggtccaataaagcgtggggacaactttcctttgactttaaatcttctcatactgcggagtggtgacaccttgaggtacacatgatcaccttcctcaaactccactggtcttcttctattattaacgtagctcttttacctggtttgagctaccctcaaattctcctggattatacggacttgctcatcttcctcttgaataagttcaggcccaaagaactgtcttcctctggtctgatccaatatagaggagtcctgcatttcctgccatatagagcctcaaacggtgac

SEQ ID NO: 124278 - DNA, 300 bp, Zea Mays
cgcagagacagttagacagaatagtattcgactcgaggagcacggcgaacacgagtggctacggctacgggtgggctgaaagaagaaaataatacgcagcaaggaggagtcggctactcggctacggcgagtcaccttggggcgacgcagcggcggggattgtggtagctcatcttccccggccccgctgcagccgtatagctaatcgtttctgctgcgagacggaaccagtggcacagtacgtacagcacaatagccagaagaaaacgagacgttcccagcagcatcgaccggaccgtt

SEQ ID NO: 124279 - DNA, 885 bp, Zea Mays
cttcggaagcatgtgagacgacctatgattcgaagaagagaaaggacacatcctatcgtggttccagaaaccaaagggacaatagaatttgtgttcaggaggggatgctagcgtggactcactccgaatggtgaaccacctgagattcgagtagagggttcaaacatagagttatactagttcaggcttttgccttagttcagtgtagtgctgattgtaatattgcttgaggactatgttacatctggtgcatgtgtgagaagagggaaggggacctgcccttttatagctcaaggataggaccttatagaggagactttttcctactggtaagagtgtgatctgttgcccccggttgacgtagtgcctctgatgtcgtatgtagggttgtgcgtagtcgtactcccgatgtggtgtaccgtctgtccgtcatacgggtccctatagcgagtctgatgttgatgtcctcgtagtggcacttggtgggtctcacggggtagtatcatggtatggttgtacatggcgcagtctcgcctttcgtcatgaaccccatgccaccctctagcatgtgtaggcatacacctagtatggtgtattgtcccatccttactggtatgtgggttactgtggcgactctgatgcttaggtactccacgactagggttgtccggtcccacaaggtagagaccctatgtggtgatgctccacttgatagggacttctcggcacccattcaatatgtcgtgtcactggtccggacttagtttggtgatgacacgtcctgtcgtgtctgatgtgggccaatagtaccgggtcgggcctccgcctcgctgagttgctcaatgaggacctagacgatagctccgcctcgcagggttgctcggc

SEQ ID NO: 124280 - DNA, 516 bp, Zea Mays
ggagatagttgatatacagatttttgcacactttggttggcgcttcacgaatagaatttcgttttgatggcgtcttttagttgtttcagttgttaggtggtgatttgaaatcagtatcatgtaatagccgttatattggctttcctgttgcgtgagtctatttgtagatgggagagtcatggttgtgaccctaacttctcctgaagggaagaccaaaattgtttccattatctaaaaagtgtatttttattagaaaaatccaccaccagatatgcacctgcaattttgcagccaacaagacaagtcaacaagtgagtctccaacgcggcacacacgggagaggctggagtctggcaagagagtcaagccctcgccatgagggcaccggaagctgacctcattgttgttcaacttagctccttggggaggacctcgattcgctcatctccatctcagacctgaaggactacaataacatgatgaagcagtacgggaagctaactgtcgccacaccta

SEQ ID NO: 124281 - DNA, 695 bp, Zea Mays
gtggatttggagttgctggagtcggcgaagctcctttgaccacaagatgactttttgtcttggtggccatagtccttttcaacttgagtactgggggatgcttggagacctttctttctactagagatggcactttggtcagcagatctggtgaaggttccaagtttagagcagtgtccctattctcctttgtgtggaccatcgagctagttaatcatggaatgatagaagatgacaaagtaatgaatgaaaaactactagggttagcgttgtaaaaaagaagaaaaggagtgatcactacctcacattcatcaatctgtacttctcaccttgcttcctctccatcgaagtttggagcattggaagcctccatgccacaccacacgatgtagagaggagagttcctaggctatggtgagattcttgggtgatggcaattagcgaaggatgctagagtgctggacagtgtcacagactcacgctcacggttcacgtgactcacaggcatggagcgatagcctacagcatggcgcattagcgttgtggtggctacagggcaaagactaggccgctagggtttggcactacttcgccttcggctagccgctagcacaagtgcataatgcaagtatgcaactcaaccttgtgggctagcaagcactctagagggtaatcgggtgtgatgtggccatgtg

SEQ ID NO: 124282 - DNA, 472 bp, Zea Mays
gcgaatagggagtataaatacagagtctgttagaacgcaccgtgcaaaagaaccactcatctataatcaagcatacctaaaatacggatgcggagtgtgtatttgctggagttggtctaaccacatgcaaatgcgcattcgcatgcgatagttgatggggatagcgttgcttcagcattttgcgcgtgcatgttacttgtactacgtcaatcccaaagtagatttagatgcagaccggttttctatctttgttagttaatatattaactaattaagcaaatagtaatgtcgtattggaatttaaaaaggaaagataggtagatattttttatataataaactatgtctacatataaacaaaaatagaaagagatatgtcatgcggataacaagagagtggagacatatgatcaacgaaaatctatttttgaagaaagcatccattagagataagatttttttgctagtatat

SEQ ID NO: 124283 - DNA, 493 bp, Zea Mays
cgctgttcagctttgctcataaaagaatcagtaattgttcgcagacaccttctctctctttcagtcaacgttgtttctgcatcaaacaaacaaactggatggtaggaatagtactcactagtctagtaccggtactactgattttatttaactccactggactagtagcactcaccagcttgtacagttctgcagttgacatttaggtcacatcaatgcatggccatccctagccatgccacatcgggatgagaacgaaggaaggtacgcaagggaaaggaaacctcagccagtggccatcagtcccactcctcttgactgccccaataattggcctcacccctctcaaaaaatcagcactagggcttctctaaatttctccctctacatcacttttttacgtcacatcatcaatatttcatctcctactttttcatctactgcagctcatatattctctccatataccacattacaactataaaatattatt

SEQ ID NO: 124284 - DNA, 393 bp, Zea Mays
gacctcctcacaccgcgcctccacccactggtcgatgctatcgtagtgcccaaaaatttgttgtgaggcaggtttccatcttatgcatttcatcgagcaccttgcggacggtggtgtccacttattccataatgccagatctggtgcgccacggtacctcactgagtggatctaggctgctagtctgataccagatgttatcaacctcgctgggagaggaaccagcgtagatttattctggcatggagaaggggaaaagggaagaaggagatgtcaggaggtaggcgacaacaataattgcatgttatctgatgtatgatggtttgtttcgttcgcgtacatgcataagaatatgtcacggactcagcctccacagactaagccagatctgac

SEQ ID NO: 124285 - DNA, 414 bp, Zea Mays
gggcggtgccatgaggccgtcgcctatgttctacgtccacgaggcggacgtcgtccagatccaccacttcctcgaggagtgctccctctgcgccaaatcgctctccggcgacatcttcatgtacaggtggtcgcccccgcgaaacacatactaactataccactattatctttctctctcttttacgtagatatatagtcatatagatatgacagatagatgcacggatcggatcaggctaattggtttgcctgtgcaggggtgacacgccgttctgcagcgaggagtgcagggagcagcagatcgaggtggacagggcgaagcaccggcggaagaagcgcgcggcggcgcacgcgctgtccgcacgcagcagggagcaccggcaccagcagcagctgcagcagcaccaccacc

SEQ ID NO: 124286 - DNA, 393 bp, Zea Mays
gatagaagttagaatatagagtagagaccagcatagtagtagtaatgcagtatgaaactatgatttatgaaaatgcaaaacagaaatcaccagcaacaacatagtagcagtatgaaactatgaattatgaaaatgcaaaacagaaatcactagcaacaagtctatattctgaaatgaaagtttgaaatagcaagtctacaacttgcaggaccataggtccataaccatggatttcagatcgcctgatcactaactgtaaccaccacctatatgagatcattgtctagcctgaaacgatcaccagcagctccagcttcttatgcagcatccttctcatttctagttggctcagtttttgacagataggcgatggagggtgacagaccagagaac

SEQ ID NO: 124287 - DNA, 451 bp, Zea Mays
aaaatcttctttctgttcgtcagttcactactgacaattcttgctttatggaatttgaccgtttggcctgtctgtgaaggatcttgccaccaggacccttctcgctcggtgtgacagccccgggcccctctacacgcttcgcctgcctgctccccctacatcgacctctgctccacatgttcttgcagcggccgcctcctctatgacttggcatcatcgtctcggccaccccaggtgtgatgtgatgtccaagatctccagtagtacctctgtttctagttgtaggggatcttttgagcacctctgtcatgcgtgtcagtttggtcgccatgttaggcttccattccccacctcctcctctagggtagcaggcatttttgatctgatacacttgatgtatggacatcccctgtaatcagcatttctggctataagtattatttactcgttc

SEQ ID NO: 124288 - DNA, 599 bp, Zea Mays
ccgagcaacctctcgcttttccgccgttctttatttatagtcgattgatagtttgtcttcgcgcctaacgctgccgacattattagaaataattaccaagcgataattggtaactgccgagtcatgcttggctctgccgacattttagagataacggtcgagttatgagagacactgtcgacgttttagagataacagccgagtggtgcttgatgttgccggcgttttagatgtaacagccgagttatgcttgaccccgtcggcgttttagaggtaatgatcgagctatgatagatgatgtcggcgttttagaggtaacgttcgagtggtgcttgatgttgtcggcgttttagaggtaacggccgagttatatcggaaatttcgctttcccgagtgatgacttggcactttttagaaatggtgcccaacccgggaaaaccccatttatactcatgtcgacgtgcgcttttgagttctgagccctaacttcacatttccgcctcgaatcactcctctgtttccctaagattttgccctcgtccgatctgtcggcgagattgcaatggcgcccaagcggaagaagcagagttctactgcgg

SEQ ID NO: 124289 - DNA, 432 bp, Zea Mays
agcaaagccttccaatagcaactccaaagcccggactaggtgcatcagcttccatgaaatgcccatgcgacgtgagaacacgccttgcaggcaaagggagggttttgcatggcatcccaggagacacaaccctgtccaaatcacatgaaatccgagagaagatggctacaacaggaaccaaagcaaaagcagggggacattgatcatagccccccatacaccccacaaaagaaaactgtaaactcaaaattgaatttgacaaagtcgaaggattatgatttgaaaatatgcatttgaaaccaccaatttgcacataatcagcttgacaactatcatcagatggatcacctagagacaactttggcttcttaaaggctgatatatagccaacccttccttgatgcggcgatggacaatgtttcttgattggtg

SEQ ID NO: 124290 - DNA, 454 bp, Zea Mays
cgaagattggctaaagatgagttcaatgttacattgctacatgatcgcttaaggaaacaggatgatgacgacctcaccatctgatgattcttccttatcctattcaatcgtttgttgtttcctactactagctggggcataacaaaccatgaagtgcttttgacggaagaaatgcatcgatttcacgagaactattggtgccagcttatattcaatgacctatgtgaagcggtgaagtggcacacaagaagcaccacaaatgtctatacgatgatatacagatgctcgattgtcgtccttgtaagcatatcttatgtcttttgtacatctattgcttttagctcatttttttgtggggcatactctatcagattatatgttgattgttatgtttacttacatagaatctttacacgacttactaattaattttttctgtagttgtattaccggg

SEQ ID NO: 124291 - DNA, 480 bp, Zea Mays
attaaacagaaacacagggcctcacgtgtaaaatgccctagactcggtctaatcccgtagtggactgcgggttggtttctagtttctcggagggcttaactgcaaatcggagcttgacgcagagtgcagacgcagatctgcgatcaacgtgccagatcagaccgatacgtgaacgaaccggtacacgatatcgtgcgttggattagggatcaatggcacagattcaaatagctacaatctaaccttgccctttcgatttcaatcctacggtccagatctggtcacgcgaaacggtacgcgcaatccaatcggacccgtccgtgagcagatcaacgacactgttccgttgtgtgagatctaatctgcaccgtctaatccaggatggagggttgtggggtcgtcttctcccccccgatggccgagtgtccctccccgcgcagcacagccgcgacgacaacacgctggtgataggctaatttg

SEQ ID NO: 124292 - DNA, 295 bp, Zea Mays
caggaagcgcatggtggtggtttgatgggtcacttcggtgccaagaagacggaggttgtgctgtccacacacttcttttagcctcgaatgcagcgtgatgttgagcgctttgtagcaagatgcacaacgtgtcaaaaagctaagtcccgattgaacccacatggtttgtatatgcctcttcctattccttcagttccgtgggcggatatttctatggattttgttttgggattgcctaggacgaagagggggagcgatagtgtttttgttgtggttgatcgtttctctaagatgg

SEQ ID NO: 124293 - DNA, 750 bp, Zea Mays
agggtttcccctaggagcggaaggagaagctggcggagaagggagtgagacccacctccccgcacctccggagctgccactagatttggctcaagttctagccaatcaaacccgactcattgaagtcctcactaggagtttggagaatcagtgcccaaatggtggaagaccacaagacaggatgggagaatttctgaggctcaagcctcccacgttcgctggatccagcaatcccctcgatgccgacgactggctgcgcgatcaagaggaaattagaagccattggatgccctgaaaatcagcctgttcaattggctgctcctcaactttctgggatgaccctaacatggcgggataccttcagcactatcgtcagggatgctacctgggcagaattcgaaactgctttccgtgagcaccatgtaccccaggggaccgttcagctcaaggaagatgaattccgggaactaactcaaggtggaagatctgtcagtgagtacgtgcacaaattcatagaattggctcgctacatgcctaacgatgtcagcacagaaaccaagaagatggcccattttctgaaagggcttagaccagaactcaagaccatcctcgccagccaagatttcctcagcttctcacacctctccaacaaagccatacaagtggaaagggcaaaggaagaggaaaaggtcacctcaagaggaaattccaagaattccaagttctccgagctcagcagcaagatcggca

SEQ ID NO: 124294 - DNA, 492 bp, Zea Mays
atctatgtttcattgtattttaatttaatttcccagattattcaagcactatagagtttgatatagttgttatggccacttggcaatataaataaatatatgatgccacacaaaacaatcaaataaaatatagagttaaacaacattgtttacggaggttgcgctatgttgtgacttcaggggctcgaataatccatcacattccacgcgagtacaagctccagcgtatctggcgtcaacgtgtgtgtggccatcaaggctacgacaacgaataagcctccgtaacaagcgcaacaggcgtaattgtggctcgatagtcaggatacaggataagtccacgcaacgtgcgcaacaggcgcaattgtggctcgctgatcatggcggtcgaatcgtgcctgcagggcatgcaaaaaatatgcgactcggtgatggtggttcgactcaacgggagtggtccgactaagtgagagtacaacatagcaatcacatgac

SEQ ID NO: 124295 - DNA, 304 bp, Zea Mays
tttacatgttagattcaaaactatacacatcaaatattacaggcttagtttaacaaatgttacattaatcacttaagaacgtttttacagtaactactgttcttccttcagaactttctccgcaacttcgttaagcagtttgttgacgacttcgtcaacaatagattcggctatgtcgataatttctattgctttctttgtctccggatcggccagggggtcgaacggctctggtggaggaggtaattcagctgcgatagaaaaaatcaatcagtttcaagccacgaaaacaaacgacgaagct

SEQ ID NO: 124296 - DNA, 500 bp, Zea Mays
ttaacgctgcagatcaaatgagtcgctgaaaatgaagcgcacctcctgattcacattttcatttggcatcttttttttactcgtttaattatggccttccggctgctaaaagcgtgtatataagcaattaaaatgattgagcacaggttctttcgctgcccttttgctacatctgttttggtttcagtctcttctttccaccaggacaaacttgctcatgtttcaggaaatagccatcttgtgatggattggaactggagttctgaacagcttagaagcacatgacatctaccgttcttgcttcaggaggataatcttcaggagcataaaacatctataccagcgttgctaggaactgaactcatcgatacagaactgaactcataatcacaaaattgcgcccactctgactgcaggataggtacaggaatcagggcatggatgttactgtacatgccaaagccatggctcctcctcagctagctgacatgatagccaaa

SEQ ID NO: 124297 - DNA, 696 bp, Zea Mays
gaaaattgcagtgacattggagtgatctgaagtggaagatgtcccttctttttgtcccaggcgtggagttggtgttgctaatatggatgtcatatgagggttctttttgttgtgcttggcttgtttctagctcagttaggttgtttaatcgagtgaagctttctggttgatgatatttgaactttgtcaggttgatgctatcaatgtagagctttggtgactcagtctttaatttaatggagggactttttttttgtggtcatggagcgtcagtgtggagcttccctggttaactgatattctcatttcaatattgtggggtgtgctttatatagctacctctgttattgctttcttaaaagctgagtaaaatctcctttaaaaaaactgtagatcggaatcggatagacttcaatcatcttggccgagccaaacaacgctgatcgatccactgccagctgattaatcaagtatggcgactggcaacaaccgacaaacaactgcagttaagcgacccagctcgctagctataggtggtctgaataatcattgtacgtcagtctcatgcagcctaaggaacaatgcaagctgaccagatccagatgtgcagttttggattggcagcctacgtgttcggttcctgaccgggcttccagctgggacctagtaacaaatttatcttgtcctaaacaaaac

SEQ ID NO: 124298 - DNA, 359 bp, Zea Mays
ggcggtggaccaccggccctgtcgcgcggcggcgggcgagatggacttcttcaagaaggaggagaagagggagaggaaggctgccgccgccctggtgccgtcggacgaccttggcatcaaggaagatgaagtcacaatcaacgtacgtaaccaacccgctttgcccgtccatcccccaactagtttgtcggatcggcggttccctacttctttccctgacgcgcgcgctcgccgtcgcggctcggtttccagatgggtctgcaccacgtcgacaggaggaagagcagtagcgaggagtccatcgtcatcgacgacggcgtatcctccaacgatgtcgatcacagggaggccaaagctga

SEQ ID NO: 124299 - DNA, 508 bp, Zea Mays
aaagtttctatatcagcttatgagacggacacttctgccgtggatggggtacagggaggctaccacacatatccagctctggctccttggtgccctggtctctcactcagagtttgacgttgtggatttccttatttgtgagatcgaggacaccgtattggatggtctgcgtgcacgtcgacagctgccatatgctcactatctatgtcacatttttgctcagctgattcggcctccacagttccagggcacacttgaggcctcacgcctcgtctttgggtcctaccgtccagcgcctgaggatcctgcgccagcacctgctccagtatttgacactcaggccgaggatactgctcttcatcagttcgaagctcaggacgcagcagttgattatgatgatgatgatgatgattttgggatttcgcctccgcctcctatgcctccacgctcacatgatcatgaggctaggagttctcgtgctacccctgctgcccctcctgccattgac

SEQ ID NO: 124300 - DNA, 1165 bp, Zea Mays
gaggcgatgtcaatggcggcggacgtcgttgaggtccagcttccatatgcaccaggtccctaccctcctgctgcacagagggtggtggtctctttgctacttgctctagaggagggctccgaggatcttcccgccttatccttgaagggactggagtcgaggagatggaggcagaggagagaaggtttgttgagggggctccatccgggcaactaagagcctagagatcatcgagggctctaacacctctgccatggaagtagcggtgattgtgcgtgtgtcgatcacgcaagagttgctccctttcgatgtggtaagtctcatctcctttttgccccttagtgtttctaggattcctcacctgagtatcactcctagttgtagcgtctcctaacccagtcgtcgacccggagtgacgcactgcttgcagcgcagtaggaggtggagcacttgctcactgaagctgccagttcggaggagcgggagctgttcgtgctcactcttaggctgagaagccttgggcggaggtgacgcgcctacgcacatagcgaaatgaggcgcggggtgacgtggatcgccttcggggggagaggtcatgcttttagggagctctgtcggagttgacccgacataccgatgacaccgagttggcactaaactcagctaacgctcacctagaggggttggatgcagatctctcgcgagaacgtgaggcatccagaggtacacccttttgggaacggggttgttcttgattggtctatgtctaaggttacttacatttcttcttttgcagagctctaaaagatgtcctctgtggctcgggacacccaaaatgtggtagacgatgagaagcacaagctctcaattgcttgtgacgccaccgtaatcgcatggctccaagccgaggattcactctcggagtagagcgtggagcttcatgctctatggttggccacgggcatgtcatgtgtgcacctttgtccttcgatgacgacaatggtcttgttgaccgagcaactgggaatgttgtggggccacatggaatttgtcgtcctagaggacgcgttcttcatgagcaatatgccccttggacagatggtccctcacttcgatgagatcgaccctgtcatgagtcgcatcgaagaaaagttgcatcggatcg

SEQ ID NO: 124301 - DNA, 472 bp, Zea Mays
ctttctgactgctgaatcaagaatcttcactggtttttcacggtactgaaggtctttctaaatctgtactgtcttttcttcgaggtgactttctggtgcttgcaggcatttgcggagctgggatacgtgaaacacattgtggatgtcggacatggattctggtaactccagacggtatgctgcgggtcctaccctgccaatgatgggatagggacctacaaaacgtggggctagcttccctttgacttggaacctcctgacaccacgcattggagaaaccttgaggtagacgaagtctccctcctcaaatcggagttccctccgcctgttgtctgcataactcttatgtcgactctgagcttcgagtaaccttctgcggatcagtgcaactttctctgctgcctctttgacaaaggcaggtccttctagtgctttttcccccacgttggaccacatgagaggggtctggcat

SEQ ID NO: 124302 - DNA, 343 bp, Zea Mays
gcgatcattagggagatttgtatttgattttattgcttgtaccctgatcagctcatacgtgcctcaccgagctcaccctgacctcgtcggtgtggctccctcctcttcttcttgtcgcagtcttgtactactgaaagctcgttgtactactggcgctcgctgagttcagctcagacaacggtactacacagacacagcccaaagcaggtcgtacgtccaacccgagccgagcgatcgttctccattttgttttcgtgcatttccacgctgttctgcttttccacgaaagcaacaggccaagtaacatcaccagaggatttcaaattggcctcggccatcagcg

SEQ ID NO: 124303 - DNA, 455 bp, Zea Mays
gttaacttatctttcaaagtgttgaacgcctcttcttgtggggggtcccaagcaaaagacacacctttctttgtgagttcgtgaaaggggcagcgatggagctaaaatcacgcacaaaacgacggtaaaatcctgcaagtccaagaaaactccgaatttgggtgaccgtcgttggtgtaggccagtcttgaatggcttcaaccttgctgctattgtgatacccggtttgcaaagaagagaagttgaaggttattctttttgtttgtttcttctcttattcaggtgtcgcgctttggggatttagaatttgtggaaaacattcaccagtatagcagtagagtggttggtcgggagctgtcgtgcaagcgagttgggccgcgaatcgcaatccggcccactaaccctcccctaaccctagccgccccccctttttcccccttgggttgttgcagccg

SEQ ID NO: 124304 - DNA, 481 bp, Zea Mays
cttcttttttgtttgtgttggccgattcatcaaaaatcatcggcccttcgttactttgttgtacgacgacatctgtcgttcctattttaatgatgtctccttttttcgcactgttggaggttgtagctgtatgcccccctgccggattagtcagcctttggggccgagttgttcggcaatcttgttgggcctgtgctcgtggaccagattgaggggctctcaatcggtcttgtactggaggtgtcaacctattgaacacagatgtttggggtgccccccaagcggggtactgtggcatcccaaatgggtatggtggcatgccccacatttgatttgggacatatggtggaggtatgtatatgtatggatatggcataggtggatatggtggtgggggtgtccatgcaggtacgttaggtcttgattgaacattatgacctctcgtcctttccaattggtgcggtgatccaatcggcctaac

SEQ ID NO: 124305 - DNA, 470 bp, Zea Mays
cggggggttaacgggtcccccaccgtattattcctgcacacgcgcgcaaggtcagaattcgatgcatcggccatcatacttggaacaggaatatttgaagaggtcgtcagaggataaattattgccgtgcctaccgcacgtacgccgtcgatcctgtgagtctctgaccagccagtcttgccgtgctgttgttacaagctagacagcggagagggagagctcgccgggccacccagatgatctgccgaactatggtacttcgacgtgttcttgacggctacaatgtgaactctctctctctctctccctctctccaggtggaatgcaccgcgagtttttctttgtaatcattgggtttctttgtctctaaagtaatttagtcgaggagcgtttacatgcatggcttggttgcttgcaacacatggagtagataattgcgcgtgaccaatcggggttccattttagccgcg

SEQ ID NO: 124306 - DNA, 435 bp, Zea Mays
cttttgctcttgaagtggattttttgcatggtctggccacaaattatatatgactccaagaaaaagtagaggtttgtgtagttttcaattcatcttccaagtaacaatctttagttcatagaaagagcagttgttctccaattttgaagaattggagatgcagcttgtagttttaacatataatggatacatgcttactctacaagttggtatcatcacctaatattgaactcctaattatcgtgaggtggtcatctctgttcttggctgtctgaaaataggaacgccttgttgtgtgttgtaatgcttatcctacaagtctgtcatcacttgatacttattcttgattgtcaagaggtagtcatctctgttccgatgaaattgtcaagaggtacttgtctgttctaaaacacaaaacatcttgagatgttcttg

SEQ ID NO: 124307 - DNA, 808 bp, Zea Mays
gacggtgtttatgtccactgaaataaaacaccacatattaatatgccacattgtttctcaataaaacaaagaccatggaaaatttagccaaattgagtgagagaactgtccaaacataggttaaagttgtaaggcaccttttttccaccatacagttgctaaaaagttggaatataaagaattctaatcaatagatcaccttttaaaccacaaatgatgtttccatgatattgagggcattgtattcacatgagagggtattagagtacaactagtggatgaagacattgttgggctagctactgaccttttgtgataccaggtttcctataatcctctctattcaaggcatacctaggtggtgtttatgtccactcaagtaaaacaccgcacatcattatgccacatcgtttctcaaaataaaataaaataaagaccatgggaaatttagaaaaattgcgtgagagatctgtccaaacataggttatagttgtatgtcaccttttttccaccatacagttgtgaaaaggttgtaatacaaagaatacaaaacaatagatcaccttttaaacctcaaatgacgtttctatgatattgaggacattgtattcagacgagtgggtattcgagaacaactagtggatgaagacgttattgggctagctaatgaccttttgtgatactaggtttcctataatcccctgtattaaaggcatacctagatggtgtttgtgtccactcaagtaaaacatcgcacatcattacgccacatcgtttctaaaaataaaataaagacaataggaaattt

SEQ ID NO: 124308 - DNA, 564 bp, Zea Mays
ggggcctcttcaactgccaaaacaaaagaaaatgttcctcctgcgcagaggactgaagagccagctataatgccgaagttactttcagttaagctagttgagacgacggctgataaggctgaagggtcaaaaattgaagaaatagcaaaaatgctagagattttgagcccttcgacagaggcaacagtgccgaaggcacaaaagagttctgccgcaactcctaagaggagaaggatgacgtatgtgttagatgttgtgttagaaacagcaaaaaccttgagtcctgctcccacaagaaaaattgccgaagcttccaaggcacaacccaaagctgaaacaaagcaggcagaagtcgaagctgcaacaattcaagctgaaaccaaagctgggccttcagtgcccactgatacagagcctgccgtagttgaagaaaaggcgacagagcaaattgcgtctgaaaaggttgaaactcctgctcccgaagcttcaaaagaaagcactgattacatcattcgtcatgcttcaggaaagggactttctcaagaagaaaagctagaagcacaa

SEQ ID NO: 124309 - DNA, 469 bp, Zea Mays
atggtgtggttgtaagtattctaaaccttttgattgttgagaataccaggcataagttgattattggaaatattacatgccttgatcaagatgttcatagaattcccctattttcgttaaaagagaagtgcattcaaattctagatgcatacctttagggggagctccatttctatatcttgatcatattgagactaacattttctcttagtaatctcataaagtctcaagtatgataataagtttctcatgaagtatgttgcttcaattcaatccaatttggtaaagtaatatcacttttatcaaggattgtagcttttattgttaaagtagcatatttactgaattctcctattttaagcttatttgatattcttatgttgttcctttgatcgcatctgttattcattgaataacttcaattgacacttatgttgcttagtgcctcatatactatcaatcaatatct

SEQ ID NO: 124310 - DNA, 579 bp, Zea Mays
gagacctttgttggaaccactcctcgctatgtggttggaattgcatcactcaactatctcacaatctctctcacggaggctcttcttgcagacggacacgcgagaacagaactgcacaagctaacaaggattttttggtccacgcctgccatggcctcacgcggttttctattcattgtataaactcaaagatacatgcaaagggataagggccagccaagtcactcggccagcactcatccatgatgctaaactcacgccactactaatgatcatgcacacaccaataaagacttaaaccggctgattggatggacggacgagcagcgcctggctctagcgagcgtggcccaccagaacctgaacgccggagcgtatgcacacatacagtaaagggatatattttttacctatgctgcatttgcgggtgtaggctcagtctgactctatacagttaatcaaacagcggctgctttttagtcaatgcacgcgctcagtccggacgaatatgtgcagcataccaatcacaaggaaagagactaatggctgcatgcagctactactctcctgatcatgtct

SEQ ID NO: 124311 - DNA, 419 bp, Zea Mays
ttggcaaggctctttaaactgtttttcaaacttgaaacgataagctagtcgaacatgttcatgcttcttcttcgtttctttcatcttcggcattccccagccgcttgacatcggatatgtccggttggccagatattcctgcaccaggtccctggtactgattttctcagctaccactctgaactccactttagccagctgacatggcgaccccagttgcataggggtctggtctttccgaagtttaaagacagcagactcatgaccaaggtcatcagcttctctctgtttttctcatcagccttcatataaaaccattcatttttccagccggttggccactttgtgcggtagctgaggactggtgccttcgtatccttatgatacgcaaaattgtaacaaccaaaattttcgtgaag

SEQ ID NO: 124312 - DNA, 411 bp, Zea Mays
caaggctgttcttctcatagatcaccaaggaaaggcagtttcctgtcaagtccagccgcccgcaaatgatccaatgatatttaatctggcagtagaaagcatgtctgtaatcaaggagtttgaagatgtatttccagaagagttggccgggatgccaccagaaagaggagtagagttctatatagatctcattcccggcactgcacccattgcaaagagaccataccgcatggcccccactgagttggcagaattgaaactccagatttcagaactacaacaaaaagggtacatccgtcccagttcgtctccctggggagcacccgttcttttcgttactaaaaaggatgggagtatgaggatgtgtattgattatcgatccttgaatgaagtcacaatcaagaataagta

SEQ ID NO: 124313 - DNA, 921 bp, Zea Mays
ctacacgagctactggctaaccaagaccaaagaaatcaaaaggcagctcctgctcattcggggcgtaaggtggcacttattcttcatcttcaggttgtgatcctaacatgtcatactaaattatttcacattgcatagtctatgatacaccatgaaaactctcagcaacactaaacacaatgaattaaggcacttcttctaaggatgtcactcttgccctcaaaagaagccttgtaatgttggaccgatcaacatcccacataatgagagccaaaagaagcaatagcatcctaaatatgctcctaggcccaaaaattcaagggggaaccgagaagcatgagccaacattctcagttgaaatttaaagcctgaaagttccaagcttcattgtgccttataacagtgatgaaagtaaagcctagagcctgctgcgggtctagattaaccaagttatctctttcaatcacaaaactgaagtgggttattgcttgacctagatgagagcattgaatcttctgaatgtgcacatgacactgacccacattatattctataatgaagtcggttgtgtcttcaaagtttagatctcgctcgagcaaatgatgaatcgagacaatcctctagtcctcatgaatgggaggttgagaacgtgcgactgcatgtaccatgatttcacgatgctgaacttgctcccggacgaagccatgtggaatgattggtgcaggatcaacccgatgatatgccattgttgtttggggaactggggttgaaagcaatgatcgtgaagcactcgacgatgggtgctagtattgagattgctcaacgacgcttctcgccaagggggttttgttgaacattggagtttgctttgtgactattgaagacgaaggggccttcctagagttgatcgcccagagtaat

SEQ ID NO: 124314 - DNA, 421 bp, Zea Mays
atgacgaggccattatgcaacatgcaactcggctccccatgccagctggccgaagtagaattcagggtggtagctggtcatattagcactagggacttaatgcaggaatatctggcaaacaaaacttttctaacctctagcggatgggggatgccaaagaagaaggaaggagggaaaaatatgaacttgttcgacttccctaccatttcaaatttcagaagaaatttaaagaaccatgttctgaatggttggaaatgatagaaaccatgtgcaatgaaatcctcaaaaattatacgaagaaagaagaccagttaatgactgctgccttcggtacccggccgaaacaaaggttgaatcgggtgatggatgctctgaattttgaatacccagattacaacagacttgacgaaggggccagggg

SEQ ID NO: 124315 - DNA, 376 bp, Zea Mays
gctcagatgcaaaaccatgggcgaaattacttttcttcattgtgatgaacaagaaaaaagtgccaaaattttgacgagacacatcgattaaacagcagacaagaagatacccagagggctcaatccatagaagtatatgatccccctggacggagtgggtaacaaaacaaaaaaagcaaggtagaagtgtcggatctagaacatcagttaataagtagtattctgactaaacaacacaaagtattatgttcgatattaccatcgtgcagaggattatgttgattcttattattatcacaagtacaatacaattatcaagaattaatatgggcatttctgaaaaagtaccaaagtcatgcatagtggtatacatggg

SEQ ID NO: 124316 - DNA, 1152 bp, Zea Mays
agtaaagtggttcgacggaacacgctatggttttcacaccaacatagtgaaaaaaattctcagaataacctcttggtatactcgcaacttcgtgttgctgaggtactagtcatttatctcaaagttcgcttcatgtcatttagcgacaaagagagcaatgtgctaacatctggttgagcaatgtatgctgagatttatagtcttaaattatttggtaaggccttttgcttactaatagaatcccaatttgtgatgtcttttatgccaaaaaggctttcatgcattatattatatatcttcgggttacttcgggtaaaactttatgcatgaggagagagcagagaattaacttatctgtatttcattgtattttaatttaatttcccagatttccaagcactatagagcttggtatagttgttatggccacttggcgatatataaatatacaatgccacacaacacggtcaaataaaatatagagccaaacaaaattgtttatgaaggttgcgcataatatgacttcaggaccttgaacaacccaccacaatccacgcgagtacaagctctagcgtatctagcatcaacgcatgtgcggccatcagggctacgacagtatagcaagccttcgtaataagcgcaacaggcacaattatggctcgataattggggtacacgataaatccacgcaacgtgcgcatcaggcgtaattgtggctcgcgacagacacacagtgcctacaggacatgcaaaaaatacgcgactcagcgatgatggtttgactcaatggaagcgatccgattaatggagagcgcgacatagtaatcacatgacgcagccaagttcgaacggcacaaatattgtgtcgtgttgccagggcgcagtcaatattcagctaatgccataactcagccgattaccaacgcagcctgatcggcgtgtctgagtacccattatacaatttaatcgctcaacgtgaatccaaaagctcaacacatcataaatatttagagcgatccgagtctacgcagtgtagtctgcacacacgttttgaataattttctgctaattatttactatgagaaataaagcagaaaaataataatagaattaatgcatgagcataagcagatcagatgcatgaaaacattt

SEQ ID NO: 124317 - DNA, 523 bp, Zea Mays
gaaggcacgacacgtggtgaggagttggagcggtggccgattcagataaacgaaagggataacggtagggagataagatgcgtctgcgaaacttcacagaaacgatgttacgtgtcgcaaatcataggcaagaagttatgcacagccgcccacagatttgcacacgccacgcgcgtcacgatgtctggccacagatagacatgtgcaacgcaagcatgaaagaatttcaaacaaattttaaggagctacatttgatttcaaaaattatagtttaggtaagacgtcgatggctcaacccaaacaatattggattcaatattttggaagattactaaagtcaggatttttacaaaataaattaggacaatttaaacagatggagacaaacacgatatcaaaatcgtgatagacaaagatgattaaaatgtagtgtccacttacattcacagctatcacgtgttaacgtccacactcgtggtcgagtagacgataaacacctggggtgttacaaagccaatcccac

SEQ ID NO: 124318 - DNA, 964 bp, Zea Mays
attaaaggtgacgtcgaagcatgccagaaggcctttagcaatgtttgtgccttcattggcataagagatataatccaagaacacatagcctatagggtgtggccacttgtggatagctgggaaatgccaaaggagactactgctgaatccagtgaaggtggcctagtttgattgaaatataccttcagattcagagagaagtttgatgaaccaaacgatgactggttgaaatgcattgaagctaccagcgacgagctgcttgggacatattcaaaggccgaagatgatgccttgtctgtagccttcgggggtcggggcaagaaaagattgaacagggtgtttgatgcaattcgcttcgtataccctgattatcactacccattgcaaaggcaaggaaagaagaaaaaaactgccgcttcggccaccactgctgtgccgaagggcaagaaaatgaaggttctgacccaccggctgcgatatattgaaccggttgtagtgcctgaatttggtgaagggacctcttcaactgcggaagcaaaacaagctgctcccaccgtgcagagcgttgaagaaccgattgtagtgccgaaggtgcctatagtcgggccagccaaagccaaagatgatgcggccgaagagccagaattggaaaaaatagtgataatgctagaaattttgagcccaccagcaaaggcagaattgccgaaagtgcaaaaggctcctaccgaaactcccaagagaaggaggatggccagcgtgctagacgctatcatggagaccacaaaggccttgagccctgctcctactaagaaagttgtcgaagctgtcaaagaccaggccgaagccaaagctgggtcttcagtgcccattgagacgatggctgcctcgccgaaggataaagctgagcaacaaacttcagataccggcaaggcagcggggcaagatatgatagaaaaagcaaaat

SEQ ID NO: 124319 - DNA, 379 bp, Zea Mays
taaggatcaaaaggcctgtcgtagtggcacagctgatgaagggcagccaccgcaagcggcccgcagccaggaaaacaagaactggggacaaggcttcgagtagcacccgccagggaacgccgaatgacagcaatatcacgggtgaggtagatattggagatcttatcgacttccttcgggaggagtacggatgtcgaggaacgtcgacaaggagctatcaggcgcggcaaatgacggtgatgagcggattctcatgtatgaacttattctgctagcgtcgtgtcgtgtataggcagagtcattgaaaaaaatgcaaacgtgaaggcggctcaagacggcttcgccaaaatgcccactgagccatgtaactcgtcaaaat

SEQ ID NO: 124320 - DNA, 401 bp, Zea Mays
ggtgcctttttaggcaataagaggggtttcccttcactgattaatatataatacaagtgatcaagagacaaaaaaacaaaataaagaaaatcaaaagaattacactatgctctgtaactatacctctgtgggacgtagctctaccttgattgaagaatattttgttgtatttctggccaaatacaccagctgaccagcacataaaaattatgatttccataagcaggcattttttgaaaccttccaggacctgaaatggattgtgttgtgggcttgtggctgaatttgcaagtgatggtagatgccttgattttgagtgtagtgttgggaaatgggggttaattaataatgaccaataaaaacaaacatatttgtctcaatggaagttaacatatgttata

SEQ ID NO: 124321 - DNA, 398 bp, Zea Mays
atgaaaacagggaagtgcagggttatcggtgtaaagtttcccaagactcagtttacccacgtagtggactgcgggttcattacttgattctgcaggggttcatatgctaaactgtcatggcgaaggggtatgggcggctctggtccgccagatcgagaaccgacggtggtgattagatttagatcttattgaatcgatatgcactgagagctattggatctatatccaacggccaacatcctacgatcccaagatccaaccctccgatcacgatcctactaccgaggtggatctagcgaagggatacatgagttttaatccgtgtcgtcgattactgaatccatgaccagcacgccttcttctccccgaggtaggatgcggcggcgcccagcgtcccg

SEQ ID NO: 124322 - DNA, 334 bp, Zea Mays
tggaggaagaaatattatataacacaaaataaatttataaataaataaattcatcacagattgggtatgttcaaattgtattttttctgaggaacatttatcacaggatttgaatttggaatttaaatttaaaatgagaaagggtaaacagaaaataaaaagggaacttacttactcatcttgggccaaatccactcactcggcccacctctgtttcatccagccggccactctccagactccacgccctattgtaagctcctcaagcagcgcgtcactggcaatcgggcccgggccgtcagcgcctcctcccttctacccacgccgaaatcct

SEQ ID NO: 124323 - DNA, 292 bp, Zea Mays
tgaagctgaagccggcgaagacgaagctaccgaggccgaagccgaagctaccggggccaaagccgggaccaccgaagagtcgaacctggaaaccacacttgaggttattgacaatatactcctgaaaatggctgaagaagaagctgttatggctgcggtgaacacggcaactgaaaaggggaaagagcaaattggtgaaatttcggaggaaggagattttaactttcaagatttgcttggacaagagctaacagacaccgaaaaagaagaattgaaaaaacatgccatatct

SEQ ID NO: 124324 - DNA, 564 bp, Zea Mays
agcgcaatccacataagaacaataaggatttgaagcagcccaatctgaaagtgagccaaggagaaggtgttagcacttggaggtatgaccctgaggcaataaggcaagcgtttgctgaaatggtcatagaggatgagctcccttttatgtttggtgagaaatcgagatatagaaaatttttgaaggtagctgtccaatgttggactccaccatctcgaaggacatgcacaagggacatagttaggacttattttgaagagaaagcgaagctgaaactattctttaagtcaaattgtgagagagtttgcctaaccacggattgttggacttctcaacaacaagacagctacatgacagtaacttcacattttattgacaaggattggcaacttcataagaaggtcattagcttctttaaggtaaaggggcatagaggagatgacattgggaagaacctacaaaggtgcttgactgaatggggattagaaaaggttatgtgtgtcacagttgacaatgctagttctaatgacagtggtgtcagttacttgaggaggatgatgaata

SEQ ID NO: 124325 - DNA, 459 bp, Zea Mays
agcatgtctacgattcagatttgtttggctacgaagatgcttaattgattcatgatccgaatgaataacaaattccttagaccataaataatgtttccacatatgtaaagaacgaatgagagcatacaattctttgtcatatgtagaataattaagaacatgtccatgcagtttctcactaaagtaagcaacgggtttacctccttgcaacaaaacagcaccaataccaactccacttgcatcacattcaagctcaaaagtcttaccaaaatcaggaagttggagtagcggtgcgtgagtaagcttctctttcaaaagtgcaaaggaatcctcttgtggctgcccccaatggaacgaaatgcccttcttggtcagctcatgtaaaggggcagcgatggtgctgaaatccttcacaaaacgacgataaaagtctgcaagtccaagaaaactccgcacttg

SEQ ID NO: 124326 - DNA, 357 bp, Zea Mays
gtccaatcaatcttacctgttgtcgctcctgagtgggtgagcgaggtcgctttggtggccgatcacttgggccaaccttctttttcacatacttagacaataattgatcaaaggtcaggctagatttgactagtcgaccagctgcctttaatgtgttagttttccacgtacctatttctggtcgtcgtggtttgaaggtacgtggtcgtcgggtctcctgggcgttgccggaccgttcgcttgaatgatccggactatccgatgatgtcccagaccgtctgcgtctatacgccggaccgtccgtgatgcgcagaacagggactcgtgtctagttacctgcctgcacctgccccctgg

SEQ ID NO: 124327 - DNA, 431 bp, Zea Mays
tgtcgaagaagcggcaaaaaacatatatgcaattgcagctaagcagagccaaggaacatttaagccgcaaagggagagagacattctaaccgctggtcttggtaaccctgagcatcctggtcgtgtacgaggaatctcatctaaggaaggatggaaggaaggattcggaccacaatgggaaggtctatacaggaaacgtgatcgatacaaggaagagatggcgaattattttaaggaggaggccaagaaagagttcaaaggcctgatgtctgaaatgctatcgaatcctcctctagaattgatgtagcaattgacgatggcgagtgcgatgtctgttcaacagatgaccactccacagatgcaaataattccagcagctcaaacgccggcttccaccgagggtacgaccatcccaagctctatcgcgtcaa

SEQ ID NO: 124328 - DNA, 478 bp, Zea Mays
attgatcaagtgttgattcgatggtctcattccgacgctgctttggatacatgggaagatgaagaggcgctccaacaacggtttcccaaagccgccgcttgggggcaagcggcttctcaagaacgggggtatgtcaggaagcccaggtcgcagcagcagaagcggcatgtccaagtaaatgtggagcttgagaaggaagaagtggttcaagacaacgattcgctgatgggccgtggccgtcgagtccgcaggcccagtgggcgctttccatctgatgtgtggaccaattgagtccttgtaattggcttataactgaagaacagcgaaaggaagaacttacgaggatgctaatggaaatttccccagccgactacctcgtcttcttcctccttcctcttgtattcctgttgtctcttggttagctagaggtaggacgctaacacgaagcacaacagatcaagccctgagcgcgcaagac

SEQ ID NO: 124329 - DNA, 1346 bp, Zea Mays
gtgctccccaaggagatgagctgggacgaatgtaccctttctgttgaagttctgcgatctggagttttagttctgccaattcggtgggagccatgcggtatggtctttttgcgattggtgcggtgccgggaattagatcaatgtagaactccacttctctttctggcggcatcctggcaattcttctagaaacacatccatgaattcttctactacagatatgctttctgctgctagattaaacaccattggatcttgggcgggtggctaagcctgacatgagactgactttccttggtggtcagtgagaagaacggtcttatctgtgcaacttatgacgccattgtgcttggttaaccaatccattcctaagatcacgtcaattccgtcagatggcaagatggctaattctgccaagaacactaccccacttaaaagaatcctaacttgggagcatttgaggtggcatagaaggtctggccctggggttcgggtgactaagggaatttctagatgtgcagtgggaatgccatgcttttccacaaaaccagtgactatgaaagaatgagatgctcctgaatcaaaaagtacagcagcgggagtaaattcaactaggaactcaccgagcactactcccggggtttgctgagcctcttgagcgtcgacgtggtttactcatgccctaccatgatactgggtcttgcttagctggctgttggaggagggtgccttggaggcaggtgctagggcactcttggggccattcatcgagttggagtaggtaggcacggatgtcttcaactaaggacaattattcttgtagtgactggggtctccgcagtgccaacaggcattggctggaggttggttgcttgcaacggagggggcctgaagggaactttgacccggatgactgaaacatgacagagtgggtccagctggcttgttgaagcttggtcccttgggtggaaacccaaaggatcaaattctctggtgcctgtcctgctgctgagctcggaggacttggaacttcctcttgaggtgacccttttcttcttccctagccctttctacttgtatggccttgtttgagaggtgcgagaagctgaggaagtcttggctggcgaggatagtcttgagttctggtcttagccctttcaagaaatgagccatcttcttggcttccgtgctgacatcgtcaggcgcatagtgagccaattctgtgaatttgtggacatattcactaacagatctccctccttgagttaattccagaaattcatcttcattgagctagacgattcctaggggcacgtgatgttctcggaaggcggcttcaaattctg

SEQ ID NO: 124330 - DNA, 324 bp, Zea Mays
cgacaggtttttatttgtgcgaagtggttgtgtgtatgtaaactatgatattgtttgttgtgagatgagaagggaacttcgcttgctgcggcgatttgtgggtgccgaagacacgtgcttggttgaatccgtaggtggttctgttcgactgtaacatgcccttcgccattagggtgattcttggccttcggcgcacgtgtagtgtatatccggctgcacccttgggcggctttttgcgtggatgcctattagtgaaggcttcgtatcatgcgcttgttgcgcttgtccggctgcacccgtaggcgacttttgcacggatgtctt

SEQ ID NO: 124331 - DNA, 726 bp, Zea Mays
gtaattttgggctccgtttgctgttacaaaacagatataggatttacgataaatttcgtactcatttacgttattttatatcacgttttacgctggaatccgcccgagccagaacacgcgtacagtcggttgcacgcgattttcacgccgtaattttgggccccgtttgctgttacaaaacagatataggatttacgataaatttcgtactcatttacgctattttatatcacgttttacgctggaatccgcccgagccagaacacgcgtacggtcggttgcacgcgattttcgcgccgtaattttgggcctcgtttgctattacaaatcagatataggatttacgctaaatttcatactcatttacgttgttttagctcacgttttacgctagaatctgcccgagccagaacccgcgcacgatcggctgcacgcgattttcacgccgtaattttgggctccgtttgctgttacaaacagatataggatttacgctaaattccgtactcatttacgctgtttttggtcatgttttacgctggaatctgcccaagccagaatcaaaaccagatcgggcgcgcgtggatatacctgactcgggcttcccatactaatggaagcccaggtgatagattgttgagtctatcatctaaggtgacaaataacatatgactatatagatataattgtgcaactttgtacgtgtctcaacaaattgcacttgag

SEQ ID NO: 124332 - DNA, 416 bp, Zea Mays
gaggaaagccccaatgacgtctgagtctgtgacgttggagagttcggtgcactccttggacaatcgacggatgtactcacgtagagtatcatcttgcttgtgtcggcaactccggaggtcctaagaatttttggggcacacatatgtgccctagaaattcctcccaaaaccctgaccaggtcatcccagtcatggatttgggcaggtgggaggtgctcaagccaagctcgagcggagttggatagaaattggggtaggttatgaatgaagaaattttcatcactcatccctcctagctgacaggccagccagtagtcagcgagccatagttctggcttggtttcccccgagtacttggtgatggtagtcggggctcagaaccgggcttgaaatagtgccctacgtatggctcggct

SEQ ID NO: 124333 - DNA, 501 bp, Zea Mays
caaagatgagattactcaaggctcaaacgtgggtacgtgataacgtgcttcccatgtaatagaaacaaagcagcagattctctgcttcccaggagttccgtggaccaccgaaataaaattctgcatctcgccacaggtggatgagctaaaaatttattcgaaaaatttgacctaccacacagactgacatgttagaattatatccactagtatgtggcccaatttaataaggaagtcaagatggtgtgtataaatgacataaggttttaatctcatattgctcgtctatatagaagagaaccaacttatatatgagagtgtttcctactctttacatgagacaaataaagggcaatggaggctgctacacatgtgcgctcgctcgtgtttcgcgttatttatcgcatgacttgtgacgatacgtgatcgcattgtgttctaaatggcagtttaatttttgttttttgtttatttggctataaatatcacacctaaactacc

SEQ ID NO: 124334 - DNA, 379 bp, Zea Mays
ctattttagacactctaagcgactcgttcaatattggtaggattcaaccttattttcttttataaaaatgaaaatacaaactgtacctgcaacaaattattttccaaagattcaaaaaaagagagctgtgcattgtttttcatagaaaccatctacaactatttggcctctattttagacactctaagcgactcattcaatattggtaggattcaaccttattttcttttataaaaatgaaaatacaaactgtacctgcaacaaattattttccaaagattcaaaaagagagagctgtgcattgtttttcatagaaacatgctttcgttgagagttgaactcaagacctcccgcttactaaacgggtgctctaaccaac

SEQ ID NO: 124335 - DNA, 499 bp, Zea Mays
gtaactttctatctttaacatatacaactttatatctaactttctatctttaacgtacataccattctatatttaacgcaagttttttattattactattttcccggccggtcccccctcccctcatcacctgtgcttccgcgaaacaacgctccgaattcaacagagcctagattaagtgacacaaccctaaactttcatatgactactatatagcatgtgttacacacgatcccgaggagatgaacgatgatggtggtggcgcaaatgaggagaaggggaagggaagggatgagggatgattcaaataaagtagtttatggggaagggagatgagttatccaactatctggaccgttgattttgatagtgtgttaagtttgagtacaatatgtttggtgaatttagtgggataatgagtatggggtgacttggttgtgtgacttttgcaaagtttaaactgatggattatatagtggtaagagcataactcttttcg

SEQ ID NO: 124336 - DNA, 739 bp, Zea Mays
ttgcattgtcatgtcgtacctatcggttatcaaataaagtttatgatcattggacaactgtccttgttctttgaacaaaaagattcatatgtagtcttcagccatgtaaaagtaaaagtgcaaacgatttttacacatcagaagcggttccaagcagaccatcattttgaagtaaaaataaaatggtcgaaccacgcagcagtttgttctggagctcgaatacgttcacgaacaaatatatgaaactttaagcatacatgttcacaacactgtcaaataattattgtctacaacaacacgatacaacaaacgtcacagcacaactgtccttcacgacttatggttcgaacaaaaatataatggtctgccaaacaaatttaaccaatgacataagcaaataatgcaaaccggtttggtgaacaagctgaagttacgagtaaccgaatatatcttttactcataactaaatatgaattgttgcaacttctttttttgttctttcatcataatccagacttcgggatcgacatcttcttcatttgttgcctccagcctttgcaatcttttttcagcagaatctagttattgaagtttcaattccctttttcgtatgatgaccttttctgcttccaattccaacctctttttctccatttccctgtcttcttctgagcactactctttcttttcacccttttctatggacctctgaatttgtttttcagttatctcttgcaaa

SEQ ID NO: 124337 - DNA, 386 bp, Zea Mays
tcacataatctaatcctatcacggatccgccgtggctctagccggaccgtccggccatgcctggataccgcgccaaaaatctcatctttctatctatggcgccgtttccttctgaaacagatcaaaaatgtcatagtaaaaaatctcgtcccatccagttcactccacggatgagcatggctgccacaagcagatggaagagagcaacaaaaagaatgctgcaagtaagagaagggaagaatgtagcaggattgccaacaaaacagtagagaataggaagaaagcaacggaaagaaagcaaggaagagagcaacggatagtaaaaggaagggagaacggagagcaacactgcacacgggacacggccgttagcccgttacaagcaa

SEQ ID NO: 124338 - DNA, 882 bp, Zea Mays
ggacgtcacaaattgtcaccactatgggaaggaccgttcatagtagcagaagtcactcggcctggatcatatcgtcttactcagatagacggcacggaaattgggaattcatggaatatagagcatcttagaaagttttacccctagctatatctcaaaggttgccgggatgacaatgaactatgtaagctgagaaatgtatcatcaataaaaagacttcaaaggcactcggattgtttaactgtcaatctacgtactcacctagctcagggtgaccattataccctgctaatggagcaatcggcttaagtcggcaacgacttaagacggtgcaacatgctcgcgcttacctaactcggggtgaccactataccctgctaacggagcaatcggcttaagtcggcaacgacttaagacggtgcaacatgctcgcgcttacctaactcggggtgaccactataccctgctaacgaagctatcggcttaagtcggcaacgacttaagacgttgcaacatgctcacgcttacctaactcggcatgaccactataccctgctaaaggagcaatcagcttatgtcagcaacgacttaagatggtgcaacatgctcgggcttacctaactcgggtgaccactataccctgctaacggagcaatcggcttaggtcggcaatgacttaagacggtgcaacatgctcgtgcttacttaactcggggtgaccactataccctaccaacagagcaatcggcttaagtcggcaaggacttaaggcggtgcgacatgctcgcgcttacttaattcggggtgatcgctataccctactaacgggacgatcggtcgaagtcgttaacgacttaaattggttcggtaccctcacgccta

SEQ ID NO: 124339 - DNA, 329 bp, Zea Mays
gtcaaagtagcaaaatacgtgacatacatagagaaattagaatgggagaaatatgtgtttgaagttgcttggcgtggagtaggtaggttcttgttgttgtcatttgtcaccttgccaagcgatgcaccctcctcgttggctctacttggagatgacagcagagtggcagccctctgcatcacattgaaaaggtagagaatctaatgtttcaggcgaagaatgttttgaggcatttcgtcaaacagctcttgagcagatcagtggcaggagcacggctcttcccgctgcgtgcgctatctcggtatctcctctcgagagaggccggcggc

SEQ ID NO: 124340 - DNA, 702 bp, Zea Mays
tttggatatatgctccatgtgacaccgcattcaacagaggacgatgggacaatggtccatctactttcaccgactacaatgacgcacacccgcaaataccaaacactactcccccacttcggccactgttttcgaactaccccgcatgggacatgcaaatgtctaggaacaacctcactcttaggacaaaactctacctcccctgaagacgaccccagccccaggagaaaactctgtcgcatctgagctcggcctcggccaactatcctagcagtagccaccaactcccttcgaatcccgcaggaggccactctgacaactgttctaatcactccctacatgactgcatgcctaggcgtaggtctgaccatggcctcaggagaaacctctacctctctcgatcatggcctcaacctaaataacatcgacaaaaggatgctcgatgccaccaacccttccacaaagacaacaacaggatgactacaaaattgcagggctggtttcaggtctactatttgccatacgggatgaattaccatgtgcttttcaccatacttatcactatttcaacaactacgactcggacaacacatccacaagatgggctcgggtacgcttccgaaccctcgaccctggcctcggctctctacttggtcaagagacggaacaaaggggccaaacttccctcgatcaaagacaacc

SEQ ID NO: 124341 - DNA, 363 bp, Zea Mays
gggacattttcgcaaaggggttggcccttgtgaggctgttgcaagggatttgcgatgtctcgaatggatatagggatatgatgtgtaggttggcaccaacatcgatcaggacatgtttgagcctgatgttatttatggtcagggagaccacgagggctaagactcttgccttggtcatgctttcagggcaatcagctgagtcaaaagtagtaggagtgtcatcctacgtgagggacttagtgtagcaaggctaggggttgattggatgtacatcttggtgaagtaatttgaggccatgctgagagtctatgcctttggtgggcccatggatcatggtcacattgcgcactaggtcttgaaagt

SEQ ID NO: 124342 - DNA, 281 bp, Zea Mays
gaggaaagcaacaagcggtagggctggctcgccttgttcctgtttgctagctagctcttcgttcctcgcgcaaatccctcggcgttttctcggcgttcatcatcttgctgcgcttttctaatcgaatcctgccggccggccggtgtcacgccgattattccctgcgtagctcttgttgtttccgagcgtttgtttgggggacggagcgagagccgcatcaccatctgctcgctccggttcaaagcgcaactactactactagctagactactgcctttccc

SEQ ID NO: 124343 - DNA, 633 bp, Zea Mays
gtcaggcaactggcgccgtttcacgtaacatgacaccagttggacctgagtcaactgcttaggcaaatgtttacacctctccatcacatcaagtcactactccaggacaacgtgataaacactctgcacaccaagacaccccttgggcacacccattaggtgtgtcgcccagaattttcaaagattttctgaagaagtgatatccataaaatatacgcaatgaatgtacacaacaaaaggaggagatcggatgagatgggaggaagtccaaatgtggttactgaagcgcaagtccaatcaacaaaagcattgaagcacagagcagggtgatgtccagctaagagtcatctgcctcaactagccagacgtccaatttgtcaccgatcaaattgatttcagacctaacaaggcatggacagatggcatcgtctggatattcagaaaatgctaatttcaaaagcataagatgaagacctttgaatggattatttctaaaatccactcaaagctcaggggctacacccaatagatctacagtgactcgatgctaaaatgttgatttcaaaagcttaagataaagacctttgaatggattatttctaaaatccactcaaagctcgggggctacaccca

SEQ ID NO: 124344 - DNA, 557 bp, Zea Mays
gggtgacatggattttgtgcctccaatgaggtcctgggcccgctcatccgtggtgatgcagatgtctgcctccctgaacaattgtttagaggtggccgatgccttttggagtatggctcggacgaaggccgagtcgttggatcctcgatagaagtcttcaatcacacccgtctcaacgacttcggggatgtggttcctcatcgtttgaaatcttttgaggaacgatcggagggtctcatcattctgacgcctaatggatttgaggtcccatggctacgctagtttatcggagagggactggaagttcgcgataaaccgacgactgaagtcacccaggtcatcaatgcagtgtcaaggtaggtgttggagccactgcagtgcgtcctgccccaggacaatgggcaagtacaccgtcatgacgtcctccgttgccccagtagcctgggcggtggttgtatagatggccaaccaacctcctgggtcctgcttaggcttgtacttgtcgatgttggagaccttgaagttaggaggccattggatagcccggagatggggag

SEQ ID NO: 124345 - DNA, 316 bp, Zea Mays
gactacgtgggttcaggttcttttatactaaaggggcacgataaccaagaactcgcccatcttcactcaatgcaaaatagccctcgctaaccataaaatttgaagttgtttttaataacgatctttggaaaggtgtttttttgggaccttcggcttaaggccttcattattttgtgatctgagatcgttatgaaaaatgaactaactctgcaagggctactattgggggcctatattgccgaaggtcctcaaagtgttacattatatactaaaacatgttttaggctttataaaagagtaacaaagccaaccttca

SEQ ID NO: 124346 - DNA, 386 bp, Zea Mays
gtttactgtcagatttcaaccatctcattggggggtgtgaagcacttttgctgtttatcatagttcttcagtctgacactctgactcatcgcttattatggacgttcttgcacatgatgtaatggcaagagcaaacgtctgtgctgctatagtggcaaatttcttgtgctctacactctgactcttgctgtttatcatagttcttcgcggccagagcaaacgtcagtgctgctaaagtggcaagtttcttgtgcatatattggggttcctgttttccttgtgctatagtgccaaagctgaactttaattgcaagttatcaggccaaatgtttgtagatactgctgataatcacgcactgcgggtcagctaagcttcaggaaacgat

SEQ ID NO: 124347 - DNA, 368 bp, Zea Mays
gaaaatcaagaagcggtagaagttgatctatcccttgactagccacaaggcttacagaatccttctgctgagatgttgccagttcaggtgatcaacaaggcactaatgctctacgtgcaatcactgtaacaacagtttgaggcaagtagtatagtccgttcgaagctaatcatgtgccgtgggattcatccacctttcgaaagtcctacgaatttcactattttttggcatcgactcctctttatcgagcttgtgactgtgagcccgctcgactttagcgacataactaccctcatgcaagaagttgtaagttgagcatgtcctataatggatcagttcagtccaccagattagtggttgcttacaca

SEQ ID NO: 124348 - DNA, 868 bp, Zea Mays
tagctggacgaacagtaggtacaagagatgaggattagatggagagaagatcagatctatagttatctagttagcagagtattagcatcccgaacaatagcgtaacaacctgctacaattccgtctaacaccccccctcaatcacacccgatcaaggttgagattgtttctaaatttagagagtcattgctgagagatcagtttggtgaagccattctccacctgatcatttgtagagataaaacgtatatctagcaattgacgtataacttcatcacgaacaaagtgataatccacctcaatatgtttcatgcggccatggaaaaccgggttggaagcaaggtactttgcacccatgttatcacaccgccatagacgtgcagtttttggacttaagatgtgtaattccttgattaaattacgtagtcatattaattcaacagtagcatttgccattgctttgtattctgcttcagtgttggaccgtgacacagtcggttacttcttagcacaccaagagatgagatttgagccaaagaaaactgcaaagcccccgattgacttacgatcatcagtacacccggcccagtccacaacatagttgaggtggacttgtgaatcttgagaccaatggtcaaggtaccttgtacataccacatgatgcgttttacagctgtcatgtgtgtagacgttggtgactatagatactgacatgctttgttgatagcaaaagaaagatctggccaggtgagagctagatattgaagtcctccaaccatgcttctatacagtgtaacaacctcatgatcaagtggagtgccaacatgtgctgataacttctcaaaggttgacattggtgttgccattg

SEQ ID NO: 124349 - DNA, 605 bp, Zea Mays
tatagtagaagtgttattttttgatgggaagaaaggtttgacgaggtcctcaaataatgaaacctactttaagtttgtctcacaaagcattttatgaggacttcgaacacttgtttcaagtgatgaaacaatgtttagggtgggatgaagtcatatcgccgaaggagcatcaccttcggacccgtaaaaagacgaagggacgaaggggataggagaagacatacatgccatgttttgtctgtgaagagacaaagatatactctagcgattgtatatatcttgtatgtagaaactaggatatttatgtaattttgtacgaagctacacatcgacgtgctcctataaatacatgaacaatacctgttatagggatcgataattacccgcacctgtagatccgctctaccttcaaagagctctgcctacgaagcacgatctcaaaccacccccttcgagcgtcctaagagaccttcgaaaatatttgtatttatcatgttgtaatttactatctaggtactcatactcaaaagggaataataaaaaagaagtcaatagttgatgggtcattgtcgcattatcattctaatgattcttgcatgttgttc

SEQ ID NO: 124350 - DNA, 428 bp, Zea Mays
cctagccactatagcgttggggcctcgatattgtcggaccattgcccaccgcgcagggcaacctcaaatttgccttcgtcgcagtcaaatacttcactaagtggatagaagccaaggctatgtcaacaatatcagcgaagacagagcagaagttcttctagcagaatattgtctgtcgcttcagagttccgtccgagttgacagtagacaacgataaacaatttgaccatcaggactttagggaattctgcaactccatcgacacgaaggcagtattcacgtctatctaccacccacaatccaacggggtagtagaacgtgccaacgggaaaattttcagcgctataaagaagagacttctagacgataaaaagggcaagtgggtcgagcaactacccgaagtcatctgggcactcaacacaatggag

SEQ ID NO: 124351 - DNA, 428 bp, Zea Mays
gtgcagttctacaacaggaaggacaccctattgcatatataagccgagctttagggccaaagaacctgggactgtccatttacgagaaggaatgcatggctattctctttgcagtggaacaatggcgctattatttgcaacatggtgacttcataattaaaaccgatcatcagagtttaacccatttggatgaccaaagattgtctactccgtggcaacaaaaggcattaaccaagttgcttggtctgcagttctggatcaaatacaaacagggcagcgaaaatcgtgtcgcaggcgcattgtcgcgccgtccaaacctggaacaggatgatcccaagatgcaactgaacgctacttcagtgtcatcagtcataccaagttggctgagccaagtagctcaaggttatgaacatgatccgagtgctaaa

SEQ ID NO: 124352 - DNA, 386 bp, Zea Mays
cagctaacaaactcagatagaggcctttcacaatcctcctctttcacaaacccttaccaggaattaaccaaaatctggcctggaccctggaggcaactcctgttcatccagttgactaaaaagtggacactgtttaatatggttattagctagtacacggaactacagtttgtcagttggtaagctaacaatctgttttttgtgaccttgatatcataggtggtctagagagtaatacacagatcatagatggtaatggctcagtggttcacatagtgaaggcgtggaattcaacagtcaaaggcttggaatccaacgtgtagcaagttcaaagaaaaataaaatgtcaatcatgataacaatgtgagggcaaaaacagtcccaaa

SEQ ID NO: 124353 - DNA, 489 bp, Zea Mays
tgcacgttcaaacaatcgcgaagcgccagctgacactatttacctgagtcactgtcattcacaccagaccccttctgtttggttttatttatgtccatccgtccctctaccgcgccacgtcgaatacctgactgtcgtggtcagagctcatcaccgacagccttaatcgaaacgacgagcataccaggtacttccctgggcataactgacccacgccctacccccaatcggactgttgtggactacagttcatgttgcttggtttagggcggacaccgaggttcgccgggcttggtcccaagaccatgacgcgctaataaccgattaaaaggcatggcgagcattaaggacttaaccgaagcttagaacggtaggggaatgggcgaaatgaagggcagataaggcgatccgcgttcggtggcgaatcacggagcactccggcgacaagggactgttctagcaaggtaacggcagccgtgttaaatcaaa

SEQ ID NO: 124354 - DNA, 487 bp, Zea Mays
ggaaaatccaagggctatggaggtgacaggcccaaccaggggcctgggaagagataaaggttggtgatccgaccttttaatcataatcgttcttcaccacattcaccctcctaccctttcaaacaacctatctttatccgtcctgccactacccccacctcaacaaatcagctgagtgcccctagtactcatttccctgccatcccaagctcctcaacaggctgctttaattgtggaaagttcggacattttatcaaggactgcacgtatcccaagcagaacagatcaaataaacagcagagttctaggagttccactcaaggcaagggaaacccgacgaataatacggcgggcaaaaatatgaagaaaactgggcagatttattctatgcaagtggccacgacaccggaaggacaaccggtcatgatgggtacgtttctcatggccaatcatcctgcagttatcttttttattctggcgcttcaca

SEQ ID NO: 124355 - DNA, 507 bp, Zea Mays
cgtgacctggacataggaacatctccttctcagcgtacgtccagacggtccgcgatggcgcgtagggtcttcttcgcagcaaacctaaatctcgtctcccgggagggacttcatcaaggaggagaggtcctatggtgtgtcttgacgtcggcaggccacccaacatgtctctagtcgacatagagacgaagagaggcgaatattcgaggtagaggaaagctaaactagggttaaactaaggctactcctaattcataaggtaaaaatgataagtaaaatttattggattgattgtggggttaaatcggccgtaccacctcatctatataagggagaggtctgtacccgttacaagtctgttctcgagttaatcccatatgttttgctaacaaaccccgctatgaattcagaaccctgactgattttgcgcacgcgcggaccttctgcgtcgccaccgcggacagtctagctacccattttggtgctcaacatatgcccctacctttt

SEQ ID NO: 124356 - DNA, 380 bp, Zea Mays
ccgaagctgcaactaccgaagttacaacggccgaagatacaaatctagagagcacattttctgatattgataaaatgcttctggatatggctgcgaaagaagctgctatagccgccgaagagaccctggccacagtgcctggaaaagagaaggaggcggccgaagatacttcagaagaagaaaatttcaactttcaaaacttaattggacaagaattgtcaaaggctgaaaaagaagagctgagggactatgccatatcttgcgggtaccagccaggggcgctgctcttcggcggtattgacgatgaaagcttaggttgcctccgagaccgaactggagcgaaggttatcagtactctgtcgaagagtattggtttcccg

SEQ ID NO: 124357 - DNA, 381 bp, Zea Mays
tcttattgatgatgaacttacatatgatattgatgctatgcaatctgagtcagaaatgcttatctcaaggctaaacgatgatcagctacacgctttcaaaactattacaaaaactgttctatcaaagagaccaggcttctactttgtctctggttacggtggtacaggcaaaacgtatctatggaactccatcataacattcttacgtagccgcaaacacatagtgttatctgtcgcttcttcaggtgtggcttctttactcctaccaggcggccgaacagcacattctcgtttcaaaataccatgtgaattagatgaaggaacaatatgtgacattaaacgtggaacaatgttgtgtgaactgattcaaactacatcttt

SEQ ID NO: 124358 - DNA, 555 bp, Zea Mays
ctgaataagtagatgctgcatcaggttgaagaatcctagtggaaatattttttctagcttgcataataacaccagtatttcttctccaacttctccatcatatttttactaatttttttagcatagatgttcctatataaatagcttggcttatctattgcttgccacatggcgtcaggcttgtaaccacaaaacattacagagacaagccactccactagtatatggtagtcatggctcttcaacccagttatttttctcatttcaaattcatagctaactttaagcccgtagcataaccatctcgaaattttagtttttcatccatctcatcacctcgatctgtccttaggggtatagcaaccgaggagttggagccgttcctgctgtgctacgcctcgctccatcctcaactacgccgccctgaccaacttcttcatatatggtgagtttttcaatcctcattctctatttgtgttctttcttcacccgaggtcgtagatctctcctccctacgccatggccaaacaagccgcccagcatgtgcttccgagg

SEQ ID NO: 124359 - DNA, 1327 bp, Zea Mays
gggagctctatgcgctgcattgagaatcggtggatgtattcacgcagagtctcatccttcttctgtcggcaactttggaggtcctaggaatttctgaggcacacatatgtgccctagaaattccctccaaacaccctgaccaggtcttgccagtcatggatttgggcaggcaggaggtttgagaggagtcggataaaaagaagggtaggttgtgaatgatgagattgtcatcacttgttcctccgagctgacaggccaggcggtaatcagcgagccatagttctagcttggattcctcaagtacttggtgatggtggtcagggctcggaaccgggctagaacggtgccctgcatatggctcagctaaagatctgatgacctagtggctgaagcgagggtctttgatcttccccactatcatagcaaccaccatgctgagggtggtagtcgtgtgtggcatgacgttggttgttgtggtgcgaccgctcactgaggcggtcatggacattgcggttttgacaattgtcgaggaggcggtcccagaccacgggggctttgtccttcgtggactcaagatgaatcgagtcctccctctcttggcaagagggccccgctcgttgttttgaagcgggctcccgaagccgagacacagaactctctacctgctagaccatagtgcactctaggagacccctgatttcgttgtatattcggtgtcattcagtggtggatggtttcggcatcatccgaaggaagattgttgtcacagcgaggttctggcagaccttgtaaatggaccgatcaccagtttattggctcattcattcactcgttgggtaaggaggttgtgacttacaagatgtcaaagggaaaccattgtggaagttcttcggtaaattgctttaagcgagtaggggtagctgatactacaatagggattcgcgaagagcaatgccttatgatgttcatgaccaattggtcaacatctagcaagaaaatggatgcatgctagcgtcatggcttatgactttcgaacccttttatgcctttgataccaccctcggtaacgcacgaataaaccgtactgttgactcacgttggattcaatcgattgctttccgcatttctagccacatttcagccatatccttttattctttttgtagtagttggttgtttatggccagccggtcggataagatcaagcaatagacgacattcaattcttctttacatctgcagctccaagaaaagaatcagaaattgagcctttccaccaagatccagcctacagtgaaattggtaagttgagggtggtaagactttt

SEQ ID NO: 124360 - DNA, 788 bp, Zea Mays
ccagaagtactcatttaggtcatcatagttagaccacgcagaatgtggtgtcttcccatgttgtgatttgcctgcctcctgcaaataatcacaattatccgtatttaacaaaaaaaactgctcatttttcagtgatgatttatcaaagtacctttctgatgactctatagaaaggtgtaaccactttcttcaagaatgcctcctcatccccaccataagatggcctgatattctccccagtcacaatactaacatttccagctagcaaaccatgcagctcatatgccatctgagcaaatcgaagatggcatgtcacgatgtataaacttcattgcaatgaggtttgcctcaaaatatgataagtaaaaaagtgtaccatacattatggaagatgtagcaaagacactccggcataaatctgatgtttgctgcttcaccccatataagaagataaagacctaggtatagaatcttccgttgctgaatttcttgtggttgtgcgccttgtggaaatctacagtcacgacatcatcagtaccatttgcagtaagagtatttttttcctcagataacaattgtaaggaatattacaccttaaactatgcttccgtgacaaaaatttgcaccacttcctgtaattgctgaatagcttagtcatcaccacatcgacagctcggtcatcaagctgtttgaaggatacagaacaattccagttaactgagaggcttggaaaacaaaggccttggttagtattctctagtaatgcacttgaggcgcatgcatgcatg

SEQ ID NO: 124361 - DNA, 467 bp, Zea Mays
gtttgcagtatgcccattttcaagtccaaaggtgtcttttcttatatttctcaatttgctttacaaccatcagtgatcatgctcagatgacgagtttttagttcatagtaatgtgttgaacatttaatcaccaaaataactagaaatggtcctttcaggatgcacatttggttgaggttgacctccattctctagttgggcctgcagcctagcatacttcctccttatgtagtcctgtttgattagggcaacattgtgctctatgttcaaagttgtcgtgtactgtactctagcagagtctccaaacttatgttgccttatgctgcgtccgaactgatttgggtgagatcctttctagaccgacactgtgggtagtacttgtaggcaatctagcttagaccggtgcacttccgttaacagaaagataacagtgccaacctagctgcatcattgatccctgcgtcaaa

SEQ ID NO: 124362 - DNA, 338 bp, Zea Mays
aaactatcccctcgctttattggacccttcagaatctttaggcgagttggggagatggcctaccagcttgaactacctgaccatctgtctcatgtacacgatgtattccacgtgtctcaacttaagaagtgtctctgtgttcctgaggagcagctaccaatggaggaactcagtgttcaaggtgatctgacttatacggaatatcctatcaagattcttgataccttgactcatgttacaaggagtaaagtggtcaaaatgtgcaaagtacaatggagtcaccatggtgaaggagaagctacatgggagagagaagaagagcttcgaatagagtttcc

SEQ ID NO: 124363 - DNA, 427 bp, Zea Mays
tagacacaaatattagtaagaggtgagattcctgataattgtacatgcctagcctagcactttatggaaaaccttcttaccaattgtagtgaacaaggtaaagagcaagcaacactattgcaaataaagctgctcgagacaaattggttaactagtcgagtaaacaaaagagacaactacttgaatcacttaaccagtcgagctacaaaagcactacaccagtgaaaaccatatgtttggttttggtaattgacaacactaaatggacttttgagaaaccctgatcctgaaatagggttggacattatattaatagacttgggatagttgggtcagacccattacaaggggcgagagggtaattacaaagggaaagccacaaactctaacgggtattctaagacctccgcagtcgcaactctatctt

SEQ ID NO: 124364 - DNA, 310 bp, Zea Mays
tgcaatcttcttctggtcgaaagtcacggatttggattgatttgatcaatcgcatgatatttatagtggatattccatacatacgatgcatggaatctcggatttgggaccgtcgtggttatctgctgtagtggcgaacatatagaaacgtgtttgtctaatatatttttgtaggacatcttgtgatcggtatggctatctgtatatgatgcatattaatgaattattcatgacttgtgtgtcatgaccagggcaatacgactggagccatatgtattgttcaaatttaatgtaatgacctacgtgtcaa

SEQ ID NO: 124365 - DNA, 602 bp, Zea Mays
aaaaatctcctaacaaaatgaaggtggaaaatgaagattacaagctagagagctaaatgtttgaaccattcccccttatttatagagggttatttttctttctaaaattattgctagatacatagagcttatccactcgaccgagggcaaaatagaccaactcttgaagctttgatttgatggccagacacttttcacaaagttgcttcgccttgatgcattctttgtgatgacaccatgtgccgcctacaatctctttctcggaaccatgccatgccttttgaggttaaacctagcaaaactcacgaactgtcacatggtggtttggaggctcaaccaccaaacccctgggtagcgtactccatacacgtcctagacacatgtcctatcggttctcaatcgtgtcggctacacgatctgcttcaccatgtccttgatcatgtcggcgtctcttggtgtcagcaaccagggctagtcaccccgcttctcgagttcctctatcaagacccaatgctcgtccttcaccactcctggttcatcgacacaaatctatatgacatccaacttcactattgccaccgtcttcaaactccacacatgcg

SEQ ID NO: 124366 - DNA, 359 bp, Zea Mays
catgcttataatatttgcttatcactattcggttattgtttaattgcaaactgcataatcaatattgctgaatagtttcaagtaaatgattcgttttttagtacaatcaatactcgaacttatgcataattgagttggctattattatgttcgtccatgggagcaagctttatagttcaatagacatctttgctctcagtgtctggtacgaccgatgaatcctttctaatcatcgcgctaagtttatgtccccatccaaagggtaggatggacgctcggggggcaagcacgatcggacacccgatcacggtcacctgtcctgcgtacgccggatggtccgggtactaaggtcggacagt

SEQ ID NO: 124367 - DNA, 593 bp, Zea Mays
gttcatgggttaagcatcgtcatttcactaggcatcaaaaggttaatgctatacgacgactcgctagtaatcatcagcgaggtaaacaaggattggaactgcttaaccgactcaattaatagatactgcattgtggtgcggtagctagaagacaaattcgagggtttagaatttcaccacatggaaagggatcgcaatgcagcagcagatccattgtcaaaattgtggtccagtcgggcccaggttccacctgggattttcgtccaagaggtacagcaaccaagcgtcaccgcagagcatgctgaagaatgcaacgccttagaataagcaaaaatagatcccaatgactagaaggatccaattatcaggtacataaaaacgaggaagaatcgggtgacaaggccgcggcagaacgcatcgcaagacagatggccactataccatcatagggggtctgctatatagaagaggtgcaggaggagtcctcacgaaatgcattgataggaatgggggtgcccgatcttccgtcaggtgtaggtaactatcgatttggtggagatgtcacacagacgatccggcttccaatcaacacg

SEQ ID NO: 124368 - DNA, 552 bp, Zea Mays
aaattatagagatagtacaatttatccaaaccttaataaatgtctagagacagaaaaagtttgcccaaaccccaaatcctgaaccctaaacactaaacactgaaacccaaacctcttaactcgaaactctaaaccctaaaccctatgtatcgaaggataactcatatggctatttgaccattatgatctccactaaagaaccaagattgtgatttgtgtccaacatatagcaaaatttaaccaaaagagtagcaaaatctagaaaacgaaaattttaggcaaaaccgtagtaggattgaggagatagtacaattttatctaggccatagtaaatgcctagagaaagataaaattttcccaaacccaaaacacttaaccataaccctcaaccctaaacactaaacacaggaccccaaacccaaaaccctaaaccgtaatgcccaaaacctaaacatcaaaccctaaaccctatgtaccgaatgcttacccctatggattttttaccattaaatggtctccactaaaaacccaagaatgtgatttgtatccaac

SEQ ID NO: 124369 - DNA, 327 bp, Zea Mays
gggctcgaatcacgtggacccgatctggtggtgcaccagaccgatctggtgtgcccaaagattgccccgatctgctgattttataaggaaggggcaatggatcctaggcctctttggcctatataagcatccccttggtgcctccattcagtacacaagcatcccaagatcctctgaacactctaacattcttccacaactcaatcgtgtgattctagcgagattcgagcgccatcttagtgctattctttatactttgtgtattgtgcacttgcgtttctctcttttatgttgaattgatgttttgatctcgttattctcgtgtgc

SEQ ID NO: 124370 - DNA, 420 bp, Zea Mays
ctgatggagaaagatctagaatatcttcagcacttcaaccacaaatttgctcaacatgaaccgaaggcctgccttcaaaaagcttcggtaacaacaacttcattttcctcaagagtaggggcggtgctgtctcctccaacccttagaataaacatgtcccgaaagtatcttcctctcatggtgtcaatatgactttgtttaatggtcaattttctgaagatggtatggcttggccgctagggccgatccttagaatcttcatctccactttctacatcataatcatcattgtcatcagaatcttcagacaaatcctccattttctccttggtaattttctctgtattcgtctttgccatagattcataaaaaaccagcaataaaaggatccgcaactttcttctcttcatacaacttctt

SEQ ID NO: 124371 - DNA, 527 bp, Zea Mays
caatggcaaattgaaattcttggttttgacgggatacccaaatctgtctttcgccatacgacacatgacatttatgtccttttcgtctaggagacgttgtcaggttgtttgtctcaacatcctcagtcaccaatggagtaggaacaaatggtgttgggatcaattcaggaatagccatgtgctcggagctaaatagagacccagtaggtgcttgagcatctgcggaactcgacacaagctccggggtaaaattagggttctcaatggagattgagtcctgacttagcatctcttgttgtcttattctatagttttgccttgcactcttttgacatggtgtcatattacgcaacgtcctttgttccctagtttgagttgcacatcgagctatttctcggattctcttacgttcctttgcctctaacacttttgaatagtcatggtgtacaacattttctttgttgcgtgacgcacgacgtttcttcaattcattttttttcatcactcatctacgcgtatcgtgctcg

SEQ ID NO: 124372 - DNA, 416 bp, Zea Mays
tcgttccaatggttccctagagtggtacaaggcacgctgggttcttcgtggtttcactcaatgccctggaattgattttgatgagacttttcagtccagttgtcaaacctgctaccattcgtacagtgcttacagtggctctcttccatagttggtctgtccatcatcttgatgtgaagaatgcgttcttgcatgacacccttgatgagactgtctattgtgtgcaacctgctggttttgttgatatctctcggcctgatcatgtatgttgtctgaacaagtctctttatgggttgaaacaagctctgcgtgcctggtatagtcgttttgccactcacattctctctcttggctttgtgagtgccaaatctgacacatctttgtttacatatcaacatggccatgacacaatttat

SEQ ID NO: 124373 - DNA, 383 bp, Zea Mays
acggaagtcactacatagtgacccgcatgacgggaaaggcggaacaatatggcataccgagtgtacgtctacgcaggatggtatgtgatgcagggcccatgatgatagacgaagtcacgccacacacgaccacaccatgagactagcccgcgggacccaccacacactaccacaaaatacatcagtaatggactcgctacagggacatgtatgacgaacaagcatggcaatacactatattgggagtacggctatgcacgaccctacaaacgacttcagggataccacgtcaacccggggctatggatctctccctctctagtagaaaaacatgtctcctttgtaaggttcttcacttgagctatcaaagggaaggccctccc

SEQ ID NO: 124374 - DNA, 633 bp, Zea Mays
actccaatcacaacaaactcatctctttcactaattaagtttagctcacatgagtgctcttgcaactagctctcaaatggatggctatctctatgcacacaactcaatttgattcacttgggtcacttggatggctaggagatgttgctctaacttgttcacaacgtttctcaaatcatggatgttgtaatgctcgattggagtggtatatataggctctccagctcaaactagccatttgaactccacctagaaatctgtgtcatatcgtacatgtccggttgtgcaccagataggtcaagtgcactatccagccagtgaccgttgggtaaagttgttagctgtcagattgtcacatagggcacatgacacgtctgttgtgccaccagatgtgccacatcattcgaccattggatattgttgttgtcgaccattggatctattgtgcatccggtgtgccatcggatacgatcgacgcatatctttgaagtgttcagtttgcaacctcattgtgtgccctgtccagtgacacatctgttatgccatcgaacacctctaagtgtgctcaatatgtcttgatccattttacatactctctatgtgacatgtccagtgacacgtccaatgtaccag

SEQ ID NO: 124375 - DNA, 365 bp, Zea Mays
aaaccaccaacataaaagttgtggatctcgaaaagttatgaaactttttagttgacaacttttttatttgaaatcatctctgctctcaaaaattacattcaaattttaaaattcaaaatgcaaatttttattactttatatattcttggatgttgttcatccaaccgtagatatttctacttttatcatatggttaaataactttttagaactgctgcaaggggtgcaatacatctaagattcttcacagagagatgaaacaacttggatgcccgtcgtgatccatcctactcttcttgctggcctttttttaccaaataaattgtctatacgttatttgttacacttctattctttctgtttta

SEQ ID NO: 124376 - DNA, 393 bp, Zea Mays
agcatgcaagtcaatcgtaaatgaactgagtatccttgaaacctcttttttattgatgacatatttccactttacagagtacatcatcatcccagcagttttgagatacagctagggataaaactttctgagatgttctatgttccaagagttcccaacttctgtgccatccatctgagtgaggcgatacgatccgggtcgagtgatttctgctaccatgaaaggtccttcccataagggtgataacttgtgtcgtccctcccccgttataatttggcggaggacgagatctcctactgagaaggatcgttgtcgcacagccttgtcgtgatagcgccttagagtctgctggtaccttgctgattggattactgcatttagccgttcttcctc

SEQ ID NO: 124377 - DNA, 580 bp, Zea Mays
cgaagagcgtttttctatagtgctgtgaatggagtgacgacaagcagaagatctccatcagctcaacggtgactgaggtgctcagtgtccgtatgttttcttcttcttatcctcggaattggggtatctcatattctcattcttatcacagggtcagggtcaggggcagaggatatggccaagtaaactggaactttgcatgagtggttcagctgcataaaaaattgtttaatttcactaataaattgtgcagctatgaataaaatggtgatgaattggtgtctttttaggctaaacacaaatgatttatattcacggagaacaagacctaggggacctatatgcgagacggcggaccatccatgatagtttaccggatcatccatgtatggttacacgacggtccgcgatatgtcatcggaccatccgcgatgtgcacagagctaaggaaagaacccaacctctacctcacggaggagtaagcctgctaatggcaaaaaaaaaaaccaaccaacatccaacccacacccaaatctagtaactttgacatccatcccacaaccaccaaaaaacataaggc

SEQ ID NO: 124378 - DNA, 622 bp, Zea Mays
gctagctacaaactgtcacatctgtcgtctctagaaactttttgttgagatacatatgtgaagagtagggtgatgagttgcaaatcaccatacatgtggtcatatatgtaagagtaccgtatgttaaagtacaagattattagtaacatccttcacccttttgtccttgcggtagcactacatgaatcaccttctttgcctaatgctacaaacacttggcaaaggctttgtcgagtgttacactcagcaaagagaatttgataaagaaaaaatcggcaaaggttttttgttgagtgctacttattgggcactcgacaaagactttgtctattgctgatccaaaactcgaaaaacaaaactttttgtgacgacgtgatctacaataacgacggctttacctagtgttgcacttggcaaagaaaagagttcgacaaaacaaaaattgaaaaataacaaaacttattttttaaaaccgggagagacatggaccggccaaggcgccttgcgggcatttttcacgcgtgcttcacaaccgatgcgaccaagcaagattcgaacccataacctcactctcgcgcatgacctcacctatcactctacccctatctcacatatgtctata

SEQ ID NO: 124379 - DNA, 782 bp, Zea Mays
ctttgagaatgaagtcattttattgatggtgtgtctcccaattaccgaatacaatgtcgtcccaatagcttttgaaatctagctacgggtaaaacttcttgagatgctctatattccaggagttccctattttcgtgccatccatttgagtaagacgatatgatccaggtcgggtgacttctgctactatgaatggtccttcccatagtggcgacaatttgtgtcgtccctcccccgttagaattcggtggaggacaagatctcccactgcgaaggatcgatgtcgtatggccttgtcatgatagcgcctcagaatctgttggtcctggttgactgaatcattgtattcaaccgttcttcttctagtatatcaacatcctctagtctagtagcttcagcttcggctatgttttcgaagatcaatcttggcgccccaaacttgagatcagcaggtagcactgcctctgaaccgtagaacataaagaaaggagtgtttccgtgcaaagctcggctaggttgagttctgaggctccaaaccacatacattaactctctgatctgatttcctacgaacttttcattcttgtcgaagactttctttctgagtgcttccaatatcatttcgttggctctttctacttgatcgttggctcttgggtgttctactgatgcatatttgatctagatgcttttttgttcgtagaaatcaaagaactccgaactagtgaaattggatccaaggtcggttatgatgatgttcaggtattccgaacctgaataat

SEQ ID NO: 124380 - DNA, 327 bp, Zea Mays
gataaagtatcgcgctctaggaggctggtctggtggggctcatcggtcgccgccgtgggggtttggtgccgccgcctgtgctgactcggggaggaagaaggtcttgtgaccgttgatctgctaatcagataggccaccaacggtgtagatttaatcaggtgtatgctagttgtcgtgtgatccgggccgttgaatccctggcgagcagttcggattagaccaaggcgtgataaagcttgggccatttgatctttatccaacggtagagatcgcgtaccggttcgcttctgtggtattctaatcgtggccatagaattctaatccgac

SEQ ID NO: 124381 - DNA, 417 bp, Zea Mays
ccaacgcctgtaacattgttcgcctcaacgtctccttaaagcttcacgtctccactcaacgacattcgtaaactttgctacaccaacgccgacaactgcattcgcctcggcttctcctcgaagattcacgtcatcagcatttaaacaaaaaagacaagatcaaaagtcactggagtgaactcctcgtttgacattaaccgtgacagtatatgctctactagaatagcataagagacgcgatatctatcaaaatgtcaaaatggaaacaaaatagaggctcaaacttgtagaatggaaactattaaccatcacgcatggaacatcggtcattagaagttgagcgcgtccacacggatggcgagctgaaaacatcgtcaatcctccactccatctagatctccactatctctcccgata

SEQ ID NO: 124382 - DNA, 350 bp, Zea Mays
atcaccgggagtcttgatgaccgcagtccatgcagcattgatagctgaaacgtacgagtaatggtgaataactgcacggcccgcgtatcgtggactatccatgccacctgtcagtggaatggacaggcgcacatgttatccgtaatgaatgcagaggcgcgcgtagcctagaggcgtcatgctcggttccacccattggcttaagccgcacgcagtatgccacgtggtagcatcgggtctccgcctgagcggggagtaggagtatatgcggacaggcctggaacccaccagactaggtccggacacgtgtcggcaccggacccccgcctgggttctgttcaaggcccgag

SEQ ID NO: 124383 - DNA, 300 bp, Zea Mays
tctacgcgactactactactacagctgcgagtccagtcgtggccgccgacgattgccactaatgattcgcagtagcatggcattattttatctatctattcgaagcagatgccgcctctgctgtttggttcattacatactattattattacctgtacacctgccaatcaaattaactgtcgccgtacctgcctgccgaatctgccgctcagctctgcttgcatttccagaggtgtcaaatgattggattcagttcaattgacctgaatcgattcctggcgagctggtgctggaatctgc

SEQ ID NO: 124384 - DNA, 489 bp, Zea Mays
gagtacacaccgaacgacaggttcagtttggcttttgtgcgtttaatagaatattgaggcattacattatatgggcattcctcccgcaaatgtcgagatgttctaaaagcatacagataaaatccccaaccacaattatccagttgtggccgatgtatgctattgtggtgatttatttgggaaatcttacgcacattacagataggggttttatgcagtgagctgtggacttagattaatgtagtggcatgaatactacatatttgttcttcaacatgaagggttagtctcaacatccagtgagacacgcaacaataagttgcttcgtggttacaattctgcaaacttattattattattaccaaatgcatagtcaatcattaagatttagactaaatgcacaacactattttatccataaggcttcttcaggggctcatgaataccattcgtcgtttggagccattagttgacttcagatcaacaagt

SEQ ID NO: 124385 - DNA, 469 bp, Zea Mays
gttcggccgccacggagagaagacgatagccgcctgccgtccattctgtagtggacggatgagattagatggggatccatgatggttccgaccgtcaatctggccgcggtcggctcggattaggtaggggaaacgtttctacacagatggatctgagtcgtccgatctagatcagatgagtacagtcatgtctcgagtatttaaaatctaaaccgctgaaccctggatctacgactatgatctgatcaaaggataccccttcgtcgtattaaatccaagccatcggtcacggatcgagcggttcggggaaggttagagtcatgcgcgatcgtcgaccgtggatcttagatcatgtggtctacataggatatcggttctgttaacgaccgatcaaatccatgccgtccactgttgatcgggcggccgaaatctggttataccccttcgcggacgtaactttgcataagag

SEQ ID NO: 124386 - DNA, 641 bp, Zea Mays
caagatcatcaacattggtgttcagatagggaagttatgactagtttttgttggatcaaaaattctaaccacctcaccagttttctaaaccatgatattttggtgatgtttccctcccacctcgtaaattccaaggtaggtagtgggtgtgtacgtttcaacccatttgatcgaccgttgggttgtacatagccaccccaaaacttatgaaatggcaaggccaaaaattcttaggtgggggataaaaaccctaatggcaagtgttttttctctctctataaatagagaggatggtcatgttagttgttagagctagtggcgaaggggactttgtgtccaagttttaagtgtagtgccctccaactcactcatgaccgatagtgtttgtgctctataatgattgagtgttcctagtgtattgcgttgagagattacatcaagtggcactacatgattgagatgcaagcaaatggtgcttcttacacttggaggtcagcacctcttatatggcttggtgacttatggtctccatcgtaaagcctgtgtgatggttgtgcatggctctaaagaaggatttgtgaggggtgttatgcttatcccatatgagattgtgaagagtaactctagttaagggaggtgca

SEQ ID NO: 124387 - DNA, 506 bp, Zea Mays
atctggactatgtacatgaatacatgagaacttaggggttatagcataaaaaactggacctggttgtagtgttctttacctacagttggacggtgggtttatttagataaaatacagggtctcttttgcaattgtgttggccgaaggggtatcacagcatgtgagccgtccgatcacccgctgaaggctcggattacaccagtgaaggttataacccgatgcgcattgcctgccctcagatcacccaccaacgctcaggatttaaaatactgagatataatctaacgcctatgatcactatccgatggtgccgacccaaacagaccccgctgattcgtgtctccaatcttagtcgtgcattatccgatcgatgacccaacgcattcgagatccgtttcgtccgttgatcgccagattatgatcatgcggcccggaagtagtcttctatcctcagcgcccaaacccgacggtgacctgataatcacggcggcacagctctcaccgcg

SEQ ID NO: 124388 - DNA, 319 bp, Zea Mays
acaagtcgacttacaaattttaaccaagtcatttcgtgcgctagaattaccacacacaattaacaaacacatccaccataataatcgtacccggtacatatatgtatatcgatgtgcccttcacacactaatttgtattttaacttagacatcacatgaacactactacttctcataagtgaccataaccatacgcatttagaccacaacaagcaattcatcatgataacgagcttaaccaaatccatctaacaattcggctaactagagcaacgacatagcccgctatagaacatactcgtcggctagcctattatta

SEQ ID NO: 124389 - DNA, 436 bp, Zea Mays
cctccaatccttcggaatagatattgtttgtagagatgcaatgaaagttctatatgcaggagagacattagagtatgagacatacttaggaatgtcatgttcataacaataacgagaaggaggtttcccagcatttactctaggaactcttctttgcgcaagaggtaattcttcatgttcaggaatgggagaaatatggattggagagacattaccagctgggtctggagaggagtctgaagagagatatgggactagagcttcaacacatccaggttgtggttgctccccctgcttcttcgtctgctttcgatagtatactataggttgctccccctgtttgtcattcacctttgccccaatggaacaatcatgttgctccccctgtttctcattcagcttccctgccatagaacatgggattgacccaacaatc

SEQ ID NO: 124390 - DNA, 511 bp, Zea Mays
caaaaagatcaccaaggatgtgaaatgtaaaatgaccgctcatggatcattaagagacaagggtggtcaagggcatgtagaatgaaatatcttaaacaaaccttgggatataaaggtaagcataaaaaagatgagagtatggaagatttcaaggagatgagcataccaatgccaagagacaagaaattgacgaaagattgcgacttaacaacagaagaggaaagggtctcaaaagacaagaaggtcatggacatataaactgaaatgtctaagtaggtagtagaaatttagaggcaagtatttgaaacaagagtattaaagggatacaagcatgcaaataccaaaggactagagttcgctagatggtagcaatgtaatgacgaaagaggaaagaatcccaaaaagacgagaaggttatggtcagggggcatctacaaagatgttgcaagcacaagagtgagatcagatctaatagattgagagaactatagaccatactgtaataaaatac

SEQ ID NO: 124391 - DNA, 841 bp, Zea Mays
gtttagagtggttcaggccgccacaacgtaataccctactccactatgagttatattgcttgagtatggagaagtctgcttaagagtccagacccccttgcatcgcatgtgccctcccttttatagtacaagggggtgcatacataagtgctgagccctgacaggtgggcccaacgaactagtgttaagtaatgtacaccatggagccttaagcgtcgtgacagatgaagatcttccctctctgtcactataaggatctttcaactagacattcctttgcccatctaccgcctcgagttggctacggagtggagtctaatatgctaactaatgtaggggctggccatgccgacatgcagcgaagttaaggtgaatgacccatgcgcgccctatccaaggcaatgactgctcatgatggcaccgcccatgcatgaggcgttgagacacaacgacctgccttggtaacacgtagattactatgtggtctgtcagcgcatgacgtgtcgataacactatttgccttggtaacgcgcggagcgatcatttgggccttcacagcccaacaaaatcctgcccatgccctgtgcacagtagggcatgactcagtcacctacattaaattaggacggacgagtttgcttccagtcgaaggcttgtgccacacgccatcgggccacgtggaagctttagacctctgcctgagtgaagagtgggggccaatatcatgtgttggattgaagacttgggccccatgataggagtctagatggcacacgtggtggtctgggacccgcctgtgggggtctggacaacatacatggaggcacgagatccacctgcg

SEQ ID NO: 124392 - DNA, 354 bp, Zea Mays
caaacaagggttcccatcttgaacgaggttcgcgtgctcgcagtcgtgctcgtggtccactcagtctccattctgctcctgtgcgcgcggtcttcagtcatcgacacttgagtcctcacacgtgttcgaaggctctgagttgctgctccactgcgcctggcctcgtgctgatgcacgcgagggcgtgctagcttgatggtgcacatgtggagtggaacgtggttaaggtcaaatgcaaatatgcgatgcacgaccgctaccgatttggatccacggcccggcattgcacatgtcctccgggttctgaatttactagaatttgttggataaatatccgtgtagttggacagaaaa

SEQ ID NO: 124393 - DNA, 287 bp, Zea Mays
ctttaggagttgctctattcaaattgcgaaatcaatgcatactctaagcttacctgattctttcttctccaccgacacaatattggagacccactctgcgtatctgcaaggtctaataaaattagcttctagcagccggtgaatttcgtcctttattcgtgggagaaggtctagacgaaatgttctagctttctgcttgaaaggtctgaaaccggacttaatgggcagccgatgctctactatctcacggcttaatcccggcatctcagtgtaattccaagcaaagc

SEQ ID NO: 124394 - DNA, 612 bp, Zea Mays
cagaaaatgatgaagtggtagtttttaagagcttcttcaaagcagggttgaggtttcctctgcacggaatgattgcagatgtgttggaaaattttgagatttatcttcatcagctgactcctaacgctatcgttaggctcagcgtgtttatctgggctctccgaaaccaaggagcggagccgcttgccgaagccttctgctgagtacacgaacttcactatcagacgaaggctagggaagatggactgcacgagaacttcagctgttataattttgcgtatcgcaaggacatgaagacaccagtggttagctacagcactaagtggccgaccggttggaaaactgaatggttttatgtttaaattgatgagaaaaaggagaagctagttcagagcccgctggagctaaccttcgggctgactaggcctcagtgcaacatgacgccgggggcaccatgcccagatgctgtgggcgaatttagaattgtatctgaacatattggtacgagggatttagttcaggaatacttagccaacagagtattcccaacgctaagggaatggggtatgccgaagcttaaaggagagaagaagaagaatgaactcgttcgac

SEQ ID NO: 124395 - DNA, 466 bp, Zea Mays
gtcggttttgtttcagctttggtttgcattttcaaagcctcggcgattttccctgaaggagtagagcttaaagccttcactgtttctaacacatctggtacatttgccatcctttttcttttgggagttgtcgcaagacttttctgtgccttcgacactgttacttctgccgaagggcttaaaatttctaacatttttgttcctttagtttttggctcttcgaccttatctctaccagtctttgactcagctagctcggctgagagtaccttcggcattatagccgggtctttagctttctgcgtaggaggaatgggttcctttggttcagcagctgaagaagtctccccgccaaattcaggcaccactgtcggctcaatataacgtggcctgtgggtaaggactttcaacttcttgttcttcggcgctggctcatttggagtggccgaagcagtagtcttggtcg

SEQ ID NO: 124396 - DNA, 476 bp, Zea Mays
cccccaagggtaagggttagatgctttgcatgaccacccatgcatgggattcttaggttcgactgcttcaaccactatggatgtgggaatgtgcaagcctggctctggcacgatgtagagcccaatgtcgacataggagtaggtacatcagagtggggacaccatccatcaagacatggaaactgacatcagttcaaccactccctcaccgagaagtcaacagaggacactatataacccattgcaggacatgacggggcataatggtaggctatagtatcctgactgaaggggaagacatcatccacaacatcgtttgaccagtaggaatcccagtggacaatgaactaaacgaaacatgacaatactcgacccccatctgcttcactcgacctcagactcttgtaatagggccctactcccaccttagcctggaaaaggatgggagaggcccacactcaaggcacgatagaaat

SEQ ID NO: 124397 - DNA, 506 bp, Zea Mays
gcgggctaagggtttttggttgctctgccgagctccttggttctagttttttggccgttttctccttagttttggcaggtcgcttcggcacttcggccatcgcggttttctcctgttccgctatcaccatcggttttggcacttcggccgattctcccttggcttcagcaatagcggggtactctggctcaacagcagaagaaggcccctcaacaagcttcggcactttggtcgtttcaaaactttaaccttttttcccttcgacgtggtagaaatagctgaagcagcagcctttctcttctttccctactttcacgagggataacaatagtctgggtacacgaaaccaataacatcaaagactctgttcaatctcttcttgcctcgccctctgaaggccactgttagggcatcatcctcggccctcttgtaggcaccaagcaactcgtcgctagttgcctcaatgcaatctagccagtcatcattcggctcatcgaattgatttc

SEQ ID NO: 124398 - DNA, 599 bp, Zea Mays
cgccgaatcccgcatttatattgggagttggaagctaaagaaaaactgctcctcgttgatccatgttcagaaggatgatgatgcaccaaagttctctttatttcttccttactgtaatttctgatggtctaaatcctaaactgaaaataacagccaggatggcgtgtgagtccggctagaccgaggagtgaccaactctgaatggtcctctgaattcccaagctttgacatctcacacatttgttcttccaagtcggaccacactgctccttttgaaactgcagggatccttccggtacgagatgatgtgggcgcgggcagagccgcagaggggactagcagccgtgttagaaggcacatggaacaggacaatcattagatgactagggtgttgaaatagtggaccaaccgagcaaggatgacttatgagcagcttcaggatctcacccaactgttctaggtgtggagattctggccggcaacaatattgcagccctcttatctatgtctagattacaagttcgagctactggtttatagcatagtaagtacaaatcatctcgtgaactcatacctcttgatgcaaaaatactgaaaac

SEQ ID NO: 124399 - DNA, 481 bp, Zea Mays
gggcaccaaggttaatctttgaaaacatagcagaagctgaggctactagactggaggatgttgatgtactagaagaggaacgattgaatacagtgattcagtcggcccggtatcagcaaactctgaggcgctatcatgacaaggccatacgacatcgatccttcgcagtgggagacctcatcctccgctgaattctaacgggggagggacggcacaaattatcaccactatgggaaggaccattcatagtagcagaagtcactcggcctggatcatatcgtcttactcaaatggacggcagaaattgggaactcatggaacatagaacatctcaggaagttttacccctagctatatttcaaaagctattgggacggcattgtattctataaactgggaaatatatcatcaataaaaagacttcaaaggcactcaaattgtttactgtcaacctgcatgcttacttaactcagggtgacca

SEQ ID NO: 124400 - DNA, 303 bp, Zea Mays
gtagtgtattcatcacaatagtgttcttgtactttgtgatttaggtagtgtttggttccggagccagttaggatggtgcactgataaaattgggttttctctagcagatgtggaaatcctaaaatctgtactgaggaattcccttacttcacctggtgaggagttctggaatgcagcaattgaatgtgctgatgggatatccgcctaggctaataaggtcatatggaaggcctgaatttgatatgcaacagaagacaagtcaaacaggtgagtccaattctcaattgatctactcagtttttg

SEQ ID NO: 124401 - DNA, 349 bp, Zea Mays
aataacgaactgtacatctgtagtgttaggaaaacatacgataaatggacaccgaattaattttgcaataaatctccccacgtaattatcatgtggtccatgtgaattcatacttcaaactgttacttcctccattctgaattatagaacagtttgaattttctagatgcattgctttaattatatatgtagacgtattgtatatctatgcgcatagcaaacactatgtatcttgaaaaattgaaatgtcttataatttgggatgtagtagtagtgaaaagttcgaaagtctgacaggaagcataccaggatgcaggtataggaaaaccatatttctttttcttaactt

SEQ ID NO: 124402 - DNA, 308 bp, Zea Mays
gttggatctctttggagcccctccttccatgaaccttgcagatgaacgttctcccaaagctggtagtggagcgaaagcagtcaaggatgaagataactagagtagtatagtagtaggtggtatccttatgtaaattaaataaggaaagttgagttgtaccagtgagtatgtataattagtaccagtctggcataatgtaataaaggtggtgtacttatggagtgtaataaccaagtatgtttttcttccttagatgccatcaagaactcgtgctcaagacggggcgggaacttcccgcggtggggagg

SEQ ID NO: 124403 - DNA, 277 bp, Zea Mays
cgaagaatcaaggtttgtcaacttatgaaaaatagtacatggctatttttatcgttgtcatgcagtggcgttcatacctccagctggccgaattccacgtatacaccgatcaccaaaagcttggctcaacttaatgaacaacgcctccatacagtctggcaacataaagtatatgtcaaactagccaggttgcaatataagataatttacaataaaggatgcaacaatgtcactgttgacgccttgtctcgctatccacatcagtcgacacaggtgt

SEQ ID NO: 124404 - DNA, 567 bp, Zea Mays
aaattgccatcttcatctttttttctcgttgtcatgatttttatctggtgtgataaaaaactcaaaatcttctatgccgtgattttgaattaaatgattctggtttggttcgtcaagattatgaaaaatattgtgtcctattttctatttgaggtttacatatgcctgaagtaatagccacatatgcagactcatggttctttttgtttcttattcctaaagcacaagtcccccccaaacatgtaacttgttatgtcttggtacataagcttcactatgtcacttgaaattttgtatgtggtgagtgcatttatgttttgtgtccctgaaactgatgtttcttgtttcgtgggcatgaagatgagatgtttcaaacatttatggatgcagctctttagtttatttagctttagtggagtgttttttcactatatttgatccaagagctgattggtttggtgcagaagatgatcttttttcttacattctgatacacatgttctgtttcaccagagtttacaaaagaccctgaactctactgcactgattctgtgtcacccctgctgg

SEQ ID NO: 124405 - DNA, 854 bp, Zea Mays
aagcagcgtaggtggatagcggcgtcacagactcatatgcttacagagtcctgaaccctatatcacctgcatccatcaacctgacatgaatgcgagtgatgtagtagcaagctcgaggaggctcgtacactcgccttgtctcatacagcgatcggacgtaggttcccaacgcgtgcagaacatcctgcagcaggttagggaagtgccctgtctcgaacattgaagtgtaatgttcagtgacaggcaataaccccacataggggtcctgctattcttcattggcttcatcgttgaggttttcctcatcctcttcttcttcttcatcgtcttcatcattgtcaccagagttgtccgggtcgtcgcctcagggaacaggggctgggactgctggtgctgacagtgctgaagctgatgatccagctgcgaaggctagtgattctgccaatgaggtgggcgtaggcagaaactcctctgagttgtcctccagaatgactcagtgctccacccgaatgcgagggagatccacaggaatttcctcaactaccacttggtagacaggaacttgccgtggcagagggatgaagttggtgttgatccgagtggtttgaatggtactgaccatctataacagaaaatgccaatttagtagatgtttaaatatgtaaggttaataaaataattttgtaagaacaaaattagcaggttttgaacagtctaagctttccatttctaactaatctaacgacctagagtcaacattgctttgataccacttctgtcacacccaattctgggggcaaaaccgaatgcatagcatatgtgggccaggattcatttcccacacatatgttgac

SEQ ID NO: 124406 - DNA, 469 bp, Zea Mays
caaagcagaaaattaataaaatacatttatagcacgtataccaaaaatcaaaaaagcctatttaccggaatttcctctaatacttgaagagttgatccggcgtgcacctttggtatttttcttcgcctcgtagtcactttcttctttctcttcttcagatcctgaaccatgacgggatagtcaggataaaagaacccgatgtcatcaaagacacgattgagttgacgcctctttcgtgctctgaaggcctattgcagagcttcgacctcaggattgatataattaccaagaatctcattgcaccttccttaaacataatctagccacccaccactaggttctccaaactcatcatcaaatctatacttatagtgaagcctaactagcccaggctcggcgtctgaagcatcctcttcaaacatctttgacatatcccactcggctgctagtggccatgttttaaaagcta

SEQ ID NO: 124407 - DNA, 517 bp, Zea Mays
gttatgtaaaagtgcctaaaattcatcaagcataacttgcttctaaagaggatctttaatagcagttaaatgagatgtggggtcgataggacaagagtgagtcacagaataggttacagtgccattagttctgaccattgggcgttggatgttgtttgtgatgcgggtaccataatgatgagtttgggtggcctctgaaggtactgttgctttatcgggaagagcaggagcagaagtcggcatgtgctcggttgccagggactctgtgggagcacatgaagaaggttgatgctcagatagtgttggggtagaggagtccagcgtctgcaggtggtgaagggttatcaggcatagatcctggtgttgatctcattacaactctcgctaaagtccatgtagggtcagtattgactgctgctgcttgctgtggagggatccgaagtagtgtttttgcaaagggaaaaatactttcatcaaacacaacatttcgggagatgtaaacctgaccagattcgtg

SEQ ID NO: 124408 - DNA, 372 bp, Zea Mays
ttttaaatgattaccttgagagatgttggtacataattcgatcttttgacaaattcaacattcagcatatatctagtgctgagaatgatagagctaatggcttggtacaggaagctttaggttatcgggtaacatgaggaaaattccatgtttccggatgtccaatagccaaagttgggccgagtattcaagtcgtggatcatccagatggagtagacggaccatccgcgatagtattaaaccatctaggcagagacgtcggatcatccgatgatagtagaggcattgccttagttgattcaattaacaatgcagccgatgcagttgattggagaacacccctgattgtatacctatgtaatcatattcaac

SEQ ID NO: 124409 - DNA, 456 bp, Zea Mays
ttcttaacaaaaatcaagagatatggtgggtagaaggttgccgtttcagataagtcctgaagatccaatacgctgaaaatctgaagaacaccaaaagatctacggcactgttgatttggatgaacttggatgaatcggtgaggatttgatcgcctgggagtaactcggtacgtggcatcgttccgtgggctgagccacgcgtggccggagttagtcaccggcgaccaccgtgactcgattaacttttgccgcggtgtcacccatgcctcgatctccctcactgtgtctcttaccgacgtggtaggcatgcgctaacgaagctatccgtggccggagatcgctagccgagccgccgtggctataaatagcaccatgatccacggcgcactactacagatcctattatatgagacggttaattttcacttattaagacgtttctcaagtgtccaaatt

SEQ ID NO: 124410 - DNA, 494 bp, Zea Mays
gcaaattctaggccgagtatgcaacaggggcgccgatgttcgataccttgcctctgagtatcatctcaagccgattcactaagtccacaataggaattcttctgttggttacccgtgttgagtcagccaagcctcggtacagataagccagatatgctctgtctttcagtggctgaatgttcttgaaaacaaagttagcaaccacagcttctgcagtcagacccctttccttcagcaatccaacttctgctaacaaaacccctgcttcagccacttcctggtccgtggaggactcgatccagctcggagtgcgaacatccggctgtcttcctgaccgtgggaggagggaattcccatgattctccatgatgaaccattacaggcgccatcccttgatgctgtccttgagggggatgtcgaggtaatcagtcttccttctgcggtgcatctccaagcttgcgccccccaccagctggtgctgccccccggccatc

SEQ ID NO: 124411 - DNA, 317 bp, Zea Mays
ttaacgataaggagtccctcttcaacgagccaagagatgacaagcctaccgactcaggctcaagtcacaagaagagggacgggaagaagaagagacgcattaagaagatcatctactacgatagcgatgcatcttcttcttcaccaagggacgacgacgaccccacgtccaagaaaaagacggttaatcaaaactattcctttgattattcccgtattccctacaatttgaattagggatgaaaacaggacggatacagccggatacagggtcatcccgtattctaccctaacgtatttctctcggatacaggaccg

SEQ ID NO: 124412 - DNA, 447 bp, Zea Mays
ctggaggagagtagaggaccacaggtcgacggaggcggtggagtggtgaagctccggtgtggcggaaataccgaggacggaggcgcgacggaaggttcgcgagaggagagctagagaggcaccatctgaattcatgaatgcgtgtgtggtgtggacgataggacgaggagggtgctagggtttacagcggtggtgccgttatttttactgggccgattttgaagcatggttatcatcgacccgtgtctaggtcagcccaacgagccaaagtcgctgccgagcacggcacgcgctccatgtcgtgctaagctcaggcccgttaccagtcataccgggccgaaataacgggctccgtgccgggctaacaggccgcaggctttctggtcatctatagctgtagtggttggaggtgagtgttctctttctagagacatggttcaaagtcct

SEQ ID NO: 124413 - DNA, 359 bp, Zea Mays
tgagatcaccctcatcaattcctttgcaaagtcatcgatttaagatttttgcgggtgcttttgcatttgtgagtcgtgtgcgtgggtttcaagatcaaaacgtactcaaacttatatgccgtccgatcccgttctagatatatgtttttatagtatgaattcaattagttcgcattgatttgcatgttaattcggttttatgtacatgtttcgatctgatgaactgaagctttcttaatgtaggcaaaaattaatattactggatttagtattcaaattcattgacaatatatgtatgagcaccacaaaaaatctcaaatataaaacaggtagtgtggaagagaaattccgtgcactag

SEQ ID NO: 124414 - DNA, 473 bp, Zea Mays
gcaatttcgatcttcatttttgtccaccaataatgttgctttaaatcttgatacatcttagtgcttccgggatgaatgaaatatcgactaagatgagcttcgtccaatatttactggcggacttcatcatccttaggcacaactatgcggttattaaaccatactatgccttgattatcccttctaaaacaattcgctttgtcggcttctattttctcatgaatatgtctcatacccttatcacttctttgtgcatcaataatcttttgcagaagaagcccgacgactcagcagcagtgcggaattgagtttctagtccggtggatctgatctaatcgactcaagcttcaattggtttaaggttccatgttgaatcattcccaggtttaacttctccatttcttgacataatgtgatgtcagaggtctttactgtaagacaatggcaggaagccttgcgacttagtgcatctg

SEQ ID NO: 124415 - DNA, 327 bp, Zea Mays
aaggttcgggcggaggttgcggaactgcgtgctgaatgcgcggcacgccactatcttgatggtggttctcccgcccctgtcgggattcagcacccttaccgttcactgccccgtggtcgcttcaactatggtagcccagactgcaggacccggatagatttagatccatatatcgatggagtcgaagtctgtaataatgcttaattcggtgtctcggtctagttagtcttagttagagttagtttgtttatcttatgttggatgcttgttatgatggacatgtaatgaagttggatctttgtaatgattgtcatcaagctgtgggta

SEQ ID NO: 124416 - DNA, 567 bp, Zea Mays
cacaaatattgtatactttttgaactccaaaaactaatgtataaaagtcaaatataataataaaatgtatagagggagatgaataagggaatagtttgagaggtgtgtcggtaccctgaatatagggtacttgctcctgctatgtcaaggtgagtcctcggaggccaccgttaaggatttcacgagtagccgacccaacatggggctaaggcccaccatatatagtcatgaccaggccaagcttgcctcctgggctagatctccgtctccatcaagccccataaagagagaaatcaacaacttcagctacaagtctgagatcctgcaaataggacccggtcctcctcgtgacccaacggatctcgagacaaagggatccggagggaacataaagccctagaggagaaggcattctttggttacaacaacaagcaagggcgacaggagcctggacctcagaacgacttcaggcatggaaaacaccgtctggacctcaggccaagtgaggtccggagttgccacgtgtccgggcaagggaggtagaagcccggaccccctcgagtgcgg

SEQ ID NO: 124417 - DNA, 714 bp, Zea Mays
attgaccagcaaaccttatagaaacggcctgtgaacccatcaggccccggggctttgtccggagggagctgtttgatggtattccacacctcctcctcagagaattgctgttcgagtccctgaaggtcaatgtgctgcagtcctatggtgtcaaggttgacagttctggacctttgctgccctgtaccaattaaatcagaataaaaggaccgaaacacctcagccttatcactatgactggtcactagctgctccccgtcatgaattttggctatgaaatttttccttttccgataacgagaccaagagtagaagagctttgtattagcatcaccatctttgagccaggcaattcttgatctagtcctagccatcgagcggattaaggaggcaagagccagagagcatttcttcaagcgcccaagcaaccatgtctccaaaacattaagaattctgctctcttttgccacttcaagctgcagcaaaatttctcgggcaagctcaagttgcagtttgaaattcccaacctttctgtcactccagctttgcagcccctttgtcatcgccttgaattttagggaaagggtcttgaggggacaagaggactgctgaacagaaccccaagcattagtaaccgcttccagaaagccatcaaacctgggccaaaaggattcaaaatgaaatctccgtttccccgtgtggttgtccttcaat

SEQ ID NO: 124418 - DNA, 720 bp, Zea Mays
ttcggttcggttttcagtttatggtaaaaaagtgcccacccctaggcatgctagatagggtaagggtgcattctcttatgaggtttgttgtgttttgcagtgcagcatgactattgcaacaagtttgctagtttgagtagttgtctttgagacctagtccaacatcttgaatcgtgagccatgccataggagacaggaatctcaagtagtccacctgctacggcctccgccagatggcattggctctataggcctacacagcacacgtggtccccataggccagtattttgcgtacagcccgaccgggatgtgtaatgccctaggggcgtcacatcgtttacctgtatgaccattctacatgtgtcacttccctagtaccatgcctgatcattctttaagtttcacttccctagcaccatgacatggctaggacaaggtgacctcatgaagtatcctccctaccttggcccacttgatgggcctgttggtgcctcgaatttagtgctaatggtgttttttggccctctctacaccttggaagcccttctccgcaagccaccaactctaggtgttagtgatctattgaataaatagtgatgacaagatgtcaataggttcatagcagcagtcaaggtcaaccatggtcctttcctgcatactatgacttagagacgaccgtaatagatgcggggcgcacctttagtgcattattatcccct

SEQ ID NO: 124419 - DNA, 307 bp, Zea Mays
gtcctcctcctccatcagctccaccatcgccatttttttcctgaacgtatcttgcacgtgcctcatctgcgagatagttcacgtcacatccaatctctacaaatgtaatgagacaaataagtttgcaaattcaggataaataaattgtacaaacaaaactatcatgtcattttcaaactcatttcccttgagacgatcagcaagattccccaacatctgtttctcggctctagccgcctcccattcccttgcatcttgtgctctcttctcatttgccaccttcaatctcctctgctctgcacgcatc

SEQ ID NO: 124420 - DNA, 488 bp, Zea Mays
actactcatttccggatgccacaaggcattgcaggaagataatcgactccccgaacgcacgacagaatgaacagaacagtaataatcgcgattacattggaagggaaaagcaaaacggactttcaaacaaaatcaaggtccaaacagacaacataatgataaacaatagttggatagagcaatctgggttgcgacgaaccgaatcgggaaggagacgaatctgctgtgcggaggactcctagcatccgacggggaggtcctcaccctgcgcgacggcgcgacggtgcacgtgaataatgcggacgtcacagggagggtgctggcaatggacgaccacggagtcgccgaaggcaaaggggaggacggggtgccgctcacctcgtcggcgacgagccgagaggaggcactagcgaggaccgcccgcgtcgcggggcgccgcgagagcttcgaggggagatcgatttccccccagctcctgacgggttgtg

SEQ ID NO: 124421 - DNA, 717 bp, Zea Mays
ggtccctgtcctttcgaatatcctaaaacaaggtcaacgcactattgagatgagtcactgacaattcccagaaaggacccccgggttctactcttttacaccgaccaacccacgacgatgaacagacctcgccgcactccggcgagcttattccggccagacgacgctacggctggagctcccgtgcgacaggggcgcaattaaacctttgccgaacacttcccctccatcaatttcaccaagggggcactgaatggatcagttcacaatgaccgggcagatgggcaaggggatgaacgtgttccgaccaaacgacagcgaggacgaccgaattgaggctggggaaaggttcacgagttcaccagggtctacggacacactttggtttgggcagaacaagaactgaagagcgggtcgacggtgagggggtagtcatggcggtgttttacagagcaagggtgcgttccggtgatgggcttcggccgaatttcaattggttggcatggagagcaataggagatcaaaggcaaactagaacaagaagcaatttcataaacactgacccgaagagcgctgaccacggtggagtcccttgcggcggagcaagaacagaggaggagggaatttgggggctacgtgggttttccggtggaattaagtcagttgcctaagagcttgtgcgcgcgatgcaacgaagaagcagtgcccggactcaat

SEQ ID NO: 124422 - DNA, 712 bp, Zea Mays
actcccgaaccagatcgttgtgccaaggtgccaagggtgatgagggttggccctttagagtcttggtggaagcgtggttgacaacacacatcgagcctctacctggtgcatcaactatcagtgttttgacccgagagtcctaccaactagtgaattagtgttgtgtgcctagatctagatggatgatgcaagaagacacaagcgtttatcctggttcgggcaagagaaggccctacttccagcagagggaggtgagacctatattatcttgcacctaagtgcttgtagtaggggatacaagctgaccgggagaggtagtggatcccaagtctctggtggtgattgaggcaagtgccaatatcagtcgtggaggtgaaaaaccgtgaagtgttctcctccctgaatgaagtcttggactccttttatagtctcaaggagggatcccaggggcgccaccggttgtcgtgtatggagaggaggcgagtccgagcccctgtagccggtatggctgacggtatggccttcgtactggctgtttacttgaactaggaggaggacgcccgatccctgtatttgcatcttgaccgagcagagagccaaggccaggatctagggctcggaatcgtacccgagcctatttgatggaggcgttgtccgagtcgtagttgttgaaatagcaataagtatggtgaaaacgcatggtaattctccc

SEQ ID NO: 124423 - DNA, 979 bp, Zea Mays
cgggaggacagcaacagcagcatgttgtcactacctcacgtggggggaacggcgtggaatggaaaagccacacagccacatgcggaccgtgacgcgtccgtgacttgtacacgacaggccaagcttgcgatggtatataagttgggcgtgcatatgatatagtagaataaagcttacatgttgaatgatagctgcaaatcccatcggtgtttaggtggggtcacgactggtgctgcaacggagaattcgattgtctcatagtcgcctatatcgtatgatcctgcacactcatcctcaatgactatattatgcagaatgatacattcacgcatgatcaaacttagtaattgttgattgaaagaatggtatggggttgcaagaatatgaaatcaagccttgagtacccggaatgtcctctccatgtccttccatgccccctcttgtcattcagcgaacatcctctgctttgaagtccgtgggagcgatatggtcttcacaaaaactagccgccgagggtatattccatcagcgagatagtatcactggttgtacccgtggccattcaccgtgaagtgctcgtttagtccttccccgctaagcacgccaatgaacaactgtgattggatgagcatgttcgccacgccaaaaaagcatgacagacccacaagtcatatgaggcaacaacctcgagcatgatagtcgaggatctaatgttccctcttattaaggatctaatgttccctcttatgaactaccatctccatccaataggatagctcttttatttcgaatgtatgcaatctatacaccatatcatactaggaaatcacctttactcccccttatctaatagatgcctaaggtcatcaacaacggaacaacgcatgtactctggcccaaaacatttgataacacctctacataaaatgttggatacactctaaggcagagcttttccctattttatgtactcgtcgat

SEQ ID NO: 124424 - DNA, 1219 bp, Zea Mays
tatacccattcaaaaaggcacttttgacatccatttgaaaaagcttaaaaccctttgaagcagcacaggctaaaaggatcctaatggcctctaaacgggcaacaggggcaaaggtctcctcataatcaattccctctttttggaaaaactcttgagctaccaacctcgccttgttctcactacgaaaccatcctcactctgtttgtttttgaaaacccattttgcaccaatgggatggcagttagaaggaggtggcagcaaaacccaaacctgatttctttcaaaattttcaagttcctcatgcataacattaacctagttaggatcagataaagcatgtccaacaactcggggctcaaaagtagcaacgaaagctgagtgagcaaaatgagaaatctactgtgacctagagcgagtgactcgctcatgaagctccctgatcatctgctgaggtgggtgacgacactgaatatgatgtggagcctcccttgaggaagtggcatccccgtcaatagctgcttcaactcctccagtctctacaggagctggctcgagtggaccccaagtggtggaaggagtggggtcgggtctgtcagttgtagaagtggaagcaggctctactaaggcggccggtggagttggctcgagagcaacccaatcagcgtcgtcgtgctcctcctccacaaagattatctgtcccatctgatctgtacctgcaggctcaaagatagggaatggacaaggtgcagtctcatcgaatgtaacctcacaagtctccataatgcggttagtctctaggttaagaacacgataagcatgataatgtaatgcataacccagaaaaaccccattagaagaccgggactcaaacttgttcagattaccctgtttcagcacaaagcatctgtagccaaacaccctaaaatggctgaccttgggtggccatccaaatcacagctcataagaagtattgtccagaaaaggccgaagaaagatgctattggacacatggcaagcagtgttgatcgcttcgactcaaaaatgcctaggagtactatgctcatcaagcatcgtcctagccatctcaacaagggtctgatttttgcgttcaacaataccattctactggggcacatacagagaggaaaactaatgctcgagtcccaaagaagcacaaaaggttgcaaactgagtatttttgaattctatgccattgtca

SEQ ID NO: 124425 - DNA, 489 bp, Zea Mays
cgaccgacgagctgggggggaagtacggcaagcttagccgcaaccgagctcgagtggatcagacgccgagatttttactgggctatgcttatctgatggccactgcgcatgaatcacggcaagcaatcgatcaatggcgatgggccaccggcgacgagatctttttggcgctggcagtctgatcatctcgggacactgtaccatgacgagcacccatcagatgaactgacagagcgacttggagcacgatttacttcagattttgtgtggtgaccaggctagctctctgcaccaaagttatatacctataatccatcttcaactttgccacaatgcttaccatcaaatagtcaccgaattccattcaaaatcgggctcaaagttcaccccatcatactgctattgaaaattcagtccagggattgcctgacagcccgactttgagggtgattatctccaaattttgcacaacaacctaacttactctcc

SEQ ID NO: 124426 - DNA, 290 bp, Zea Mays
tcacaagtaaaatcatgattttctcgatcgctgctcatgtcaatcacgcatatgtgagctgcgaaaacaaatacaccctaagcctataggtgctaagtagtgaggtgatggtgccgccctgcaacatggtgtcgatgtatcccagaagagatgctagattttgttgtcaaatagcctttccgcgacctagagtgaagtggggttgatggccctccccgtcacctcgtacaacaatgactaaccattgttgtccattgggaagggatgcatcaacaccaagcttgcaaaga

SEQ ID NO: 124427 - DNA, 3991 bp, Zea Mays
gactctaatgcaactcaaccgagaaatgaaaagtgacagtgtgttattgtgttctctattctatacgtgtcataagagctagatataataccatgagctgcataaagattaaaatatatggaacatacattcattacctcatacgtcaatccaccattaactccttccttaatcggcccaaattaatggtagggttagctcaaccatacaatataatattgtcgtgaatattactttcgtacaccacgactgcactagataggttctgagaccgtctccaacaatgcacgataaagaagttgttaccatatatttagcattttttagaacgtaaggcctccaacaatgtccgctatcgagtccgctaaaatagcggacgtccctagtggcgactatatttagaagtgtgtcgtgtgtcctgtacccacacgtgttgcacctttcagttgccactcgctggcatcatgtccttttttattaccttttggttcttgtcgttctaaatgtgaccaatgatgcagagagagaagagattaaatggtaagatatagaggatcaattttagaggattttgctagagatatcctggttacagataatattctgccagatttttatcatcaatgcatgtcgactttatctggattaaaaacgatggtatttgtccattcacatgtttcaattattcgagtgctaagctgatgggccacggaccaattatccaaaagataatttgggctcataagacgcttattagacacacactaacacaagttcacccttaaagagcacatcagggtctattttagaaaaaaatatatatataaactacacacaatctcatctatatattactataacctggtaaattttgctaacgagaatagaacgttacgtcgtgtggctagctgacatataaaaaaaagtaattagccgacacatgctagaaaattttcgttaaatcattcatttttagcgtacgagcgagagagagtatgttttgtgtacgccaagaggggagatgtacactgtcccttgggtgtcaatcaggacgaagataaaaacataatatgaggcaacaccaagaagaagagagcgaccaacgagccgagcagtcttggagacatttcctaaaaacttcgctcgcacatcaaccaagtgtagtgtcatagatgtgacggttttggaggtctctctcaacatttcgtatagatgggaagactctaatgcaactcaaccgagaaatgaaaagtgacagtgtgttattgtgttctctattctatatgtgtcataagagctagatataataccatgagatgcataaagattaaaagatatggaacatacattcattacctcatacgtcaatccaccattaactccttcattaatcggcccaaattaatggtagggttagctgaaccatacaatataatattgtcgtgaataatactttcgtacaccacgactgcactagataggttctaagaccgtctccaacaatgcacgataaagaagttgttaccatatatttagtcatttttttcgaatgtaaggcctccaacaatgtccgctattgagtccgctaaaatagcggaagtccctagtggtgactatatttggaagtgtgtcgtgcgtcctgtacccacacgtgttgcacctttcagttgccactcgctggcatcatatccttttttattaccttttggttcttgtcgttctaaatgtgaccaatgatgcagagagagaagagattaaatgataagatatagaggatgaattttagaggattttgctagagatatcctggctacagataatattctgccagatttttatcatcatgcatgccgactttatctggattaaaaaacgatggtatttgtccattcacatgtttcaattattcgagggctatgctgatgggccacggaccaaatatccaaaagataatttgggcccataagacgcttttcacacacacgcaaacacaagttcacctataagagcacatcagggtctattttggaaaaaaaaattatataaactacacacaatctcatctatagattactataacctggtaaattttgctaacgagaacagaatgttacgtcgtgtggctagctgacatatagaaaaatgtaattagccgacacatgctagaaatttttcgttaaaatattcatttttagggtacgagagagagagtatgttttgtgtacgccaagaggggagatgtacactatcccttgggtgtcaatcaggacgaagataaaaacatattatgagggaacaccaagaagaagagagcgaccgacgagccgagcagtcatggagacatttcctaaaaacttcgctcgcacatcaaccaagtgtagtgtcatagatgtgacggttttggaggtatctctcaacatttcgtatagatgggaagactctaatgcaactcaaccgagaaatgaaaagtgactgtgtgttattgtgttctctattctatacgtgtcataagagctagatataatacaatgagttgcataaagattaaaagatatggaacatacattcattacctcatacgtcaatccaccattaactccttcattaatcggcccaaattaatggtaggtttagctcaaccatacaaaataatattgtcgtgaataatactttcatacaccacgactgcactagataggttctgagaccgtctccaacaatgcacgataaaaagttgttaccatatatttagcattttttcgaacgtaaggcctccaacaatgtttgctatcgagtccactaaaatagtggacgtccctagtggcgactatatttggaagtgtgtcgtgcgtcctgttcccacacgtgttgcacctttcagttgccactcgctggcatcatgtccttttttatcaccttttggttcttgtcgttctaaatgtgaccaatgatgcagagagagaagagattaaatgataagatgtagaggatgaattttagaggattttgctatagatatcctggctacagataatattctgccagatttttatcatcaatgcatgccgactttatctggattaaaaaacgatggtatttgtcgagtcacatgtttcaattattcgagtgctaagctgatgggccacggaccaactttccaaaagataatttgggcccataatacgcttatcagacacatgctaacacaagttcacccctaaagagcacatcatggtctatttcagaaaaaaaatataaactacacacaatctcatctatatattactataacctgggaaattttgctaacgagcacagaacgttacgtcgtgtggctagctaacatataaaaaatgtaattagcccgacacatgctagaaatttttcgttaaaatattcatttttagggtacgagagagagagagagagtatgttttgtgtacgccaagaggggagatgtacactatcccttgggtgtcaatcaggacgaagataaaaacataatatgaggcaacaccaagaagaagagagcgaccgacgagccgagcagtcatggagacatttcctaaaaacttcgctcgcacatcaaccaagtgtagtgtcatagatgtgacggttttggaggtctctctcaatatttcgtatagatgggaagactctaatgcaactcaaccgagaaatgaaaagtgacagtgtgttgttgtgttctctattctatacgtgtcataagagttagatataataccatgagctacataaagattaaaagatatggaacctacattcattacctcatacgtcaatccaccattaactccttcattaatcggcccaaattaatggtagggttagctcaaccatacaatataatattgtagtgaataatactttcgtacaccacgagtgcactagataggttctgagaccgtctccaacaatgcacaataaagaagttgttaccatatatttagcattttttcgaaggtaaggc

SEQ ID NO: 124428 - DNA, 745 bp, Zea Mays
aattcgtgtaaggtctcatgaagaatcacaacaccttccatgatattacgaccgggaagaaaagcagtctgggtagggctaataaccttgtgggccactgtcattagcctattcataatcgtcttggtaaaaattttaaagctaacattcagcagagaaattggtctatattgctctatccgggacgcatcatttgactttggcaacagaataatcgtgccaaaattcaagctatgcatcggaaggcaacctagaccaaattctctgaataaagccatcaaatcgtccttaatttcttcccaaaaaaattgataaaattcagccggaaacccatccggcccaggcgccttgttttgttccatttggaagatagccgccttaacctcctccatagtatataatctagcttattgtatacagattatataatccaattcatataatgttatttggtggggtcaatattgaacaaacaaaaaatggtctgtactgcctctgcgtgcctccccgtaataaattctccctcccttcctcctctctactctctcttcgcgcgcctgcgattctctccgctgggatgcaaggtgattctcttcctctgttttcttctcggccctctgtttccttgccaagattccgctcggcgttgtatgctctcttctgctatggaaccatggccgtagttcttcccttcctctcgttttgttctcgtttcgctgggcagctacgtatggttaggctaggc

SEQ ID NO: 124429 - DNA, 378 bp, Zea Mays
caactttgcttgatcaacagggggtgagggttgactgggtgtttgtatctcatataactgagcctgacttgattcttctgtttgggtatccatgtgtttcgtggcttttgcttgtggttgaggtggactaatcatgtagccaaacatttttctattacttttgttgttcttcattcatcgaatatctctgtgactcatttttctcgttcgtagttgttaagataggaatattgtcgttggcatcatttacttaatttccattggggttcgtcatctagtcagagggtaaaagagttaatgagacagactgcataagaggcttgcatgacattaagataaagagctaacacaacattttgatttccaagataagattag

SEQ ID NO: 124430 - DNA, 842 bp, Zea Mays
tgttaacaagttcattccaccaagtgatatcaaaatctttaaattcactagtggcttgtctaaacccatgctgctcaggaacaagatgggaattaaatttttgttctaatatcatctcccggtctaagtaagcttcaacaccataagaaccaatgaacggtggaatagagaacttaaccttagcatatggatcattgtctatttcaggattataattacaacgtctaccattacctcccataccatgtcaattacgtgcgaggtgtcgtcgaagcgatgcatcaacatctctatcatcgtcgtcgtcgtcctccgtaggagagagaactactgcaccagcagctagggctagagcttatggtgggggacgagcctccaacacgtccatgcgtgtaacaagttcaacatcttgtcgatcaagatgctcataggatgtcgccatagagtcctggtatttttgaaagcttcagtcatcgcgcacatcatctcctccaattccagctaagagacacactcatcgtcattaagctcagggcccttctccttgtctgcttggttctttggtcctgtcattattaccacaaaatagagacaaaaatgcaacaaacaaatagtgtgaacaacacactccacacaaagttgcttcgccttgatgcattgttcgttgtgacgccacatgtcgccaccagttccctccagaaccgccaccaccgagtcttgaagcccaacctcaacaaaacctaccatccataacgcagggtagttttgaggctcaaccaccaaactgcagtgagtatcgcacgcgtgcacatcccccacgtcctggagacgtgtctcgccag

SEQ ID NO: 124431 - DNA, 377 bp, Zea Mays
ttcgatggctcgctaagattgcaaggagcaggagcagggattctcttcattgctcctggaggtgatcaactcaagtatgcgcttcaactcctgtttccggcattcaataatgccacagagtacgaggccctagtccacgggctaagcatcaccgtctcactcagcatcaaaagattaatggtgtacgacgactcactggtagtcatcatccaagtgaataaagactgggactgctcaacccactcaatgaatagatactgcgcagcggtacagaagctagaggtcatgtttgaagggttggagttccaccacgtggaaagagatcgcaacacagtggcagatgcactgtcaaagctggggtttagtcgggcccaggc

SEQ ID NO: 124432 - DNA, 415 bp, Zea Mays
gttagttcttgtgatctgttcttgtgatctatgtttgtgatctgtgttcgaaccctaaaccctaatctactctactaccttgtgttctgtgattttagacgcccgtgagggaccgatctggtgctccggctctggtatgttcttaatccggtgcttgttcttgtgatttgtgtattgtaactggtgcttgttcttgtgatctgtgtaccaaccctaaaccctaatctactataacaccttctctgattatagccgccgtgaggaaccgatctgatgctccgggtttggtaagtgcttaatccagtgcttgtatttctaatctgtgttggttcaaaccctaatctactctactaccttgtgttctatgagttgatccgcccgtgagggaccgatctggtgctccggctctggtaag

SEQ ID NO: 124433 - DNA, 293 bp, Zea Mays
tagacctaaagacatatgacagagttctttcaagaagatgggctagaagcgtaatttgagatagacttaaccaaagcgaactgaatgcaattagacgaggatgatgaaatggttgttgatgaggaggaggatgaggtgcaaaatgagaatgacttagaaatgcttgaaggattaccttttggcaatgacaatgacgaacttgcgcctttagatggtgttgagtatgaaatggttgattgtgatgatgagacttatgatccgactaatcctgactataaagattattttcaatc

SEQ ID NO: 124434 - DNA, 277 bp, Zea Mays
accttcggttcagggctcgattttctcctcttcagaatttcttcatcttctttcaccattctagcagcttgtctgctcagaacgttaacaatcctttttctttttgcccttcggcacccttgttcaatttctcctagtcaggatattcaaaattcatggcatccatcacccgattcaaccttcgcttcagtcgggtgccgaaggcaacagtcatcagctgatcttcttttttagtgtaatttcccaaaatttcgttgcacatggtttctgtcatttc

SEQ ID NO: 124435 - DNA, 602 bp, Zea Mays
tttttatatttttttccaaatgtctctttgcctcagatgccatcatggactcgcgtacatgatggtgcggggacttcccgcggtcgggaatatactcctaacccgccaccagtaccaccgactttggccgaggctatcactgccctggtcaatgccactgcggataatacgcgcttcctgcgcgaaatggcgggcaatcagttccaacagcatggtgggagagctcctcctcaaggaccgcatgaaactacatacttggaattttctgagactcgacccccgctctttattaaagtagaagaacctctagaagctgatgagtgggtaagagttatggaacagaagtttgggttgatccgttgcatagagacgcagaagccactgtttgctgcacaacagctgagagggcctgccagtacttggtgggcaaattttgtagcaattcaaccggatggacatcagatcaactgggaggaattcaagctagcgttatgggagcattatgttctagagggagtgctccatatgaaacaagaagagttcatccggttaaagcaagggggagatactgtaatgcagtatctcaataagttcaaccattt

SEQ ID NO: 124436 - DNA, 917 bp, Zea Mays
cagaaatgccagtgttctgtgcacctctttgattattttgccccaagcctattttcttgctgcacccatatacttgtacctcctttcttgtgccttggtccaactgttctattacattttctaggccagcaactaggacgagtacttggaacacttattcaacattgctatctgttactgacttgtgtgccacatatatatatttagtcagccttcccagaactccagctttctctcgagcagaacaggtactcctttgcaatcacacccacgctcgttggacaatcacaccggtcaccgtttgccacctgcagtgctggtaagaacgttgtaagagcggggtaagacgcttcataatttgtattccaccaccaccaccaccctgagagatagttgtagggttcacattgtttgttgcctttttgtctctgttttgtgctaacaatgacaggaccaaagaatcaaatggacaaggacaaggggcctaagcttaacgacgatgagtgtgtctctcagatggaattgaaggagatgatgcgcacaatgactgaagcttttaaaaaataccaggactctgcggcgacatcctatgagcagcttgatcgacgagttgatgaacttgttacacgcatggacatactggaggctcgtccccccccaccaactccagccccatctcactctcctgtggacgacgacgacgacgatgtttatgcaccgctgccacaacgcctcgcacgtaatcgacaaggtatgggaggtaatggtagacgtcgtcataatcctaaaccagaccatgatccatttgctaagattaagttctctattccaccgttcatgggttcttatgatgctgaagcttacttagactgggagatgacagtagaacaaaaatttaattcccatcttgctcctca

SEQ ID NO: 124437 - DNA, 279 bp, Zea Mays
caacaacgtaagaactggtggaggacagcttgctctgcgtgtcaactggggtgttgcatggtttgcacgtggtcatccccgcgcgctcaagaatctccagagtgtactgatgttgagtaagtagcatcccgatggaggagcgggagacggtgatccctaagaagtgctggagtggcccaaggtccttcattgggaaggacgcctgaagagcaataatgatctggctgaccaaatcaggtgacgaagtagtcagaatgatgtcgtccacatacaacaaca

SEQ ID NO: 124438 - DNA, 296 bp, Zea Mays
gttgagtttagtgattggtttggcctcgatccacttggtgaatttatacaccgccataagaaagtgggtatatcccctgggtgcctttttgaaagtcccaaccaagtcccacccccatacatcgaatggccaagagatgggtatggtttggagggcctaggacagcatgtctgtctgccacacgtagtattagcaaccttcgcaggtgcggatgatccgctcggcatccgccatggcggtgggccagtagaatccttgcccgaatgcttttccgaccagccattgtgggggcacat

SEQ ID NO: 124439 - DNA, 380 bp, Zea Mays
agaagatctaactcaaccagtagagtcatgatggatggcataatctatctatccccacctaacatgaaacaagactttgacctgcatcatgaagtctatctcacccttatctatcttaaccatattcccccaactccgatggtatacactaacctcgaatcaatgagaccaagaccggaggggaaaatatcaacatcgacaaggaagggtataacagtcaaagcgaatctcgagatgaatcaggacttaaacattttggataaagtctttttctgccataatctttcttacctcaacctgttcagtttatatcccacataaatagtagctggatacctatgctctcccaatcttccactacctccaccaccatcaccagc

SEQ ID NO: 124440 - DNA, 421 bp, Zea Mays
ctggtagaaaaataaaaagaaaaggaatgaatagtaacaggctcaatctaacctaatctggcctatcaccaagcaaacgtgcccgcgcgcgcccgcattgtccattttaagcagaggaccgtggtcattcaaataaccggtaaagaaccctatgcactattcatctgtgtctctgacatttactcagaggcccctgcatttctatttcttcgcagcgccaggtccacgaccgtggacgtcgacgagcatacctccggcgagcatgtaccagccgaatacacaaaggctaagcttcttactcggtcggcaccaaattctacccctatcgaccctaatccctcaactaattgcatgaatctcggccaaaatctttctgcccactacgacgacgaaaatccgaggtgatcacgacgatttggtg

SEQ ID NO: 124441 - DNA, 604 bp, Zea Mays
tttggtgatgtgatggtggtggtggtaaaggttggatttcttggtgttgctggtacattttatggttttgttggtggggatggtgatgttcattgtggaattggtgctggtgatattgttagggatggtaggtgtgggcgacaactctttggttgtccgtcggtttatttctagccatcctatctttggtggccttggtttcagggcaatccctggtgggatgtgtcgagtcttcgccatggaaaagacaatagaacattcactgttgcgagactcggcctctgcctctacctctggtgttttcgcctcttcctattgcgcgtggtactcgtggtgatgatcgatgtctccagtctgctgctgattagcgatggtttgcacttgggactggttacggtttggtcggcctgagtccaactgtgcaggcctgacccatgtcctactggactgcggagtgtccttaggtttgcgatgtggttcgacttttctctggtggagctctttgaactgggcatacttttcgaataactaatataaatcttgcaagtttttgggtgggtatcttatgcagtgactgtataatacgctggcgcgaagaccactg

SEQ ID NO: 124442 - DNA, 1253 bp, Zea Mays
tgacaaatgagggcgttgaaacgcgcctggtagttctgtactatggtggtgaaagagagttgtgccaattcgaagaggcaattagtacggatggtcgggtcgaagcgtagtttgcagagctctgtgaagcgctcctaggaaggcatgccctcatcctgttcaagggtgtagtaccacgttcgcggtccgtcgtgtaggtggtataatgcgagccaaacacgatcagatgtgagcgtgtgttgcccttaaaaaaactgctcacaatgagtcatcataggaggtgaaatcgtgcttgtcgaatttggtggccgcaccaagggttactagtggcagcgctggagcggggttggtggtgtcgagaagttgggcagcagttacagtgatggtgggaaatcgataaggttgatgggaatgaatgagtcaacaggggttgggtggcgggcagcgtggtggtgggggtatggtggtggtggataagtaaatatgaagtgccgtcgtgttgtccctcggcacctcgtaggaaaagccttgggccatggcacccgctgatgaggatgcctgatggctctccacggtggccagccgcgagagaacgaccacctgctgcatgttgaggttggccatctgctgggcagcctcagagagggcctttgccatggtgtcaagggagaatggtggcactccttgcagtgccggctgaacgacctgttgtgttggtggagacgaagtcttggtgtcaatcgctgtagtagcgtcggaacctgacatctccgatactagattcataggatccttgatcctatcttggttgcgaagtgtgtaggaatgcgagattggaggccgcagtcaggaatttctgacttcggaaaggcgccgtggtggcgtgggtgtagaacaacggcacgacagtgagcgagggagagagggaacacggagggtaggcccttgaggcccaacaagatgtttgccttgcttccttcatctggttacatcactcctatatttatagtccctagaggactttgttccaaagcaaactagaggaggaatccttatagatttagactcccctttcctaacacactaattctatttcctaaatgggtactttatgccaggtgtaatttgggcccaacacctgtgtggctcgttctccggcgtgcataggagatactggttgtaacatcatatatcatcaatgactatatgatgcactggtcggttcactgcttgtttttctagaacactgggta

SEQ ID NO: 124443 - DNA, 547 bp, Zea Mays
tactatggttgtccctactgactatgactctgagtatgatggtttatggcatgctacctagcttgacctgtaatcaggaagggggtgttgacatcggtgtactgctcagcatacatacaacaatcagttaaacgttaaattctgcctagatcacgaggatcggtctgtacggtttgtcatgatcgactaattgagccaattgtcatttgtttttagggtcgactattaatgtaataataaatgtgatcatgcacttaaagtgaccgacgacggaagtgaaatctgcctaaagcatgcttgagttggttacttactctagagcggtctaggctacgtgcatggccaataagggagtgtcgggctagaagagcaccattattacccatgtcgttaaccaaatctagggctagacagtcaataagccatctataggaatatatatctcagatccaatctactacatgtatcgcaccgataaacctaggaacatcagccactaagaactactgaccacacaaacaaacatggatcagggcctccaaagaag

SEQ ID NO: 124444 - DNA, 1197 bp, Zea Mays
cctaattccattctgcaaatttccatctttgttcatttatgtgaggcttttcttggcatcctgccacactttggtctgtggaaatatttgtatcactgttggcctgggatggctggaggacagcatcagctggtggggggcgcgagcttggagatgtgccgcggaaggaagactggttatctcgacatccccctcaaggacagcattaaaggatggcgcttggagtggtttatcgttgagaatcacggaaattctcccccccccccacggtcagggagacagccggatgttcgcactccgagctggaccgaatcccccacagaccaggatgtggctgaggcaggagttctgctagctgaagttggattgttgaaggagaggggtctgactgcagaggttgtggttgctgactttgtcttcaagaatattcagccattgaaggacagggcatacccggcctatctgtatcgaggcctagctgactccacctgggtcaccaatagaagaattcctgctgtggacttggtgagccggctcaaaatgatactcagaggcaaggtatcaaatgttggtgcccctattgcctactcggcctggaacttgcctccttccaaggcctttacccatttcgtgtcaaatcctcctgctggtgatggcggtttgggccttagagtacgaccctctgacgaagaagttaatgctttggttgctttgcttgaagaaattcctgatgatgaacgacaagatcactttgaggtgcctttggatcccagtgatgcagagataagtgctatgcttgatatgttagccgaggagtcttctgatgccgctcctgctggaacattggcggtggcgcctctcccagaagctagtaaagccttggatattcagaggcctgttagtgttcgcctgaaacgcccttgccgagccaatcagcctgcttctcctgctgatgggcagaaaaagaagaagagacgtcttcggcgagtgtctagcttggatcgggatactggtccttcagctcctgctgctgaggaagtgttcgtgcctgaatttactaaagctgatcccaatgggtgtgacccatctaacgctgaccccgatgggtgtgctgtccgtgttgctgatgaagatgaggaggaggaagaaaaggaaatccctctgattcggaagaacagtcagcgctacatagccagt

SEQ ID NO: 124445 - DNA, 881 bp, Zea Mays
cagaaacttggtccaagagtacataactttcaaggtatgcccccttgttaatgaatgggaaattccaaaggagaccacatatagttcaagcgaaggtggtctagtttacctgaaatattcctatcgctatataagtcaattcggtgagccaaatgatgaatggcttgaggccattgaggcgactagtgatgatttgctaggagcttatacgaaagctgaagattaagctatgaatatcgccttcggcgctcgtgggaagaaaaggttgaatagagtatttgttgtcatcggttttgtctatcctgattactgctttccggctcgaaagcaaggggcgaaaaggaaaatcacatcaacaaccccctctaccgcgttgaaagcaaaggaaatgaaagttgtaactcaccggccgaagtcatattttttggagagggcttctttactgcctgccactacagtagtcgaagttcccaccattcaactggagaaggcaacaacagatagttcgaaggtcaaacatcaaccgaagctgcagagtcctccaacaatgccagggttgtcaagaacagcagcagttccagcagctactcctaggaaagggaggaggatgaccagcgctctagacactgttctgagaccttcgaaggtggctactcctgctcctactagggttttcaaagacaaagttgaagaattggaagaaggtgtcgctgcaagtgctgctcctgattgtactaagtctataccttcagaaactaggccgatagagcacaatcttccaaagaagttatcactactgatacatgaagcggcgtcgactgaagatcttgattttattatccgtcatgcttcgggaaagcaactgacacagaggcaaattg

SEQ ID NO: 124446 - DNA, 395 bp, Zea Mays
aaaggagaacaaatttgattaagtgactaagcactggtgctgtacaaaatttggagttaaaaggaccaaaagtcgggcagtcagtcgagtctgaagactgaaccatggctgacagtgagctctgatgagttttaaggccgatttgtgcttgatcgagtgagggaatgaccaaagtccctatgatcgaattaaagcctgtacataggttaacaactttgttgtaatccgattggtaacttgtcacgcaaaaattgaagaaaaatgcctctgaagatgctcggtcagaacaactgaagcagcccctgatggtacaatggcgaaaagattcgcggattcagtgaatctcgccgccggtgaccttacaccgcgattgacgtcggtcgtcgcgattcgtg

SEQ ID NO: 124447 - DNA, 838 bp, Zea Mays
gcccggattattacccggtcccgtcttgtatctgtcccgaatcttaactatacgtatctggtctcgtatccgagagaaatacattagggtaggatacgtgatgaccctgtatacggctgtatccatcttgttttcatccctaattgccaccaggatgggaaagcacatcacggtaggaagtagtcttagatagaatagaagcaaaagcgacaaaaccaagacgagccggacgacaaagtgtaaggcgaccgcgaaggttatatcgcggaggaggcgcaacaagcacagaaggagacaagctagatgatgttgaagggacggtggaggatgtgaacgttgagtgtagtggaaaagaataggaggacgtgatagaggggatggtggagatggaggtggaggcaatggtggaggtggagaaggcgatagttgtggaggtgagggatgtggaggtgatggtgatgaaatagaaataggggagacaaggtggtaggaagaggtggaaccaagcagagaaaatcaacagactcagaggaagggaaagaagaggacaaatcagtaggaaagaagggacgtgactcatcaaaggtcacatcctgatatactcaaatgcaacaacgatagggtcccaacaacgatatcccttatgcctagactcatatccaaggaaaacacacagattggatcatgagcttcatcctctcatgaggctaaagaaggacaaaggcaacacaaccaaaagcacgaagatgagtatactgcggtggccacccaaaaagacgctcaagaggagtgacaccatgaagagcaactgaagattgaatgttcacaaggtacacag

SEQ ID NO: 124448 - DNA, 447 bp, Zea Mays
ggtgcagaaccatggtgcaccgatggtctacattgcattcttatagagtagtagagttttccagaaaggatagcaattaattgattcaaatagaataatccactctagtagcatcggacacacatacaaagcattaggaacgtaggagcatagaacacgaaacatgctacttggatcagtagtagtacctggccatagcagacaagggaggtgttgaatccgtccagagcgttctcaatcatgggcaatcccaccagatcaaacacatcggcctgcaaataaccaccaagattttgctgccacatgacggcatactacccaagatttggctgccgcaacgaaccccgacttcaggaggaaggtgtagatgcagagtttagaggaagggggcttgaggcaggagcaggctgcaagaaccgtggagaggtagcgggagtctgggacaac

SEQ ID NO: 124449 - DNA, 295 bp, Zea Mays
ctcttttcctcccggggggtgaggtttttaacgaggcggagccatgtaatatacctgcaaaaatcccccgcaaaaactaagatgcaacatgtcaaaaaagaccgcatcaacggtcttcggcattcgaccactccgaagtcaccacgagaggcagcacagactaccctcgcgtgcgacaactccgcgcaaaagtcgcataagggtgcagccggaatagcacaacaagtgcgttaatcagtcttttattcaaaagacactccgcgcaaaagtcgcctaagggtgcagccggaatagc

SEQ ID NO: 124450 - DNA, 588 bp, Zea Mays
acgacacgacacgacacgttggcaatgtctcgtccaaaatccaccacggatcaccagaccagataacgaataagccgtccgaaatccacgcttggtcgtccattctctcacgaggcggcggcgctccgctccgtcaatgctgccatcctctacaacgaccccgaggcggccggtgtgacgtgcgacggcacgctttacatgtaggactgagagggaaccttggcatgcatgggttgacgacttggccatgattaattagtcgcggcgacgaacagcgtgttggttttggattttcgtttacctgactcttgagtggttagcaggctacactatccacattattctttaactcgaatattacaatcctttgcctttattgtagtcaattccacgtatcgtttatatattagttccttgcgtgctgtgtgcacgacgccaaccacatattattctattgtacttaacacttccaacaggaagaaaaaaaagacgataattaatgtaggggaaacaaaagatattggatctcgattaatcatgagcgggaaggatatgatccgttcatcgtttatcatcgtcatgagtcaa

SEQ ID NO: 124451 - DNA, 708 bp, Zea Mays
ttttggtgcgttgagtggcacctaccacgtagggttgcaaggcagttggggaagaagcagctgtggccagttgaggatgttccaacttcagtggagttgcacaagtaagtgtggtctcttcaaattcaattatcctagatttccattatattagcttgcatgttaaaattgcattgtggcttgctgcaggtttgatcgtcggtagcagaagaatattatagactttaggaaacaccatagggcatacattgaagaatgggatttgatgggtgagaatgtggacgacaacgaggagccgcacaacaacagactataggcagtaccaagtttggtagtaaggtgtgactcgttgcaagcttaggggacagtggacacaggatgactacaccgacatcgattcgtcggacgacgaagacacggcgtacaaccaagacactcgagtggggacacaagtggaggcagcaccgatcttggaccgagtggtactggttaaaacttgttactcaattcgaaatgcacaaaatatgacatctatgtaatgccaatatgattgaattcttttgcagggcaacacactgaaacggtcggtacaagacatcgagcgcttctgttcgacaatcggcaacaacaacacgcgtaccttcctggacataagcttttaaaacaccttgctatccaaaattcgatacatgatgttgcttagcatgt

SEQ ID NO: 124452 - DNA, 457 bp, Zea Mays
atattgtaactttgcacttaaaattgtccttaacatttgttaaatgcaggacgacactacagctcacgtatgagctacaaagcattagcttatcattttcaaccatgaatgctaaattaaaaataccatgaacacttgaaggaattttttaccaataccatgtaacagcagcatacaatcacaaaattgaatatgatggtgaactgaagaagcacaatccactgttttcgaaataagttaattgtcaatctattgctttccttactgaatatgtgagcatgtgatgattttgaatatggctgagttcaaaagggcaagcactattgtgggccattcgttgaagaactgcattacaataccatgctcacatgtccaaagatgggaaggtaaatattaaaaaccaagttaacacgtgctcacatgtccacatatatagtacatgcaaccaactctaacg

SEQ ID NO: 124453 - DNA, 872 bp, Zea Mays
ctttggagcaatgccccacacatgacagagaagcttgagtaaggacttgatgccaatggaccgaagcaatggtgaaaagcaagaaaagttgtgatcgataaacaaataaggttgtcaagtatttttcagtagtgaatttacatgaggataatcacgagatcaagaattaagattaaaggcacaaggacacaagaatttagactggttcaggttctcgagttgagataataccctatgtctagtatgccatggcaatttcttcattgtaggaaaacaaacaactttcagcggtccaagttaattttggcggctcctggttaaccgcaaaaaacaacgccattgttttcggtaacctatggcaaaccgccgattctaactattttttggcgactgttccaaagccaccgaaagtaacaggctaaactttggtaggctttttgaaaccactgatagtaattaattttcggtggcctcccatgtggccatcaaaataaccctgttctttctggtggctccatacaaacctccgacgtttatgcaattttcggcagccacaccataagccaccaaaatttagccctttttcgggcgtgatttccttctctcgtccatgctcgctcttctctttcctaccatcgttgtgtcgttgctacatccacgccatagcgtctccggccttgcttcacccgcacagctgtgtctctggcctatgcacgtagccgtgtctctagccttgctccacccacgtcatcacgtctctagcctccgcgcgacgtcatgccctagccttgccccctactccacccacttctttggccccctgcttcactcacaccaccgcatcttcgacaacccccgccgctgtgcccccc

SEQ ID NO: 124454 - DNA, 645 bp, Zea Mays
gaggaatagagaagagaaagaaagagagagtgtggtctgtgtgccggtaccccttcatcgcttaatctctgggtggcgagggcgcttcggctaggcgagttgtggcgtccagatcttgttcacgttcacgcccgtcaacgaaagggagctttggcatctgccgccgcgataaagaagcgcgggtagtgaatgtcgcggtagcgcagggcgtgttgggaaagatgatggaggaccgttggatgtgcgatcaaggatcgaggtaagagaatttgcatcgaccgttagattctggttaaagggcagagatcggatcacacatcaataaaatcctagccattggatctcgatatcgcggctgatggcgcataccggctcgggatctaatcctaaccgcagatcgcgcgatgtggggtctggggtgtgcgcgttataacagccacacttgatttacaaaagagcccctactcttttcacaaatcaatttgccatcccgggcgatgttctctgtgtctggggaacctttcaagctagcccctagccttttgtttattcatgcgcctagtccagaagcttagggaattcagaaaaaataatttaggaaatggtttttgtgtataaaaatatatacagaacttatttaatata

SEQ ID NO: 124455 - DNA, 359 bp, Zea Mays
aggtccgacgacatgtggttgttttcgtgcttccgttctagatggagatgccttttccgctctagctttcaattttgggccgtgcgactctattttttgtactagttgatttcagttagtttattagatggcaattgaactgggtttggtttctttatgtgctgttgtgtagagtctagccctttcgttctgcttagagagagattactggttcggtgaaactcaatttatatagtactaatacgtttttgtctgtcacgtcgtcaaacgctttcgcttttcggtgatatttttttgtaaactgaaagttttgctgtattttgtcttctctattaaccacattagttgcacataatttt

SEQ ID NO: 124456 - DNA, 700 bp, Zea Mays
gtttcatgttatttagaaagtggttatggaagcatgggtatatatatgtatgtccacttgtgtataaaaaaatccttgatgggtgattaggagagtatagatatctagacgcttattatgtgggttgatgaatggataggttgggataaccaggattatggtaataagagactccatgtacagtggatcttgtttcgtctagcgatccaacttgatctttgaagacttgagttgatgctttttctcccttgacgtggttggtcttctttggccctcaattctagagttgccatccgagttaaggacatgtggctaagtatatataattaggatagccagggtacacgaggtaggtgggtttgaacaaagttttactttgcttttgtgatatctagattagacaacctatgatgtaggttaggttgttgtttacggacgagttagtccaaggtattaatttagggtaagatatgtttacagaattagggtctaatttatgtcaccaacattatctaacttatttaagtaactcaatttggattagatcatgttagattaggtgggatctagatcagattagtataactagataagatcttatttattttaggctagatcatggttgttactgtagagtgggatatgtataccaagataaatccataaggataaggtagaatcttttgaggttagttagatc

SEQ ID NO: 124457 - DNA, 774 bp, Zea Mays
ccggacactggcttagccctcggcgataatggtgacgtcgatctcgtcaaagtgagagaccatctggccaaggccgattccacccctcgacaaatgccctcggcgacggtgcgctctccacacaatcgggcagctcccagaggcgatcaaccagaggcgcctcagtcgacaacagaggagagagatgggcgcacaccatgctaacaaccagacgaatcacttggagtttggtgctcctttccgagagaagggcatccgcccggtgccccgcagcaacggcattttcgcgagcaagcaagagcttgcatgtattctccgtggctgtagccttcgcttcatcctccgcgaccttcgtatcccgcgcttgagtgagaattttgcggacctctgcgagaataagagcgtgaggcagtcagaggtggcaaatggtgaagaggtatgggtaagaaagggggctaacctctggtcgcgtcgcgctccatcacaagttttgagactgcttgcaccagacgaacctttgcctcccatgaagatgactcggctagcccagcatgacactttactctgcggagtgcctctccgagttgggaaccctagtttcaaaggcgatctgcattgccacgagccccatcgcacttcgcatgcaaggatgatgtctcgcctcgaagatggtatatttctaaatgggggacgacaagctcgcgttcttcctcttcagtgtagacagcacccgcgcggagcaactctatccccacctgtgccgtttgcagtgcc

SEQ ID NO: 124458 - DNA, 632 bp, Zea Mays
gccagtgcgacaatagtgagctatgtgcacacaatcattaaatcattctcacaaagaaaacagattaataaatgttgacctgactgatactcttactatacaagttggacaggctctctatgtttaaaccagtcaacacttctgattggggcagagggatgagggttatcgatgtctaaaaccacgggtctacggtggtagttcggaacgatgaaacccaatcatgatatcccatccacaattagttacagaaaatcaatacaaagaattcaaatacaacacactaccaacctaataactgtgtgatagtcatgctcaatcatgcagcctccttcctttcttgttcttcgctttctctctgctcaggcaacccaatgctggtggtcatgaatcagccgctgctagccaacatctcacaccaggcagtagtgaaattgattgtgcgcaatgttctcttctcttgtgtgctcccagttttattggcgaaggcttaatcttgcatcagatgttgctgcttcccaagtcgtgggggtcatgtcaaattgtcaacgattgttggtagtcatgtactcatgttcaatgttagatgtctcccatgtctcagcaacataaatccacatcatctccatctc

SEQ ID NO: 124459 - DNA, 573 bp, Zea Mays
gctcaggctgtttcccaagtatctctccataaggaccgattcgttgagagatcactcgagatcaggtgaggcgtaggaggagcgacgacgacgacgagatatccggtgtgacatgataggggatggctatgaagagcttggactacgactaggaggagggagccgtgagcatggacgttggggtgatgcacgaggacggtgccgttagagatgtaggatgtcatgcccgcacagaggatgggaggagctggttcgacgcactcatcgttcctccaacgagttcacgctcgcagttcgcaccgatgcacgcagcaagttgaagcccatgtgcttttcgtctctgctcctcccgggcatcctcaccaaactccatcacatcccctcgatcgaggcctccatcgacttccccgttctccacctccatcaacacatgcacgagtggtccccctgcataagcacatccccttcctaaatacatgtttgtattaacttcacatcccgctattatctactatgttgtgctctcgtgaacaaagaactaaaaaattaaaatgttgtcttttttgttttttt

SEQ ID NO: 124460 - DNA, 828 bp, Zea Mays
taggcttatgcttgtagaacccatagctagtgacgttaacgttgtcttctgcctcataaggcttggggcccataaccataaatccctagtcgaggtgactcttctaccatggggttcgagattagttccctaggcaaggatccttgagtgtgtcatggcatagccttggttatggcattcccctaggggctaaaaatactattgatctttccaaccaaacttccattgctttcaaaggcaacataagtgataggtttgtaaccttcagacatgttctcgtagcttttaagctcttgagccctctacatcacaaattttccatccttaggggacatgcatggtcttggaatcctctaagtaggaccccattgcttcttcctttcctgtttcttcttgtcttgtacttcctagcaatgcaacctcctcctccatgatatacatcaaaactagctccctccaaggatatcattacctcttgttatatcacctattcttcctcatcataatcttgcaattccatcatttttagtagatgagagcattcctcaccaacactctcggacttagccaactatctgaactcttctcatttagagtggtgggactcatcatttagtaaattgttcaatttgtttcccacaatatgactgtctaaatgttgagtatggctgattttatgagtttgccaactacctaaattttcacatttaatcagcacaaccccacttgattcctggaacatcaacttagtagcattaggcaaaggagcatcctagatttaggccccatcaacatttccccatccttagtcataagtttaggcacaag

SEQ ID NO: 124461 - DNA, 873 bp, Zea Mays
ctccgaaggctgccgaactcgtggataaagacttgcttgaagaccatagagtcgaggcactcaacacgattgcaagatatcaagaagcaaccaagtctttgaaatacaactttgtcaagatcaaagaatttgttgaaggcgacctcatcctcatccaaacaccgcgaacacaagcaaaagcaaagctcggacctacatcgtctctaaaaagacttcgccatacgcctataggctaactagccaaacaagcgtctagctagagcacagctggagcatggacaacttgcggaagttttttttgtgtaagaacaactttgatcgtaagggcctacgaatgcccatgtaatatttgaacactcgggccttttcctcacaaaggagtgaggcttttaatgaggcagagccttgtaataaagcaactagaaaccctccccaacagatgtttcacggccgaaaaggctctcaaagccaacattcggccacaaaaagcagtcaccaccgcactaggagacccgctcgcgacgtgcgactagacacccctcgggtgcaaaaaacgcctcggggcgacgtcagattaaaataaaatattggcaaagacaccccctggtgcctaaaatgcctcaaggcgacgctagattaaaacaaaatcttggcgaagacacccggtgggtgcaaaaatgccttagggcaacgccagattaaaatcagatcttggtaaaaatgcttcgagaaatcaaaagtcatagtgaaacgtcacacatcccaacggtcacattacaaaacccccggaaccacttcaacctatgatcaagggtagctttcgacaatcttccaaaaaagacattgggaccatctcaccaagttgaatcaatc

SEQ ID NO: 124462 - DNA, 454 bp, Zea Mays
gtagagggagcggtggaagcaggtgtggtggaggcagtaggcgtagcttgggtggtggtaggcacttgagtggcggaagttggcgtggtagtgaaaggtggagtggtactggtggctggagcagaggggttgaacctagctagagtggagcatgcccaagacgagaggcacgaacacggaaggctatttgatatgatccaatcctcacctgctctcccttctctcctatctcagccgccgccgctgctgctaccactgcccgtgctgctctagtagctctgtccaacttccttttctttttgccttcgtactgctcaagatagacctccttgcccttgtatagtctgaatgggcgagggggatcatgatcatcgccccctcctgctagggtcacattcttggtctcaccatcctgactgctcactgatcattgacacaccgcacgagaatgaga

SEQ ID NO: 124463 - DNA, 380 bp, Zea Mays
gctgctgcttcggtgatctctaatacgccgaagccaaaaagagttaaggttttaacacatcgccccaagcgcgctgcgacggctgaagagctgaggcctattgaagagtcttctgtttttgagtcaagtcactccgctcctaccgaagctaaaacagaatcggccgaagagccaaaacagaagatagcagcaagcagttgaaggctttgtgtccgttgcaagagacagagctaccgaaggtatcaaagattgctgcgataactccgaagaggagaaggatggccagtgtactagacgctgttatagaatctgtaaaggtgtcgactcctgcctcagcacctgatgcagagggtgaagccctaaagaaatctagcgaagct

SEQ ID NO: 124464 - DNA, 408 bp, Zea Mays
cagaaatcaagcgggcacaagtcaacaacaagtacaagaccatacttcagaccataccgtctacaggggcacggcgagaccccctaacagtacacaaccaactctggtgctccagacagcactccttgaggctataaataggacaacctatggctccaggaaggggcgaacacttcacggtattagcactagcctcaatcaaccatagggacttgggatcattccctctctcgctcagcttgtatttcctactgcaagcacttaggtgcaagtaatataagtctcatcccccctctgctggaagtagggccttctcttgtccgaaccagcataaagactagtgtcatcttccatccccatctgggttagggacacacaacattatttcactggttggttaggtcctcg

SEQ ID NO: 124465 - DNA, 360 bp, Zea Mays
gcttcattgtccagagtattatcatgggcactagagttttcagattctagcaggctctgctccaacacgctgcatccgtcaccatttcgacattgcagtaagatcaggctcagaactgaacaccaaagcagctagaacatggtgttttacagctctaaggagcttagttgatgctgtctagtcgacatttcacaacactgatgccaaaggttgtttgtgcagccagtgccattcaggcctcaaacaagtctctcgagactcggtgtagttttgcttgcagccacagttctacgtctgtggaccaaagctgctcttcctcattctcaacactctgatgatcttgctgtaaatctatactcc

SEQ ID NO: 124466 - DNA, 534 bp, Zea Mays
cttgcattttagcaccaaatttagtgtgaactgttcccattcaatcattcattgcagttcactcattgaaggaaaacccgtcgagaacacattatttccaaagcccttcacactccaatcccactccgtagcaaccaaccttctcatcgcactagtgatctgctcctctgtcattgagccctccacaacagtcactttaccaacacaactaccttgctttgatttgacatgagtaggttgaggtatatagtaaaaccccaaaccatctaccgcatacccacaaggaactgcaaaagttttgcaagtacgaaccactgtacatttcgaagttaagtgggtcttgatatcacacacttcacaaaacagctcaatattgcattcactcagctggtgaccttttattttacacctgaaacaaaacgacacctttttttggccacttgaagtgttgaggatcccacctggtcatctaaatgggatggcttagaaatctcattgatcgtctcaagttttgaactacggtggagccccaga

SEQ ID NO: 124467 - DNA, 465 bp, Zea Mays
ccaaattcggagccaccgcttcgagctgctataaattgatgccccagcctgcttcaccaacttattacgaactcagaacaccacctctcgcctccaattagtcaccatagctcgtgaatttcaaacttcccccaattccgttttctgcaccaccgtgagcacccctccgtcgacccactgtcttgtcccttcacccgccttcctagttgccgttcttgagctctggtacgtcgctaaatcttaccgtgcccttaatttggatgttgttgtactatatcgtcaggaacacgacggggaagactccatctccgtgggtgtacgtaaaccaagctttaggacagcatgcaggttaaattagtgattcccagttagtcgccaaggtatgaattaggcatagaccatattagggcgttgattattgcgtatcacggccgatgtgagttcgccgaagtacgcacgccgtcg

SEQ ID NO: 124468 - DNA, 536 bp, Zea Mays
gtgaatatagatttatggggataaggatgggtccaaactcggtggagaattccccagcaacacctttatataaaccttagagcactatgctgatggtagtttcttttgaataagaaaaggagacaatatgaaaggtattaaggtgtgctgttttcgtcgcatcgagaaaagaaaagaaaagaagggatttgggcggtcctggttggttctttacggcgtagcccgggaaatcaggtgggcgatttcttcatatacataatttgtactgtgtgatctcatagagtggcgggggttttgtttttgttggcaacaataattgaaagtccgatgtgactcggcaacactgtcaagttagacgggacgactcgagcgcggactgattggtggaatcgagtagtgtatggttgggttgcgatgggcgaagaaggggccggggggtccgttcaaggacgacgctgatctttcccgatttcggacacgtccaaaaggaccctctccctgcacagagcacaacacatgggcaggcgctgttgggc

SEQ ID NO: 124469 - DNA, 494 bp, Zea Mays
gcatcgatccttcgcagtgggagatcttgtcctccgccgaattctaacggggaagggacgacacaaattgttgccgctatgagaagggccatacatagtagtagaagtcacccggcctggatcatatcgtcttactcaaatggatggcacggaaatagggaactcatggaatatagagcatctcaggaagttttacccctagcaagatttcaaaagctattgggacgacattgtattctgtaattgggagatacaccatcaataaaatgacttcattctcaaaggcactcgaattgtttattgtcaatctgcatacttactcgactcagggtgaccactataccctacaaacggagcaatcagcttaagtcggcaacgacttaaggcggtgtgacatgctcactcttacttaacctagggtgaccactatgccctattaacggagcaatcgacttaagtcggcagtgacttaaggcggtgtgacatgctcacgc

SEQ ID NO: 124470 - DNA, 495 bp, Zea Mays
agatcttaccatatgcggagttctcttacaataatagctaccaagccagtctaaagatgtaaccatttgaggctttatatggcagaaagtgtaggactcctctatattgggatcagactggagaaagacagttctttgggcctaaacttattcaagaggcagaagaacaagtccgtataatttgggagaatttgagggtagctcaaaccagcaaaagagctacactgataatagaagaagactgctagagtttaaggagggtgatcacgtgtatctgaaggtgtcaccgatccgaggtatgaggaaatttaaagttaaaggaaagttgtcccctcgctttattgtacccttcttgatcttaattcgagtgggagaagttgcatatcaactagaactacccgatcatcttgcgaatgtacatgatgtcttccatgtatctcagctgaagaaatgtctcagggtacctgaagagcagctaccactggaggatcttag

SEQ ID NO: 124471 - DNA, 613 bp, Zea Mays
ctatggtttctctgtcctctagacttggtctcattttccagaaaggtcagggggctgctcgcataaaatcctagactcagtgaacaatgtatgtggacggcgggttctatataggaaaaacacaggggcacatgtgtaaaactaacccgcgaacgggtatcgggaaatgctgaccgccagatcagaattctacgcgcctgattagatccgcagcggtgtgaaccggaaaggaacaggtaccgttcgatcgaggatcgttggcctagatcaactacgcgaagcaacacgcccaggatttaatctcgtccgcgagacgcggatcgaacggttgagcttctattgatcaaagcggtatcaaaactctaatcctaaccgtccgcggtcgattcgtcggcctcgatttaaaatgctgagatctaatctcgaccccacaattgccatcggagggtcccgggcttcccgacccagggggtctccagatttaatcctggccactcaatccgatctaacggtcatccgaccatcgtctccacctaacccgagcgccaccgcgccagctacctatgtcggcggtcctccagcgagggattttccactgatcacagactcaaat

SEQ ID NO: 124472 - DNA, 274 bp, Zea Mays
gtggaaatgaatctagtgggttgatggctgatcgagcgacccacattggttagggtaacataaaatccaggtcgtccacatctaatcctagggcccctatttagtaccaatttaggttatgttgtttctaatctggtgagtcggtttgtgatcggacgactgatatcggctgatacccccttcggccggtggttttgcaaagtagaccttgcgaaaaacagaaataaactcgtcgtccatcacgacttagtctgagtcttggaaaactttacaa

SEQ ID NO: 124473 - DNA, 455 bp, Zea Mays
agatgggaagaaaacgacgccactttagtctcttggaggcaaataatatcagctttggaggatagaattgtgtctcttacataatctcgcctagccttattattaaggccacgagcattccatacaagaatgtttgatagattcattgaaaaacaaataaacacgaccaaggacaacaggaattaacagcctgccaggagcttcgggctgctggaatcatcaaatcgttccgcctgccagccaaaaatagcagcaagttcagcgagatgagagtccgccagtcgcccctcgaacagcttaaaatagttgtcttgagctttttgatcaatggcttcttccatggctgcgagacccaaactcctgatgactttcttttgggcttcagtgatgatcggacctagagaacagggcttgacaccagccaccctcctactccgacgaggcacagcaacaac

SEQ ID NO: 124474 - DNA, 522 bp, Zea Mays
acctgcagttacgcagaaagctgaagacccggttgcaatgccgaaggcatcaccagccaaatcaggtgagccagaggccattaatattaaagaagcataggtcgaaagaacaaaaatattagaagtcataagcccttcggcagaggtgacagtgccgaaggcgcaaaaggatcttacaacgactcctaagaggaagaggatggtcaacgtactagatgtgctagaaacgataaaaatttcaagctctactccgaagaagactgccgaagcttcaaaaacacaaattgaggcaaaactatccaaagccgaagctgccaagagcaaggccgagaccgaagctgggcctttagagcccgccaaggagaaatccttggaaatcggagaagaagaaacgagaaaagaagctgcagaacaaattctgtctgaaaaaattgccattcctattcccgaagcatcttccgaagctctcgattatattgtacgacatgcttcgggaaaaaggttatctgaagaggaaaaatg

SEQ ID NO: 124475 - DNA, 386 bp, Zea Mays
gcggccttcaacatcttttggcactactatgcaatctttaaaccatattactccctgataatctttccggaagcaatttgacttgtcggccttcattttctcatgaatatacttcatacccttatctgttctttgagcatcaataattctttgtagaagaactgactcaagcttcaaattcgtcaaagttcctttttgcactatccctagatttaacttctccatttcttgacataaagtggtgtcaggtgttcttattgtaagacaatgacaagaagccttgcgacttaaagcatctgccaccacattagcttttcctgggtgataatgaatttccaagtcataatctatgattagctcaagccaccttctttgtctcatgttta

SEQ ID NO: 124476 - DNA, 381 bp, Zea Mays
ctaggctatgaggtcagggtcggcgtggcgcatagacaataatgatggcaccagggcccatgttgtccacatcgtccatcataatgagcacaatgcatcttcaccagggtaaaacacctggttttaccatggtacagtggctccttctcaatgaatccatcgacgactggcccccaccttggcctgtaaaaagacgaggacggtcacaaaagaaagggatgaacagacagagaaccatagagctaaggacacttgacggaaggcaattacacatgctcaacgagacctaaaggcctagaggacggagccaaggcttagcgtaggctccaaaccagtagtcttttaggcccaccctcgcataagaggtttgagagatcttct

SEQ ID NO: 124477 - DNA, 515 bp, Zea Mays
caaggtgcccccaagggcggagctgagataggggcaacgatggagcaggagttaggttgatgtcggcacatagatctaatggtcgacgaggatgatggagtggtctggctgcagtacgagcgctgagtggagcaggcgacaagggcggggagcaaggtcggacttagacgatgatgccctttcatctttctagacagtacaaatcatatatatgctactgttaccggccaagagtagtgtagcaatcatgcatctatatcaccatgaaggtataagtaagctttcgaggttctaccctctcgcactaggtacaggtatagcagcaacagcaacgcgatgtatcgctggctggtggccagcagaggtgggctagactagagctgcttggatggaccacgacgacgacgacgacgatatacctggccggccgggatgcatgggatgggaggagcccagagcatagtaacaggaggtagtgggagcccctttttaggtttactagagagagatgagag

SEQ ID NO: 124478 - DNA, 563 bp, Zea Mays
cgagaaccgggtacccgaaataggcccatggcctctttaaaaatggtccacctgccgaccaagtctcgaccgagcaactctgcgaggcagactggctgaccaactctacacggaccaactctgcgaggcggaccggcttaccaactttgtggaccaactctccaccgaccaactctgtcaggtggaccggctaaccaactctccgccgaccaattccacgaaccatctctctgtcgaccaactctgcgagccggataggctgaccaactctgttgactaactctccacagaccaactccattgaccaactctccaccgacctactcggcgaggcggagatccgaatccagggctacgaacccacgccagttgtgacaagatgcatcatcaccaagccacgtctagacacgcgcgcagcataccaaatcggcgccagggaatcaccatcagcatgactgtatgcccccacgaacagtcctaggcgtacccccactaccctgtggggtcagtctgcctcagtcatagaagactttagcaccagaatctcaacagtgacccatata

SEQ ID NO: 124479 - DNA, 559 bp, Zea Mays
agagagagcccctcacttgttcaggaggttcgttatgtcatgttatcttgtgcaattgtactgtggactatttataatgtttagtagatattacttattctatttttatgtcagactatcgttttctttaatcattagatatattcttgctttactgcttgtggcttctgtttctgtcttaaaaatcgaattgcccattgcaggtttgcaagttacttgcatgcatattcttgctatcaactacagattcctcaattcaactgcctttgggttctcataaagaatctctttctttgaatcactgggccacatacttccatcaagtttctgtgggaactaatctcaattgtcattactttgctagcttacaagcatcgtccgaggaaaaggttccaaaggtttgtatcttagcaagttaagagctggattaaaacagttccctattctgtatcatttatccttatctactcacattttcaggacacctataaagatttcagaaatgagacagatgacaatgtctcgaaatttctcaggtttagaattttttgtagcagct

SEQ ID NO: 124480 - DNA, 500 bp, Zea Mays
aagaatcgtcgtattttagggacttgacttactctaacttatatcaaggcatactcaagcatagtcacacaatagatgacgtgatggctacgtaggaatgccatcacttcaccacacactcccaagtgacaaaacaactctaaccgaactgggcatttagctgatcgattccaaacccatttttcataccaccactacaccacacaccgcaaacataggctaattcaatcatacttcacatgggaatttatacagagtcgtagagtaacaataataacacataggtaagcgacattgctttacgactttcggctaagtcaccaaacagacgacatgatgactacgaaggcatgtcaccatttcatcacacacattcatctcctatatgtgcactgatccatttcttgcgacacactctctcacaatcaatcattactacagaaaacatacatacttcttatttatgcgcataatataacacttcttgagataaaatgtca

SEQ ID NO: 124481 - DNA, 517 bp, Zea Mays
acgctctctagcagatttcactctagcggccaagtatctctatcagatcatgagacggacgttactgcaccggatgggttatagagaggccaccactcacatccagctctgactacttggtgccctgatctcacattcagagtttgatgtggttgatttccttatctatgagatcgaggacatcatgttagatggtcttcatgctcaccgacagctaccgtatgctcattatctctgctacatctttgcgcagctgatccggcctcctcagttccagggcaccctcgaggcctcacacctccattttggctcctatcgtccagcccctgaggacctattgcctatacctgatccagtgccaaacactcatgcagaggatgcggcattccatcagttcgagactcagggcacaaccgttcctaatgatgatgatgatgatgattttgggatcccgcctctgcctcctgtgcctccacgctcacatgatcatgaggacaggagttccagtgctgcccct

SEQ ID NO: 124482 - DNA, 278 bp, Zea Mays
ctgcgtgttcacggcgccaccttgacgattctgtgaactcccacaagacctctggttggtctgggagttgttcctctgctggttctggctttgattgttcatctggccttgttgtccagagcgttgcacttgataattatttccaccctgatttctagagaggatttgcgaaccttgagcgttgttcgggcgggtgttcctgctggactgaccttggaacgtccttttgtggtcagacagttcccttcttttgctttcaaggccaattgccttgttca

SEQ ID NO: 124483 - DNA, 682 bp, Zea Mays
gaaaaacacccctgaagatgctctgtcagaacgactgaagaagatcctgatggtacaatagcgaaaagatcttcagattcagtgtatctcatcaccggtgaacttacgccgtgatttatgccggtcgtcgtgattcgttcgccctggtgtactgataacgactaacggtgaaagacctcaacgcagggaagagttggagccttatcaccggactgttcaccgtgccacttgccgcgcgattgactgaggtgtcctcgctggagtttgccgccctttgtagccttgccacgtacttagaagagttaccacattgcagtagaccgtcgtagatagcctgtccatcgcctgggacattgccccggtgaacgccacggtagttcgcaccggtgactcaccccctctcttcggtcgccaacttccctcttccaaattcagagccaccactctcgaatactataaattgagtgcatatcttgctccgctaggttgttttgaagccagagcaccaaccctcgcctccgattagccaccatagcgcctgaatttgacttttcccccaattcggtcgccatcgccgccatggagagctcttccgtggccagcgtcacctgaggtagttccaacccaattaccatatgttctagcttccttagggtatagtggtgctccccgtacttagagt

SEQ ID NO: 124484 - DNA, 606 bp, Zea Mays
gcgctgctagggacggccccgccggaccggacgatgtcggtaaggtcgccaccgccggcctggtcgccctccatccgcggaaggaagaagtcgcacatggctgtacgtaccgagcgcggctggcagctagggcggccgttgccgatccctcgctctagctcgccggtcgctgctgcctctatagtttctgcagggacgcggttgatgccaactgctcaataattctcttgctcctttccaatcaactggccggcggcaccaagcaagctaataaggctagctagccaagacccgtgtggcggtggcgcacaggaagcacacagcttgttgggtgcatgcaggtgttggcaacttggcaggcaccaaggagattgaagaaggctagggcagaagaaggacgtacaacgatcttttgaagggtcaggttcgctcgatctgcttggagggtagctagctagtagcaagcaatccagcaagcttgttcttgcttttgtgggggacaaaaaaggaggtaggccgggtggaggggaagcaggatgtgagatatggggctgcggaaagggagttatcttttcttagcaccaagcaagcaccaggagagacgag

SEQ ID NO: 124485 - DNA, 513 bp, Zea Mays
gtttctctttatctactcactgcaccaaaagcattcttgattatattcattctgatctttggggtcagactcctcattcttctatttgaggttgtgattatatgatcacttttattaatgatttctactgcaaagtctgggtttcttttctgaaacataaaatgatgctctgactgcattcaagcaatggaaggatttagtggaaaatcacactagcagaaaaatcaagaaactaagaaccgacaatggattagaattttgcaatagtgagtttaattctctttgtgctgatcatggtattgctagacacaagactgtttcaggtacgccccagcagaatggtgttgctgaaagaatgaatcatactattctggagcatgttcgttgcatgctttctaatgctggtttatgggataagcatgatttgtgggcagaagctgctaatgccccttgctagttgatcaatcgctttcccaattcagctattgattttaaaattctagaagaggtatg

SEQ ID NO: 124486 - DNA, 568 bp, Zea Mays
gtgaattcatcgtcgatgtcggattcgccatggttccaccgtgctgcgtgggcaaggccactgtcgccccaatccatggtacggactctaccattactttcgctagagctcatacaacgttttgcattttacgcttgtgcattcgggcgcctggtggcgaggattgaccggtgccggccatgccgccgtcgtacccatgctctgcgccgccgtagccaaccagcaggggggaagaaaggctctggttcgttggatctcagatgcacgtgtgagattaaaactagagacaccccttcgtcaatttaaatctgagccatcggattttaatcatgtggctcggggtagatcagatcatgggcattcgtgaaccgtagaatctagatcctgtggacgatgctacgtaccgattcgtaatcccgctcatctaatcttgcgcgcacaaaccgaatcgggcggtgcagatcgtcccgtaccccttcggttgacccattttgcaaaagaagccccaggattctagaaaaccaacccgccgtcccatgcactgtttgctgtgtctcggaaattttgc

SEQ ID NO: 124487 - DNA, 756 bp, Zea Mays
caacgagctgagcaatcacggttagtatcagcttcagcctcgaggttatgcttgaccaccagcataacctagtttggtcagtggacatatttgacaggagctgacaggtcacacttgcatatgaccagtgcacattagttattatatggctaatcttgggctgtattatgtgctagcgagcaaaactgcatatctactggcagagcaaaaatacatgattgcgtgttttaagtatgtacctacctgttttaagtatgtacctacctcacagaacaattgacttgcgtaaacttttatcaggaaacaaaagttaacataggctggcctgcgtgtcagtggcattgtaaaaggcaatgcacgtcgtgatgtgcggtgagcatattagtcagataccctggccaacatcacatcagagtgtgtcctgcccacatggcaaacgcaacattgttgtggtgctaaaatgttagaacgccttaccacgatccatataaaggtaacaggatagagctccttgatcaacttggcaaaatgtgcaggtaagtggaacgacaacttaagtgtacagtttcctatcagttttaccagtaactgaattttgtgggtttaccaagatttacaattttgaccagtggtgcaccaattacggcacaaattttgtgcaccgtttgaatttatgtgttgcaaatattgtgctttcgtataccatagaacttgtgacatatcaatgcactaaatttcaggtaacatacccaaaca

SEQ ID NO: 124488 - DNA, 962 bp, Zea Mays
ggtctccgcctcgcgtgagcccacctcggttaagcaagacaaacctagggcgagacttagctgaagtccaccggggacaacaacattcaatgtgcatacctaccccatgcagggttgcaggtgtacaggagcaacaagatcgcaatcctgtcaagcttcaccaactatgattacgcatgcgaccactgtttgcatgtcgtctaccaactcccgatgggacgtacaatacgacaagagtacatgcctcacagtattgagccaactccagtactccaggcagcccctgataaggctataaataggatagtttgcggcatcaggagggcgagcgaacacttcacggttttctgctccattacgatattggcactagcttcaatcaaccctagagacttgggattcttccatctccccctcagcttgtattccctactgcaagcacttaggtgcaagtaatataagtctcatccctcttctgctagaagtagggccttctcttgcccgaaccaggataaagacttgtgtcatcttgtatcacccatccgggttaaggacacataacattatttcactggttggttaagcccttgggtccagacaccgacagtaacagtggctgacaataggcctcaggtgagcacaacaacaagccctagaaatagaacccaaggaacaactaaatcacagtataaatctactatgttgtgatgggtcgcttcttcctaacaacttggttcaatcctccccttgcgcttactcgtcaggagcatgcttggaatcattaggttgtcacgacactagtcggagcccctcgacgatgagaagcatagtgctaaccgggcatgcttgggatcattaggtgtctagcaaaaaatggatccacttgcaaagaccagttcaacgacggaattgtggacctctatcggtatatgaggaattccatacccacggatgatgccaag

SEQ ID NO: 124489 - DNA, 283 bp, Zea Mays
gatatctatcccccacagtctccgccttgttttctgcgcggtggctgtcggtcggaggtgtgaggccggatccagacgcttgcgattccggttgattgggtcgatactcgttgctgtccggttgttttctgcgcttccgattgggtcgattccggttgattgggtcgatacactcggttgatccggatgcttgcgattgcaattccggttgttttctgcacggttgatttccttgtttactgaatctcttgtcgcgcgcccattgtactaccctgcaaatctc

SEQ ID NO: 124490 - DNA, 415 bp, Zea Mays
atggagctttcgtgaatggacgtcacaccccctacctgcgtgcgccagctgttggtgttttagtcccgactgcgcactacggggtagcccgtgtagtgcttttgggaggacgacaacgtcaatcgctgctcgatggtatgtgtggatacacgtcgaaacacaatttatacaggtttgggtcacatggatgcgtaaataccctacgtcctgtgcggtgtttcatatttgatttgtccgggctcgcagattataggtatttgtggaggtgaacgaaagagttcctattgatctaatggtgagcgagagagtttttggtaggggtacctctgcagccttatatagcttactggagagatatcctcttctacgtatcatttgagtctatataggtctatcatcttctactgcggatgcg

SEQ ID NO: 124491 - DNA, 524 bp, Zea Mays
ggcaagggcggagtggcttggacaaaggttgaagatgatgtgcccaccaaccggagcataagaaagagaagctcggaggggaaggagacaagcaccagggaagcaagcactgcaggtaccggaaccaaggctgagcacaaccaggatgcacacgcgcgacgatcagagagctatgtaatggagaggagaagcagtagcttggtgcatccttgagatgtgagcaggggtgcgatgcacaatgttgaggcgagcgtgcccacggtggctgggtagaggccggaaggaagatgggagatgttacacccgaggtgttactcagggtttcccctcagtacctacatctgtggcatgttatcacatgtggtttagcttgagcttaaggtagcaaacatgaggagccaagccttaacaagcctttatcaccctagaaatcataccttaaccacatcaagcttagggaagagggtgaagtgttacaaccctagaattcccctttttggtacattagtgcaccaaagagaaac

SEQ ID NO: 124492 - DNA, 453 bp, Zea Mays
atggctcgcaagggcatgtttctaatgacattgcaggaaatgaagaaccaccttgtgaggccataaagaagcttgcaataggtgaagtgagacctcaagaaaaggatgatgaggaaggaaccttgtggatgactaatgaggtttttgatgtgggcgcaaaggtggtgggtgataaatcctccacccaagtaaacccatcaacctcaagtcatccaagtcttgaagaaggtcatcaaccccaaaagatgccaaccctggtggaagatgaacctgaaagtgttgatgatgaagtgcctcttgatcaagtggatgatgaggaggagcaaattcaaagacaaccatcagtgccccatcctcgagtccaccataccatccaaagagatcatctagtggacaacattcttgggagtatcaaaagaggggtaacaactagatctcgtttggcattttttt

SEQ ID NO: 124493 - DNA, 496 bp, Zea Mays
cgccaatataaataacacagtcggtggataaccgaatccgccagtaaaaatatatcgtccccacatgctttgagctttttgtactagtgttactcccaccgcgtgaaataacatccatgaacgacgcgaacgcgagctgctcgcttttggcagcttggcccgtgaatccacagacgacgaaagatgatggagctgcttgtgtcgacaacataggactagatatttctcccgggagcaaaagacggagatcatgaggtgcttcaccatgggtactggagataacgtacgtgccatccattcgaaccgtccttgatcttgctggcaggcaggcctgctacctaccttgatctagctaactagggggacggtcatggaaaccctagctaggccgtagggataaggcgcttttcttttatttttacacgatggagatgtgtgctcggcagcgcgccgtacagggcacaggtcccgtcagtcaccagcgcgcggcgtcgcc

SEQ ID NO: 124494 - DNA, 311 bp, Zea Mays
attagacatgagaaatatacacctccaaccattggtgcttgctagcactattgtatcccttgaggcttgcgtgtgtcattgtattgtatcggaaggggatgtatcttgcgagatcacaccacctacgtttgtagtgtgaccaccactgtgtagcgaagtgaatgaggcttacgacgctttagccagaagctggatagtggagacgatgggagcatccgagagaagccaaaagtagagcaccacgtacaaagttacctgaccggaagcttgactcgcgcgttgggccccaacaagtattagtaagaagtttg

SEQ ID NO: 124495 - DNA, 671 bp, Zea Mays
caaactgtggaactgagtctttcttaactagctgttggtggagggtgccttggaggcgggtgccagaacattcttggggccattcaccgatttggagtaggcaggtatggatgtcttcaactgtggacaattattcttgaagtgactggggtctccatagtgccaataagcattggttggaggttggctgcttgcaacagattgggtgtggaaggaacttcgacccggagggttgagtcgtgacggagaggatcctgctggcttgctgaagttcgaccctttggaagggaacccaaaagatcaaaccctctggtgtctgtcctgttgttgagctcgaagaacttgaaattttctcttgaggtgacctttttcctcttatcatgctctttccacctggatggccttgttcgagaggtgcaagaaactgaggaagtcttggctggcaaggatggtcttgagttctggtcttaaccccttcaagaaacgagccatcttcttggcttccgtgctgacatcatcaggtgcatagcgagcaagttctattaatttatggatgtattcactaatggatcgccctccttgagttaactcccgaaattcctcctccttgagctggacgattcccaagggcacatgatgctctcagaaagcagcttcaaactctgcccagg

SEQ ID NO: 124496 - DNA, 334 bp, Zea Mays
gcatctgctgaagcgtctctaaatgatctgcacaaggttttacccctgtgacggattccagcagtttacttgtcacggaagttgcactaaatctagtagaaacatggacccatataaccttgaaatcattgacaacttcagcctcttcacatacatattgagctaatgtagtcttccccattccaccatggccaactaacgagagaataggaacatggtgagtactcctcacaatttcagatgcttccactggcgcctcaatcagccattgcacaatcttttgtttctccttcttatcgtccaacaaagtaagtttcagttaatgttgaaccag

SEQ ID NO: 124497 - DNA, 1290 bp, Zea Mays
tgcattcatgccaatattttgaattatagcatttgaccataaaaattcaaagttgtattttttctgtgaattagaaaactgaaaacaaagcaaatagaaagaaaacaggaaaataacaaaagaaaaaagaagaactagaaccctctgggccggctacctcactttcggacaattctccaccttggcccactttgctcgtggcactcagcccacaccgccagacattataccgcgccagcccaacctctgcacctaaccacccaatttagtttccaccgggcggcctagtcgctcgcgtcgctctgcggcactggcagatcgggcccgcgtggcatactctctacctgggtgctcggggttctacgggcgtcgtctggtggggtcggctcgttagatctatccgcatccccatctcccggaagaactctcaacagcgccgtaacaaatcggccggatttggcgcaggctaccgggtctgcgggaattattgcgaatcggtctccggccttgctcgggtataaaacctcgacacagctcccagcttctccatgccatgccatggtccgccatttactttgagagtgggagaacagccattgttgagggttggtcctcttcgccattggcccgagaaaattggtctaggaagatcagcatcgaatgtaggacgtcttcgggggctcagccatgtgagaaatcatgtgggcgactggtaattcattgccggattccgactcttgcggccaaatcgccgcgcgacgagaacaagcctcctcgggatctaatcaccggtatggtacccatccctatccttggaattcactcagccttgcgtagcactagcggggattaagaatgaagtactagaaccctgggtctctgcgctccagcgaaccgccaccatggggagcagggcggcgccgctgtgcgcgaccgaaacgaggaagaagttgccagtcgttagatgctgagcatatggctcagattaggtcggggtaatggtttgactagatccgatacccgccgtcgatccctgtgtaggcggtcaagattagaatcgcgtaccccttcgatttatgaaagcgatcgggccgttgatcaagaatcgtgcgggtcaggatggatcgggagagttttaaatccgcgccgctgatcgctgatcaaacggctatagtatcgtacctcttcgctaatgataggatctaatctaggccctcggtttgcatcgagcgggcgagggttaggaataccccttcgtcctgggtcttttgcagaagagcccttggactc

SEQ ID NO: 124498 - DNA, 310 bp, Zea Mays
acacactcggcatcctcttctttctccatagaatgaaaacactcaacctctatacatcccaaatagatgacagcagaggactctaggttcacaccaaaggagcagagttttgagtttatcagcaatgatgttgagctgatgatttttcgagggctccgaggttccatttactcaacatctatttttttgcctcaaagaaagtaaaagctaaaataaagtagcgtttgtaaatcataaagaacatactagctttacaaggtgtgaacatttacttgcccagctatgcctcaacatgactgttgcaggataa

SEQ ID NO: 124499 - DNA, 363 bp, Zea Mays
ctcgaaccatcgcaggaagaatctgttcaatccatatgtggaagtcatgactcttcatccctaagactcgcatagtagataagttcacccccctactcaggttagctacatacccatcagggaacatcaacatcttgatccactaaagtacttccttcctctaggccctgcttaggacgaaatcggccttaggccttctccatgtcttttcaccacttggcgatttcatctcttggtttggtctatcacataacgctgacagatccactcttgcctttacgttatcctttgacttatcaagaatgtccataattgttccccaaagtgcctcgacaacattcttttcagtgtgcatcacgtcaa

SEQ ID NO: 124500 - DNA, 491 bp, Zea Mays
atttttgtttatttttttttcttaaacggtttcttttttctaccttggggcccatgttattgctctcttttttcaccccataccttataggacaagtggctccaactttacaaatttatgcccacacactacaacttcatctgaagcaatctttatatagagttagagctatttgggagatgtgtttggctagtaaggtatcttcagcaagtatttgtttatttgcccttatcaaacgtgggtttcggcagaatgccctcatacatacggatttggttcatatgcccttctcaaacggtgtctaccagttaaaataccctttcatctattcatcagtctaacaacgtctaaagttccaaatctaccctcaccatatccccgcgcttcttcttcttctccatgtcgacgtctccgtgcacacctagaggtatatggaagggagccaaccaggaaaccatgaatgtctgccaggtgatggcctcaccctctct

SEQ ID NO: 124501 - DNA, 459 bp, Zea Mays
gagagatcaacagatgttcctatggcccgacagtctattttacagagcaaatcgtccaaagacacttgatatcatgcccatatcctttccacatgggctcgtcacagtcacgtgttcttcttcgtatcctgccaaccgtatcctggtcaaggctactagaaagccaagtttggaacaccacgtccgctaataacaagtaataaattcagcatcacgaaaggcacattcagtcggccactactgctataccaccaccactcatgaattgaataacacactggactgaagaaaaggtgatgcgaacaatgatgaagtagataagttcagctccaaagataacatatcatatgcgctgcaccagcgtcaaaagcggctctcctttccgtctgcttctctcagtttctttctttcgtctccggggcctggatcgagtagcacccccctggaaggacgacgaac

SEQ ID NO: 124502 - DNA, 361 bp, Zea Mays
ctaaaccaaacatgccctattcctcagcgagtggccaacgagtcgttggtcaccttactgtttagcccagtttgctaccaatttttttttatactttgttcacttgcatgtgacaacattaccatctatatcataccataccactatatataatccaccagtttaaactttacaaaattcacccaatcaaatcacctccatactcataaccttcatgaaatccaccacacaaattacacacagacttaacactctatcaaaaccaatggccatattgttggataactctctctcccttactctaatgaacaatattatttagatcatctctcttctctatccctcatccctctccctctcc

SEQ ID NO: 124503 - DNA, 288 bp, Zea Mays
gtggtggtccccgccgtcgccgctgtggaactcgcccaggacgatgcccgtgcccccgccgccgcaggtgtgatgtcgagctgccgagctggccggctggactctgctgctgcgacctgcgactgcgaggagtttcccgtcgagtgtgttgttgtgcctgaatgcctggcctcttctttctggagaggtatgccgtatgcatgcttcaggattgcatacgtacgctgcttcagctgtccgtctacgaacgtactaccgacgtgtgtgatcgaagtatttgtgtgcctc

SEQ ID NO: 124504 - DNA, 470 bp, Zea Mays
ggatgaggaagaggaggaggaaatccccttaattcggaagaacagtcggcgctatatagccagtggggagagtagtggtgttccttctccagctttgtctgctctcgttggtctgcaagaattgtctttggcaaattttgatcaaactctcgaagatatggtccctgaagacctgttgtcagagccggcatatggtggaatgatggaaatttgtgctgacgtgcctgctgtcgaggtagagttatcccgagcagtgtctcgtgcctcatcgaccttggagcgcggttttaagagtcaggaggctgatttggattgcttcgttcccatggaagtggttgaaaatccttcagccttagaggtggctgctacagagaactcggtccccaaggatggcgcttgcgtttacccagcccccgagggtgttaccggtgatgatccgactcgggtgggcagcgcgagctatgatccag

SEQ ID NO: 124505 - DNA, 1370 bp, Zea Mays
catttactaaaagctcccttttgtatacatccaaagacaggtaaaactcaagatgtgttaaattcctgtattagtttgtaatgtgataataaggtggcaggctcttatgctcaggagcgggtggcatgtccttttgaacatctagattcaataacagatgcagtcccttaaaatccttgacattgttgatttagtttattctaacagctgcaggaataatgtttgtcacacaatgttccctattgctcacaactgactcttcttccaggccgtgtttgtgttccgattgaccccagtaactgtgatgattttgatcctgcggctgttccgactctatcacaggtatggtccatagagcctagcatgagaagcactaacatttcatatccttctcccaagcatcatggtgcaatgctgatatgctaaaacaagtgcactcatacagcttttaggagagctgaatgctactggttttcagacagatcctgaaaatagtaagtgattgtagccatgctccttttgtgattcgtgtaaaaacttattatttcataaattgcagaagtaaaggcgttctagtgccaagatgcagccttgcgtaacaggctaacatgctctccttttgacaatcctatcgagtttcagattgggaaagaacgtcccttgggaaatccatcagttttttcagaacttccttcctgcacccattgctgaaagcatgcaaggtatggattctttcctatttcatttctgtggcaatgccggcatccatatgcattatgtgaataattgaaacactgcaaaatatcttaagtagcagaaccttaggagcatatattatagttctcttcatcccgcagcaaccacctgaagagaaaaaaaagttcggatgcacacttactttcagttaaactcttatctcatggttctgacatttcctgaggcataactctgaatctttctctgccatgtaattttgcaggaggaactggaaagtgcatatagcgcgaagcttcagcagtccaagaattccttggactggtaaaatctacgcatgtttctgcctctgttttatcatcagcccccgttcggccctccctgagcatccaacgggtaacatggacctggtgctaggtggaatatctatgacgctgccaacccgtgttgcatgcctgggatgcatgcaaccatgtcagtttgaagttgcgtcttaggattcatgttaacatggaacaagtccgagtacatgctttgtggtatttttacctttggattagtttattaggttgaagggttataatgacggtcaaacactcgaaaatggatgcatggagatctgcctcggtcatttcatgcaagttcgttgctcagca

SEQ ID NO: 124506 - DNA, 319 bp, Zea Mays
cttatctcctagttaatagcgaacagactttgcttacttaaggaaaatctggttgcttcgttctgatctatctctggcgtttgagggcgtcgagcgcgggaaagacgaacgactccctcgagattatgcctaatccgcgaacgatccggacacgagcccatcgctctctaagttgacccatttcaactgcagtctttgcccgacccacaatgagacgaccttgcggggtgattggtttgtggccccacgtaagggttttcgccttctagtggacccgggggatatctgtcccccacaacacccatgggttaaaatcttc

SEQ ID NO: 124507 - DNA, 421 bp, Zea Mays
cacattatcgacgttccacattaacaccattaaatgacggcaaatattttatgtatttatgcaacaccactacgacaccacaagtacgcgcattttatttatttggacacggcttttcattagttctctagtgatcacacaaaaacatcccaaacacaagtttaaccgatgacataggcatcaatgtctatggaaattccatatcacaatcaactaaagaagaaacatataaaacaatacacacatgtcatctctagcttagctatggcaagtctatattacttaagagcaaaccaaacatttttagcgagaagggtgaactaaacaatcaaaagcgcactagcagaatttttggacagcaatacagcagtcacttgtttgagtcataactcacaagatatttaaccaaaaaagtaaacta

SEQ ID NO: 124508 - DNA, 1799 bp, Zea Mays
ctgtgctacgacgcacatggagaaacaaacaatgccttgacactagatagatatcccatgtcgcagataggacctgttttctcaagagaaagttgtcaaagatttcggctttttttagtgtaaaattgtcttcttgaacccgagaaacctagttatgtatgcctctgttttgacctcaaatttggctcaacggcatataaatgatcaagtcaaccagtcaagctttgttttcctctcctgtccgcctccaagtgccttccaagaaaattctagatcgatgcatgcccattggtgtggccgtgtgggggggccctactttgcattttaattccattttcctgggctgctctcctgttccagtttggaaagaagtgggggcacacatagtacattgtgacaacagctgactgaaacagcttccggaacagctcatagagttttcagatggacatggacttctcagatggatttcacaaatcacacctatgaagacttgactgaactgaagggtgattgggttaggaatgggggcacatgaggaaccggaccggacaagggaaagaggggagggacaggtgtctctcctctcatccatcaacttgcagaggcaaaacgaaacccgttagttgatccgaggaggaaactaataagagcaggtgtacttctctgtccgggatatatttatttatttatttctagagcgaaggcatccgtctggggccctccgtttcaacccaagaagtgaagggagctttggggtttcttccgaacaggaaagcaaacccgaagaaggtgcagcattccgtcgcctagggaataaaccaacaggcaaccggagcaggacgagaggaacggcggaaggcaaaataaagttctcaaaggtcatgccgatcaacaccagaggcgcatgcgatccgaacgaaccgctcccagcagaagacggagcgataccagatcccctgcattaccaatcccaatcccagtgagctccgactcaactcaaatccgacgatccctcgtctcaccccccagacaagaaaacactgtagatgtgaagggaatttagccaacgacggcgataagatgagataaccacccttgtgtcttcacagcggcgagaagctcgaacccccagactgaaagggagaaaaaagtcgcttctttctccaatttactcgaaaccccggccgatgcatccgaagcagcagctcgatagtttaacatcccctccagaaaacaaacagtgccttgctctactcctcctaccctgcctttactttactgttacggttacgggcggtggcccttattattaccctaacgatttcccatcatgcgggctccgctcaagtttcaacccttttaatccatacagcagcagttcaccgacgagtccgccgttagattagatgatgattgtgtacagacacatggcatgagtatatatatggatacgtaatgggtgcccgcgtttatcacccaattttattttcccccgcagctgtgattgccgccgcaattttattaccgaaagatccaaactgaagcaaaggctagtactgccgcgctaagctaagccagagagagagagagggggacaagaaaataaagcaagactgcaagaggaacggaacagggcagggcccgggtgtctgtgtacctctcgcctcgccaccagttcaccgcctcctgcgatgcgccgcttgcgggacagcgcctgtagaaagggaaggggagagggcagattcttttgctcgctcaatcgcctacggattttacagaccccccgtggccgtggg

SEQ ID NO: 124509 - DNA, 664 bp, Zea Mays
ttaagctatttaagtagaaatgaaaaaagggatgaaagaccatgaaaaacatgaaatcatggcttaggccaattataaaaattgaaatacactaaataagctacaataaagattatgaaagcttggccaaaatagtttattaaaaactccaaacaagccattcaagtggaggttcaatggggaaatctgaaattcagatttctgaattttcagcccttgaaccaaaaccgagcacgttcaccttgatccttggctctaattctaatgctcccattgacaaaaacgtgtctaactaacccctctgtcacatgtcagaagatggcatcgggacgcgtgccctagacacgacaaaaccaaagatttgcctcgggctcacgctgggagacagaccagacttcagagctccaaatctttgaaaccagtaggccaaatcctatgacccccatacaagatcggtagcttatagggaggagaagaggttttgtgcactgaccaaggcaagagcaggctcggatgaatgaccacacgcgccagaacttgggcagaatgaacgcgcgcacgtgttcgaccctcgtcggcacgcctgcattcgcccaacccgcgcgcactcgccccactgtccggtcaagtccgtcgcgcaccctcaccctcggccgtgctcgcc

SEQ ID NO: 124510 - DNA, 386 bp, Zea Mays
ctattgtcgacgttacctctcatcaggacgttgaaatcccaatgggtgtcacgctgcaacttggtcctttgatcccatctgcaatcatgcctatcgaccatgtgaaatctgttagttacgctgctcggaaagaggttcagcttttgctagcttcacgagagtcagattcctttgctgatctacttgtaatcttcttacttgcatgttgtcttgtcatttcgcatactagttttctgatttgttgttttctccctggacaccttgagtcggttcgccacgtccttgctgcaggcagagggtgaaataagaaggtggtcggatcaactctgcgaaaggcattgtagtctgaagttttgatgctcaggaagaaactggcagaccttaag

SEQ ID NO: 124511 - DNA, 488 bp, Zea Mays
tgaactcgcaactacttagaccgcatattagtgtgaagcgagtctcattttgtttctagaagtgaagttgaattccattagttgtcagcattcacctgttctataggagctgccgtccagactccaggacttgtgaaagaatataaggggtaagatcgtcaatgcacatggccatacaatggcagaagagcaatgaggacacaagattgaatttaaaatggggaactggcaacaaatcgaactactggccgtgtttttttatataaaaaactggctgttgagtgttgacggcaaacgggagaagcccaatgtttcgattggcagaacggcaaaattctggcctgctggctgatttcgacgcaccaaagccaacgttccttgcagtcttcctttcatgtagaaattctactctacctttttgaactaatctccttgtcctattttctttcttgaactctaaaaccatacattttagcctccaaattagg

SEQ ID NO: 124512 - DNA, 407 bp, Zea Mays
gtggttagggttttcttatgtagcaggggctaggcgaagaatttgcatttcggatccgttttggccttctagatcggcattattctgattttacaaactatcattcaaactatacacgatatgtgctgttttcggtgtatttcccatttctagtccaacgccaccttattactctattcaatcggatgtgctttatggccatccaaaaggttccaaaaactaacacctttgcttgcgagttcgaagggcagatgtgatcaatctattcgttgtttctcatagccttttggatagtggttttctttcctcaccattttgtggtataagtgtcaaatagaatactacatactcatcattcacttcatcaattgaatgtgtccatcagtcccataggtatagttgactac

SEQ ID NO: 124513 - DNA, 452 bp, Zea Mays
gatgaaacaaggaggggctgcaatgcaatgcggcttgcaacctaatctagggctagcgtggcgagagttcacacaaggcggctagcgagggcaaatcgagtaatgtggtgtctcaacttgtaatctaggaaaggtggatgggatagcggcggaaacaaataacagcgaaggagcggttgaactacgattacgacacgacctaaaccagcaacaagactcgaacacggacacaaattcaacaaagcaatctgaaacgaaattgcaaggctaaacagggttataggacagcggaaattttttttgtatggaaattatctggagttatagaatgaaaaaacctaaactaaactagggtaagcctgatggtaatacctgagtctttgaataccacttgataggaacggggtgcccgatcttccgtcaggtgaagataactattgatttggtggaga

SEQ ID NO: 124514 - DNA, 592 bp, Zea Mays
gcagtgtcgccttccatcaatcgtggcatcaccgaagccagaaatatagaagacgcggaaaagtggagcgtcagggaatcttaagaaaggagaggtcaccgttccttctctcgtgcctttctttttcgttacttctaattttctttccctgtctttgcatgtaagtatcgaaccttttgttgttgcctgttgcaatcttgcatgatcatattcgctcctggttgcaagtatcgagtgttggtcggggcagccaatataggagtcagtcaaccctactttgccatagaaagagtccactgcatctagatgaaatttcaagtcttcgggaatgatactctctaaaacatacagtatttttcacacaattggagcacatctttgatcactaatttttataactatgtttatgagaccaatataatctatgcaatcttaacttataaaacatatagttaaatgtgttaggaattcactcagttttttatttaatttaattcaaaaaatcatatcggatatgtgatggcatgtatatgtatgtgtgtaatgttactattcacaatagtagatgacatatacataaaaatcataccga

SEQ ID NO: 124515 - DNA, 433 bp, Zea Mays
gtcacatcaggtgaagcagcatgtcctgattgccattactacacgagttcacttagacttggaaatggtagcaagaattgctatatggaccatcgcagatttttggatgaaaaccacccatttagatttgatgttgacaaatttggctgtactgagtttagggcagcacctactccactatcgggagaggaaatattggagtgcactaaacatcttaatccaatttttggcaaggacacatctgggaagaaaccaacaagcaagagacgcaagaaaggggaaccattagtcattttcaaaaggagatctatttggttcgtgctaccatattggaaagatttaatgttgcgacataattttgacttcatgcacataggaaagaatgtgagcgaaagcttaattaatacattcatgggcaccgatgggaaatcaa

SEQ ID NO: 124516 - DNA, 781 bp, Zea Mays
tctaaaaccggtcgtgacattaactcatcaagatcaatggtgtgatcttgatgcaagttagtccgaagcaaaaaaaacatcatgggtgaaaacctgacccgcctcacataatctcataataaagtttttcctctatggttcctagcatgaacatgaaacagagctgtgttggcatcgccctcacccagccagctgatcctagagcggctcctcgcaatacgcttgagaggagagggcaaggcaatgtttcttgatattattgtgcagccatgcttcctcgttggacaaagtccgagagtcttgagcaatttccagtagatgaagaaactctgtggctccaattctgaagctttcttgcagtggatttgagtttcctggacaaaacatcaaaagggcaggaggatcctagaaccgagttccaagcttcctcaacagtatgcatgaagccttcgatttttggccaaaaggattcgaagtgaaatcgaggttttccaggcttaatatcatccagcccgagcaacagaagacagtggtcagagtcctccgaggctgcactctgcagaaggcagtttggaaacagctgctcccactcaactgtcaagccttaccaacaccggatcagcttgcagatttgaccaagtgaaactccgaccctgtaaaggaatgtccctcaaggctaaatcattaataaactttcgaaatctgcccatcattcttgtcttcatctttgtatataaggttaaaattcccaagaacatcccaaggtccctgacaagcatcg

SEQ ID NO: 124517 - DNA, 277 bp, Zea Mays
ctgacgtcgatgacgcagcagcgaaggccaaggactcggccaacggggtgggggtcggcagctgctcatccgagctgtcctccaggttgatcacgttctccactcggacgggagggagattcgctggagcttcctcgactaccactgggtagaccgggacctgccggggttgaggggcgtagctggtgttgacacgggtagtttggagagtgcgaaccatctacaagagaagagtcaacttagttgaatttcaaagaggtaagactgataaaggaat

SEQ ID NO: 124518 - DNA, 420 bp, Zea Mays
agttcctagagttctgttggagattggttttattttgcttcgggtatgggcagtccttgatgaagtatccggactttccacagttgaagcaaccagtggaagaactagggagagtagggaaacgagtaccaggggcactcggttgattggtaggagcgtgggcagtagtgggacgaatacagacagactacttaaagggatatgtaggtggacgaggcgaagagcgattttgattaaaaggtcggataaccaaccttgttctcttttctggtccttgacttgacctttcacctccaaacccctttgatttcccatatcctgtatttttagcttcgactgccagtgcagtgttgacagccctgatgtaggtaaggtccaaacatgtcgccattttccgctgaagtctgtcattgagtcccc

SEQ ID NO: 124519 - DNA, 340 bp, Zea Mays
gctttatcagagatgtttttaatgctttaacttatgaacttaagaatgggttagtctgttccaagtataatctgctggagcataacaatcctttggcacctctagcttgtgcttgagaatcttgtatgatttcatctcttgttaccgttagtgctataattggcgtttgatatctattaagtatctgcatgtatgctggtttatcactttaggcagggcgtgtgctatgaccttatgttttcctattatgcatgctgataaccttttcaaacttgtcccatggtatatgtacaatcatttagatttgttgagtggcaatatagcaatattttcagtgaac

SEQ ID NO: 124520 - DNA, 826 bp, Zea Mays
gtcaccagtgatctctcaaggctatctaggctatcagtcgagctctttagaaggactcctcagtccgagtgctgaagagaggactggctgctggatcacactgagttgaaagccaagtgtccactgacatgtgtctaaagcgacgaaccttggcaacagtggccctgtgaaggtcgaacagtctcggatccatagcaagcgatcaaacctcattctcgtcacgttctcataatcgggcgggaggtactggtggagtggcagaggtagagggagcggtggaagcaggtgtggtggaggcagtaggcgtagcttgggtggtggtaggcacttgagtggcggaagttggcgtggtagtgaaaggtggagtggtactggtggctggagcagaggggttgaacctagctagagtggagcatgcccaagacgagaggcacgaacacggaaggctatttgatatgatccaatcctcacctgctctcccttctctcctatctcagccgccgccgctgctgctaccactgcccgtgctgctctagtagctctgtccaacttccttttctttttgccttcgtactgctcaagatagacctccttgcccttgtatagtctgaatgggcgagggggatcatgatcatcgccccctcctgctagggtcacattcttggtctcaccatcctgactgctcactgatcattgacacaccgcacgagaatgagagtagataaatcagcatagcaaagcaagggataagaatggaaaatcgaagatctagctacctggggcacgtctttcgagaaaaaaccaaccagaggaagtcacataagca

SEQ ID NO: 124521 - DNA, 402 bp, Zea Mays
agccaccgctcgccagtgggcctaccaccacgggaaggatgccgcagccccgttctggcgtgaacaggatcgtgtggggggagaaacggccctggccattgatccggtgatgagagctcatgattgaatctcaaatacgccatcatgattgaaaatcatagccattgatctcagatctgttggccgagattagatcgcgtgatcctttaatcttgagcgttgattttagatccgaccgctgtgatagaatactggttctggtgagataagtctctgatccctgccatcgaatttggatcccacggctagcaatccaccataccccttcaccatgtcaatctttataaaaagaccctctggtttcccaaaactaacccccagtccactcatgcacaaagaacc

SEQ ID NO: 124522 - DNA, 664 bp, Zea Mays
atcagagagttcggggttcaatatgtaaaattcagggcctagttgtaatgcttttcgaattatgatggacggcgggttaattcgagaaaaggacaaggtctctttagcaaaagcgatgggtcaaaggggtatggaggcattctggccattggattagaaaccaagggcacggatctgacctacttttaagtgaaccggtatcccatccaggcccttgggtcagagatccttggcacacgggacatccacgcgtttgactaaatcctatccacccgatcagttctgaacgccccggatttaatgaaccgaagcgctgaccatggttctaatcctatccgcccgtgatcgatccaacgatggtcgtgcatcggcaccttacccaccgcgccgagcgacggagccttgccccacggcgacggccatggccggagacggccatcccggtgcgcaacaccctaacccccaattagaacggtgctacacattgagaagggcaaggcaggtgacaaggaggtagtgttatcggcaagggtgtagtggtgggaacagtccacggtgagctgaaaatctgcggccgagtattgctccggtgagcaattagtccacccccggaggacatcctctcccgaaaggaacatggagacgtgtgggtaacacaagcgag

SEQ ID NO: 124523 - DNA, 470 bp, Zea Mays
ctttgcctttgccatagccattgctactctactgccattttgtggtggcttcgtaaaaattccccctctcatcccctgattattacagtgcccatgacccctttctctggagggacctttcttcctttaagactagaagttggcgtgtgctttatgcatgaccgcgtgccgaatggatgcttctagtagttctgcatcagaagctcattctgagccttagcaccaagcaacatgttgacgaggtcacattatttgtgtacttgttgctacagtactgctgttggagcaccatattggaggggtagaaggtttggagagttttctcgatcatctctaagtctatggctatctggccacagaaatgtagctgagcgacaatgcgatggatgacagtgttgtaagcctcaactgcattgaagtcgagagtggcccattcatgttgcgcccgcgggagcatcacatgcttctcc

SEQ ID NO: 124524 - DNA, 359 bp, Zea Mays
agttcaccggagtaggtccctgtgtcacccctgcctctgctgaagttagccaaggccttagcgcgccttaagtcccctcctcgtggccggaatggctcaccggagttactccgacccacccgaggctttctcaccgccgttctcccctctctgcccgtggattcgtggcatcttccctgccattgagttcgtcgtggcaccctcttcctccctgcacaactccggcgacccaggagccaccctagctcgcgccagcctcaactccggcgacctcaccaccgcggagaggagcagcgccgcccgcagccgtccgtttccccttggtctgatcccctccatccgattcagatcgaacagcc

SEQ ID NO: 124525 - DNA, 441 bp, Zea Mays
tagcgctctagcttccagcatcgatgctcctcctgcaggttacaaaggtcctggactaggtagtggtgcttctgccttgtcagctctagagctcctatgtgcatttagggcagaagtatagggttttgttgctatagtgggttgatattcggctagctaggagttgttaagctggaattaagctagaccgatggggcataacacatagggtgcttaggattttggaacaccacccttgaccccatagaatcgactcgagatcattgacccattagacctgggttcacgtactaaactcacgattcatgtcccatagatgtatacccccttgtaacatattgttttcaagtgtcgacccacaacctatgaccctgttgcttgacccaattgactcaggaacattatgactatggtcatgacaagatttagtgctagcatgtg

SEQ ID NO: 124526 - DNA, 299 bp, Zea Mays
gacactagagcctgaatgacatcggttaaccgaactatgtacctctggcatcttctagttcttatgcctggtgcccactacccaaatacatgactgttgatcttcataaactagggatttatgatattttcaatgcattagatcaagtaaagtaagtgtctttctattgcttaggaacttaggatactatactgtctttctatcgcttttcttatgtgcagcctctgaacatattaagtccacctaatgtgagagttggagtcttattatactgttatgatatttggacagtagatatg

SEQ ID NO: 124527 - DNA, 481 bp, Zea Mays
aacaacacctccttcacacaccaagaatcgatcataaaggcattgttaaatttccacagttatatgccaactctcacaccaataattaagactgcttccactattgtttagcatggactttgtagagctcagagggagcatttctatgcaatttagggttcacaagctgctcctccagcgtcatcttaatgtccttcactgcctgcaccagtcttgctcctctgcaaactcctgccatgaagagagacaaaggcgagaccttggagggaggagcaggttgcgtacaagaaagatggtagattttcgaattcaaagatgctcggaaaataaaagaaagttataattgtcaaatttggtattttactttctactcttttccctttcttgtaaggtcaaaaataaaacatccttatatttaccattcgctttcggttagtttctctaataacgtatcatttgtcttagcttttgtacatttcaa

SEQ ID NO: 124528 - DNA, 279 bp, Zea Mays
tcattatagagcccttgtgtggaagccgttgcaacaagggggtcgataccctaccacaccatcaagtccaacctccacttgtaagtcactctactcagttggtccaccctattggtgttaggggcatgttgcttataccatcactcctccaagtggcgcaaccacaaaagttccaccctcacctaccaaagacatacgttgggatcatggggctataaatcccactaagttcctccaaatctacaccacagatattctcatcattgatggagacaaaag

SEQ ID NO: 124529 - DNA, 330 bp, Zea Mays
aagaatgggacctgatgggggtgcagccatggggaagggctcacctacaccttgctgtcgcagaggagaggaggctgcagggaggaagacggggagaggcgacgcccatagagcaatcctgctgccgagcgccatggagttatgctgctgctcctgcgaaggctccttgaagaagacagcaggggcgccaatcctcaccatggagagttcatgctcgatttctagggatgaagggggaggcaccatggtgaattgttgttgtgccatggagcaaggaggagagatggcatggggaaaaagtggagttggctggtggcggctaggggggta

SEQ ID NO: 124530 - DNA, 511 bp, Zea Mays
gctcctatcacgcgtccgacaggagcacgcacgtacccgattgacgtggaggcaaggtaggcatcattaccccacgccagccatggtgagggatgtctccacacacacacacacatctcggataatgcaaccgtacgcaagtgggatgatggagagtctagcaactagacgaggcgtcgccacgtacaaccctcagtgtcctccgactctgcccatgggtcccaccatgcattgctacagggaacctgagcactggagtcgctataatgacctacgtatcgagtagatgaagcgatccaccttaccgggtgtacgaccacgcacgaaccagaagacgatgccaggagaactatgtcagcacgactatcatagaaaataggtcatgccctccttcgaatgacaagtccccatgtaagaacctccccttgagctataaaagggaatgggtcaagcaactaagggcattcgggtaggagcattcgacctgagttctccaccccctcattctcac

SEQ ID NO: 124531 - DNA, 772 bp, Zea Mays
gtgattgctatagtaagattgaagctggatagtagagcaacaactttcttaaagatggattaggaagtcactacatgaaaaatcaagattcaagccctacaagaaggtttgtcagactaactgatagagctttgcgatggtacagtaaccaaaagatcagtagattcagtgagctggccgccggtgaccctctgccgtgattaacgccgatcgtcgcaattcgtgcgtttggtctgtggattgagttcgccggtgaaaagatctcgtcacggatgggttcaagttactgtggccacgctgtctctcagttcctcgcgctggcgacgtggccttacggacatcaccggaatccacgatattcaccgcggttgcgccacacctccagcctttaaccgcaccgccgtgactcacgttagccatccgatcatcgccggtgagtctgccacggtattctccacgaatcaactgcgccagtacccttctccctctccggccgccagcgcgtcttcgcgaaattgaacaccaccaccttgcactcctataaattgatggcctggcctattgcaccatactatcacgaagccagagcacccattaccgccttcaattagccaccatagccggtgaatttccttcttcccccaattctgtttccgccgccgtggtagaaccctcaccgtggtcagtgaaccccaggtctgttcatgctccctgctgtcttgtttcaacatccgtggatcctcctgatgctcctcgacccggccaattggac

SEQ ID NO: 124532 - DNA, 287 bp, Zea Mays
ttccccacgtgaaccggatcgcgctgaccggatcctccatgatcgcgcgactccgtcaccaactgaagtcgttgcggcccctccgcctcccaagccgcgagctcgaagataaaacgttttcccgtgactagaggtccggccgctacaagtcctcgccctctctatagtctcttcgtccctcgccgtttatccgcttcccatccctgctacctcctcggcgcaaacctctctcctccctctagccactggttctcgaccaaattgtgggcacttgaccgcctcatccg

SEQ ID NO: 124533 - DNA, 367 bp, Zea Mays
cttttctctctgcttatattgatggttgaatgaatcataaagcactaggatttatactaagatcatgatggtgatgcaatgtaattgaatatttatttatctattcatgttttatgtcacaagcacaagtatattatgaatactatgccactttggccattcttgtttgcttgctttgttaatggcaggatttccttcaaagcagatagttctctatacgattttgccatgacatgtcgtatggtatatatgggaatgttacaaacgtcatgatctttctactgtcaattacattgtcgatttttgaataataattatgtttttatgttctgtgtaatggtgcactcatatatggaacccctcctag

SEQ ID NO: 124534 - DNA, 1347 bp, Zea Mays
cgagaatggggtgcctaaagaaacccaaagaaactccttaaaacgtcccaccgactaagtctctgccaagtaaccccacgaggtggagcgaacaaccaagtctcgcccaagcaaccccacgaggcggagcagacgaccaaggctccgccgagcaaccccgaggcagagcggacgaccaaccctctgccgagcaaccccacgaggcggagcgaacaatcaattctctgccgagaaacctcgtgaggcggagcggacgaccaaccctctaccgagtaaccccacgaggtggggcgaacgaccaggtcccatgttaagctaatcggtgaaagggaaaggccgacccattgctgttgacccgcgttagcttgacaagacgtgtcaccaccaaaccacgtctgggccatgagtacggtgccgaaaactccctgtcaaacacaacgttatgtcatcacctacagtcttaggcgagcccccactgacgtatggggccagtcaaccacagccataggcacctcaacgtcagagtctgtaacaccgtaaatcttgtcttcggggatttagagaggaaaaaaatataaaatgcgagaattgataaacaataataataatcatatgacttgacttactatttgaataaactataaagttagaactgcttccaaaaaatccaagttaaagtgattctttatattaaacattgctttaaaaaatgaaatctttaatcaatgtttatttggatttaactcctaactttaagattatttgtgtgttgcataattaaaacatttacctaaataaaacaaggaataagtagtaaaaaatatattcataaatatatattgcatatcatgttgggattaattgtttgtttcatttatatttgaagtgctaaacttgaacaagaattcaaatttgagttcaaagtgaaaatgaaaatagaaaaaaaagaaatacctgcgcttgggccaattttctcctcggcccaggattcctccgcgtcggcccacacctcgttctccccgtgcggcccatctcccccggcgtgcgcactccctggccggtggggccctaacgtcagccaccctatgcgtatcaggcacccattcagtgtggacaaccgggtgagcgccagcccacattccttcaaccgctgccatgaggggcccacaatccatcctcactcacccttgctcccagcatggccgtggctatgactgtgggtcctagctgatagtgttatcttcttccccgtgacgatctctaaccaaatgtgcgacttccgcaggcgcctcagccaaactcggcccggattcctcgcagtgaaccaacaacattcactcggacttt

SEQ ID NO: 124535 - DNA, 540 bp, Zea Mays
ggggtccgaaccctatctaatggcttcgggctgctttacttcggaggtccgggtcgtgagcacaggggtcctgtgtcttctgggcccgatgtcgttgtctccgagaacgccactttaactgcccacaagatacccctgaggctgttctccgtgcggctaaggatagccgcacaggcatcgcgccttcataccgtagtaaggggtacctctaatccagggtactgacaggcgccgacctccttttccatacggctgatcagccaaccttgacttttgagttctcaatttctgatgaaacacaaacgaacacacactcatcacgttctttgcaatccttctccctcactatctctcatttttttgaaggaaaggcatgcttctgtgttggctacatgctactcatgtcaattcgagtagctagctctaggtcctgcaagctactcgcgtcaattcaagtagctagctctaggtcctgcaagctactcacatcaattcgagtagggagacactaccacctacgctgcgctgctacaatactac

SEQ ID NO: 124536 - DNA, 557 bp, Zea Mays
gcttctcgcaaatgttgcttgtgctcgtcgtcattattgtcgtagagctccgactaaagcctttgcctacactggcgtgcattaagcaaatagcctgaccatgctgtcggtacgtgatgtcatcatccttctcaagttctagtggcaatccggccgcgatgacgctaatggaaactatttcaggaactggctcattgtcctcgaaggtcactccatctgttgcgctgacaccagccgtgggttcctcgaggaggtgaaataacaagtgaggggagtcgttatagtttttgggctcgcatatcaaggtgggtgttgggactaagaacagtgggcccaagcacttgggagcagagtgataggtggaaaatacgtggcacgataaaacggatgactgggagcgcaaatgtcttgtcaaacgtgtctcgttcagctacaggacatgggtatttatagggcgactaggaagttggtggcctaagtacgtttgtacccctggttacctgctacattccgtaaatatgttgcacaactgggtaattacagggcgagacaccttc

SEQ ID NO: 124537 - DNA, 984 bp, Zea Mays
cgagctccgacgagctcttagatcggccagatggggcaacgactggcgccgaacgttggccgaacccgtattcacgcccccaactaatgtttcccctaagttaattgcatgaataactacccaattgcccatggccacggtgaccgtgcgaatgattcaaagaacaatgcgttcacggcgaacggtggcagtctaattcaattgggtgggtcggtgagtatcaaggacacatgaggatgttagaacaagactaaagacaacaggatcggacctgaggagagcttcccacggtgagcttgggttcgcggtgttcttcaaccgttttgggggaaatcccaaattgggaaactgtgggagacgatcggagctgagagtgggtttactgactacacaattccctagcggaacatgctgaggctccaatttataggctgctcaagcggtggtgatcaatttgactgaatcgcgctggcgaccagaggggaaaagggctctagcgcatgacacaggtggcctttcaccgttgccggtgctccggtgatcaccggacatgcaccgcatgattcaccgtgacgagagccagcgctaaggcacgtggtgcgcaacggcgatagcacgacggcggtgagggttatctgagcgaccgacgagctggggggaagtacgtcatgcttagccgcaaccgagctcgagtggatcagacgccgagatctttactaggctgtgcttatccatggccacggcgcacgaatcacggcaagcaatcgatcaacggcgacgggccaccggcgacgagatctttttggcgctggcggtctgatcaccaatagagcactgtaccatggcgagtgcttcttcagtaagcctgacagccatagtttagggccagatttcttccaaatttctgtggcaacacatccagatctctgcagcaatattgtagtgctatgaaccaactacaaccttgctatattgtgctcccac

SEQ ID NO: 124538 - DNA, 450 bp, Zea Mays
ccgaattctaatgggggagggacggcacaagttgtcacctctatgggaaggaccattcatagtagcagaagtcactcggccgggatcatatcgtctcactcagatggatagcacggaaattgggaactcatggaacatagaacacctcaggaagttttacccctagctgtattccaaaagctattggggcgacaatgtactctgtaaactgggaaatatatcatcaatagaaaggcttcaagagcgctcaaattattcattgtcgacctgcattcttacttaactcggggtgaccactatgccctatccacggagtaatcgacttaagtcagcaatgacttaagacggtgcaacatgctcacgcttacttaactcggggtgatcactatgctctgctaacggagcaatcggcttaagtcagcgatgacttaagacggtgcaacatgctcg

SEQ ID NO: 124539 - DNA, 433 bp, Zea Mays
gttgttggagctttggccgctgcctccgtccggagttgggtacgcgaatagcgagttgacgaagccatgcatcgttccacttccttcctgattgtcctacggagcgagaatgcaatttgtcagaaatcgtatatattaactactgaactgtcggcgatagctatagagttagaatacaaacctgtgctccaggggcaggtagctgtgccggcggtgtggtaaactgaggctgttgcggcacaagtccctgttgaatacaagaataatacatattcatgagtgcagtgcggcacaagtcgtcgtttttactgtgtaactagataatggacatagaatttcttaccggaggtggaggagggcccatagggacgaacgtccattgcggcggaggcggaggggccacgtagggaatgccctgctgctgagctagtaa

SEQ ID NO: 124540 - DNA, 399 bp, Zea Mays
ggccggcagagccgcgtcgggaccggcgcccggcgggggaggagggagaggcaggggcgtccatgctttggcattaacatctcaaataaaacacgttgattccataaaaagatagtgtattatataagatttaacaagaaaatttaatgacaatatccaaaaatgatctttcatagatcatcatagtttagatattcatatcaataagtataaaataaacataagcacaactgtgtatttaatctaatttttcaataatgcggtatatttttaggaatgttaaatcaatatgtgttccttcgtatgtcaacagatcaatcaataagttctacgtaaagtcgcaccatcctgaaaaaatgttataagcaatattattctcaactatgaagtacacttatg

SEQ ID NO: 124541 - DNA, 323 bp, Zea Mays
gcggcgtattccgttgcgccgtcacctgcggaccgtagaagcctgaaattggagttgggggcagcgggcgcaacgcggtgaaccaatcggtggccggtgagggtgaggaggtggcctcgtatttgcggaatcgctcgccggcgccgcgattcggcacatcaacgtgaactagtcttcttgcgccgccgttctaggtatgagtaacccccattgcatcttgttcattcccgcaccatagatcgtcatcagatggggggattggggtcgagatctcgtgtctccggtgatggtccgccgtctgtgcgggcgctgccgtgcccagg

SEQ ID NO: 124542 - DNA, 691 bp, Zea Mays
cgaggtttcgctcgtgcagttacaacaaggattgcacggattttgctgcgaatggtgcacggccggaggatattacgatacaatcgcaaggtgaagtgccttctacacttggcaatttcgcacccttaacggttgtttgttgcgttttgatctccacaaatccggtaatatagcggaatgacgcccttttgctatcagtagcatagcagagcaggaatttgtttgtgcatgtttggaattttgtctgcattgatgatgtgggtagcgccgaatccttctgacgtttacagtttgatacggcgtcttggtttatctgaaggataaggtggattggactctcttgacggtaacaatccggtcaattagaagtaacttcacatgaatgactttatattttagtctcactctcacatcaacttacctttaatttgacgtggattggactgacacatcaccaaccgggagaagaagactagtgagacttagtctttttttttccttccttttttattctgagccaacaatatagcctggaaaaagcacattgattcagatgagacgttataagatctggtattatggaaatttccttgacgtacgagttttacaggacgatcttcgttgttaaaggttgtctcttatcactatcagctatcaaaggtgtgcggaaagtggtgatgataacagaggg

SEQ ID NO: 124543 - DNA, 700 bp, Zea Mays
acatcccgcagtccttgacggcgaacgacgccaggccgaaatccggcgaacttaaactggccaaactacgcaacggctagccctcctctttgttggacaccaaattcaaccctacgcgactatttccccccactttattgctggattcgagctctacatcaccctgcccacggtgacagcacgacgaatggactgaccgagatgttcccgatgatccaatggattctagctcaattggatgcgtcagagagtatcaagagcacccaagcatactgaaacgaggaaccagaggacatgaacggacctaaaacacgttggccacggcgaggtcacaaggtgcggtgtttcggaccaatttgggggaaatccgaaattggggagctctggtgagcaattggaggcacgacttggtggattgggtgcttgactaccttacgaacccgacgacacactcaatttataggctccgggggcggtggccagtgaatttggagttggcgcggtggcggcggagagaagagttgcactggcgcaaggattggcggctttcaacgtggcgggctcactggggatcaccggacatgcataatgcgagtgactgcgacgtggtgaatgccgaggcacgtggcgcaagaccgcgaggtggctaactccggcgaacctatccaaagcggccgtgacacgctcgggtacggtggcc

SEQ ID NO: 124544 - DNA, 424 bp, Zea Mays
cgaccacagtgccaaaatttgatgaaggagcatcttccaatgctaaagcggaacaagctgctcctaccgctcagagcgccgaagaatcggcagcagtaccaaaggtttctacaaacgaatcggccagagtgccgatgcaaactgccaaagctgaagaaaagatagccgagaagctagaccaagaggaaaagataggaccaccagaggcagaattgccgaaggtggcaaaaactcccgcaattacccccaagaggagaatggcaagcgtgctggacgctgtcatggagacgacaaggtcactaactcctacccctatgaagaaagttgccgaagctgttacggttcgtgctgaaaccgaagctgggccctcagtgcccgcgaaggcagagcctgccgcaactgaacagagggctagagaagaatt

SEQ ID NO: 124545 - DNA, 687 bp, Zea Mays
agactttccacgtgactcttgttgaatttttctctctgtacgcattgcttgatcaacgagatcttgcaaggtaccgtatgggaacatctcgacaaatccagaaatctcttcattgagtctgcctaaaaatcttgccatggttgactcgggatcttctctgattccagttcgcactaacaacaactccatctccttaaaatattcatcaacggatttctttccttgcttcaataattgcaatcgatttcgaagatcacgttgatagctggaaggaacaaattgcctcttcatcactcgcttcatctactcccatgtattaatatgtcttagtcccaatctaagttgatgttcttgcagttgattccaccaagtaagagcataaccagaaaactcgactgaggccaagttcactcggtgttgatctgaaaaattgtgaactctgaaaatttgatcacattgctcagcccaattaagatatccatctgcactttctttcctagtaaatttaggaatatccaacttgactcagccgatatgatctggatcatttctatgacgacgcccatgataatggtctctattttcaaaatcagtatgtcagtgatgatgtcgccgaccaaacattccatcatttgcaaagggattctcatcagatccttcatcatgatcacggtcttcatactcctc

SEQ ID NO: 124546 - DNA, 591 bp, Zea Mays
ttttttattcacctgcgtgttttattgatgtgtgtctgagagaacagaaacttctagattgttctttgtatttttcttgtaacatatcaataaattgaatatattttccatcgcgatccagacacagaacgcaaagttggatcacggcttagacatgtcgcgcgcggcaggtccgtatatactacgattcccttggccttgcgcagacatgagagtatatgacataaggtggcctcaccctccctgcacgcccagtcggtttggatgaaaaaaaaagaattctacgcacatgccgcgtctcgctctacactgctactaatgctaccactttactgatgttgtaatatccagtgagccactagggacattttgcaacaactgttctagtgatagcaataacatctttctcttgcaacgaaagtcatgattattgcaacgacaaataaagtggcaaaaatgtgcatatattgcaactacttttaaaggctgtggcaataactaacacgtaatgctacaactttactgatgttgtaatatctggtgagccactagggacattttgcaacaactattctagtggtagcaataaca

SEQ ID NO: 124547 - DNA, 671 bp, Zea Mays
tcgctagcggtgaaagtagtggagttccctctcttgctttgtctgctctcattggcctgcaagaactgtccctggccaattttgatcaggcttttgaggatatggttccagaggatttgttatcggagccagtggatcatggtgtgacggaagtttgtgctgatgtgccagatgctgggttgaggtcatcccgtgcctcgtcgaccttggagcgcgatctcgagggtcgggagactgaattggatcgttctggtcccatggaagtaactgagggcccctcaacattagaagtggctaccgcagagaacctggacccccagggtggtgttgacacatgcccagcccccgaggatgttgccggggatgacttggttcgggtgggaagtgtaagccactgcctagcccccgagggtgctgccggggatgatccggctcaagtgggcagtgcagactatgacccagcccccgagggtgcccgagcggggtctccctcctgtacttccatggacgttcatgcgggatcgccttctcactccggctatatggtggtggctcaaaccttggaccaggaggtcgctttagagggcagtgtccccactgaccgagtgttgggctctgttgatggcgccgagttgattcctgctgattcgttgcaagctgtttcgggtagt

SEQ ID NO: 124548 - DNA, 410 bp, Zea Mays
ccaaggtccgaggcactccgtggacaggatctccccgacttcgatccgcggtgagcaccttcagtagtaataccccgtcattaccgctacctgttgctactgtttaatcggagtttagacgtgagggtcggaggttaggtagttccggccatggcgctgccgcggagcgtggcctgccactggggataatctctggtgggaggaagacgtagcgtacgccgttggatttagtacaggtggtctagattagatcatagataccccgctgcgtgattcaatctagggcgctggatttgattgggatggttccgatcggatcgcgtttcattaaatcctaaccgcaggcctagctacgtatgtccctgattaaaacatagggtacctgttcggggcggttgatcctggacgtt

SEQ ID NO: 124549 - DNA, 527 bp, Zea Mays
taccctggtcagctcgtcagaaccttcttctccccgtgcggtctccgtaacaaccctgatcgagcgccgcgggccacaacaaaccatcgccacacatcttggggatcccacagttggatagccaactctggcttcccaaccgattccatgctaggtatataacccatggccgatgtgccccatggccatgcattcgggtaggagagcaactcgacgccgcggtcgtcgttcatcacctgccgccgcgaagaaacatttgctacatcggtgattggtggccagagagagaacgtggggcaccacaagagtgtaacacacccgtgcatggactcctcgtgtgtcgtggctttatggcatggccggaatttctcactacgatgtgtcaccgcagcgaagacacgtcgtgtcgtggccaggctgccttacgcctctatctcaggtgagtcccacccctgtcttattgcactactttcctattcttgtggcacctatcgggagcggagcagagcgtgggaggcactagattg

SEQ ID NO: 124550 - DNA, 651 bp, Zea Mays
tggagatgttcttctctgcttcctattttgattgtacagtgtagccatcaatgttataaaaatgatgaattttaatttgtctgaggccaagtgctttaatcggcactaattgtatggtttaattgataacaactgttgtaatgatcatacaaattattgctcgcttatttcgctgtaagggtcaggctgaccacatccaacttctaaacacgatctcgatttggcagttgctggtagttgggctttgaggctgattgtatgatgagtggcaaacagtttatctagatcgggctggtttgatgtatggatacaaacatggtgcgttagaacagcagaacctaacagcccaaacctgggctagttgaacgggccaagccgggtacaggtggcaaacacgctctaaccacccctcctgggcctgggcttcctctcctctccctaggtccctacctctccaatcttctccttccttgaccccagcggaggaggagccaccgagccagggcgtgcgagtgcgaactgcgaacgcagcagcagcagctcacgcgcgcacggcacaccagtgagtgacaccacctctcgcctcagcgccggcccccctataaataatggcgccactctcccctacccccgcctccgcctctgctcccg

SEQ ID NO: 124551 - DNA, 311 bp, Zea Mays
gaaactcagtatctgaatgatcgaaggcgcaggggtggagtagtccttttctcaagacaaaataaaagagatggagctaagcgagaagcaactgacagaacagtccatccgatgttacatctaacacctccaggccagccaccaacgctggctgcagcgacaatggtagcaaaccaaccacaacaaacttcattccctactgtagcaacttccccaatctcttatccaactgttctactgccttctgttttgcctcccatccaagcacacaaaccagtcctgctccacaccaaccaaccctttcagttcat

SEQ ID NO: 124552 - DNA, 646 bp, Zea Mays
gttaactaaccgttagactcctacaattctactctaccaattgtgagaagtgtatctcgatgaacatataatgcgccttgacccgattcaaggatatagaggaagcgatgactacttacaacatgtcatcacctcatcacatccattcatcgcatatatgcgcactaattcatttcttgcgacatacgcactcacgatcaatccttactacacaaaacatacatacttattttttatgcgcagaacataacacttcttgagataaaatgtcattataaacacattacacataattgcattacaaacctacttgtccactcgaaaacatctattagaagtcatgaacacaaccgtacactatatgcgatgtgaaattcaatgaacgtacaatgtgtattgactcgacttataattatagaggaaatgatgactaccttggcatgtcaccacctctctatttaatccgagacaatttctaccatcgactaagagttctaagtattaaacacattattacttttcacacacaaataaacctcaacttaacaccagtgacaccgatggatttttactaaactcatcatgcgcacaacccagtaaaccacacatgcatgcgtagaactaatacacccttcgcataacgact

SEQ ID NO: 124553 - DNA, 743 bp, Zea Mays
tgtttggactgtaaactcatgtgtggatttgattttttttgattgatttgtatatgtttgcagcgtgatggtagtggttgtgacttctggtactaggaagatgactatgagcaatatttgatggagaatggccatgttctacataatcatctaccaatattcagccaagcagagaagatgattactggtgaagctgatgttttaggaagttgtggaatgaagagggaagatagaaaagcagatggcctgatggttcaaaagctagatttagtagtagggttacttagttaagattgttgtgccactaaaaataatatcagtcttatgtgtgtgcatttttctgattaatctatatgtaaggattgtttgatgtgagttatggtggtaatgaatgaaaagagtactcagattcattaagcatttgtaaacctcatccccagttcacagaagcattattgttgccatttaagttcatataggcaacatacaaaagcattcatgtttagctagcatttttgttgccctctgtagataacacacacaaaagactgatcaagagcatcagtgcatcatacaaaaacattcatgctcaactattatagttaaaggcattcatcggccttgatcaaactgcatacatctacttcaattcttattattcttggtccttgtttctcccttatttgttggtggttttgcaatcctctttcttgttgtgttccttccttctttggttgctgatg

SEQ ID NO: 124554 - DNA, 432 bp, Zea Mays
cgctctctaatgtctctacttccgacaacgccatcacagacatgatcaccatgaaagcggacgacacagagtggtggattacagtggtctacgggccccaatccgatgcagacaagctcttatttcttcaggaatgagggcccttgcttccaaggggcacgagaggtggctagtccttaaggattttaatctcatttaccaggctttagacaagaacaatctaaacctaaataggtgcctcatgggttcattcaaatccgtcatagatgacttccaccataaggaacttcgtctgaatggtcgtcaattcacctggagcaatgggcaggctaaaccaaccatgacaagaattgacagattcttctacatggccgattaggagcttctcttcccaacctgctacatccactccataccctccctcatgtcgga

SEQ ID NO: 124555 - DNA, 446 bp, Zea Mays
ggaatcagatgggccagattcgacgaagagcggcgcctggcgactgcaatcgacggcgagcaataccccagtcaccgccgaccgattgcgcccacgaacggtttctccgtgacccgcacgatcgcccggtgtcccgattggggtccaattcgagctgtaagtggatgcccgcggtggcggcgaggaacacgaaggcggcgggggttctggggagcgatactctcgcgagaaggtagcagggagggaaacacggttcatgagtcgcgcatgaggaaccgtggagaacccaggggaaggtcttatccccacgacgtggtagactcggtcgagctccagaatttccgcgcgcaagtggttgaagtcccacgcccgagttcgtgcggagaagaaagcgctgactgcgcgggaccacaagtcagcggaagtactggcgtgcgtagcttggc

SEQ ID NO: 124556 - DNA, 330 bp, Zea Mays
cgattgatggccttctaatgccgaagcgtggccatataggacgttgaatttacaccctcacatcctccctctgatccaggtcattcttcacgtaaaaccactgcttcatccaagagcccggccacttcttctgaaatgtaggcacatgataatttgcctcggaatggggcacaaagctgtaacagccgaagttgttatgatattgttctttttcagtcacctttgtctggtaagataactcgtgaatattgcagaagcacttagcatccggctctagtccttgactcctcatgacccatataaaaccccccactttgataagagcttcgg

SEQ ID NO: 124557 - DNA, 323 bp, Zea Mays
cagaatcccaagatatttgcaagggaaattatataactggcaaggtaaagaagcctgcacaatagccagatcttcctccccacactgaattgggaagacattaattttctgaatgttggtcttcagaccagaggcttcactaaaaagatgcagaatccccttaattgccccaatgtcaaccacatccggtcgaagtagacgcccaagttcaaaatcacagtcctgctgtttcttctgccctcgctgtgtcggaccggccgctatcacctttggtccttcagcaggatgtcctttctcaagacccaattagtagtaggtctgtg

SEQ ID NO: 124558 - DNA, 1211 bp, Zea Mays
cataaataaactttatattatccaaattggcactccttaaattcacaataggatttgagcacaaattctgcacagtgtttggaagtaaatttgaattcaaatttggatttgcaagtagaaaaaaaagaataaaacaaacctagcctaagtgggccgaccgcgacccttctggcccaaccggccttctcagccgtgcggccgaccaagcctccacgagcgcttgtcgcagctggacattggggcccacgtgtcactggctcgtgctcgcttacacatgggccccgcaggtcagggccgtcaacaaccttccgttcgaggcgcggctcgtacggtcctgctcgaatcttcctccgcgatgtgcgccgatgaccgagaccaaccaggggattaaaaccccaatcgaccccgccgcaaccctattctctaacaccttagcacctcaccgccctcttcactggtccgtgcgcgccgtgtgctcgacaccataaggagagagagagtgaaattggggcgccgtgtggccaaccgggtgcctgcgtcgctggtgattcggatccgggtcggtgggcatcgcgggagcttggtggtgctgctcgcgggcgtgtcgaggaggatcgaacgtcggggcacgggaattcgtcgccggagtcccaggatccgccgcgggccgcactgcttgtggtcgggtgctctccacgccacgacaatcggtgagacctccttctttgcgcttgcaatcgccagtacttcgtgtattcgttatcggggtaggaaatagcgcagcgggaccgtggatggcttggctccggcgagtgcgccaccgtgctctgtgggttgcgccgccgtctcgggttaaggtgagagagaggtgcgatggccgtcggatgtggagcggacggtcccgattagatcaggcttacctcttcgtcccagtgaaccctggccgtccatccgcgaacgagcggatacagttcaatgtcagttatttaaaatccgagccgttgatgcgagatcctgcggctgtgtgagcgtaccgattcggtattaagtagatctaatcctggccactgaagtctaatccaacggccagaacggcccgataccccttcgcgggtactctttacaaaagaaaccttatgtttttaggatttagaacccgccgtccctagcgactgtgctctgtgtcttggtgttcttacgcccgagacccc

SEQ ID NO: 124559 - DNA, 373 bp, Zea Mays
catcaatgaattgtgaggaggtctatttaaataacagtggagcatgtacgcgtccaagtctaacgctttagcttcctacgcggcggcgaccggcagtcccactcccactcccagtccattcctcttcctctcccccactgcaacgcggtgagcggccgacagtcccagtctattcctcttccccactgcaacgcggcgagcggccctaaccctacgcttcctcttccaccgacgacgcgcgaacagagtggtcctcttccacgggcggccagtccacttctcttccacggacgacgggcggccacgcggttcagacttcagcgcggccgatcccccttcctcttccacgcggttcgattcctctcccccttcc

SEQ ID NO: 124560 - DNA, 1007 bp, Zea Mays
tgcgttgcagttgttgctggatagagctaccaggctggatatctggatctatcataagttttatgactaggcccatgaactttagcaaaaagctgcaactttgctcgttttcaatatccttattagcttaagatggtagatgatagaggggctggcttgttgttccttgtcagggaaacatcattagggtttctatccctaccttacatttcaagctccactctgcgaatagtgcagaacattgttttgtctgtctatatagctggtctagtgacctcagccatactctttgtactgggtgtagtcagcactagtactgtgactggagtctcagaccttgattatttaagatgcctccatggttccattcaagtattttatgaaaagttccatgtcatggcatttcagtaacgatgtgatagtattgaattccttgggtagatgagaaatggagtctgtttttttaagtagtcggactaagtttgtccttgtatgatgcagtattagaaacaagttacaattaatgatagacatatatgaaataaccattgtcaatgacttctatgtcctgttagtgagaagttcatttttgaccatccaactattgccggagtttgtttttggccatgcaactctagactgaatttttttggtaactaaactatcaatacccgacaaatttgaccatctagttggtttcaaaaatggttttttgttttctaaaaaattaaatactggcagaaaattttagctgtatttaattatttatacaaactagttctagcaatgtgggcatgtggcagtaataaaagaaacaggtttacaggcggttgaatgtcagaacaatagaacaaaactgctgagagcaatttagactccggtgtcgaaacaagtatgtgcaggttcaagttacagagctatgcaaaactctctgacattagtttcttttacccgtcttcatgtaaatctgtcgtatgtttctttacatagattaattccaaatggat

SEQ ID NO: 124561 - DNA, 473 bp, Zea Mays
agccgcagttcgcgggttctgctcgggcggattccagcgtaaaacgtgagctaaaacatcgtaaatgagtacgaaatttagcgtaaatcatatatctgttttgtaacagcaaacgaagcccaaaattacggcgtaaaaatcgcgtgcacccaatcgtgcgcgggttctggctagggcagattctggcgtaaaacgtgagctaaaacatcgtaaatgaatacgaaatttagcgtaaatcctatattagctaaaacaacgtagattgatcacgttcgatcgtgcacggattttggcttggtcaaattttagcgtaaaacgtgaaccaaacagcgtaaatgggtacaaattttatcgtacatcatcaatctatttcgtaacaacgaatgtggcctaaattacgacgtcaaaatcgtgctccgatcgtgctcgggttctaggtcaggtggatttaagcgtaagacgtgatccgaaac

SEQ ID NO: 124562 - DNA, 1231 bp, Zea Mays
tagaccttccccctcgtcgtgcgcttcacccagtcaacagcttgccgtgagctcagcggactccgtcgattccgccgtggatctcggccactcgcgttccctccacgttcagcttctcggccgttgatcagtcatccgcgctggccacgtttctcccgcccttcttccccaaatccgcgccgagctcaactaccgtgcgcaactgattctgcgatgtccgggcgccttcctctcaacggatcgcgcgcgtatggcgccgtggaaatcgtgtgtcgcttcttttgctcgcagactccaggaaagatttaaagcagtcgttgcgccctctgtttctttcttcggccacgagacccggctggcgcagccgctccgccgcgaagcttgcggacgcggattgactaggccaccaccccgggctgattataaatggagccgtgcacctctttcttccttctcctagtccgcagccaccctcaacccctagaacggcggatacagtatcgtgggcgtgatagtcgcgggtgtggatgcggcgtattccgttgcgccgtcacctgcggaccgtagaagcctgaaattggagttgggggcagcgggcgcaacacggtgaaccaatcggtggccggtgagggtgaggaggcgacctcgtatttgcagaatcgctcgccggcgccgtgattcggcacatcaacgtgaactagtcttcttgcgccgccgttctaggtatgagtaacccccattgcatcttgttcattcccgcaccgtagatcgtcatcagatggggggattggggtcgggatctcgtgtctccggtgatggtccgccgtctgtgcgggcgccgccgtgcccaggcatgcgggggaggtgatggagcatggggccatggatctccaatccgacggccgtaatagcgtaccaattcgtcagtagatctggccgttggatctcgatcgtacgggtggattcagggtgcgtgtgtcgattcagcagagctcgatctggatcgttggatttgtgctggtgggctcagatttgagaatggcgcagagctacctccgaccgtagatttcggatccaaggggggtccaattgcgtaccagttcaggctttgcgcggtctaatccggaccaccgattactgatcgtgcggtcgtgatcccgcgataccccttcgcccagacctttttgcatatgagtccctagattatttcagaatgaacccgccatcctcg

SEQ ID NO: 124563 - DNA, 724 bp, Zea Mays
accgacaaacattgtagaacataagtgaatgtattaccatgtagtaggagtgaaatttattacccgcacagccatcgtttatttccccctcgcgagtgaggaatctccaagttcgtcttgcttcaaattaaaccaaatcaatcaaggatcgcacacaccctgcccctaaaacccatgaagcaagcacgacagcctgaaacagggagcaactttcagagttgtacaagagactaaaatataaatacgttgattgtaaaattcatcaaacgcgttacatttaaattaacatgtaactcatagttgtattttctagggcaaacggaaccattgttacaagtgcaagccattccgcaacattccgagcatatcagttttagtggaccattcaacatcagggaactaaaataggttttaccctgcccccctcgacaactgggttcatcgtacacataattccaactgtacaatagctggatcagcccaaggaaaaccatacaccgaaaaactgatgggtgacctgggttcgatccccggcaacaccgctttttattttctattttctgttcttttccagcctacttaggaggtcactgagcctaaatgtctgatattctctcacaaaagaagatgctaaagaaccttttgtccacttcgattttccaactggaaacagtcggttccctccaaaccgcagtcagtttcctatctaactattgaagccaaa

SEQ ID NO: 124564 - DNA, 397 bp, Zea Mays
gatggattggcatgttcttgcacagaaatccaagttctaggcgttgcaagtctggctgtcaagcactctgaattgggtttccaatggtacagtacactgaaatatcccaatccactgaacctcgccgccgacgagccgtgcactcggattctagcccgccgcggtgtttcgtgctcgacgcagttggataacggcaagggggtaagaaatatcaccccgtggatgaacttgagccactattcactccggccaccgtgtccgcttagctcacgaccgcttcagaaccgtcctcgccagagttagccaccttgcgaccttgcgccacgtgccctggcatcttaccacatcgcagtagctcgcgttaggcatatccggtgatcgccggtgagcttgccac

SEQ ID NO: 124565 - DNA, 673 bp, Zea Mays
cgcaggacgtaacccttagcctgatccaaaagtttttgagtcaaaactattttcttaaaaaaaattcttgctctcatcccttcatttcaaaaatgctttccccctttccttctctcagaagtcagatggaggttcgttgccaaaccagcttttgctagaatgaagatggtttccctaagttgttgagagcatgcacagttcgcctcggaatcaggagccagccagagtatgatggtcgtgaattcgtcgagcatggcacagagaagtgtgtcgtgactgtatacattggatccagtccgcaccatgtggaatggagtgtcactgctgcggggcacagattcagagacacctgccaagtcatcgcccgcaaggcattgagggccctgtgtcagatctatgaagaagaagtggccgacacaccgctcagattctttctgccctttcaaagaaaccgtcctgtttggatggctaggatgcgtgcattggaagggcagcagctgcttaaggacgaccccacagtcgtgtacctcactgcatacctgctcaccgtggatgtgcagtatgatttcttgactcggcaccaccgtcagatgattgcccgagcagaagatgcagagaagcgaaaccataagctccatgtggatctcaccacagctcaagcccgtgcaactgc

SEQ ID NO: 124566 - DNA, 592 bp, Zea Mays
caaggtagaagcagtatcaaaatggaagcaaccatccaacgtcagtgaagttcgtagctttctgggaatggcaggatattaccgccgctttatcaagggattctccagcatagcaatgactgagctcctcaagaaaaacaataagtttgtgtggaccccgaagtgtgaggaaagtttctagatcataaaagaaaagctcacgaccgcgcccgttttgacactaccggatatacaccaggatttcgtcgtcttctgtgatgcttcaaggcaaggcttagggtgtgtcctgatgcaaaatgagaaagttattgcttatgcatcacgcttactcaagccgcatgagtagaattatcccacccacgattttgaattggcagccatagtgcatgccctgaaaatatggaggcactaactaattgggaacaaatgccacatcttcaccgatcacaagactctgaagtatatcttcactcagccagatctcaacctccgttagagaagatggctggaactgatcaaagattatgaccttgagatccattatcaccccagaaaggccaacgtggtagcagacgtcgtcagccgaaaacct

SEQ ID NO: 124567 - DNA, 474 bp, Zea Mays
cttgctcctaaacatgccatgagaatggactatcccccctttgagtacagtagacttgtgtagcatttcactggagaagaagatgaaaccaaacacaagaatctagaacacgcatgctagtgaataaaaagaccaactctagcatgcaccagcagcacaccacaaagttcctcgctgttctgttatgaactctgatctgttgcatctatcatttggtttccccttgcatccctcgatgcttcttttgtttgtttgtatgttctcaaccccttctctttgtttcctgctccctctagttggtatgaagtatgaacatgtggcacctgctccctctagagaaaaaaaggttggcatcattgtcaacaatggctttgcttaacaagcaattatttctaataaactagcaagtgttgcaggcccttatatactttattatatcgtggcatttcaagtccatttcacttaccaaatccc

SEQ ID NO: 124568 - DNA, 434 bp, Zea Mays
ctgccagccatatcgatggttccttttgtagagcacccaccagtacatgtcttcctcatcaacttcttccatgccttgaattctttcaacctgtcccatttgttctttatttgtgtcttggttgccacaatatggaccatgtctttcaatcctttttcaacctcggcataaccaaccaagtcaaacaactgtttggatgattctctacttgttcggcaaatagtttacaaatttctcgagcgttctcagcattccaattaatttcagtcatctataacagcttacgagaaagaaaataaagggatcatatatatagaaatttaaagttgcagttaggcacaacacaggttgctgactaaatttaatgcagtgcagtgcttattactatttttgaggtggactgtcacctggaactggacatagaggtaagccaa

SEQ ID NO: 124569 - DNA, 556 bp, Zea Mays
gctttttattatgagttatcaggtcaaagtggcctcatccgaatgagatgacaatgcaatggcgaagtctctcatcatcaccctggagggccccgccttaacatggtgcatcaggcttcctccgttgtcgattgattcatgggcggcccttcggcacaaattcctcctcaacttccaagggtacagacagcaaacagatgccctcgcagagctatcactttgcagacagttagagagggaaagccttcatgactactacaagaaatttttgtcgcttaagtctcagttacgttagtggaagacagcaatgctattcattacgccatcaacggtctctgcacaggtcacatatatagtcactacaccaaggatccaccaccaactctccaagagttgtatcaattattcaagaagtatgaacgttctgaagacctccattaccgcaaggtcgaggcacaacgtaaaccaagggacccttcgcacccagggagctccaacacttggtcgcgaaagcagcaaccttgtcaaaacagccccaatacaaccctaaaacagc

SEQ ID NO: 124570 - DNA, 458 bp, Zea Mays
tgaatttatctatggcgaccaacacgtgagtgtatcctccctaagctttcttgaagggtccaatcatgtccagtccccagcacgcaaatggccatgttacgggtatggtctgcagttgctgtgctggtaaatgctgctgctttgataagaattggcaagcttcacacctctggactaactcggttgcatcaatatttgctgtcggccagtagaaaccatacctgaagaccttcccaaccagagtcctggatggtgcgtgtatcccgcactgtccggcgtggatctcatctagcagttgcttcccagtaaccgaaggaatgcacttcatgaggactcatgttgcgccccttctgtacagtgcatccccaatgatggtgtagtgggctgactgccttgcgatgcattctgatgcttctttatcatccggttcctcttcgttctttatatacttgatgata

SEQ ID NO: 124571 - DNA, 327 bp, Zea Mays
ggaggagctaaagagcacggtggccggcaacagaagggaaagacaaagggtaaagacaaagagaaagatcagcaagaaaggaggcagcgagctgggaggccatggcgccggctgatctcccaccaggctttaggttccatccaactgatgaggagcttgtgaactattacctcaagaggaaggtccatgggctcagcatcgagcttgacataatccctgaagtagacctctacaaatgtgagccttgggagctagcaggtaacctgaaatccaagttcattcagttgttcatcctgagatttcatcactccgaactgaatttttgag

SEQ ID NO: 124572 - DNA, 541 bp, Zea Mays
ggtatttttcgtgccatctagctttcgtgctgcagttgtcattttagttttcctgttttgtgagtgaaattgtttgtgagcttcggctttctactgtgatcatcaccaaaatcactgaggataataaaagcactgatcccacactcattggcttctacgaagccatggaaaagaccaacgtagagaaaatcaccaatgaaatgttagccggactatctggtgattcaagctacagtgaaagcttcgatgttgagagtgagaatgaagatgtcgaagatcggccgtggagaccaagccacgttgtttttgggaaatccacaattagacaagggcaaattgaagcgatgaaaggcaaatactttcatgatgtataatgagggctaggggaaaagacaccgttccctgccataaggtgatgaagtagtagtcttcaggagtttcatcaggttacccccgaagctcttattagagtgcgagttgttatatgggccatgaggatccaaggactggagctagatgcgagatgcttctgcaatattca

SEQ ID NO: 124573 - DNA, 722 bp, Zea Mays
tggccgttccacgacagatcaatggaagacgtgctttcttccccaacgacaatatcaggacggcggcaccatggctagaacagcagcaaaacatgccggtgaacagccaaccggcccatctgccgactattcctacacccaaaaagtgttacgcaaagcagaggaaaggatgagttcaccggagatgtccttaccagctatcgtgttgtcgtagcccctggccacgacgtggcgcggttccccaactccggcgagaaatcgctagttgcaccgcacaccacacgcgcttagcgagtcctcggacgccctcctggagtcatggtgaagttgtcgagcctgccatggagaccccgctgttggtgtacgcgcgcggcttcggttcccacacacagcggcaatcgtactccatcgtggaatccacgcgcctccctcgaccatccgcgctttcccgactgccacgagcacggtaagcaccgcccgcagcaactccttgatacatcctcgaggtcccaacaaccacgtggacgacatcacgcgcagcgccactgctctgctcgccggtgcccatggtgcaaggccttcaggtggcttggtcctcgccctgggttcactgaggtgaccctggcaacaaggtgggagaggtcgtgttgtataggcctgaggagaggccgaatcctaacaacttgccatcggatcctactaacttgctggtcgtgcggtgc

SEQ ID NO: 124574 - DNA, 520 bp, Zea Mays
taatacgaaatatttccagttagtggctaatggtaaacaccgtaaacagagaatctatagcctagaagatgataacgggtcaagtatagtggacaaggaggaacttaaaaaacacattactagctactataaaggcctatttggtaaaccaaaccaaacttctgttgaattggaggaatcgtttactcacgacatcccccaagtttcagatgcggagaatgaaattttaattgtgccgtttgttatggaagaagtccgaaaggcggtcttccaaatggagcataataaagcctcgggaccggactgatttcctgttgaattctatcaagtattctgggaagtaattaaaaatgatttaatggctctgtttgccgacttccataataactcccttccggtgtatagccttaacttcggagtcattgagttaattcctaagaaagagatcgctatgaaaatccaggattatagacctatttgtttgcttaatgttagttttaagattcttactaaagtgctc

SEQ ID NO: 124575 - DNA, 554 bp, Zea Mays
ccgtcgcgcccgtaattgctcgccgtcgcacttctggacggcggatctgcacggtgcgagggcagctgtctccgtcgcctggtttctggtgagtcacctcatatccattttgcctcatctcagtgatcaagtagcataaatcagggcgtgtgctggtgcggggtgacgtcggggcgggttgccggagtttcgccgccctagcctacgcacagtcgtgctcagtcgttgtcgggatcgtgtgaggagggagcgcgtgcgccgtcagatcttgatggacggcgtggattaagaatagaataccggttcggcttggacttgtcccggccgttggattgttgacgtatgggcgagatcggatcgtgcgtataatagatcgcaacccttgatcgcggatgcgatgaaccagatcgtgtaccgattcattaaagaccagatctagtctggagcgctggattctaatcgtacggctatcacgggcgcatacccctttgccatacacgctttacagaaaatcccccacaaaatcacgaaaccatcccgccgtccattggggg

SEQ ID NO: 124576 - DNA, 337 bp, Zea Mays
cgaagggtgggaatcaaatgaacgtccttggggagagtcgggtttttcttctcctccttgctcccaacagtctcgcccgtattaatgtgtttgacatgatctaggaagagatcatccgtgcttcctggtctcctctcaaagggtgtcttcatgcaccatttatcatgaagatgatcaaagtggtcacccagactcacttcgaaaaacctgtcaaacactcccgctacgtaccctactgggttgattcctccaacccagctgctcgtacgaagcgggctccctcagggtctggaggccctgcctcttctgatgagccacctcctcagcctcctcatca

SEQ ID NO: 124577 - DNA, 424 bp, Zea Mays
gctagttgtaggaaggatgcgacagtggtaaattaaagattcaacacatcaaaagagagggaatttttcttttttaggccgcttgtcgttcaaaatactttgacattctcgcactcacataatgaatacataaaaaagaaagatagcagaggccaattagatgagggtgggaggcgaggacaaggcgtgctatgttattagggcatgtacaacctagagcccttggtttggtttttcaagtataagaaacacctaagagactacatgagcccctacacgagcacctacatcataaatgtagttagaagacaacatgcatagagagttgtgtagaagcgggctcttcgcgaaaaacccatctcttatttttttcacttacctctagagatctctaaagagaccccataattgatggggtgtacat

SEQ ID NO: 124578 - DNA, 725 bp, Zea Mays
gggaatgtcgtcatcaacctaggtggccatcgttggctgccagctagcatctgtcctcaacttactcgaggacgactcaagcctagctccgactccgactccgactccgacgaaggagtcggaagagcttgcttcatggcaacaccgtcgtgaaatgacaatgacaagggggacaaggaggtccccaatcaagaagaggagtactagcgcaagtgctaagcgcgcatcctcactcatgaggcctccctccgccagcagcaggaagagctcgacgcccttgtacgaaaactcaaccgcgtctatggtgatgtcgagcagagacacatcaaggccaaaaagccccgggcaaggaaggtatgcaaccatcacgctgagagtaccgacagtgcacattattttctcaatctcgggcagaacatggcattagcagtagccatgatgctctgatccatccccgagtcgaacaaactagaggtgagggccatgtacctaaacctccacaactttgtggagagggtcactgtgcagcaagccgagattgatcggcagttccccctcagaacggaaagctatgcccacagacgacctcatcttggagaaggggaacacaacactcccaatccacaaggacgcgtgttcccatgaaggaccgccttgggggcatccgcaacgcctaacacatcctcgacaaccagcatcaggagcatgagggggtagatcagcca

SEQ ID NO: 124579 - DNA, 323 bp, Zea Mays
cgggcaaccgatatttctgaaccctggccgcacctgtatatgatcgtcagctagctaggtactgtaacttgcaagcaagcagcagtgcatatatctatctatattcatatactagctacaacggtggagaaaggtttggaatttgcttgtggtggctgcagaatccggcgacctaattaatcgtggcgtacgttttcacttgaccaactccatcaagtagtagctgggaaaacaggcattagggttagctactaaaccaaacacgcgctcgcctgcagctgcagtgcacccgttcgtgtggcgcgtcgttgcaagcaagcgat

SEQ ID NO: 124580 - DNA, 527 bp, Zea Mays
attctaacaattatttttacattaaaaatcattttctaaatccatttctctgattttctaactccctggagtaggcacacaaaaccagagaacaacaggggtctctacacattatttcctagactcagtacacagttatagtggaatgcggattgatttcattatttcccaggttttcttatgtaaaagtgaaacggcgaaggggtatctacggatctcgaccaccagatcgcaagtaaatggcaccgattaaatcggccttcccctgaaccggtacgcgatatgcaccgtccgatctgatttcgacggcgcggattttaaacaccatgcatttggttctgctcgtttgatcatgatcggacgtcccagatcgacacccacgaaggggtaagctataatctaatcctagccgtcggttctcaaatctacgaacggtttgctgtctccttcctctcgatggccctgacgccggcgccgcccggagcgcggcggagatgttaccggcgcacaccgatctgcctctacgg

SEQ ID NO: 124581 - DNA, 369 bp, Zea Mays
gatcattaccattcttaagctgttactttcctacagaactgtcgcttcctcgagatctttcagtacaagcaaggctagagctccacgagtggtgacagaattgttgtttatctctgtctgatctttcacatcgccaacaactctctcgaggcatgcgaccagcagatgaacgcttctgcagacacacatcacgtcactacgcacgcgatcgatgctatatctcattcttccttgacgatcacagaaccagccggttgatgcagcatctttgtcagccgcaggaaaagcctctgaaaccgttgatcgctgcctgccctcggtcgcttaccgtgctcgcctgctttccgtctccttgtgttctcagcggga

SEQ ID NO: 124582 - DNA, 549 bp, Zea Mays
tgttatattaaatcatattttgtgagtctattatatttgtgattgttatagatcttatcgaaatttaggaagagtcctttgaccggaactgccttcgacccgttgcctttgccaactggtgttccagagcctatgtgtttttgtggtgatccttgcaaggttgacaagtctaaggatcatgacacctatcgacagaggtattggatgtgtgctaactatgcatttgagccaacgattgttcaacgccggatgaatttaatggtgagaatagtcttttaatatgttaacaattcgaagactcgaagtggtgcatgttttctttgcctactaatcattgcatgttttgtagactcctccaccgctttgtgattttgagcagtggattgacacagaaatctcacagaaagacaagaagtggttggagaatcttaaaagtgggatgcagaagacaaagagaggatggagaaaagacgagaggagcttgctgtcgagcaacaacgggaagacgagcaagaaatgaggcgtgttgctgaatgcaaggaagagaag

SEQ ID NO: 124583 - DNA, 623 bp, Zea Mays
gagagttatctctagtatgagagaactctattctccttgccgtggtctgaagatagagcttgagacagggagggaaacctcactggaccctgccttttaagcctgctgaaatggacagatgtcccatgaacctgtccaacatgcagtggagttgtgtcctcagggtgccagccacacttgcacttcattacgtggctcacatgctcactaccatataggttcgtagcacagctcaaagacactgaatatggtcatctcccaattacagcacacaaatatcacttatggataggttccaataggttcaaagtcttgatattctgtccagcagagggtggtgtcgtaagacctcgatcctacactccatactcatctcaactacacacacaaatatcccctttgtccccaactgcagacgacaaccagaaccattaaaaaccccactactcactgctccaaaacagtcctagatattttcccagcagcaagtgaggtctctagaccttctgctacgtatctatactttatctttatccaaatttcgagtaacatcaacagagaggaagtgaccatattcagaatccaaatgccattgaactcaattgtatcagcctgctgctcca

SEQ ID NO: 124584 - DNA, 487 bp, Zea Mays
gctcgggccagagaccggaacggacagctagagacccccgattcccacggagcgcgcagagaactcgcgttctgtttgagggaggaggaatcggtccgaaccggccatccgcgatccccggccacgcatcaggggcctggcgaggaatagggatcccagacaagatccgcaacaacccgagcggaacccggataaatctccttcgagcatgttggttatgatactccgcgtgctatgcgcttggttgaggaacgactggcgagaatcatgggcagaggaaaccggatagcgatgcccgagtctgaccggaggaggaagatcgagctgttgcggaagggagacgactggtcatccgaccccacaaggaagcgactccacgcgacagaagagatttgggctggcgagtgggacccacatcgcagtgacatatggcgtgcgggtgaggccgccagcggtaggatctaatgggctggcaggtggagtgggg

SEQ ID NO: 124585 - DNA, 626 bp, Zea Mays
gcatgatatgattaaggcatgattcttaagacaaaaagtcttagttgaatttgtgttcccaagtttttggtgtcttttgctcaatttgattaacatgagataatggttcttgagttagcactgagaagaaccctaggtaacactggggtgttacaaaaaggaccacctaggcgccatggagcgataactgtgcaacacactgaaaataatcactagagcatacaacaactccaagactcattgatcatgccttggttcattagagagatttgagcatgttttgagttgtgactctgtcggtttttattcgtgaactcttttctttacttgtgtgtgtggtattgctacatttatgctcttgtgtgtgttgctactccctccttactcttgttcttgattgtgatcatattgtgtaaggtgtgagagactccttttattttcaattgaacttggttttagattttgctaaccccatctatagaccaagtttgttgttttcagttaagttttccaaggatcacctattcaccccctctctctaggtgctctcacatatgacctgactgttttgccctctccacttttttcacgagagatgcaccttgctcgcagctcgcctacaggag

SEQ ID NO: 124586 - DNA, 768 bp, Zea Mays
attgaaaacttaaagaaaaagcttgcggaaaagaatgaggattttgaagtggctaaagcaaaacaagaaataagtgaatggactagcgcaagactacaaaagaatgtagatgagctttgggaatcgaaggagagatattacgaaaaatccttggattgtgctaagaagctgaaagatagttttgcaaagatgggtgcttactcatctgagcaaaaatttattagaggcaatcctgaaggaatcatcgaatggatcggcgaagaagctgaatcctttgacgagatccttagcgatcgtggtgatttctgcgcctttgtcgatgccagaggggttgcagcaattttagaaaaatctggttgtgaacattttaaagctacaacccagacggaggccgtcttcactgtagagaacacgaaggattcattggctgaggctactctgatgggacgggaaattctactctaacgtttggatgaaaggcaaccgagaattagccgacgaagctataaagaagaacgagaaagaatcccatgaagcctgagaagaagccaagtgagccgaagaggttgctgagcgcgcaaggcgcataggtattttaattgtttcatagcttcagtattttttctggcttcggattaacatcttgttacttttactgtagctgaactttcaccgccacccgagccctatgatcccgaagccaatccagccatgaaggcaacactagaaatcataagaattgtcgaagaagttgttgatgaagctgcc

SEQ ID NO: 124587 - DNA, 314 bp, Zea Mays
ggttatgcctcttgctctaagacgaggccatttgtgggccgtagctttctatcccaagggggaactaccgatcgatctcggcttgttgcacggctgccctctccatagaattgcagaggttctggtacattgtcttcgcctccagctcgcgtggctccaagatggatcaaagcatcatggctgttgcggccatgttctgtgtgggattgagaaagtattgtgcgccgtcactgctctcagcgagctggtcacataccttccccgacatcgccgaagacacggttgagtttttgcatgagggcgttgaactcttc

SEQ ID NO: 124588 - DNA, 939 bp, Zea Mays
cagggtacgaagccgttatcctgggacttcgcaaattacgagccctcggtgtgaccacatgcataatcaggacagactccaaggtcgttgccagctagatcgaaaaggaatactccgcaaaggagcctatgctcatgcaatatctcgccgccgtccgtagcctcgagaaatagttcaagggtttcaccctgtagcatgtcgaccgcaacaagaacgaagaggccgacgcgttggccaaagcagcggccaagggcgaggccctgccctctgacgtgttttaccacgtcatcggcacgctagccgtccgcaaccctgaaggtttgcaaataactcaggatgccgaaggccaccgaattgtcaacctcatcatggccgaagactagcgagccccaataacactatacctgcaaggccactaccatccaaccgaccgcaatgaggccaaacaactgaagcacaggagcaggactttgcattgatcgaaggccagttgtacaagaagggaatcaaccagcctatgttgaaatgcataaccgaaaccgaaggcataaaaatcctccatgaagtccatagtggaacctacggatcacactcaggaccaagggccctcgcagccagggtgattcgtcagggattttactggcctgtgataatctgcacagccaaccgagtcaccaggtcaagcgaagcattctagaagttctctcctcgctcaggcaacccttcgcaattcaccaagctcatcgcacacacatggccacttcaacactgggggttggacatcgttggaccactgcccatagcccaagggaacctcaagttcaccttcgtcaccgttgaatatttcacaaagtggattgaggccagggcagtctccaccataacatcgaagaccacccaaaaattcttctggcaaaacatcgtctgtcgcttcggagt

SEQ ID NO: 124589 - DNA, 384 bp, Zea Mays
ctaatagttcgttgccaatcaatcatcatggtcactaatgtagcaattagggcatgtcaattacctgaacttgtgctgaagaagaatatgccaatttgaataagtctaattttcatctgagaccaattaaactcggttcaatgtagctttgtcattccacaattatcataaccaacaaagcccacctccatttctgtagagtttggggcagcaaaccccagtccgaatgcatcaccataaacatcatcagatgtagttcatatattccggtctcggcagagcaagcagtgctcccaacaggttttggcacgtaggccccaagttaacaaaggatttaggcacaaatacggcagacccccaattatggccatatcagaaagctac

SEQ ID NO: 124590 - DNA, 803 bp, Zea Mays
aattccctttcagcgatcttcagtctcccagttatccaacacctcctgcgcttctccgcgcaggtgcatgcctgccatctccacccactcctcctggggcaccgcatgtagtcggccgtacctctcgcactggcggagccagagctgagggtcctctccgccatcgaacagcgacagttcgtagcgaggcgcgtgtggccccccacggcgtccaccccgctcgatgccacccacttcctcgtcgtggccctcctggcgccggtgtggcggcgggcgcctcccgtcacctgtcccggacgccgagtcggccaccatcttggcaagctcgcctctcggcgatggtggtctgcatgtccttcacagcgaccgccagttgcgccaccgatgactccaagctggaggaggactcgcctgaatccgataccagttgatatgggtgttctcggttgtaagagcgcgttcccggccgcagcccagattgagtaggctggggcgacaccgggagagctcgccggcgacctatggtaatggttggcggaaccaccggccgtttatcgtcggcaacgcctgctgctgagtttgtgggaacaagacgtcccttttctctctgtcgcccctctctcttttattccaaatcctttttcctaaacatagaaactagggagcagtataatgctcaataaggtaactaatactaccattacaaaattgagagatacttgctgctaaataagccgcagctgattactttcctcaactactgtttcctaaaatacaccctattcggttgggccatatcaaac

SEQ ID NO: 124591 - DNA, 1005 bp, Zea Mays
gtgatatgagactcgatcgatgtagttaatattgaattggcctgtagagaggtggtgacatgctgaagtagtcatcgcttcctctacggttaagtcggagtcctgcgtgatgatgttatttatgggggtgaatgcgtattgaaatattttatgttgtgcaatatgattaggaagatgaaggatagatatgttgtttcggaaatgttagccaatagattcggacaggcgtgatagaggttgagtcacttatgttataaaattgatgctcgacatgttaggtctcctaaaatgtggtgttttaggtgacttgtgtgttatcccattttaagttgagaaaatgtttaagagaagctaattaatttgctcccacccatgttttgagtcgcaatgactaaaatgggttgaatgaacttgagatgtattacaatagctgtgtgtcgtgccggtcatccaaaaatggcgaaaggtggtgtgtgatagtaattgggaaatagtcacgacattagccaactcatgtcaggtaggagttgattgtgttaagtgattgttatatatgtcgtgtcacgaattatgataataataggcaagccggcgtgtatgctgtctagcgggctgtgtcgttgctctagctagccgactcgttagatgactttagttaagcttgtagtcactttaaattacttgttgtagtctaaatgcacatggttatgatcgcgggtaaaaatctatagtgctcatgtggtgtgtaaattaaaatacgaactagtgggtgaaaagcgcgttgatatgcatatatgccgaaattgatgattgtggtgaatacgttgattaaatgtgtatgttagttctagcgcgcgaaataacatggatgaaaattagtgagtctacttgttagtcctcatttgattattttaactctaacaaatggtaaagtgttagaataattcaagtatctagagcaaggcaatttttgaattgtataggagctgaaatttagtaattgct

SEQ ID NO: 124592 - DNA, 460 bp, Zea Mays
gtgcttcccggatgaatagaatagcgactaagatgcgcttcatctaagatttgctggcggagttcttcattctttggcactactatgcggttattgaaccatatcacaccttgatcgtcttctttgaaacatttggctgttccagcccttatcttttcccgtatgtgcttcatacccacattatccttttgagcatcaattatcctttgcaagatgatagactcaagctttagctgattcagggtcccttgttggactatcctcaggtttaacttctccatctcttgacataaagtattgtcagaggtcttcaccataagacagtggcaggaaaccttacggctcagtgcatctgccacaacattggctttgcctgggtgataatgaatttctagttcatagtccttaataagctcaagccatcgcctttgcctcatattcaattctgactgggtgaaga

SEQ ID NO: 124593 - DNA, 495 bp, Zea Mays
ccgggctgccggccgacccgatacgcgcggcaccagatccagcctcctggcacccggaacccgatctggggccaggtggtcggtgtcccttggtgcgggttgtgtgggtccattaactcgactcactcgagcgtcagaggcacgccactggggagctggagttcaaggctggcgtcagtgtggcactcatcgtcaccgaccgaccgaccgaccgctccaagtgagtcacaagttccgtcgaggccaaccctgccatgtccgacgccgatcgatctgagagctgacacatgggcagcaatattctaaggccacgcgcaatttgcagacacgacaagagccaatcgcagcactgagcagactcaccaggctggtgtgcccaactgcaacgatgcattcgaggccgttggccgccctcggccagaccagacgggtcgggcggagacgctcgagcgcccgtaggccgtagctgcactgcacgtttatttaatatataaa

SEQ ID NO: 124594 - DNA, 537 bp, Zea Mays
cgggcccgcgcacgggcgcgcggacgcgactgacaagcagggccagggcgttagcgagccagggcgggctgaccagccgggcccacgggcaaaggcgcgggtgagggggatagaggagagacggttggatctggattggatggctacgattagatccgctcaggttggctctacattgtccgatctcgggtgaacgaccgagatctaacggcagggggcggtcatgggcgcggtggcgccactcggtcccacaatggaaactcgcaggagacaagcagaccggccacggcggggcaccagaggcttggggttggcctaggcgcgcacagggggatctggcggactcagctgagggcaccacgccggcgcgggagaaccaaagggcgctgcacacggcgcggagggctaacggcgacgcggggcaactccggcgagcaattgcgtgctaaccagagcagtacacagggaaataggggcgtggggaggttgctcaccttgcggggaatgctggaggcacggggcaatggtggaggcaca

SEQ ID NO: 124595 - DNA, 291 bp, Zea Mays
agtgtgtctctcagatggaattgaaggagatgatgcgcgcgatgactgaagcttttaaaaaataccaggactctgtggcaacatcctatgagtagcttgatcgacgagttgctgaacttgttacacgcatggacgtactggaggctcgtcccccaccaccaactccagccccagctcactctcctgtgaacgacgacgacgatgtttatgcaccgctgcgacaacgcctcgcacgtaatcgacaaggtatgggaggtaatggtagacgtcgtcataatcctaaaccagacc

SEQ ID NO: 124596 - DNA, 469 bp, Zea Mays
taagttattccatgttttttagtatattgtactattcatgaaggtgctagactgacaaggattgatcttactttcaggttccataaaaattattggtgttgttttagcaagtcaactaggaaaagaataggtaaattaaattacttccttcccttctattgtgtgagtgatttcatcaattggatgccttgctatttaacctttttaccaaattgtggatttatataacatacaatgctattttcagttttagattgatagaattgactttcaagaaacacctctttacggaatcaatatgataaaatacattgacatttaaaaacactaatttccattgcccacctcgctacttccctcttctctccctcgctctctccgtcttccttgtcactccctctccaccggcgctacagagctctctcccacccagtcaccctttacctatccagatctcctgactggttgc

SEQ ID NO: 124597 - DNA, 368 bp, Zea Mays
cgagaaggtgatgctagatcatatggtgcaggagggagtgagatggggattggaggtccactagaggaagtcaattcacccatggcacacaaggtttttatcatgatgcacctcattcacagcgggagacaataagcggtcgacatcgttcattctcatttcctgtccaataagatggaatccgtagctcaagtagctcagttctaactatccgcatggacatgattcaatcttcaacccttatgcatggtatggcaaccggatcagagaccaccagccgcagtaccaccatcgatcatgtatgggtatggacaagtttcccctccaccaccatattcaaatttgttaaatatatatccaccaggacc

SEQ ID NO: 124598 - DNA, 272 bp, Zea Mays
accgaacaaggccatagttggaaagaatctcttcaatctattactgctctttctagcactagcgcaaaggtagaatatatttcggctattgaagatgttaaggaagcaaatttggttgagagatttggtttatgaaccaggtattccataggttgctcacgaagaaggtacaagtgacacatgcaggccaggtagtaattaagtacgtctaaccatccctccaagaccaagagttcaaaacctgccaaacttggccaagcacaggacggacg

SEQ ID NO: 124599 - DNA, 756 bp, Zea Mays
aacgtttgcacttagaaccttcctctttcttatcttcgcaaactccagtccccgatggtgatcgccggtgagcacgccttccagcgaacctgtaccggccaagacactcaacgagtagggctctagcttggcagatacttaattccaccctcggcgacactaattccccaactaattgcactaatccggactggagcacgcctgctcacgacgacgacgaaaaccgagaagaaactatagtgtttagggcaatccagcgcggtctagttcaatcaatcgagcctacaagcaacaggagacctaagagatgctagaacatccaacagagaggcattaaccaacctgaggggggctatccacgatgagacactctcggcggcgcggaaaacagatttgggggaaaagagaaattaagaggctatggtgaacgattggaggcaaggactggttcactgggttcgtaacaagtagtcggaacaggacgaggcatcaattgatagaggacgaccgtgaggagggcgaatttggacggggaagtgcgcacggtgaaaagggggaggagtcaccggagtttgctaacgtgacgttcactggtttacggtctacggtggtcactgccgagtcttcacgacttgcgacgagtggtgagattacttaaggcaggtcacaaccaagctagacggcggcacaacggcgacggtcgcgcagccacatcgccagtgcaagtgggtacgacgacagggcgaaatagtgcca

SEQ ID NO: 124600 - DNA, 696 bp, Zea Mays
ccgttacccctccgtcccctcgtttttagttcctccttggcaacactaaacacctgatgttaaaattagcacctcatgatgaaattacatgggaaaaagtgtccccgttattagttttatatttacataggtaagttttgatcgatcgtcgtctgtcttctccatcgggtaggtacgttatgactatcaaatccgctcacgtacgtcatatgattttcttcttgttcaatcgattcaccggtcatcacattcccacgaaattgctagaacaatacctcttgtctccgaacagttcttacagtgtcttattttggtcttgttgtagtgtctccgaacaatcccgtgaaaatgaaaatcgtcaccatcacgtccaaatgcttacctggtcgcgtatttaaattgtataaaaaatgatcagattttatcgatttgtttgaagcatgtaattaagatgctggagggcgaggaatttgctggcctgcgcgcacgttgcgatcatggaggtaaacaattgaggaatgcggtggccgcgtacgtgctttgatatgatgctataatacgcctgatctgattcgtagaaggacggcggcggcgggcgcgggctgccggcggcgatggtggacggcggcgggcgggagatggactccccgcggttccgcgcgatcctgcgcgccaccagcgggcgccggaagcgcg

SEQ ID NO: 124601 - DNA, 387 bp, Zea Mays
attttctaatacatgtgtcatattatctatatcatccattataattttaatccgattatcaaaagaaattttaatagattgaaaataggctaatggtgtggtgttacttacaatgaggagctgatgcagcaaggctgacaatgaatcatactttacttccctctccttgacgaccttctagtggcgatctaccttgaagtgcgagaggtaccactttttcgccaccttgcttatctgagcctgttgtcattggaattcctcatctagacttcttatgtggtcttctaatttctcatcctcagcggctggcgagttagtcagccttctgttaatgtctaggacaacgttgttgtgatctttgtgattgaccattgcgaccgatctgat

SEQ ID NO: 124602 - DNA, 502 bp, Zea Mays
gacagattggacgtctggcagatggctctcggctggacatcacctcgctctgtgcttcaatgcctctgctgattagacttgcggttcagtagctatatttggatttcctcccatctcagccaatttcttccttttgtcgcagtacattcattgcgtatactgtatggatatgacttcttcagaaaatcttttgaaaattcctggctacacacccaatgggtgtattggtacgtagagcgtttagcacactgtcctggagtagtaacttgatgtgactgtggggtctaatcatactgcccgagtagttgaccttggtccaaatggtgtcgttttacgcgaagtgacgcctattgcctgactcattttcaggtggcttgaattgcttattgaatacttgcgactgttcggcgagtgtagtaggaggtggacggtcacgcctggcctctataaatagcctgcttgcaccgttgttctcttcactcatctttcgatcatcttttgc

SEQ ID NO: 124603 - DNA, 597 bp, Zea Mays
cgagggtagtccatgtgtccccactaagggatgctcccctctctcttttatagaccaagggagagggggttacaatcgataggtggggctagatttggcgctgatcccaccttgcatttgtggaagtcctattgacgtaagtccgagatctcataagaatgtcttatatgttgtagccttgccttacacgtactggatataatcggcatgtgcggggcgtgtgtctgttgccgaaattctagaacatggtagatggaggacctagacctccatgcctctacatgaggcctaggacgtcacgacgcacgtcacggatgaccagagtcaggaacacgtggcgcacgacgcgagtgatctagaacgcggcaattttcgtgacacgtatcgtccatgcgaccatagtagcagtggcagactatggcaccatgatgcacaagttgccaaagtgccatgctggcgccataccccaacattattggggcttaacaactagggagtggtataattctaacatagttgcacctgtcgtgtcgaactagtgtggtatcttttctgactccatcaactcctcgtccgaccacaacgtgagcgactggc

SEQ ID NO: 124604 - DNA, 525 bp, Zea Mays
cccggccgggcgcggcggcgggacggatgcgtgcgcccaccgggatgcttgattggtttcgtccccatgccaatcccattcccattgccattgccatgtggtcactgcccgggttttgtgcgggtccgggagctattgatgacgaagcttcggcaatgatcgcgagttcattcatggcgccggtggttaaggtcgttcctgcagatctgcacccacgtccacgcatcagatcttctcctccccccgctcgtcgtttagctacgttgcatttattaattcctcttcttgctcttcgttgatcaagccgcgccgcgtgcgtactcggtggcaatgggaccgtgcgcattgcacaagctaatccaaaaccaactcattgctctgcacatttgaacagtacatatcgagtctagattaagataaattctcgtcaaagtaaaaactgccgatcgagctaattgaagttcttgaaaaaaaaaagaacaaccacatcaaataaaaaaagcgaaggaagtatagccggttaaa

SEQ ID NO: 124605 - DNA, 743 bp, Zea Mays
tgagtttgatgttgttgactttctgatctgtgagattgaggatactgttctggatgggattcgtgctcgacggcagctaccgtatgctcactacttatgccacatctttgcgcagctgattcagccacctcgatttcagagcactcttgaggcctcacgccttgtgtttggatcttaccgccctgctcctgagattccagtgccagcttctgcttctgtgtttgactctcaggccgaggacgcagctctacgtcagtttgacactcagggtacagctgctgatgatgatgatgatgatgatgattttggggttcctcttccgcctccgcctcctatgcctccacgctcacatgatcatgaggctgggagttcccgtgctgcccctgctcctactccagctttggaccctgcccttgcttcgattcttcagactctcacccagcagcagcagactctcactcagcagcagcagactctcacccagcagcaggctcttctggccgccgagcaggcccgtttatccgacaggatgctctcgatgtttcagagcatgcaggacaggcaggatgcacttcagcagcagcttattcaggatagggcagagagtagggcattcatggctctcatgcttcagcattctggtatctcagcacctccggttcagtctgttccgcctcctccgcttcacgctccagtggtgccttcgatcttgtctggaccccctgttggtacctctccgctcc

SEQ ID NO: 124606 - DNA, 549 bp, Zea Mays
cgcgttgcttacagccgtcagatcggatccgagggccacgattagatcccgcgcatcgctcaacctcacacacctatgacctcccgatcaacatctaacggtcacgatttaaaagaacccaaatctaatatgatgcacacgatacaggatcgacagcacggatcttaaaactcgaaccggtatctattttctgatccgagacgttggtttgagatcggacggtgcccgatcgatgaccgccctaactctttctcgtatccctctcatggccaacgccggtggcgaagcaagtttccccatggcagcgccattgccgcccgccctcgaaactaccctccaacgcgtcaaacctcaatctgagcctagctgtgtgtgaagcagatcataacggacatgggagagggtcacataccaacacggcggccgcacaactcccagtccacgcgcaagagtggctcctccacgagattatggctccagcgagcaattctcctccagccgacccacgaagatgcttgggaaggccgtgcgtagacatccgcgaacgcg

SEQ ID NO: 124607 - DNA, 428 bp, Zea Mays
attactactccaaccattgtacattcattcacgaccttctgacatgcctgaggctattaaagcggaccatatcataaaaactttattcaactttcacaagggcttcgatcctacatctataggcaaggataggtcctgaacccatccaacagtgaccgacagaacacgtatttatgacaagccaacatgatctgaagaaaatttcgatagcataacctcgttgttctctagctgcacgccaagtatggtgcagtggagaacagtgaggttatgccaccgaaattttcttcaggtcctactgacttgtcataaatcagcgtcatgtcggtcactccgaggctatccataatagggacaatttcatatggatacgtctcacatatgtcaagcacgtgagacgaacctatctgaaacgagtgacacataag

SEQ ID NO: 124608 - DNA, 870 bp, Zea Mays
caacaagtgcacaaaaccactctccgtgcaaaagtcgcctaagggtgcagccagaataataggcacgaaaaatcaaagtcttttccaaaggacttcccgcaaaagtcgcctacgggtacgcaaaatcgaagtctcttccaaatgacttcgtgcagaagtctcctacgggagcgacctgatcaacgaaagcatgcagcttcatcacacaaaattatgtgatacacacagcgagggcatcacatataacattggctcaaccttcaggatgatacccatctccctgtagttgaacaacattatcctcagttcctcaccctcgaacagatttcgcagctccccctcacctacactcaccccaatcggcgaggacaacaattctcgcttcccagtcccatccacgcgaagacgacctctctccacctcgccatgataacgcctacaacttcgcgacaattcactcactctccgcttcgccaccgccctccgccgcctatacccagtactcgcgcccagaagttcctcggaaccctccacgcgtggcgaaggctccgctgcagccacatccaacaccgcaaaataatccaagtcctcatctgaagactcctctgtccacgcaatcgaactcccagaatcattagactcaaaacacctagacacagagccaaatgaatcgtcatcagcagccacggtcgaagccgccacaaaaatatcattgtcagtagcggttgcgtgcgcaggcccagacccaagaacctgcgcagcaaccgaggttcagtatcacacagacaaaatttacaaactcctcaacacctattcagccacctgcgaaggcccggtcgcggctgtagggtcttcggctgccggctcggc

SEQ ID NO: 124609 - DNA, 817 bp, Zea Mays
gttgtggttggattagccttcctttttatttatatgggaattacatattccaaatatttgcccctagctaggtggatagagccaatccactttacctctcgggggcattatggtccaactcaccaaaacttcacttggttgttcaggtctaagcttgagaaatcgtcatcccgatggttttgaggcagaaaccgccacaaaacttagtattgtatccaatacactccctctaagctctaaacgcatgccaccgccagtccttgggctaccgatcatcgggtcccctataaaacctcagtccttgggctaccgatagtttttgttctgactcgagagataaacgagtaatttcgagatcgcaaacgagccgagccgagccaagctaattctttgtctcgatatcccgctcgatctagatatattcctgaagcagtagttttttgttaatgtagaacttatcttttgtcagtcactggtagggcatcctatctagttaatattactgagtacgtacttgcactcaaaataattagtgctagggcagattactactgtaccacggtacgtgctcgcttttgaccccgagctaaaaccgagacgaacggaaaattgaaaaacaacaacgacaagaagaagatgtacgcatgcaactaatcatgcatgcgactttgttttttgaaggctgcattggcagtgcaacagcagcaggcaggcaggcaggcaggaggcggggcttaattagaatagcatatccctaagccaaaaggaaagaaaaaaaaatgggctcgcggtcgtacggccggcgaccagatccggc

SEQ ID NO: 124610 - DNA, 457 bp, Zea Mays
gggatgatacccatctccctatagttaaacaacattatcctcagctcctcaccctcaaaaagacttcgcaactccccctcacctacactcgccccaaccggtgaggacaacaattcccgcttgccagccctgtccacatgaagacgaccaccctccacctcactcactctatgcttcaccaccgcccttcgccgcctacgcccagcactcggaccaggaaaaacttcagcatccgtcacacgcggagaagcctccgccacagccacatccaacgccgcaacataatccaagtcctcatccgaagactcttccgtccacacaaccgaactcccagaatcatcagactcaaaaaacttagacacagaatcatccgattcattttcagcaaccacggtcgaagccgccacaaaattagcagtgtcagtagcggttgcgtgcgcaggcccaaaatcctgaa

SEQ ID NO: 124611 - DNA, 425 bp, Zea Mays
ctggagttcctgtacgtcaacgtagtgcgcgccaggggcctctccggcactgacctcacgctcggaactgatccgtacgtggaggtccgagtgggcaactactctgcggtgacacgtcatctcgtcaggaatcatgaaccagagtggaaccaggtgttcgccttctccaaggatcagctgcaggcggacaacgtggagttgatcgtcaaggacaagaacctcatcgtgtgggacagcatcgtgggcaaagctgacctgagcatcgccgaggtcccaagcttggctcttcctaatcgtcctctggcccctcaatggtacaggctcaagggtgccaagggacaatggacaggcggcgaggtcaatgtcgccgcctggaaggggtcgcagtccgacgaggccttcgcgggcgcactgcacgccggcgc

SEQ ID NO: 124612 - DNA, 563 bp, Zea Mays
gcgaacgcaggtaggggcgggggcaggagaggacgctaggggtgtggacgcccttgttagcgcgtggatggtgtagatggcccttgcgctgacgacggagaagtgcgcgttctgaacctcgccgccgccctcctccacggcgcgcacagagcagtggaacgatgccccgtcgcttggcggtgcgtcggtaataacgaggatggcgtgcaggcccgacctgaggtgctgcacctccacctccacggccccaacagaggagcgggagcgggagccatgggacgacgacgaagccctcgcggacgccaccagctcacgcttcctctccttgagcctctccactctcttcgtcgtttgcctgatgtaggccaccgcggtatccacggggttgactgtcgcggtgggggtggatctcttacgggggatgaggcgcgaccgacgagaatggcggctccatcgcggatgagggctggggcgtgcgcggtttatggtgggctggggctcgacggtagtggggtcggcgtcgcgagggcaactcgtatgggggcgggagcgcgacgatgccc

SEQ ID NO: 124613 - DNA, 824 bp, Zea Mays
gctacctggacagagtttgaaactgctttccgtgagcaccatttaccccaggggatcgtccagctcaacgaagatgaattccgggaactaactcaaggaggaagatctgtcagtgaatacgtggacaaattcacagaattggctcattacgcgcctgacgatgtcagcacaaaaaccaagaagatggcccgttttctgaaagggctaagaccagaactcaagaccatcattgccagccaagatttcctcagcttctcgcacctctccaacaaagccatacaagtggaaagggcaaaggaagaagaaaaaggtcacctcaagaggaaattctaagtcctccgagctcagcagcaagaccggcaccagagagctcgatccttcgggcttccacccaaaggaccaagcttcaatagaccagcaggacccactccatcacgtttcagccagcagagtcagaactcctttcaggccccctcggtcgcaagcaaccaaccaccagcaaatgcctgttggcactgcggagaccccagtcacttcaagaataactgccccgagttgaaggcaccaggacctacctactccaactcggtgaatggccccaagaatacctcggcacctgcctccaaggcactctcctccaacagtcagcagagcaagacccagtatcagggcagagcacgagttaaccacgtcgatgctcaagaggcccagcaagctccgggagtagtgctcagtgagttccttgtcgaatttactcccgctactgtactttttgattcaggagcatcccattcatttatagccactagttttgtggaaaagca

SEQ ID NO: 124614 - DNA, 382 bp, Zea Mays
gccagacatatagccgttcttacaaagatctatcgacatatagtctgcgtgtcaaggaaataaatgttccgacacttgctacaagggcacctaatgctagttccggtttccgacctagcaaaagcgcggttaagaaatgtgttggtcttggcgtcccactcacttgataaagaccctctcttctttgaaccatcatatattcatcgatgatccaccaccataatagatgtgaaatcttaacatagttaagtaattcacaaaccattggttattacgaagaaatcatgcccctacatctataggaaaggataggtcctacccaccgaaaagtgactgacgaaatacatatttattacaaggcatgagctcaagcaaaattttg

SEQ ID NO: 124615 - DNA, 356 bp, Zea Mays
tttggaaagggaggtttgcccaaggacgtcctggatcagatttatgcaaccaaagccatctcatgcgaagggcccaacacaactcctttaagctagaaattccaagtcctcctaaatgtagaggccggcatacccttccccaggctatcaagcaatgtccacccttggcatctttgcgacctctccatagaaatccccttctgatcttgtcaatagcatgtaaagcccaaggaggaatatcaatggccattgccgaatagacaaacatgcctgtaagcacatgctgcaccataacttttctcacgacccttgtcataaggtctgctttccagcttggcaggcggtcagcaaaccta

SEQ ID NO: 124616 - DNA, 612 bp, Zea Mays
tgcagatatggtggatatccatatctctgctgttttcaaagcattacattctgagcaaaactatctgaggattcaggtgagtacaatggatacattttgtttgcatagttaatagatttgctttatctcactatttcaaaataacaggatgatactctgcaagggacgctgtcctcggttgatgttgcaaccaaggaaaatatggagaagcttgccagagttggagatatgctcctaaagaaacctgtctcacaggcgaacttggaaactggccatatggtgcctgcttgtcatagggcagagatgaccaatgaagaagctctaaagaggttagctttacctctacacctctaatcataatgatgctactagggatacccgattatgatgtacttagctgtttagcatttgcaggtttgcgaagctgctgtctgatgaaaggcgacttcgcaaggcaagatcgccaaaatgaagaaagcactgatgcttgtttcaattcactgagggaactgtgcattacttcagttaatagttatgtttgatattatttgttgatacggagttgcgttgtaacaataaaacaatttgtacggggtcatgctgacagtctga

SEQ ID NO: 124617 - DNA, 1444 bp, Zea Mays
gggcgcaatagaccttctgtttttttagcttcgacgaaggagaaacaggtagaacgcctgaaagggattgcaaaatcttattcatgaattccttagccacaccaccatcgtccgtagcttcctgagtttgcaataggtgctttcttctagtatgaacttgggttactttgcaaggtgtctggggtaaaacaggtggaagctgcacaatagccatagaatctggtacattttcacaactgtgagaaaaccatccatctgttggatcgctgagaccagaacatcattattagcatcctttgcgaagccctccacttgaatcaaagttggagacattattaccagagaagcagcagcagacgaagagacaagatgggacccaggcgcctccagctcaacatcccaagttgggagagcaaggccatcaactggagtaacagtcaccacccttcccgccagattcaaacttggagactttactacggctgacggctcagcagacagaatcctcgcagaatgtgctccgccgtctccatcccccatagatgagcaagaataccctaaagattaatatccagcagcgccaccaccggataccattgcctgacgagaccagcgcttgatgatcaaccgaatggggggcacatacaaagattgtcctccagatagaacctgatcatccatcccaacattcggaaatagagcgatggaggaatttggtgcgaccatgcgtaggtcgatcacatcagcatcaaggttaaaactcaagcttagtgcgatcaagacctccgtggcgccaccagaaccctccagatcaacagctgagataagaagagtgcggtgaagatcttgctcagcctgccaaattttccatgagtgtttgatgtaactcacatgtcatccggaggaaacagacgggatggtggtatactggtatctgaatgcgaaagagggagagggggcatcggcggcatcacgatcaccatgaccaccagagctccgtccccgcctcttcctcggcccacggcgagtacgccttcgtccgccatcagcagagcctcccccggcacaccttgcatgatcctccatacggcctctaggggcttccatcggcgctgccacttggacgacggggcgccacacctggactcgacgcggatgatgagtagccgtcgaccgtcgcgggcacgctaggcacagtgcccaggcagccggcaatggaagcaccgcacctgccgccgacactcagcaacccgatgagatggcgagaagcagttgaagcacctcccacgcaagtccacaagagccaaactaggggggaggactgggagcgccgcctacgatcacgacgaccgagaaccttaacccagctgccttcctcttcccgagaagaagcgggatgaacaagctcccctgatgagattaggacgtccttgtaggaagcttg

SEQ ID NO: 124618 - DNA, 591 bp, Zea Mays
agtggatgtccaatccttcattttaacagttctgattcacatacaagcatagagcaagagtttctaaccaagctttgaataagcatgcttgctagctggaatcaagtagtgtcaggtagctctaagctatgagcatacaaatcagcaatagaaaacacaagcatctaaatattccctaacgacaaatatgacaggcacaacataaattgactcaacatttttgggcatcatgactcatgcataaaccaattttgtccaaacaatagcctgacaagccatgatagttagagctgatagcataaaatctctctatgattagaaggtagtaactaattcatcagcagttttttcaaacaatatatacttaagtgcttataactctaaatcatctcacaattttgtcaataccaagacaaagtagttcaaaaaaaatttcaataccaaagcatcatataccgagcaatgaagtatccaactatccatgttgcagtaagcattaattaagcaagaataaatgcaaatgcagattaatcccaacaaaggaacacattggtttagcttctcctatcaaatcaatgtaaggcctataat

SEQ ID NO: 124619 - DNA, 329 bp, Zea Mays
aaggatgttgattgatggtggtgcagccgttaatgtcatattcgttataccaaaagctggacaagctagatgttgaattgatcatgaccaacatgactctaagcggtgttgggagcaacaccctgatcgaggccaagggtttaacattcattgacctatccatcggtaccaagaccatgtctgctgcattctttgtcaccgaggtagaatgcaactatagtataatcctaggaagagatttgatacatgacaatcaatgtgtaccttctactttgcaccaaatgctaattcaatgggtcggtgatgatattgagatagtacacgtagac

SEQ ID NO: 124620 - DNA, 355 bp, Zea Mays
caaattctatgatatagatatgttctcattgacctcattatgtgcatttggcatttaaggccaaaatatgtattcctctcaaggcacatatttagggggagcaattctctacacattaaatccttgagactaaccattcttcaagtatatgttgtgcttagtctcaaattgaaagggaaatggagttttgagcaaagggagcgcttccacttcatattcgttcggtatcaatcacccttgctaaaactcatgtacttcaattacatatctatattgaaaaaggctcacaatttccccatttggtgcttaatgccaaaggtggagaaagcattaggccaaagaaaaaggaccgcac

SEQ ID NO: 124621 - DNA, 449 bp, Zea Mays
gttttgaagaccgttgggatggaatggctccacggttccctccgagagatttggggagccggatggttaacatttgaacatgattttttttaagtcattctgtcgtgctcacacaaaatactccgcgaatacaagcttgacgtaggtaccctatagattatgggggcatgcatggaccctaacccaagtttggaagagcatcatttccttgctttgcttggcaaaccggcccaattcctcagcctagcttgcgctcttgcacggcagagcatgcatcatctccttctattcttccctttccctcgcatgcaatgcaatccaatcctttgcttgcgagccggtcatgcacggatcgcctgcaaagaccgactcctcggcgacgtataagacgccggcggcggcggcacgtccttttcgcacctcctgctgtctccatccggctccatgga

SEQ ID NO: 124622 - DNA, 681 bp, Zea Mays
gaagatggcatcgttcgaggctctgtatggcaggaaatgcaggactcctctattttggaccagactagagaaaaacatatctttggacctaaacttattcgaggtagaagaacaagtctgtataatcagggagaatttgagggtagctcagactaggcaaaagagctatgctgataatagagggagaccactgtaatttgaggatggaggttatgtgtacctcaaggtgtcaccacttcgtggaatgaggagattcaatgttaagggcaaattgtcccctcgcttcattggactattctgagtttttttaggcaagttggagagatggcctatcaactcgagctacctgataatctatctgatgtgcataatgtatttcatgtgtctcaacttaagaagtgtctttgtgtccctgaggaacagttaccaatggaagagctcggtgttcagggagatttgacttacacggagtatcctatcaagattcttgacatcttgactcgagttacaagaaataaagttataaagatgtgcagagtgcaatagagttaccatggcgaagatgaaacaacatgggaaagagaagaagagcttcgcatagattttccccaccttttccctcgttcctcctaaatctcggggacgagattcttattaagggggtaggatttgtaataccca

SEQ ID NO: 124623 - DNA, 337 bp, Zea Mays
ctctttctgtctgaccatctgtctgcggatggtatgctgagcttcttattgcacgggtcccaagtgattcttggagctgctcccaaaagcgtgccacaaacagtgctcctctgtcagatacaatagtcttcggaattccatgcaaatgcactatttgatcaacatagatttctgcatatttctctgtgttgtgggtggtatgcattggcaagaaatgagctgtcttggtcaacctatccacgatgacccaaatagaatcatggtgtcaggaggtattgggcaatcctacgataaaatccatgcaaatatcctcccacttccaggatggtatgggaag

SEQ ID NO: 124624 - DNA, 626 bp, Zea Mays
cgagacatgtttttgttcagttttggttaggagtgccgtgtacataccgtgagggtttaggcattgttaacagcaaagctaacagacagaaggaacctgtgctgtacatacagtacactactgaaaatattgcactttcagtgcgaaaatgctgtgcaagtttgaatactttatatatatcaacatgccagtatctatcatcgtctacggtggtcttgcgttgcgtgacctaaaaagttagtttctactggggcagtggtaattcactcctttaaaacatcagttctgacggtgcgtcacgcacaatgtgcacatctatccccctctcccccacttcttgcaatgggtcgttaactcatatatgggctatgagaaaccaacatgataaggcgtaggtctatttctctctcccgcttcttccctaccagtatgacgttagccccttgaaaaaccaaccaagttcaacacaacaggcaacgtagcatagcactctcatatagtatcgccgaaaaaccaaccaagttcaacacaacaggcaacgtagcatagcactctcatatagtatcaccctgttagttgaaggaaaatgagcaaccgagcgagctataaaaagttaggactttttc

SEQ ID NO: 124625 - DNA, 433 bp, Zea Mays
gccttgtcgtatcacctttgccgccagggccctggggcctgcgtgggagccgcaggtccccctgtggacttcgcgcaggatttgaacgccctcggtctcggtgacgcacttaagcatcggctggctgaccccctttttgtacagttggccctcgatcaatgcgaagtcccggcttttgtggtggaggcgcttggcctcgttgctgtcgactgggtgatagaacccttgcaggtacagggttattggcgcccgccagtcttcgatcatgataaggttgatcatgcgttggccctcgctgtcgttggttatttggagcccttcggggctgcggacggctggtgtgccgatgacgtgatagaacacgtcggaggggagggcttcacccctggcggccgccttggccaatgcgtcagcttcttcattcttggcccgg

SEQ ID NO: 124626 - DNA, 648 bp, Zea Mays
gagccatgttatttttgggaagtcaactgtccaacaagggcaagtcgaagcgatgaagggcaagtattttcatgatgtctctataatgagggtcggggggggaagcacagttccccttcccaaagctgacgaggtggtggtcttcaagagcttcatgaaagctggacttcgctttccgctccacaagatgttggttgagtttctaaagacatttgagatatatcttcattaacttacccctgaagctcttatcaaagtggggggttttatatgggctatgaggagttagggactagagttggatgctaggtgcttctacaatattcacgagttatattaccagacgaaggcaaccggaaaagaacaatatcaacaacttcggctgttacagcttcgtgccccactctgaggtaaattatcttgtgcctacattttggaagaagtggccaggctcttggatgaagcaatggttttacatgaagaatgatctgaatcagagggaggatgtgaggggcatcattcaacgtcccatatggtcacgtttcgggattaggaggccatcaatcgcacttgggaatgaagtgcaagcatgcctaatggctttcaacaccatatgtacctacattggtactagagatttagttcaag

SEQ ID NO: 124627 - DNA, 433 bp, Zea Mays
ttcaaacactttctgaaagtcgggcaattgtaagagtggagcatgggttaacttatctttcaaagtgttgaacgcctcttcttgtggtgggtcccaagcaaaagacacacctttgtttgtgagttcgtgcaaaggggcagcgatggagttaaaatcacgcacaaaacagcggtaaaaccctgcaagtccaagaaaactccgaatttgcgtgaccgtcgttggtgtaggccagtcctgaatggcttcaaccttgctgctatccacctcaatgccctgcggagtaaccacataaccaaaaaacgagacatgttgcgtccaaaatgtgcacttttccatgttaccaaacaagcgagcagcacgcaaagcatcaaaaacagcacgcaaatgctctaaatgctcctctatagacttgctataaattaggatatcatcg

SEQ ID NO: 124628 - DNA, 278 bp, Zea Mays
acactgagctcttccatgggtaactgttcctcagggacacggagacatttcttcagttgagatacatggaacacattatgcacatccgatagagtagcaggtaactcgagttggtacgccatctccccaactcgcctaaagatcaagaatggtccaatatagcgaggggacaatttgcccttaactttaaatctcctcattccacgaagtggtgacaccttgaggtacacataatctccttcttcaaattccagtggtctccttctattatcagcata

SEQ ID NO: 124629 - DNA, 582 bp, Zea Mays
ggcggtttggcgattggaaacaagaggagggatgtctgcgtacctggtaagcgctgcccttcacgcctgcgatctggggaaacgatctggatctaggggaagacatgaggttttgcgacgactagagtggtatttatagaaaagagagaatgtggaaggcagttgtaaaatttgtcgcaggttgcgtcctggccgagccaaagcgacgatcgcgcgatgagttgcacgatacagtaaacgacgaagaccgagttaagcagaggtaggcgatggtagatgaaataaaggggtaacagttgtgcgagcaacaaacgttcacgaggaggaaatgcggtttgacgacctcgcgaaaatgacacaaaccatagaacgagttcgacgaaaggaacacacatatatataatcgagttttccaagattttgtagttttcgcaaatactgaattttaggtatttaattactattagaaaaactaaaattcatattttagtacttgaagaaacgttttgaaggttcccgaaaaaaaatccgaaaacatggtcaagataactcgatacagttcgaaaaacttttcactcataa

SEQ ID NO: 124630 - DNA, 499 bp, Zea Mays
gagatacgcgtgttactttgcacgtttttatagtaggggttacaaacgtgcgagagagggatcgagctcccaactcactgatgtgcgaatgtgcgagcgattacaagtgctctatggtttgactgttcggctgactggatgttttggcggtatatgtgaatgattgctcgtgtcctgaattgtggtccttttccttcctataataggttaaggtgagagaagggggtcgctacaagagtctaagggtcgggcgaagcggatgaaggtcggacattgtcatgtagttttttatcctctggagttctcaccagtcgagggacgtcatagatgaagcctcctccctctgtcaggatactgtagtcacacctaggccatcccagagcatgtcgttgcactttgtcatgtccagtagcagtttattcggtgtccttgtttgacttcctatctacggagtggttaagctagtgtccgcctccatgctgtgatggatgacgtacgt

SEQ ID NO: 124631 - DNA, 1059 bp, Zea Mays
cctccgccgaattctaacgggggaggggcggcacaaattgtcacctctatgggaaggaccattcatagtagctgaagtcactcggcctggatcatatcgtctcacacagatggatggcacagaagttgggaactcatggaacatagaacatctcaggaagttttatccttagctatatttcaaaagctactggggcggcaatgtattctgtaatccgggaaacgcatcatcaataaaaagacttcaggaattgttcgttgtcaattagcattcttgctcaaatcggggtgaccactataccctactaacggagcaatcggcttaagtcggtgattgcttaagacggtgcgacatgctcatgcttacttaactcggggtgaccactataccctactaacggagcaatcggcttaagtcggcaatgacttaagatggtgcgacatgctcacgcttacttaattcggggtgaccactataccctactaacggagcaatcggcttaagtcggcgatgacttaagacagtgcgacatgctcacgcttacttaactcggggtgaccactataccctactaacggagcaatcggcttaagtcggcaatgacttaagacggtgcgacatgctcgcgcttacttaattcggggtgaccactataccctactaacagagcaatcaacttaagtcggcgatgacttaagacggtgcgacatgctcacgcttacttaactcggggtgaccactataccctactaacggagcaatcagcttaagtcggcgatgacttaagacagtgcgacatgctcacgcttacttaactcggggtgaccactataccctactaacggagcaatcggcttaagtcggcgatgacttaagacggtgcgacatgctcacgcttacttaactcggggtgaccactataccctactaatggagcaatcggcttaagtcggtgatgacttaagacggtgcgacatgctcgcgcttacttaactaagggtgaccactataccctgctaacggagcaatcggtttaggtcggcgatcactatacccctg

SEQ ID NO: 124632 - DNA, 661 bp, Zea Mays
gcggtcaaacatttctataccctaacccccacgcagtcaaccatcctggccgactcgccgcgtttcttcaggggtcgccagcgcgattcttcttcatccgccgccgccagcccgtttcgccgtcctccgccgccgcatgccatcaacattaatcgccgccaccgttgatagcatcgtcgagccactgccgttgtcaatcttgcgcgccccgcgtcacattggctcacgtccacggtcggtatgtcgtccggattccaaggtgctcgagttggttttttaaatttatgctttacaacgcaacttcctaatctccttcctcccttccggcagtgtgaatcgccttcatttgttccgcgcgaactcaaccctaattggcgccgccgttgacagtgtcgtcgagccggccgctgctgtcaatcctctgccaccgcgtcccataggtattttacacgcccactaacggtcttcattgatcttactgttcttgtgcgattatggttcagttgtttatcatagagcctttagctttgataaaggttcacggacctgttgttttagactcattgaatgctcaaattgtgtgggtgaagatatatgcaatgatgtgaatctgtgtgcatgttaggtattcgaagataaatgctttcagttatttgaaatg

SEQ ID NO: 124633 - DNA, 521 bp, Zea Mays
tgccgatagagttgcaaaattccttgaaatattgattgtcgaatcgctttccattgtcgactgttaattctgaagggacttcgaaccgataaacaatattccatcagaagaatttttgtgttgtctttgacgttattgtcgtcatagctctggctttgatcaacttggtgaaatattcaacgacgacaaaggtgaattttaaattgtcttgcgctattggtagcggtccaacgatgtctagtccccaacgctgtagtggccaggtgtgtgcaatgagctttgtgagctgcgaatgggctcccgttcaaggtgagaatttttgccatgcttcgcacgaacgggtcacccggttgactgcacacacaatggctggccaatagaaaacttggcgtatgaccttggcagtgagggatcttggtcccgaatgtgatccgcatatagccctgtggacttctcggagaagctctatgccttcggcttcagttatgcattttaacattggttgacttatcccattcttg

SEQ ID NO: 124634 - DNA, 646 bp, Zea Mays
tgaagtacatctttacctagctagatctcaacctccgtcaacggagatggctagagctaattaaggattatgacatcgaaatccactatcacccaggaaaggcaaacgtagtggctaacaccctcagccggaaaactttcaggaaggaagcaacaaacttcttggaagactggaagagagaatcggctcaactgaatgcttgtttggggaaaatggcagtatagaagttaaaccgatgctggaagatctcattcgcaaagctcaacgtttggacgccgagatgacaggacttgcaaaaaaggctagcaaggaacaactcccgaatctcagaacagatgaaaagggaattctttggttcaggaaccgtctgtgtgtaccaaagggggaggcacaagaaatcttgctagatgaagcccataacttagcctattctatccatccagggtctaccaagatgtacctggacctcaagaccagatactggtggagagggatgaaaaaggagatagctcagcatgtagcccggtgtgatacttgtcaacgaactaaggcagaacatcataggcccgcagggctactgcaaccccttccagtgcccaaatggaagtgggaagaaataggcatggatttcataatcggactgccc

SEQ ID NO: 124635 - DNA, 884 bp, Zea Mays
gaaacatcagtactcatgcatgctgcagcaacgaactaaataatgtacagaagcacaggattctcactccgagatcaatttcctctgcttttgctaaggcaattgtttttccttgtattgctccagcctccaggtcccaacgtctactagtgctcgcggcttggaagaagcaaagattagaaaactacctagaaggctagaagaaaggactgttcaggctctcatacatgccaggtcacactaggaataggatatgaagccaatctcatgctgtcgataggcatatattcttctttttttcttctctcgaataggtaggagagctgtgtatctttatattaagagagaaaagagaggtgatccaaaacaaacttcaccccctgcttcgcttgattgacggcaaagcgacctgttcttagctttcttgaaaaaggaaacctgatgcgtttcttgttttctgcactgcagcgattcccctctgtcgattgtgctcgtcggagtaggcaacggaccatgggatgatctggttcgctgcggcggtttgcgtgccccaatcgcgacatgccagtttcaagaagaggattgtttcagtctagcgcttaactcgatctgtcctcctcctgtgcccgtctgtgttccttgcagttcatggatttcaccgagatcatgtcgagggaaacgtcacagggcgacaaggagggcaagttcacgttggaagcgctgatgaagataccggcccagcacgatgccataatcagccagaacatcaggtacagatgcgtcgtttagatggttcttctgttgttagagttgattgctgtcatggaatttgattgttccagtgccttttttttttcccttcagtgagctgatgacaagggcgc

SEQ ID NO: 124636 - DNA, 409 bp, Zea Mays
ttcaaaacagtgtcctcgctcctcagagtattcagacgcgcgcgttcttgtgtactacaccaaccatctcaccaagcaccctttccatgttgatctccactgccgcgatcaacagaaaagcatacctcgcaggctttctccctgagctttaccgcgccgctcctcctctaatccttggacacgtcgccggctcacaaagcagctgggccgcctgcaagcacgacgacttgaagcactcagctgctgcttgccagctcaccagtcgggcagtcactacccagtacccaccacccacccacccaccactgttacatcgtgtgctccgaatgcgacgatggcggcgagctccaccagcgcgcccacgatgccggcgatggtcacgcctctgccgggctacggctaccagggc

SEQ ID NO: 124637 - DNA, 494 bp, Zea Mays
catacctactgccacatctggtgcatcctggattgcttctgcctccaagtggttcacctttccatggttgtaggcctagccacaacctcctgatgcctgttgtggtgctccttgtcttgctagggcattggaagctgactgctgctgagctgctttcttcgggcattgcatcgcccggtgaccttgctctccacaatggaaacatcctctaccacctccaagtgctggtgctacctagttgccctaattagttgcaaaggcaggaaggcggggtgcctgactgctctgcctttgatactaatttcctccaggttggttgtgctggcggtattgctgctactgagggaactgcctctagaattgatgctgatgcggacgctggttctggtgttgatatccctcagggtgactctgcctgaactgttggggtggattgcctaagaaatagggatggccgctgctcctggcctacggtccaccaatcttgcgcttcc

SEQ ID NO: 124638 - DNA, 714 bp, Zea Mays
tgatgaactcccagatcaaagcgtcaagaaccgacccaatcttggtcgttcgttggccaatcaacgatccgaactctatctcctacctttggcagactgggcacgacagcgcccacacccaccgcggccatgacccgccgaagaaacgccacctaacgcgcccgcaaatgaaacccggctttgaccagagctacgcatagaggacggtaaggtgaacttagcaggggctcacataccgagagtcgagttgcgtagcacctaggctaccgaacacagcacgagtctgtggtggcaagcttcacttccgccacccgccacatcacccactgcccccgtccgtagaggatgaagacaccaaccatgcattctggcgtgccacgagactttctctaacgcctcgctgaagatatggacgcaccacgatccctcatcctggttcgcactgttccccggcgaccatggcttctctcaatccagtggcatggtgaacatggcgagatgaggcgaggtgcgaagggcggctttagatatatatggccagggctacggcgagccatgggtttatgcgccatgcgcggagtccgttcgatggtgcccagcacgcaaggtcaagcggatctaggcacgagaatcttgggcaaattctggtggtacgagcgatccggccgcggagtatgcgctgaattcgggagagggtggacctggccatcaggc

SEQ ID NO: 124639 - DNA, 328 bp, Zea Mays
gtactgtctgctccttcattggtactagaaatttaatttaggagcatatagcattcagagtatggccgcttgtagagagctaggaaatgccgaaggagaccatcaccaagtctagcgaaggtgatctggtccggctaaagtatacattcaggtatggggataagttcgatgaccaaacgatgactgctaaaatgcatcaaagttacaagtgatgagctgcttggagcttattccaaggtagaagataatgcgctatctacagccttcggaggtcggggaaaaaagagaatgaacagagtttttaacgccatcggcttcgcctaccccg

SEQ ID NO: 124640 - DNA, 380 bp, Zea Mays
ctggcgtgtgcgctgttgtgtgctttgcatattgcgagctgcactactgctgctgtctccggtctgtctccatggttgctagacggtagttgagtggtggtggtgcatggctagacgctaattgataggcctgcagcgagctagctgctgcctgctgctaggactaggtctaccctactgcgcatgagccacgggggctggcgcttggcggcgcgcacggctcgcgtccggggctagccccaggtctagatccgcctctgatgctaaggacatattcttttgtggctagcaagaataatgagatgcaggtctgatgagctggatgttgatcatttttatcaccatgatcatgctgttttgcaaaagagcctctagctgag

SEQ ID NO: 124641 - DNA, 449 bp, Zea Mays
caagcttacgcttacataacttagggtgattactataccctaccaacggagcaatcggcttaagtcagaaacgtcttaagtcgatgcgacatgctcacgcttacatgacttaggggattactataccctactgacagagcaataggcttaagtcggaaacgccttaaatcggcgcgacatgctcacgctcgcatacttgagggtgattacaataccctactaacagagtaatcggcttaagtcagaaaaaccttaagtcaacacagcaagctcacgcatacatgaactctataatgcgccatctcgataagaattaccaacttaatgaaaagtttcttctgttcaaacgaatcaaaatctatcttcattacacaattactctgctggagcgttcttgtaggggaccttgctagcaggatcaccagagggagaaggtttactcataccag

SEQ ID NO: 124642 - DNA, 292 bp, Zea Mays
gaaggatcgcagccagagcagggtcaacagtaggaggggcagcaggaacagcactggaactcccggcctcatgatcatgtgagcggggaggcataggaggcggaggcagaatcccaaaatcatcatcatcgtcgtcgtcaggaattgttgcgccctgagtctcagtctgatggtaggtcgtatcctctgcctgagtgtcgatcacggtatcaggtaccggcactgggtcctcaggggctggacggtaggagccaaagtggaggcatgaggcctcaagagtgccctggaactg

SEQ ID NO: 124643 - DNA, 981 bp, Zea Mays
gaatgatacaaaaatataaataatataaatatccttaaacttattacttttaactgcacaaatatagtgtaaatgatgagccataaagtttgattttaaacttgaattcaaattggatttgaaaatagagaaagagggaattagaaaaagaaaaagaaaaagaaagccacatgggctgactacctcctttccagcccaattcacgttttcacccgcgcggcccaactcctaatcctccacgcgcgcgcgctggacacccactgacatccggaccccgcgcccagcctcacatggtatagtcattcagcgctagtgttgagtcactagcaggtgggacccacttgtcgggttcatccccttcgcgtaacagaacccgcgcgggagcttcggctgccgttgcggacctcgctgaccgagctcgaccgaggtataaaacccaatcacgtctctcctcctcctcaacccaccgcgccgcactcctctgccctttcgcattacctagaccatcctgggcgacacgagaagggcgccgccatcgacgtctgggatgaccactgccgcaaccgtgctctcccctatgatccttgacggtaactccctcctctcgcttgcggaatcttctctggatgataggagtttataccgtgccatgttcgaaccataggaccatagtaattgctcgccgtcgcgtgtgtccccgccgtggattggactgcaccatgggtcgggggtctacgctgttttgcggctgaaattgatgggcaacataggttcgggccgtcgtaaatctcacgagggctgagcgaattagagtttggggctcggggatttggatggacggtggagattagtttggggtgtaccgctttaggcgattggatccgtgctgtcggatcgttatcctgcggattagaacagatcatgtttcattaagttgtagccgtcgatctctgatctagcggccaccagcgataccggttc

SEQ ID NO: 124644 - DNA, 1348 bp, Zea Mays
tgtatagaaaaaaacatttaaaagtagtaaaattcaacaatttgatgcagctactgtaacctcgtttagtatttgttagtaacatatattggttatctgaaatgctaatggttgttccaatctatggttgatgaacagttctgtgacattggtccacatggcaccaagattatagtgttcaatctgtggtccaacgacgatggtaatttggagctcgacttcgacacgaatccggaggtaaaccatcgcttgaatgatttaacataactattgttaaagtatcattttgtttctattggaatactgttgccgacaatgtaaaaccgatcttctaaaatttcttgtgttttgttggttgcttttcaataaacaggaattggtttctttctagttgttcatgttgtacactggtcagagtgtgttctgacagatcttgtggtgttccctgctgggttgctcatcaaagttcctgtcgtctgcttgtattgcaggatattatgatcagtggagcgccaaacccagaacaaatcagcaactctgttaggagggctaacgagaaccatctggcaaatcgactacgctattctcttagggtgagtataatacagttcgacactcctgcgcagtgccagtgagttggttgctcacgtagcatcctattctgcaggtctatgcttctgtactgtatctacagctaccagattactttaggatcatgcttcgagggcgagaagttgagcgtcatcacattgcctctgacttgatatatcctgaacgcatcagttatagaccacaaagttgcggaataataagagaggtttgacttggtttatcttttcttcctggcctaaccaatgtaacttgttggtttactctttgctgtctggattaagggtttcatactcttgttcttgtttctcctttttttgtgtgtgtgtgtgtgcatgcactatctttggttggctggctcaggctgaggttcttacaacaattgggttcttaaagggtgccccaaccattagcgtgcacggattcaacatctatcacaaaaaccgccttatcttggtgagcttcctgaccccttccttgcgttgattcactttgttttaagggtgcattgcatagtgcatacacatagagacaagattgacatggttatctctgtctaaaatgtactgcagccattccatagagtgctgagtaccgcgagcagcaaaggcagaagcgtctctggagtgttggaggtagacttcatcaagcccacccatgacaaacaggactttgagaagtcgcagctgtttcagcggctgatgaaccgcctcaaggagatgactaacgagtactggta

SEQ ID NO: 124645 - DNA, 370 bp, Zea Mays
cgatgaagcaagctatggaagagatgaagcaagctaaggagcaagctctggctgctaaaattaagatgtgccaggatatggccttagagtgcggggcatctcctgacagcatagagttttttgcatgtgctacaatagttagggatgaatacaatcgtgagttcttttgcaatataccaactccagaagcaaggctggttttcttgaagagatggtgccagatgaataatatgtattagtgcattttcaacatatttgttcaagagatggtgctagttgaataacgtggcagtctgagactatgtaatgcatgtggtagacttattattgttatttgtgaacctgtttttgtttgggaacctgtttgttt

SEQ ID NO: 124646 - DNA, 520 bp, Zea Mays
gacttggagtattatcttttcgaagagctcggaccaacataaatcttatgtctcctgtattttaccttcatattactggtcacgcgtatactccttataaattcatcaagaactatccataattcctcaaagttgtaaaatgaataaaaatccatatctaattcattttagatccaaatttaaaactgtgtggacattagctatggcagataggatcagaagaaggctctttggcccccattttgcttgactaggccttgactaggatgccctagagggcctacatgtgaggactgtggtggagagatattacgagagattgccaccagatattctatcgtagtctaatacacacgagagatcatttgtaaacatctcgtagtcaatcctaccacacctccctgaaagaggtgaaaggtcttgcaaaccatgacaaaatgggtggcccctagtagttcggaggttcttatctcgtgcgatctctttgaccggtggaccccaagggcccttgatcttttcc

SEQ ID NO: 124647 - DNA, 537 bp, Zea Mays
atcctcaagttcaaaaactactgtatgcagtacttctaactgcacgcaagctccgtcactactttgacgaccacaaagtcatagtagtcactggatttccaataggggatattctccacaacaaagaaggcatcagaagaatagccaagtgggcttgcgagctgggagctcacgacgtcgagtttcaacctcgcactgcaataaagactcaagcactaattgacttcgtatcagagtggaccgagcaacaagtgccagacaacctggagactgtggaagtatggcggcgtatttcgatggctcgttgaagctacagggggcaggcgcaggaatcctcttcatcgcgcctagaggtgaacaactcaaatatgcccttcagttgttattctcagcgtccaataatgcggcagagtatgaagctttgattcatggactgaacattgccatatcactgggcattaagagactgatggtattcggagattcactggtggtcataagtcagataaataaagaatgggattgctcgaatgactc

SEQ ID NO: 124648 - DNA, 298 bp, Zea Mays
atttttggtaaatcgaccaaaacaaacgaggagagagacacatgagaaacaagttaaaaagctgaaccaaagtactccatgccccaacggtgcccatcgggactaacacattctcaaaagcgcaaatttcagcgcttaagagcaaaagaaaaaatatttaatgatgcacatccgcagtactcgccaccacaaaaaaggtggaaaccaaagaccgccgaaacaattcaagcggccacaaaaatagaagaagaagcagctgtgcaggtccatgcatgtaccgtggacaggccggctccag

SEQ ID NO: 124649 - DNA, 482 bp, Zea Mays
aagcacacgctctggacaacaaagtcagaggaacaatcaatatcagaaccagcagagaagcaacactcaaaccggtcaaaggtctagtgggcaacatcagaatcgtcaaggaagcgtcgtgaacataccggccaagaacaacaatgcaactaccccaattcaacccaatggttgtttcaagtgtggcgaacttagccactatgccaacaactgcccaaggcgtaatcaacagacacctcagaagaacaacaacgagaggactgaccagaacacacctgctcgtggatctgcacagaacaagtctcagcagaaccagagtagaagaagagtcaaccatgtgacagcggaatcagttcctgaggatgccgacgtggtgtatggtatgtttcttattaactccatacctgcatcagttttatttgattctggagcatctcactccttcgtaacaaagtcatttgtggaaaaacataatataccaa

SEQ ID NO: 124650 - DNA, 863 bp, Zea Mays
caatttggagctcacatgaattttctatgatttatacaagttctagcaattattgttgcactaaaaatctatttctaatttactttctctggttttctgttctctggactgggcgccaaatactgtgaagcgcaggagtctcggggtaaaaattcttaagactcagacaaatcagaactgaatcgcgggttcattatctaattccataaggttttttatgtaaaaacgccaggccgaaggggcatccttcattcagagccgtccgaacgactccgattagattctacacccgcgcgaactggtacgcaacgcggtccctcggatccaaatcctacgtccctgatttatgaagcccagagcgagtgactcacatccgatcccgatcgaacggttcctgttacccctatctgaaacgctacacactatcacatccgagccatcaaaaagagatctaacggcacctgatcgtcgtcttactccctgcgaacagcggcagcgccgccggaaatacggcgaggtgtcaccggggtacggccaacatggcaagctaacggaccaattcccacccgagacttcctacgcaacatatgcttaacagagaatgccatggagggacttacaacatgcacagaacggcggcggaagcaggctacggcgaagtgcggtccgcagcggcggtgtaacgacgacgaggaattctcccggccccgaggacccacgcacccggattcttccccgagaacgatccacgcccacacccgaacaccagggatcgggtcacagacacaaagcggtgatggagatgagagtcaacgacggcaatggcagcgcccgatctttctctcccctactctctggttgtg

SEQ ID NO: 124651 - DNA, 577 bp, Zea Mays
tgttaaatgatagcatatattctatagatagaagggcagatttcctctctcctgaagagttgcgtctctgattttctttctcctgaagagctgcgcctctgatcctttccttgattctcttgtatggttaccatactcatgtaccctgtacatctatataaacggaatacaagccccttgcagggcagcatcgagccaaactaacaaattcctcgtcgacatcaaccgatggcacagatctcacgcggcaacggcaacatcagccttttctcccaacccgatcactccatgcccattaatgactgggagtatcttggcagccttcatcgcccacccagccgcacagccttcatcgttgtccttccttccctgctgagctccccattgtataagtagggcatcgctgcctactcaactcaactcaactcaagttccatgtcaccagaggccacaacccttgccacccacgccatcactgccattcctgagctcccgtgtagtgtttcagcttttcctaaatgccttcgtccttgacatcagcaccttcagcttcctctacacccaagactgccacaat

SEQ ID NO: 124652 - DNA, 458 bp, Zea Mays
gagcatgttgcaccgtcttaagtcatcgccgacttaagccgattgctccgttgacagggcatagtggtcaccctgagtttaagtaagaatgcaggtcgacaatgaacaatttgagcgctcttgaagtcttcttattgacgatatatttcccagtttatagagtacattgtcgtcccaatagcttttggaatacaactaggggtaaaacttcctgaggtgttctatgttccatgagttcccaatttccgtgccatccatctgagtgagacgatatgatcccggccgagtgacttctgctactatgaatggtccttcccatagaggtgacaacttgtgccgcccctcccccgctagaattcggtggaggacgagatctcctactgcgaaggatcgacgtcgtatggccttatcatgatagcgccttagagtttgctggtattgcgctgattgaatcaccg

SEQ ID NO: 124653 - DNA, 562 bp, Zea Mays
gaaaagtggcgcccccacaagtacgggcgccagttgcggacggcctacacgaggccgatgagctccctcttgtagaccgccaacttaaggtggcgggctgcaaatggcttgctgaagtaggcgagaggtcccacgccctgatgaaggacagcaccgaaccctgcacctgacgtgtcacagtcgacaatgaagagcttggcgaagtccggcatctggagcattggacccatcgtcagggcgtgctttagggcgtggaaggttgttgtcgcgtcatcgtcccaggcaaacgcgtctcatcgcaagagacacgtcagcggggctacgatgaggctgaagtctttgatgaactttcggtagtaccctgctagtcccaagaagccccggaggcctcgtgcagaccgcgggggcggcaaggaggccactgccgcgacctttgtcggtgtccatggcgacccctccctcggagatgacatggcccagataggccactgatgtggtgccgaagggaacacttggagcgcttcaggtggaggtggtgtgcctgcaatgtctcgaggacgat

SEQ ID NO: 124654 - DNA, 473 bp, Zea Mays
atgtaatcaccgaaacgtttatagaaatggtccaaggtcacattttcctttcacctcgtccctagcaaattcgacaaaaaatgtgttggctctgatttggtgccaaacactagggctgaacctccttggggcgctctctacggaaacacggatggtctgcagctcatggacgaacggtccgtggcctcgctgtaggagcaactcctctctgcacgtcactagacaatccgcacagggctagacagtctttgaaggtgaaaattatcttctttgtggcaaagaaccctagatctcgcgtcctgagagggaccctatcagggaggagagttccaggggctgttccggggtcggtaggccacatgtggggtgttctagggtcggtaggccacccagggcatccctagatgatgtagagtcgctactcctatggtgagaaattaaaggaaatgatatatggattaattggattgatt

SEQ ID NO: 124655 - DNA, 506 bp, Zea Mays
cccgacaatgtccaggccctagcgctgaaggggccacgtgtgggcgatcagctttgtgaattgcgaagggttgcccgaacgggggaaaacttctggcaggcttcgcacgacctcgtgacttgattcgcggcgcagatcatagtgggccagtacaagcctttacggatcaccttggcagcgagggccctaggccccgcgtgagagctgcatgttccgctgtggacttcgcacaggatttggacgccttcggcctcggtgacgcatttaagcatgggttggctgacccccttcttgtaaagctggccctcaatgagtgcgaagtcccggcttcggtgcttgaggcgcttggcctcgttgatgtcgcttggatggtaatatccctccaggaatagggtgattggtgctcgccagtctttggtcatgatgaggttgactatgtggtggcctttggtgttgttggttatttgtaagccctctgggctgcggacggctggtgtgccgatgac

SEQ ID NO: 124656 - DNA, 355 bp, Zea Mays
taaatccttgctcctaaaacttcatagcatttctgttgatcatcctagctgatcttgcttgatgacgtctcttttcacctagatctagtaatcttttcctttgtgaatcatgttgtggccttgtcatccaaatctctagatcatccaatgattctgccccgtcatctggttatctgctataacccgttctcaagtatcggatgtcgatctcatgctcttcctccaagcctcgtgacaccattttatcaattttatctctaaacggcatatccatgtggattaatggatgttgctgttatcttgggatctctcatgtctctaaaagcttatcaatctcgatctcatggctgattcc

SEQ ID NO: 124657 - DNA, 635 bp, Zea Mays
cggtattcatgcgcactggtccttggatagcgaacaagcggtcaggattaacccgcaccagagaccactgtctgacccttggattcgaaatcgacgttctggattcaaaagacctgaaaggattcctatgcctcagatctaaatcggacggtgcatttcttgcacccgaagggatacgttggcttctaatcacgaccgcccattgttagatcgacggacgatgtgcatcccccatctccggctgtccatccggtggcgccgctcggcttcccccgccggaaacccgccggggttctcccatctggtgaaccaaagctccatacctcgagctaataggtgcaacacgatgccctcactaccctgaatctacaagttgagcacaggcacccgatatttatcccagaatggctaaccacagcacgcacgaaccgcacggcggcgctacacgccggcgacatgcccaggtcgttccttgggccggattcccactggttacgagcactaacgaacgagggaggcaaggcaattgcatagatggggaaaaactcaccaagcagcgggcgcggcggagcaagtgtggaagcggcggcggggtcctggacgacgaagtgcggcgacttccccaccagtggcgg

SEQ ID NO: 124658 - DNA, 564 bp, Zea Mays
cgagaccgagccagaggctcattttttctcccctgccagcgctctctctctgtccctggcgatttctcccctcaccggcgatctcccttcaccagcggcgatccaccggcgacctcgccagtgctcctctcctctcggtgagcagcctcctcccctcctctgccttctctctctctctgtttctctggcagtgccacccccttttgtatcaaattcaaatcttgtgaattcctgtgaaatccagtgcaaccaagttgtgaaatgtgttcccttgtgtccattgagtgtccttgcaggttcctagctccttcgggagggttttcccacctcaaatagtcgtttcaccgaaaccctagaactccgcacgtcacgtgctcggtgaaatgcccaaaccagccaaaaatgctccaattgaacccaaatttttcaggcaccttcacaacacttccagtaacatttttgcaaattttcacgccaatccgagattccaggccttaatttcaccaaatttcccgtttcgagcgatcgtttccgagccgagtgcccaaatctctttttcttcgc

SEQ ID NO: 124659 - DNA, 298 bp, Zea Mays
cacaactccttccggggcaccatgttctcggtgggtttcagcgtcatcatgtggctgaggagcaagatgacccagccgagcctaaccctcaagcagttcaccgtcctcaacgtccgtttgccgctcaagctgccgctcttccccgcgttcaccggcctggcggtggagaagaagccagtgccgaacagtgtgatgagatccgtcatcgactacctggcgaaacgtggacatggtgccccgaactacgactacgacctcgaccgtggcaggtctgcgctgcggaggaacggcgtcttcg

SEQ ID NO: 124660 - DNA, 748 bp, Zea Mays
ggcaggtatgggtgctgaaacaagagggcagggagcacgaacggacctagagtacgctgaccacggtgagccaacacacggcggcgcggagaaccaaattgggggaagagagaaattgggaggctctggtggataatccggggcaaggactggtgcaatggatgcgtaattatccaatggagtcgcgggtgcactcaatttatagcaggcttgagcggtggccagtgaatttgggttgggcgcggtggcgatcggagaaggaatgagtcactggtgcggtgattcgtggcattcaccgtggcggcctcatcggcgacgaaccagtagtagagagtggcttacggtgactcactgcgacgtggtaaaatgttgaggcacgcagccttaccggataactgcgactccgatgatgccagcgcgactaaccacggcgggacacgacgactggtccagccagcgaccggattcaccccgtgctggatattctcaccacacccgacgttatccatacttctcgtggcacgaatctttcagacgagcgtgaattgcaacgacggatcaccgacggcgagatctctaagttggcgtcctgatcagtacaatgtaccatcgcgcagctcattcagtgtaatacccaaatatttggagttgtagaatgtataattattgggagtgacaaaaaaattatttgattacttgtttgttttcccccatttttgcatattcaaatcatggggccacatggcta

SEQ ID NO: 124661 - DNA, 392 bp, Zea Mays
cagatctgcaggtgccgaactctactgatggcattctggaaattaccatcgatgtgtggcggcgtagtggcaatagtccaccaccatgccccggtgaaattctgagctccacggtctcacacgcacaggctaggaagttaggaagacgcgaaccgtagcatccatcacaaacgtggacagtcttcgtgactcggatcacgcataggtaagtgctcaaaaggttaggtttcggtgagcgacacaaacagtatcattcgcgagaactaagaacagcaaggtaacttctcctattattttaaagaggtctcactagaggcacgttacaacattaggtttgaagcactacggacaatatcgtccacagacaacctatgcacaacgtgacccactac

SEQ ID NO: 124662 - DNA, 395 bp, Zea Mays
ttggttggatggcagagagtgtgtaggccctatgatcttgggggtcttggcatctacaatattgaaacattgggatgggcaattgggtgttaaacatgagatggttgtggttgcaaaagactcaaccaggtcgtccttgggtaggtcttggtatgcagttcattctagtgcaacagccttatttgcaatctccatccaatctgtggtgggcaatgaaaaaatactcttttttgagttgatttttggctgcaagggaaaactttatccgatttggccccggatttagtttcagcagtatcttttagatcacgcaagaagaggactgtacaagaagctttagttaacctccaatggtcagctgatataagggatgatctgacccaacaaggattcta

SEQ ID NO: 124663 - DNA, 579 bp, Zea Mays
aacaaaattggtacgcgttcttttatttttatctgcaaattttaatatggatcagtatgccatgcacaagagtttcctaagttgtaattgttggtattttcttttttcttgttagtatctgtactaccggtaagagtgggtacatatataaattctgaagtttgtgagtaactacatagctaatttgttgagtctctatgcttcaataatgcctggctacattacagatgagttctctccagtttctactataacatgtttaatgctggatacttataatcccataccgaatcatgcgttagattgtactttattctactataaggaaataattatagagcacagtagcacagtaaacattgttgtttctttgtttcatttttttacgaatctcttagttactcttttgtgtgtgtaagcttcctttcttttcttttactaggtttcaaaattcatggcatgctaatgtctgcttttagtgtcacatatttgataagttatttgtgttgcatacctgaatgactcatgctcggtaatgtttgttaatactattatgcttatcatttctcttccctcaat

SEQ ID NO: 124664 - DNA, 291 bp, Zea Mays
gatcatgaggctgggagttctagtgctgcccctgctgcccctccggctatggaccctgctcttgcttcgattctccagtctatcactcagcagcaggctcacctggcagccgagcagacccggttatccgagaggatgctctcgatgtttcagaacatacaggacaggcaggattcgcttcagcagcagctactccaggatcgggctgagagcagggcattcatggctcttatgctacagcagtctggtgtcttagttcctccggttcagtctgctccacctcctctgctt

SEQ ID NO: 124665 - DNA, 281 bp, Zea Mays
cattactttaacaatctaaacgagacgggtcgatagggcatcgtctttgcgtatttgtgtctagaatagatatgttcaataggaaaaagtggtagcgtccagtggctaaggggtcctatgtgtttggggacccggtgcggccgcaccttccgcatcccctcaggtacggccctgctcccaaggggtaaatgctcatcagacgaaggtcaagaaggacataccttcatcatccaatatgtgaataaggatgcgaaaagataaatatgataactgcatctcat

SEQ ID NO: 124666 - DNA, 1712 bp, Zea Mays
gtaaccctcggtagtggtgatgttaacttgtgagatctcagcttagttctgtggatgccgtttgatttcgttgtagggtagtatgggaaaacggagcatccatagagaagataataggatatgcgggagggaatgtgtggttgtgatttctgttgttctatttgtcatgttttgaggtaaacgatgaatagtgaggctcaccgtaccttgcttcttgtgcttatgagggcaacgatagctatgtgtttagacttcttgtgtgcatcttaagatctctagtatgagctcctgggttatcaatatggatgcaccaacttgcctgtttgggtttttctttatttactaaccctctttctcccaaacgtttctggtgtagcctcctatcggtcatgtttcttgcgatagcgtgtttgaatctggcacaacttacttactatctagaatgctcatgtttgtaatttgtgtcttggaatgaggttagttttatgtttgaatctgccgctgccatgtgcatgtttagtgcagcctcacacacctttgaccagaaacaatggtgtttgtcttgattctgctggcacaatttgcttgctatccaaagtgtgtggtctaataccttctgaccaaattcttaatacacttaatggcttaacttgttagtgtcagggtctatgtgtttttaagtcttattattatatcctgcctcatatttatgaggaaaggttaattttgaagatatattccatgaacatacttaagtgctaaacttctttcattccttttgttatgttgtatagttctacctattcgtcagcagtgccctcaaacaagtgctattcatgtcaggcttgagcttgctaggtcccaacggtcttagtttgtcattgcacacactagacttttagttctggtgctttatcttggggtacacttgttttgaggaatggtttggttctaggatttgtctggccatcatctggtcaatccattgttcttaggcaatgatgtcattctcatgttttattgttgtatgaggaagtctttgaaacttggaccattactcagatgaggacaacccctttccttgaaaaaaaggctgcctcctaggtcatatacattgtagtcactcattgcttagagaactgaagcaacatcaaatggtttgttaacattttatgtaaatcaatgctggaaagcacctctgtgttgttgtggagaaggtatcctctatggtgttgttgatgcctttattgagagttatcattagggttaaatttagccgattcattcagatgattcatggcatatctacgttaatgatgaatggtaagggaagaaacatttggtcttgaaccacttcgtgaagtttgcaatttgaattcatttatatctgcgatcatggtcctaattcctgctgcaagtatgattcttacttttaactttgtgttggttttaaaagtattatcaggttggctggcaattttaattatgaccacagtttatttgtggtgcctaccgtgtttcagtgttcctctgtaacagtctcctatcagtagacatgggatatcctgtcaaaagtttgaaaactgtgcacatcaataaagtggtttgcatgatgatttagattttcaactgcatattctattgccatctttcgtgagaagactttattacaactctaagagttgtgtaacctttagtgcatgtctatttgc

SEQ ID NO: 124667 - DNA, 598 bp, Zea Mays
aaagaataggggcttgaccgctgaagttgttgttgtttactttgttttcaagaatattcagcctttgaaggatagagtctaccatgcttacctttatactggtgttaatgacccttctcggattaccaacaagcgtatctgaggaggacgtgctgagtcgggttgactcgatgctgaggggcaaagcttcgaatgctggtgctccccttcgtattctgcctagaaccttcccccttgtggtaagcattgttgcatatgagttccagtatttgtcatgtgtagtgtccttactatgtcgttttgtcgccacggaggtcttttttagagttcgtttccaacttgcctgttgaagacggtagtccaggccatagagggtgaccttcttcagaagatattgaagccctcattgctacgtaccggggtctccctaaagaggaaaaacatactaatctctggatgcaaacgattgttgatgacgctgaagtaaatgttgttcttagtatgctagctggcgagttgtctgaatctgcccgcactgagtcggcgagtgctacagctgggcgtgccttcggcagggatgagggagcttgcagtcccg

SEQ ID NO: 124668 - DNA, 456 bp, Zea Mays
ctgggatatgactggctcaagagccacaatcctatggaatgtgactaggacaacaaaatactgacattcagggataaaggggtgagggtgtagctgaggggtgatggagtgggaaataaagaggtgctacaagtatcttttgtacagctgcaccgatggatgaaggtaatgaggtctgggtttttgtgatgttgggaacagtccaggaagaagtgactgaaggggatcaggaacctttgagacagatactcaaagagtttgaggacgtctttgttgtgcccactattttacctccatccagggtgtatgatcatcacattcccttgctaccaggatctattccagtgaattcaaggccttacacgtactcaccttttcacaagacagaaatagaaaagtaggtgacataattatttactacaggcctgatagcacccagtaccagtccctttgcat

SEQ ID NO: 124669 - DNA, 437 bp, Zea Mays
cactacaactcctatttcctgcctccaacaatgttgcggaatatgaagtgctgatacacgggcttagtatcgccatatcactcaaaatcaaaaggttgatggtatatggagactcactggtagtgatcagccaagtcaataaaggttggtattgctccatagaatccatgagcaattaatgtgctgctgtcagaaaaattgaggataaatttgagggctggagtttcaccttgtagaaagagatcgcaacatggcagctgatgcattatccaagctagagtcaagccgagcataggacctacccggtgtctttgtccaagaggtgcagcagtccagtgtcacgtcaggtccaggagaggaatgcaaagcaatagagcaagcagtaccaaacccaagtgactggagggcaccaatcatcaaatacatcagaaatgaag

SEQ ID NO: 124670 - DNA, 407 bp, Zea Mays
cctagcctcgccccatcccctggaccgcttccccgtaaagccatgaagcttctccaagcttgagccgaggcattgcctcaccggagaggcggattcaccctcactggacttcggtcacccgccgccgcgcgtgaaccgagctaaccagtaagtcattttccaattcctgggacccacatcttccctagcatccagtgaagctctctgacctgttcaattgacctatcgtgccctggttatgccggactcctcaccgctagcgagcatctccgcctgcgcacgcggaccggctgactccgaccatccccgacggcgacccgcacattgtcgtgatcctcaagacctccctacatcctcgaccacctcactggagcagtctcgccgccggtaagcccctccaccccttt

SEQ ID NO: 124671 - DNA, 561 bp, Zea Mays
gcaataaactgaaaaatagtttttaccaaagttggcgcattctcttcggagcaaaattttattcgtggtgaccttgacggggttatctgatgaataagcggcaaagccgaagcttttaatgagatccttagtgatagaggagatttcggtgcctttgccggtgctcgaggagccatctcgctccttgagagagctggctgcgagcacgcaaaagctgttattcaaccagaatttttggtctcggctaacgacattaagaacccttcagctaaagccactgctctgagcggaaaattctattccgaagtctggttgaaaggtggccgaaagatagccaatgaagctatcagaaaaaatgagaaggagtctcatgctgccttggaagaggcgagaaaggctgaagcagctgcaaagcatgaaagacttataggtatgcttgtcatgatttagcttcgtaaattgttttagcttcggaactaacaaacacttatactatggtgcagccaaactttatccccatctggagccatatgaccctgaagcctatccatctctgaaagg

SEQ ID NO: 124672 - DNA, 888 bp, Zea Mays
actagctgacggtctcactgatgctcatgcctccgcctccctgcccgccgacgctgccgcaccttctccgccacctccgcggccgcatgctcaccacccagctcctcgaccacctcatcaggtcaacctcatcctcgccgttcccctccctctccttctccgtcttcatcctcctcctccgctcctccctccgcccgtcccacttcactttcccattccttgcccgcgccgccgcgcgcctttcctccgcctccctcgcgtctgcgctccacgcgcacccgctgcggctcgggctcctccccgccgacctccacgtcgccaactccctcgtccacatgtacgcggcctgcgccctgccggaccacgccaaccgagtgttcgacgaaatcccgcgccccaaccttgtctcctggaacgcgctcctcgatgggtacgccaagtgccacgacctccccgctgcgcgaaaggtgttcgctcggatgccccagcgggacgtggtgtcctggagcgccatgatcgacgggtgcgtcaagtgtggggagcaccgcgaggcgctcgcgctgttcgagatgatggagaatgctgccgccaggtcagcagaggaggaggatggtgggggtggggcgagggctaacgacgtcacgatggtgagcgtgcttggagcctgtgctcagcttggagacctcgagcgcggaaggcgggcgcaccggtgcctgagggaacgtggctttgcattgaacctcaggcttgcaacctcgctcgttgacatgtatgccaagtgtggggccatcagtgaggcaatggaggtgttctgggctgtgccggtggagagcaccgatgttctgatatggaatgctgtgatcggtggccttgcggtgcatggcatgg

SEQ ID NO: 124673 - DNA, 540 bp, Zea Mays
gagctctgcatggaaatactcctttcttcatggtctacggttcagaagcagtactacctgctgatctcaagtttggggcgccaaggttgatctttgaaaacatagcagaagccgaggctactaggctggaggatgttgatgtactcaaagaagaacggctgaatacggtaattcaatcagcacggtaccaacaaactctgaggcgctatcacgataagaccatgcgacattgatccttcacagtaggagatctcgtcctccgccgaattctaacaggggaaggacggcacaagttgtcacctctatgggaaggaccgttcatagtagcagaagtcactcggccgggatcatatcgcctcactcagatggacggcacagaaattgggaactcatggaacatagaacacctcaggaagttttacccctagccgtatttcaaaagctattgggacgacaatgtactctgtaaactgggaaatatatcatcaataaaaagacttcaagagcgctcaaattattcattgtcgacctgcattctta

SEQ ID NO: 124674 - DNA, 285 bp, Zea Mays
caggtttggaccatgcatcttgaacggcctctttaaatccctccatctttacccaaaagttttcgaaatggaaggaggggctacatgttctcgtcagctcttcctgtaggagaagcggagtgtgatcagacatgagggacgggagggagtgcatgcagcaattggggaagagcatctcccattcagaagtgcagaagattctgtcaatccttgttagagttggactagcatggccattgctccaagtgtaacgccgaccattgaggcggatttctttgagcaaca

SEQ ID NO: 124675 - DNA, 537 bp, Zea Mays
cgcttgcacatcattcccaagtgcagtgggtggcctcctaatgccgaagcgagaccatatagggcgttgaataatccctttcacatcctccctttgactcaggtcatttttcacgtaaaaccattcctgcatctaagagtctggccacctcttccgaaacgtgggcacaggataactcgcctcagatcgaggcatgaagctataacaaccaaaattattatgatattgttcctttccacttgccttcatctcataagacaactcatgaatattgcaaaagcatcttgcatctggttctagtccttggctcctcatggcccagataaaacccccactttaataagagcttcaggggtaatctaatgaaggtatatctcaaatgtcttcaaaacatcgactagcatcttatgaagcgggaaacaaagcccagccttcatgaagctcctgaagactaccacttcattgctttctggcagcggaacggtgtcctctcccccagccctcactatagacacatcatgaaaatatttccccttc

SEQ ID NO: 124676 - DNA, 530 bp, Zea Mays
tttatatttagatattgtacttctagtggggacagattccccgcggggttccccacggggataaattccccgacggagacgtggatgggagaaaaagctcccccgtgagcgttcgtggggacggggatctttcctccccacagggacggggatgggaagctattccccgacggggaaatccccgttgccatccctaactgaagtcaactgcttggacgatataattacacccgacggtcatgtcaagttactactcaggggcagtttgctaaacgctcagcgcaccaagtcgtctcttgcctacacccattggggacgtccaggaaatttcaatagattttccccaagcagtcacatccatacagtatacgcaatgaatgtattaagagagaaggaagatatctatagaaaccggaggaaagccaaaaatagctgctgaagtacaagtctaatcaacagaagcattgaaacacaaagcaaaataaagaccagccaagagccatctatcggatgtccaatctgtcgccgat

SEQ ID NO: 124677 - DNA, 450 bp, Zea Mays
cttggcgatctcattaatttcttgtgacttccttcggtaatgaattttacttcaacccttctattggaaccttacctatcttacccttgattgttttatccacttcgccacttcgcgattcttgccttaactctatcctttgtcatgcattttgttattattaccttcaccttagacacctctatatcttacttgatgtttgtctcctacctgccctttaaaatcacctctctcccgtcttattctgagagctatactttacctatctttaccttggtcgtatcctcttctttggcttgcgagtttgtaacttcgtccttagttgtgcttttgtttgttattgcctccacctatcccatctctcaatcttaccttggtgattacgctatgttcgttacctaaaacctccaatctcccacttcagttcaagcgtggtctcttacttatctc

SEQ ID NO: 124678 - DNA, 331 bp, Zea Mays
agaaagaactccgtgttgagtggcaatgcaactgaaggttgagtttgacttctctccttccttgacgaggttgatcttttcttctccggtcttggtctcattgattcgcggtgagtgaatatcatcggggttggggaatatggttgggatagatatggatgagatagactacatgatgtaggtcaaaagtttgttcgatgttatgtggggatagtcagattatacaattcatcatgactctattggttgggttatatctcatgcatgtggctgagttggttgaaggcactagtttaggtttaagtgctgagttggttgaaggcactagttt

SEQ ID NO: 124679 - DNA, 519 bp, Zea Mays
gccagcggcggcaaggtggaaagcacagacgacgacgcgacaaccggcgcggcgtcaaacaacgcaacttccggaggccagaacgtcgcggccgagaccatggcatttgcagccgcggatgatggcgccaacggcaacatcactgaaaacagctacgcaacgaacagcagcgccacgactgaagggaagataccgacggttggagaaggagacgcggcagagaaagccgacctgctgccgagcgggcaggcggagctgctgaacgagacggcgtcggcggtggcggagaacggcgcgttcccgacccaggcggcggaatcgagcgaggagaaggaggcgctcgcaggcaagaacaagaagaagaaccagaagaaaaagaagcagaagagcaaggaccagggcgccgcctctggcgagacggcggaggggaaggagacgtacgcccacacctggaagctctgcaacgcgagcaccggcgcggactacatcccgtgcctggacaacgaggcggccatcaag

SEQ ID NO: 124680 - DNA, 286 bp, Zea Mays
tgagtattggattgctatgagttcgaagattacaagtgattgtgggatgtggaagatgaagttgtctatcaatttaatggagtgttctctctttcttgtaggggtacctctgcaaccttatatagctgactggagagatattcctttatagatcattgagtccactcgagtctacttcctgttgctacaagtattcctattctttcggtgcttggttgccttctctgggttatcatctgagtgatccggcgcttgaccacgctcgtgacgtgtcttcagagttcag

SEQ ID NO: 124681 - DNA, 786 bp, Zea Mays
cctgtgtcagccttcttcatcgctcgataatcacgcattcttttatttctcgcctccctttcttcgttggtttcttcagcctttcttcttgcacggtattctcgttgttttctattcctctcctccctatgacgctcatgttcatcggacggacctggttgtgggaacatatatttgcaaaaaggttcgacatcagtaataataaataataaatgaaaacattatgctacttggtttgattatgcatgaacctgtgataatttggttagatatatcagtaagcgcagtctgtcgtcttgttcccattgtgtactccataggatcaatgggaccagtcgagtccatgtattgcaatccggatgcctgagaaattgttgaacatggtgtctgcaacaagaatctcgtagtatacggtgtctcagcccgtgccacatgtgtgttatcccctccaggagcttgcattacgatcgaagatccaaaacaataaagttgggactgtccgggcgagcaaaaaaaacaatagaatatattattcataggggatacctgtctcagccttcttcctcgcgcgataatcacacatccttttatttcttgcctccctttcttctgtggtttcatcagcctttcttcgtgcatagtattctctttgttttctgttcctctccttcctcttacgttcttcgtcatcagatcgcactgtttgtgggcacatatttcataattaaatagctcgatattatcagtattaaacgaaaacatggaaacatagcagtatgaaccttt

SEQ ID NO: 124682 - DNA, 503 bp, Zea Mays
ctcattcaccagctagctaactaactaaccacaggcaaggcagcgcggcgcaggattactctactagctcacatgggtactctctcctcctctcccatgaatctttttttgaggtggcgctgcatgatatgatgtgatacacaagggaggcatgcagcaagcaagagaatcgtgtagcaggaccaccagaaggaattgcattgctacaacgatctctccagctagctaggtggttctgcaagaatgtgagtggacaaaggcacaaagaagcttgtggcgtctgcatctgcatgcgttgttgaagaggacatgcctgagctcaggcgtcgtgggccgtggtagtggtcaccgacatgcatgtctggcgacagcaggtcatgtccaaccacactgcgacatgacatctggtagctccttccccccctaccacccatggagacggagcacgcgcgcgcatgcaagcccccccggctcaccggtcacgcacgtcgtctccttccctg

SEQ ID NO: 124683 - DNA, 440 bp, Zea Mays
aagaaactatccgcgcacagaccaactacaggcgcaaccagaccaacataataaatgcgccagaccaagcgcgcaacgcccctatagacatagccggatgcgcgaaggcacacagcttcatcatacaaactatagtaacatacttacagggagggcatcacaccttacatcggttcaaccttcggaatgattcccatctccctatagttaaatagcattatcctaagctcctcaccctcaaaaagacttcgcaactccccctcacctacactcaccccagccggcgaggacaacaattcctgcttgccagccctgcccacacgaagccgaccgccatccacctcactcactctacgcttcgccaccgcccttcgccgcctacgcccagcactcggaccaggcacaacttcagcatccgcaccacgcggagaagtctccgc

SEQ ID NO: 124684 - DNA, 686 bp, Zea Mays
gggattagctatatagtctagagggtagtttataatttgcattatcttctaccttagtttaatgacgagagtgatagcttcggcgagctgaactaacgaacacgggcagcgacacgatgaagcagcaagaccggtgcggtgacggaatcgaacgacatccaacagcttcttccgatggcacatggcagtacagctccggcgaggagctctagcggtgcgaacaacagcaatcagagcaggaggcgagcttccagaccacggcgttgcagctagtgcaggcagctgtgtcatggcagtagcagcagcagggtggcgagaggagggatgacgagcagggggctgatgcgcgttttatagaggaggttaggaaagagattaaactcggattaatgccatagaggccaaataaacgttgcattaacccggaaaaacgacaaccattaagctccaaacaatagcgactgtaaatggagagagaaggggagaagaaatgctaggcgttgaaatggggaggagaagagccagcgaacggcgttgcagcagtgtggaggagaagaggctcaggtgcgggcgctccactgcacttagtcgagtaggcggtgtgaattcgggcggtcggcggatgaacttccaggcgacgactgtaatacccaggagacgaacgaacgaagaatttggggagaaga

SEQ ID NO: 124685 - DNA, 634 bp, Zea Mays
agtcggataattcattcttcggcatcgtaccaactgaaggggagtacctgttaggccacctcgtcatgccagtcacctttagcgctccagacagctaccagaccaaattcctacacttcgaggtagctcggttcgactgcggatacaatgctatcattgggaggccgagctgggcaaattcatggtcatctcgtactacccgtacatgatactcaagatgccttgacctcagggtatcatcaccgtccgatctgacttctagggagccacataatgcttttggggggctatctagacggaccctggatggcacttacaacgctgaacgacgacacaccagcagtggatgacctcacaatcccagaaaagaagcatctaccgctacctctatgcgaccgaccaaagaaaccaagagggctaaccttggtttcttcgatgaacgcaagacggtaatcatcagttctagcctcactgccaaataggaaagcgcgtcgtccggtttctgcaagacaccaagatgtgttcttgtgggcaacacgtggacatgccaggagtcacgagagagctggccgagcaccaactgaaggtgtatcctcaggcaaaactgatctggcagaagctacgccgtttcacg

SEQ ID NO: 124686 - DNA, 495 bp, Zea Mays
gtggtcgcgccgtcgtggtttggtgccgtggacagttctattgtcgaccatcaaaccatgttgtcctcggccaaagccacatgctcactaggatatagatagggtagtgatactctatgaatgcttggcttgagctctaccatggggatgcctctggatggtgtttgccgagccaaagatctcacaggcgtcgtggtctgggcaggtggatgcttgaccgaggtagaaaagcatggttatccgttcgtgtaagtcaagggcacaaattagtgctagtttaggagcgttagatagcagcaccaccacttccctggctcttgactcaccggagttgggcggcaggagtcgtggacatgtccgtgtaaatgagccagaatcgaggggtgtttgtgcgagtgtcagcgagggggcacgatagtggcaaggtctcgggttgattcagtcggagtgtggggtcttttgtgcaaaaacgcaggagcaggcggttagccgcgg

SEQ ID NO: 124687 - DNA, 498 bp, Zea Mays
tgatgggaaagggctttactactattatccgttggaagaacagagcatgtggttgttcgtcagcccaatcagcagcagcaggatcaattactagcctcgggcaatagtgacaatcgccataccaacaggcgcacgcacgcacgcacagtggttcccccactgcgctgcatggacaggtaggcccctcccccccgggtctcgtcacgtcagatgcccctgtggctgtaggccaggagggaagcggggccccaccacccgcatttcgacataaacgctgcctccatcgctaccgccgtcccgcgctccgttcgacggcccggcccccaaaagcgaaacccgagatcgccgcacccacacaccaccaccacccggcaggagcagcagagcgcacagcaccagcgcgcggtcgagacccgcgagcgcgcgccgccatcatggcgccggcaccctcctcctccaggaccagggccctcccccccgccatcctgtacatcctcc

SEQ ID NO: 124688 - DNA, 476 bp, Zea Mays
cttttttggaattttaattgggagaacaatccacggcctggaggggtctgttttagacagccagagccatctcattcgaatggcccagcagagttcttttaaacttgagatacccagcccaccaagctgaaggggcgacaaacctttctctaagccacaaggcagtgcccccttttacctcttttcaacctctctaaatggaacctttccttattctgtcaatggtatctaaaccccattgtgggatatccactgccattgccatataaaccgtcatgctggtaaggacatgctgaactaggattcttctccctgctttgtcaataagtctgccttccaacttgaaagctgattagcaaatctatcagtaaaaggttggaagtgctgcctagataacttgtgcaatgatagaggaagattcaaataacggcaagggaatgaagatattccacaaggcatcaaaccttgggtctcca

SEQ ID NO: 124689 - DNA, 349 bp, Zea Mays
gagctcttggatgaagcaatggttctacgtaaagaatgatctgaatcagagagaaggatgtgaggggcatcattcaacgtcccaattggtcgcgtttcggcattagaagaccatcaatcgcaattgggaatgaagtgcaagcgtgcctaatggctttcaacactttatgtacctacatcagtaccagggatttgatacaagaacacattgctttcaaagtatggcctcctgtcaatgaatgggaaatgctgaaggagactgctgctggctctagccaaggtggcttggtttatcttaagtatacctttcggtatagaaccaatttgacaagccaaatgatgataggata

SEQ ID NO: 124690 - DNA, 538 bp, Zea Mays
ctcttcatcgctcctggaggtgaacaactcaagtatgcactccagctcctgtttctagcatccaacaatgccacagagtacgaggcacaggtccatggactaagcatcgtcgtttcactcggcatcaagagattaatggtgtacggtgactcactagtgttcataagccaagtgaaaaaagactgggattgctcaaccgactcaatgaacagatattgcgcagtggtacggaagctagaggacaagttcgaaggattagaattccacaacgtggaaagagatcgcaacgcggcggcggatgcactatcgaaactggggtccagtcgggcacaagttccacctggggttttcatccaagaaatacagcaacagagtgtcaccacagatcagatggaggaatgccacgttctgagtcaggaagaagcagatcccaatgactggagggagccaatcatcagatacataagaaacgaggaagaaccagatgacaaggctgaggcggagagcatcgcgagacagttggcccactataccatta

SEQ ID NO: 124691 - DNA, 405 bp, Zea Mays
taactcaaggtggaagatctgtcagtgagtacgtgcacaagttcacagagttggctcgttacgcgcctgacgatgtcagcaccgagaccaggaagatggcccgttttctgaaagggctaagaccagaactcaagaccatcctcgccagccaagatttcctcaacttctcgcacctctccaacaaagccatccaagtggaaagggcaaaagaggaagaaaaagggcacctcaagaggaaattccaggttctccgagctcagcaacaagaccgtcaccagagagctcgatccttcgggcttccacccaagggaccaagcttcaatagaccagctggacccactccgtcacgttacagtcagcagagtcagagctcctttcaggccccctcggttgcaagcaaccaac

SEQ ID NO: 124692 - DNA, 372 bp, Zea Mays
ggggggtaagcgggagacggcggcgtcgaggacaagggcggggtgcggcatcaaggccgagaagcacgggccacgcaggaggacatcagagacagtggcggatgcggtgagcgcagggtgaatcgtgagcggggaggacagggttggagagcacggtatcgctgtgcacggctatagttgatgcttaataggtagtagagatttagttaattatatataaaagtggagctttaatttaagatttggtgtggtatatagtgaacagaaaaattatttgttttttttaaaaaaatatagaattaatcgtgttattatttgtaataaagtagagaacgtaatgattagtgtagaaaacataacaatgaaaatttt

SEQ ID NO: 124693 - DNA, 805 bp, Zea Mays
ctcgtatccttggaatcttgtatactcttatattcttatgtatgcttattttcataccccaataactgttcaagacatttcagttaacatgtccttgaccacccgttttttaatggtccatgagcgatcattttatgttgcccatccttggtgatctcgttgtttccttgtaactccactcggtaatgaatctttacttcaacccttctgttggaaccttatcgatcttacccttgattgttttctccactttgtcgttttgcgagtcttgtcttaactatatcctttgttacgcttttttttaattattatcatatgcacccttgacacctctatatcctacaatgatgtttgtctcatacctgctctttaaaattgcctctcttccatctcataccttctttctcttggtcgtatcctcttttttggctcgcgagtttgtaacctcatcctttgttgcctgtacccttctcatctctcaatcttaccttggtgattacgctatgttcgttatctaaaacctccaatctcccaccttagttcaagcgtggtctcttacttatctcacccgtggttatatcctatactttacctcttgcaagacttatcttatctctattcttgattgtacctagattcctggggtttttatgcacatttacctcttcctttatatccttgcctattatcacctttgacccttgacctctctccatatttaccatgatgtttacctattattttttttgcctcacttattccatttcaatccgagagtgttgttttccctatcccgctcttgttc

SEQ ID NO: 124694 - DNA, 421 bp, Zea Mays
cacagagtttgcccgttacgcgcctgacgatgtcagcaccgagtctaggaagatggcccattttctgaaaggactaagacccaagcttaagaccatccttgccagccaagacttcctcaacttctctcacctctccaacaaagccatccaagtggaaagggcaaaagaggaagaaaaagggcacctcaagaggaaattccaagttctccgagctcaacagcaagaacgtcaccagagaactcgaccctttgggcttccacccaggggactaagcttcaataaaccatctggacccactccatcgcgctacagtcagcagagtcagagctcccttcaggcaccctccgttgcaagtaaccaaccgccagcaaatgcctattggcactgcggagaccccagtcacttcaagaataactgcccc

SEQ ID NO: 124695 - DNA, 646 bp, Zea Mays
attatctgatcaatgtagatctctgcatatttctctgtcctgtgggtggtgtgtactggtaagaaatgcgtagtccttgtcaatctgtccacaataacccaaattgaatcatggtgcctagatgtattgggtaatcccactataaagtccatgcaaatgtcctcccatttccaagatggtatgggaaggggttgcaaagggcctgctgccttcaagtgactagcttttattctctggcaagtgtcacactcggatatgtacttggcaatttcccttctcattctggtccaccaatataaagacctgagatcatggtacatcttgttgctaccagggtgcatggagaatttggaaaggtgagcttcgtctaggatcttctttctgagttcagggtccttgggaacaaccaatcggtctccaaaccataaaattcccttgccgtcctgacggaagcacttgtatttctctgccttctgcttgaccatttccttaatcatttgaacacccttgtcctcaatctgtgccctcactatttgctcttgcaatgtgggttccaccgagatataattcatttcaccggagggaataacttccaggttcagcttgcatagctcatcgcacagggtggtgactcttgcatccatgc

SEQ ID NO: 124696 - DNA, 315 bp, Zea Mays
cactgaagtccaagcaagaatccactgcctcttcaacaggaaagggaacgcccaaggccctcaagcgggaaattgtgaacctacaaagttagctgtctaaccctccatagtacacatccagacatcatgtcatcgacaataacatcgaacggatcccgcatcaaagcacgttccagggtttcaacgtcactgatgacaaatgtcctctatcaacaaggttgcatgccactccctagccttgtaactatagggcacctagctggccaaaatacaatggcaaggtagaccattcatagttcatcatgagctaccaaa

SEQ ID NO: 124697 - DNA, 510 bp, Zea Mays
cttgttcttggtattgactaacacatgtacgtctagatacacaacagagaccatttatctattacaagactttgaatggcttagagcttggaaacgagtgtagctctacagtaatcttgatttattcattgatttaattagtttgggacgagggtaactttaccgtaatcttttcttattattatttcttaatccacatctcaagcaactcgtagtagtagtacatggtaaatcgaggaaacccactgcgagaaataactacatatactgtaagcagcgcaagcatacatatatacagacactcctatacaggtaaaaaaatactgtacgtaacgtaacgtaacgtaacgtaactaactaattcgcagcatgcatccaccgtccagcggcggcgtcaggcaacgcgcgtaccgtggctacctactcttggtcgtcgtcgtcaatatccacctgcaccaccttcttcttcctgcagccgccgacgggacgggcgtcgtcgtccgcggcggc

SEQ ID NO: 124698 - DNA, 348 bp, Zea Mays
ctttattttccatgattaatgacaaacttgtatgatacattcttcacattacagagagatccagaaactggtatagaaccaaccgatctatccctttggatgattactcattgtaaaaatgatgaatggtcggaagaggcttcacgtggcatttatgtgagtaaatcacaaagcttactactaaaacatactttaaaatactgggcatgaattcttatttgaattgagctaacttgaactatattgttcttttcaggagaaggtagctgagaaaattgttgagaaaatgtatcaaacagaaagatttgatctaacaagagaagaggaaaatgctattttccaaacaac

SEQ ID NO: 124699 - DNA, 519 bp, Zea Mays
caaaataccgaaagtataactttgggcaaggtcgattgaccacagactgctgcacataaggttgcactttcaacaacacctcctctcccacctgaaactctcttggtatcctcaaatccgcataatgcttgaaccctttgttgtgccttagataaatgctccttaaacatagcactgtggagttccctctgctgcacccattctctagcagtctcatcttcatcatcttgaactgctagagcccatatgactaaagcctcatacccatacaatgccttgaaaggtgaacatcccaaagacacatgatgggaagtgttataccaaaactcagccaaagccaaccaaactttccatttttaggggtagcagatacaacacatctgagatacatctctaggctctggttaaccctcgcattttgcccatcaatttgaggctggtaagtagtacttagagcaaacttcacttccaacaacttaaacaattgtttccaaaatgttcttgtaaatatcttatctc

SEQ ID NO: 124700 - DNA, 554 bp, Zea Mays
gtgttcccgatgatctatctcggtttagcacaattggttgggtcgataagttatcagaacacacagggatgctagaacaagggccaaggacaacatgatcggacttgatttgtggctggccatggcaaggtgttcttgcggcttgtttgaatcgatttgggggaacagagaaattcgcgggctctggtgagtaattgaaggcacgagtgggtggattggatgcttgaatacctaatgaagctgagggtgtgctcaatttataggctccgggggcggtggcttatgaatcggggatggcgcggtggcggccggagagaagagggtgtactggcgcagtgattagtggcttgtaccgtggcgagctcaccgacgatcaccgaatatgcttaacgcgacctactgcgacgtggtaagacgcccgggtacgtggcaaatgaccggcaggcagccaacgccggcgagcttatcggtacaggccgcaaatcatgggggcacgacggctggccaccggagttatccctaggtgaagatcttttgtcttggagtattatccg

SEQ ID NO: 124701 - DNA, 598 bp, Zea Mays
ccccgtcactcaaccacaccagtaggtgcaccacaaggtcgaatttggctggaatagtattctggcttcacggtcagaacgagttatccggccaactaagtgtatagggataagttcaacatgactcgagggaccacaacggtacggcccttaatcgatacagacgggtataagtagacaccaagacctccatgccttgtgtttccttatcttcatccggtccgttctcatattaacttcatattattcattgatattccccaatgactttatccaaatcaagcataaggtaagcacaagtaccttgcaggtgacaggaaatcacttgactttgaaggtctaagcagacttaagcatttaagcgtacttaatttagccataaccagagatttagacatccaaaataggcgaactaagactttctggaaagctaataaaatgatctacaaaacatttgtaatcatcataggccaatttaatacttaacaaattcaaacaatacaaataaggtgtagctgtccaggtttgaacagattgagtcttctgactttaaacagctataactgaagattcagaccaccaaaaatagtgatccata

SEQ ID NO: 124702 - DNA, 635 bp, Zea Mays
cttttgcaccttcggcatttttgcctctatcagagggctcagaatttttggcatccttattatttcttcaacctttggctcttcagccttatcaaccttatcttcgactggcttgactatatgcgtctttggcattatagtcggctcttcggcgctctgtgtaatcgaagcagtttgtgttgcttcagttgctgaagtggaccctgcgccaaatttaggcactgtggccggttcaatgtagcgcggccggtgggtcagaacttaatctttttgcccttcggctcagctacagtggccgaagcggcggtcttcctctttttctcttgcccttttatcggataatggtaatcagggtatacgaagccaatagcatcaaataccctgtttaatcttttcttgccccgacttccaaaggctgcggacagatcattatcttcggccttggagtatgctccaagtagctcgtcactagtagcttcgatgcacttcagccagtcatcgtttggctcatcaaacttttccctgaatctgaaggtatacttcagtcggaccagtccaccctcactagaatcagcggtggtctccttcggcatgtcctagctttccacaagtggccataccatgaaggatatatg

SEQ ID NO: 124703 - DNA, 450 bp, Zea Mays
tacgtaccctactgggttgattcctccaacccagctgctcatacgaagcgggctccctcagggtctggaggccctgcctcctctgatgagccacctcctcagcctccacatcacccatcctcctctcgcgccgccgctacctcacgtccgattgaccgcagcgggagaggaagtggtccgggctagggacggggtagaggccggggacttttcattcgtctggctaagggccttcttggcgtcttcgccatgtgccgcacccaggcggtcgaggagtctgtgcatcgtcgcaggaccgaccggctacatgaggatattcttcgttatgcagccgagactggtcatcctctccctccccggtcccctccacctccagcccctaccttccccgcagaccttaatgagtggcaccaacaggagtttggtgtgccattcattaccccggaggat

SEQ ID NO: 124704 - DNA, 513 bp, Zea Mays
ctttgaaattcaactgagttgacacttctcttgtagatggttcacactctccaaaccacccgcgtcaacaccagctatgcccctcagccccggcagatcccggtctacccagtggtagtcgaggaagttccggcgcatctccctcccgtccgagtggagaatgtaatcaacctggaggacagctcggaggagcagctgccgacccccaccccgttggccgagtccctggccttcatagctgggtcatcgacgtcagcatcgtctgcaccagccttccaagcacctgcacctggaggcgacgaccccgacgactccggagacggtgatgacgaggatgacgacgacgaagacgatggagaagacggacacgtcaacgaggaagctgactacgcccagcaggacaacttcatggggtttggtcctgttgtcaaacattacacatcaatgttcgagacggggcacttccccaacttgttgcaggaggtgttgcatgcgctaggcacctacgtccgc

SEQ ID NO: 124705 - DNA, 519 bp, Zea Mays
tacaggaattggacagattcagttactaaacttgcgaaaagcataacttctaaacgatcagacttatgactgtcaaattttaacaaaagtaagataataatgttatctacaactttcttgtgaccatcaataactgatttcaacattaacttagtcaaccattgcaatctctgaaatttgttcagaatttcgacagattcaggtgttggacttgtgaaaagtatagcttctaaaccatcaattctcagctcatgcatttttaggacgagctagatacacaagttaactacaacttttatatagcatatatctacagaaaacatactttacttaactagattaatcgcacaactaaaactgtacacgcaggaatctcagtttgcaagcacgagagcacttaactaaattaccaagcaaaatcattgagaggtactaccaccaatttctcaagtttaaatcattatgacttagttatcaagtttcaatttatgtcaagacacttaatcatttcaagaaaca

SEQ ID NO: 124706 - DNA, 1033 bp, Zea Mays
ttattttattagatcattttcttgctccctccattgcttacttgtcttattaagaaaatagcttacatggttgacattttaggcacggaaccaaactcgtccctagagatctttgttattctcccatatgatgctcgacaactctcatagttttatagtgttgctcttcaattaattgcccgacggtaatcgatacaactttaaatatctccctaatttttgtagatcggtactgatatacttctccactcatcaaacatcttgtttgaccaaagaatattgttgaataacttggctatccatactatagctatgtccctgaggctccatgcttctattgagataccattagacccatcgccttacacccctttcatcctcttcaatgcctctctctaatctcagatttttggatcgtgcacgaaacgcctattggtgtcatcatccaattgaaaggttgtgtttccattgaataatttgtcaaaatacccttgccatctctgttgatctcatccccttcatgaagagctgcaccattttatccttaacgcacttcacttgattgaagtttcttgtctttctttcatgaaccctagccatctatatatgtccttctctctttcctttgtactcaaacgttgataaaggatatccttgtatgccctacccttcgtcacatatacaacttgttttacggtcttctttgctaccttgtgcttctttatgtttttcatactcctgtcatggttcatatatctagagcattctttcttttccataacaaccctttatacttcctcgttccagcatcaagtatctttagcttcgtctccacctttggttgctccacacgtctctgaggttacctttcgagtgtaagttgccatcttctcccacatgttattcgtatcatcttctttcatgtgccatctttgatgatcctttctttaacaacccttgtaatctctgcttgtttatccctacaggtacacatctgaaaacgaaattccaccaccataaatttatattgaaa

SEQ ID NO: 124707 - DNA, 554 bp, Zea Mays
gggagatccatgagctcaagaccaagctcgacgcggccggcgcccagggtaccttcgatcacgtcgccagtcaggtccagctcatcacgcgtcgccataagtgaagcatcaaggtcctctcagcaatgatttagacgacattgggattgtgctcctctctgcgactgttatcgtcgagtgccacgctgcctcgcgctacttcgtcgttgacacctcgaggattaggattctactccgtgtgtcgctccatctccttccatgcggacgccctagccctcaacaagctcgccacattgctctcctcctctgtcactgcgggtggtgctgggggcaacagggagcagatttgggcaggtcacccacgtgctgcatcatgccgcaaccgccctcgcccttggccacgatcttggcttccaacgaatgtgttagggactgtaggcgacctcatcacgagtggagcattcaggcaggtctacctcggcatggacctcgagtccagtgagatcctcgttgtcaaacaggttagtcttacatctcgattctggtgatttgat

SEQ ID NO: 124708 - DNA, 642 bp, Zea Mays
cacagaatatgaagtgggctttaacaagatggtccgctttgttcctcatgtggcttacaatgaattggagaaggcgagccagttctgtcagggcttgaaaccttctatcagacatgctctgggtgcctttccattggtggattttcgtactacggtagagcaggcattaggcgtggagatgcaacatcagtacaccatggaatctcagaagtcttcgggtgttgatcagtctcgtggctaggacgcgaggagggccaacactgggggtccagcccacaagaggggaaagtcgcaacaccagcgccaccacccctatcgtggaagatcctctgaatcgggtacttcaggagggagtacttagaggtatcgggctgttccgaagcccgggctagggttggtgtgtttccgttgtggtgaagcgcatcgccgtgccgagtgtcagtggagtggcaggtgctctatctgcagccaggatcacaaggatgtggtgtgtaggaaaatcccaatgggaagctcaaatgggagccagtgacttcttcctcttcgcagggcactgtcaacgtgatgtctatcgctgagaagcaattttctgtaccaccccctcagtagcagttctatatgcccgggactcctcagttcgtg

SEQ ID NO: 124709 - DNA, 822 bp, Zea Mays
caccatcgccaaataggggagagtgggggaggattgtcgtgtggatgtctcacctctagcatcgctccggcatggcgtgtggtcgtgatgactcgcaggggccgttcgcacatgttagtgaccttcctgtgcggagacatcaacaggaccgcgacgaattgcttaccaaagttgggaaatcaccgccaactgcaccatgccgtggtaaggcttcatcatgtcatcatcgctggtgaggaccttccccatagttttgtactgatctctgcttcgtgttgctctattcggtttcgagtttggggctctaatgcacgaagtacacgacaccggccatggcgccgcagctgatgggctctcatcgtgcgtctggccaccgtggggtggaagatgagccattgaccgtaggatcatatccggatgttccagattagaagcacgttaccggtttggctcctttaaatcaaacctgttcatctcggaacggaggggcatggatagatcatgcatgtggagctttggagctattgatctttaatcctctggttgtgatcatgtattgggtcggatataacctcaaccataggatgagatctgaacggctctgctgggaaaataccccttcggcgtgaatgataaagagaccctactcttttatctattcaacccgcaatccacaacactgaatggaccaccatagtttagcccaaaactttgcaaaaccgaccttgagctcttaggattttgtacacaacgtccctagactttagtaaatcatataaataaatctggaaaaatgattcttagtagaaaaataaatccata

SEQ ID NO: 124710 - DNA, 542 bp, Zea Mays
gggtgctgctggtgccgggtggtgggaggcgacgacaaccttctctctcagctctccctaaacgggcgacgatggtgcatgtctaggttcaacgctttagttttttttaacagaagaaagcacaggaggctcgtatatatcctcgacaccaagagctccaacaaaatctattgcaaccgtcaggagacaatcacggcggaggagtcggtctatggtttgtttcggtgccagcatttggatctgttgtgaggttgcggataactttggcaatggggcccaccagtcaatgaccaactcgtatgaccggtttcaagtatagacggttgatgcccatacgcaatgacgtagagaaaaattagttgatgtcccatccagtcgtggccattagaataaagaaaaggaaaaaagaatttgtacgtatggcaatgtgtgaaccggctatacaatttgggtttagggcgagtgagtcagattcttgcctttttcttttctattttagttccttcctaacttatgttttaaatattctaattcaattcaag

SEQ ID NO: 124711 - DNA, 506 bp, Zea Mays
tgttgctagcgtctctggttacaagtattatttagttatcatcgatgattgctctcactatttttggacatttcccttgcgcctcaaatccgacacctttcccaccctctctcatttttttgcatacgtccacacccaattccacaccaccatcaaagccgtgcagtgcgacaacggtcgagagtttgacaacctctcctcccgttccttcttcctcactcacggtgtttcacttcgcatgtcgtgtccctacacatcccagcagaatggcaaagccgagcgctctatccggaccattaacaatgtcatccgcacccttctcttccactccagcatgcccccacactattgggtcgaagctctccataccgccacctatctcatcaaccgacaccccaccaaaactctcaatttctccacccctcaccatgcgctttttggctccccacccacctatgaccaccttcgggtttttggatgtcgttgttatcctaacctctctgcca

SEQ ID NO: 124712 - DNA, 365 bp, Zea Mays
gcgccctctctctctgtctctggcgattcctccccgtcgccggcgatctccctcaccggcgtgccctgtctccggccgagctccggcgaccccgaccagtgcttctcggtgagcaacctcccttcctcccctgtcttctctccctctcagttctctgtaggcagtacaacacctccattccacccctttgtccatttttcaaattcctgtcaaatccaatgaatccaaaaggtggaatgtgttcaattgtccccattgtgtattcctgcaggtttctagctccctttgggagggtttcacaacctaatttgcctcaatctcccaaaacctaattcaccgcacgccaagtgttcggtgaaatgccc

SEQ ID NO: 124713 - DNA, 656 bp, Zea Mays
ggtacagtgctcggatgtagatcagactgccagcaccggatgttcaccgccggcgacctcttcgccgggattcgtgctacgggcgtatgggttttgttcaccaggtaaagatctcctcgtggatatgtatgagctaccgtagactcgtcacttcctgtcctttttcaccggcgacgtggcctcctggccgtcaccggtgttgccgtgtgttactgtggctgcgccacgctccaagctctccaccacgtcatatctagccgcaccagctcaccggtaaccgtcgtagcttcttaaccggtgatcaccagaggaagcgccacggtgaaagccacctgtttcacacaccgagcgctttgtttcctctggccgccagcgctgctcgaccggattgatcaccacctctcaagtattctataaattgaggcctcaacttgttccgctaggtaatcgtgcgtccagtgaaaccactcgtagctccgatcgtctcccacagcttcccaatttgggatttcccccaaaacggttgaagaacaccgcgaacccaagctcaccgtgggaagctctcctcaggtccgatcctgttatctttagtcttgttctagcatcctcatgtgcccttgatactcaccgaaccaccccattgaattatactgcca

SEQ ID NO: 124714 - DNA, 424 bp, Zea Mays
tggaatcttgaagtgtgataggaatataaactcctactgatatacatgtatttttaagaagtgtgcaagctttccctcgatacttgttggagccccataaaagggaatgctcacacaaggtcaaaccttctagtcagatgacttcatgaatcgcatcagaccttcttcacacgtaattggtgctccggttatggcctcttctagatgctccatgttgtctccattgttgagtttcctgccgaaatgttgtagttattgtttcctccagtatatagtagtggtcacaccacaaacacagatggtgtaatctcgcaagacttacaatccctcttatacaattattacaataacgtgcacaagcatcaaggggtaagacttgtgtctaacctcacttctaattactagaactaaacctatagcaaat

SEQ ID NO: 124715 - DNA, 434 bp, Zea Mays
tgggtgatcctcctcaatcctcatcgctgcaagctgatacgttagtcaataaaaaggcaaggttagaaccagtcacatgtaccattggcacggggaacaaaaggcatttgacacctacgagtattcttacagagagagcacatgttgatacagaaaacaggaagtgtctaagttcttattactcgcgcgaaaaaagtaaactgcaagctgagtgacaccatcgattagcagtagttatctacttgtgttacaaatgaagaacataaaattattttaaggcctaatcataaatttagtacttccttgtatgccagaagggtaggttagccttgaagtggaagcattttttactttacacttatcatcctccatcaccagcatcaggcaccactacctctcttttaaaactcaacccgtgggagctaagacagccc

SEQ ID NO: 124716 - DNA, 691 bp, Zea Mays
agattactacaggtgggactacacgagagcgttcttcgaggtactagcgagttccttgtctaaggtgtccccaaatgccttgagaagatcatcgaggctggctagggatacatcttcttcgtcggaccagtcatctattctggggggaggtagggctagaggggccttcttcttcttcttctctgtctggcatccctggttagcggtcttcttctggatcttctttttgggggcgagtgtctttagcttcttatcaaagtctatcttcaaggtccggtaggcctcacgggtgttggcttcctcgccttctactatgctgagactctcctggagggatgccttctcttgcttaagctcttttacttgctgctctaggctttccactcgggagtttaggtgggtacagtgggaggagagctcatcgtagtggttgtcgagggtgtggaggtatccggccatgtagacgatagtgggatcatcttctatgggatctcctcctgacagagcctggagtcttttcttccaggtgggggtgtttttgttgctgggtgggaaataccggaggggggtctcaaagacctctcggctatagttttgacacagttgtttgagggcttttcgagcaacgctctggcaagtgtctgggaagcggtgcccgatgaaggtaatttggaaggaaggttggtttggg

SEQ ID NO: 124717 - DNA, 765 bp, Zea Mays
ctaggatagattgttttaattgtttcttactgaaaagtcacccataatgtattatttagtggactgagatattttcagatgttttggactgctttgaacttcttcagttcgactacaggaccaaattcacctcccattatctcccatttctacataaggatggagctacctcactacatcaaagtggttcaccaagcatagctctttcacgttgatatagaatgcccaggccaaaaatgcatatattcaaagttatggtgcccaaaagtggagcacatcacactgaacccaaattcagttagttgaaactgacaccactcactacagcctgacagagctagtttaagaacattttactcactattttgcatagtaccaggcctcccactccacaacaacctttctatcctttctatggtctaccaatttagtataaacactttggcccaaaacactatggatcagtaacagtagggctccaaagtgaaccacattctactgtcagagttacattggtctgaacaaaaatcggataagaacacaccctgacagcccatcttcaagcaaccattactcctctttatgtagcatcaagccaacctcttctaaaggaacttgttcattgttatatgctcttcaattttgatagagattatggctaatactccatatatcaagcacaaaagaattccaaagttacccaaaacacacaaattcagactctgaatttgtactaagtctggagtccagaatttaaacattaca

SEQ ID NO: 124718 - DNA, 525 bp, Zea Mays
gtagcccacgagttaccgaggcaaggggaaacaggcagagaagacaagacgacgttgcctgatcacccctacatgcagtagcacgttagccttcgtcgcaatctacttctatgccccgcttcgattagatggggcaagggcacgacaagccaagaggtctacacgaacaccaagagaagatattcgttctccaccgccgcttcgcttactctatgtctagcaatagattactgggcccacttgtcggggcttgatcaccatgtacatacctcaattgggctataaaagggggacacacacgcagactctcgactcacaaagcaaaacaactcacagtggatgtagggtatcacgctccggcggtctaaaccactctaacccttgtgttatcatgttcttttagctaatcggtcaattcctagacttcctcctcatattaggatcattggcgggtgcactctgctcggaggattttcccttagacaggagtattgtaaaatcagagtcaaaagacagtatggttta

SEQ ID NO: 124719 - DNA, 791 bp, Zea Mays
ccaagattgtcgtcagacttggtgtgttagcctgctcgccagtggtcgtctctgcgtgggtgatggattggctccgggggtgcgggggagttatctgcgcccgcggtgtgcgttccctgcaagctgcgggtctcggtagctacagattggtggcaattcctcgccagagtcgggcttcgcctcagatccgccttgcctcgtcgtacgaccgcctcatagtctaaaatctcggtgagatttcccctacgattatcgtcattgtctaggttgtgcgtagcaccattttaatcggggatctgtgctcagtggcgcgcgccggcgatgccccgccgtggtgtggtttgcgccgtcggtgggtcagccgagggggagaagaaactgggctggccgtcggatcggtgatggtcggctgagaatagaagcaggatacctcttcgcgggattcgatcctcaccgttggatcaggatctggtggctcgggttgggttaaactttataaaaatctggagcgttcaggggaggtcctgcggtgcgcgctggatgcgggtttccttgggctaggaactaatctgggccctcggttttagatcagacggctggaaattaaagatacctcttcggcgtggtcggtttacaaaagaaaccctagctttattcgaattgatgcccgccatgcttttctgtgaaactaatcgcaagcaggtccctggtttttacaaaatcacccctgaagtttattttatgcataaaaaggtatataaaatggataaaaacttagataattcatatct

SEQ ID NO: 124720 - DNA, 418 bp, Zea Mays
tacttctccccctcttatttacaactacgttgcaatagggacttaagtggttttccatgtaaccactctttctggcactttcacataggattaatttgagtgacaccttttagtaaatgcacatggcagtcaatttgcaacttcttgcaaatcaattgaacccaaaggttcagttttagtacgtgatcctgagcctgaatgcttactgcattcattataatttcctggcattctttttggtactcgaaatctccccctaatgcctggaaaagctcatgattcaagcaagcgtacgagccgtaaatagattctcatgaagagattctaaaacttaatgatcgacggagaatgaattctcacatagatccccagctttctgtgtgcccatacatgtacgctgcggtggtgagattgggaa

SEQ ID NO: 124721 - DNA, 472 bp, Zea Mays
gcgagcgggtgaagtaactggcgccgacaggctgggtccactgggcagtgagagagcgagggagagtgggtgctcggggttgcgccgacaggtggggctcgcctgtcaggcagagagggcgcgcgggcgcggtcacacgcgggctgggcttaatgggctgccttgggccgaattagcttttcctattttcctggaatttctaatgccttttctatttattttctctagggttttcaattcaaactcaaactaggtttcatattcaaataaattcaaacttgtgcaacacttcaaagaatatttaaactcagcatgatgcaacatgtcatgactcataaggttttggcaaaaataaataattaatctctactagcttaagctatttctaattaaagggaaaaagggagaaagaatctaaagagagaaaaagcctaaagtgagaaaagaaagagtaacacatgattttgggtga

SEQ ID NO: 124722 - DNA, 446 bp, Zea Mays
gatcctccagtaatcatgtggattacccctcgaaagggttgaccggcgaagtcctcctgcttcggtgggggtggtggtggtaacggttgatttggatgctgtggtggtggaggcggttgagcttggatttcttggtgttgaggtctctgttgttgccggtatatattatggttttgctggtgaggatggaaatgttcattgtggacttggtgttggttgtactcatggggatggtaggtgtgggcgacgactctttggttgtcagtcggttggtttctagccattcgatcctttgttgccttagttttggggcaatccctggttgggtgtgtcgaggcttagccatggaaaagacaatagaatcttcactgttgcgggcctcagcctcttcctctaattgcattactgtcgcggccttgctgcagagggtaatcgtgatgatgagc

SEQ ID NO: 124723 - DNA, 732 bp, Zea Mays
attcaaatatcgggggatacacccagtgggtgcacctatagtgcacccaatggatacaataataagacaaagcaaccttcaaaaaagcccagaagaagcttgagactatgttcttttttagggtctcaagtcaactatcctcaaaagttggcttgagcctcgggggcatgtgggggatagatatcctccgggtcctcacatacactgaaacatgtcatgggcaaactggcaggttttctcctgggtcgtcctatgggatggcccagctagacataactaggatgggtaggcccgatctaagacgacaaaaaccaacgcccaagttaagtgctacatgagcatggatgtatcgggtggtgcagttgtgatcacccgacaggctaaacccttggtggtaactcggacggatggatgaagaggactccggatatgtagggatccagtctacgacaaagaaggagataagcaagtagatagcaatcatcgcttgtaatgggataactctccctggtcatgtatataaggtcgggaggtaccccctaccatttcatctcatcttagcctacaacatccacaactctcagcttgtcatcctcgcatcaataatagaaccaccataggaagtaggatattatgcgactccacgtggcccgaacctgcataagtctacgagtcacccatcgtgttacagcacgaaccatcgagtcgcgatcaatgatgacgtcctacaca

SEQ ID NO: 124724 - DNA, 1169 bp, Zea Mays
gcctgctgctacatacctcacccccggaactctattaaaaaaagatcctgccttaccttctggatgcctgaggcagattgatcagtatcctgccttctacaaggctattcggattcaaatagcacagcaattgaaccgtgcagtcccgtttagtttatgtttagatactgaagctaaccgctagctagctaaaagttctctctagacctctagtacatcgaaacagaagggttaatagatagtctaattttttagtcaagtctttaaaactagttaactagtcagataaccatggctaatttaagctatttttttagctccaaaacaggcccttagtatagctagagtcaactgacaggagcggtggtgtgttatgagatcatcatccagtggattttgtgtcgatgatccattcattctatcaacatgtgcttatatgatcgatcgatatgagagatcaactcatcatgtttctgacgcacgaaagaaataaggacgaaaattaggaacgagatgatctgtctcaaccagttcactagtgaaagaaaccaacagcatgaacatatatataccccatgcaccacatctcgaacgaaattccaacttaactcatcactgcatgcatgcgttgctaagctgacaatgatggctgccagtgcccagcagatgacttacagcatccataatatatataccaatgtttcgcactgacagagaagtcaaagaacgatgaaggaggagtgcccggcattctgcgagcaactggagaagatcgtcaggaagaaagcaggggcgtagccagctgcagcctgcaggaggagtgtgctggcgcatgcgttcaccattcctctgcgtgctactccagccataagcacacacagctagctaattaaggtattttagtctgtaaataatggactgtgtagtcgtgtgtgtgtgtgtgtgtcgtaactgtgaaagtcgccgatggatgcataatatatatgtggtttttcccttaaacaaattggatagatcctttggttctatttgtttcttttgccatggatagagaaaacactgtacagtgaactgcgtcagttttggttagagctgggagtgggcactgggcagaggagcatttcgctggcgcctgctcctgcattctaaagaggcccttgggtccaggt

SEQ ID NO: 124725 - DNA, 355 bp, Zea Mays
gcttgcacgatatgattggactaagggtgagtcacttcaatcactctttgaccggctaatggtgttggtcaacaaaataagagtgcttggaagtgaagattggagtgactccaaggtcactagactatttatgagagcatacaaagaaaaggataagagtctagcaagaatgataagggaccgtgatgactatgagcaaatgacatctcaccaactatttgcaaagattcaacaacatgagtctgaagaagtcccaatcaagacaagagacactcatgccttgatctcaaatgaacaagattcctctaagaagaacaaagatcacaagacaaagaaagtggtcgaaacatcaagt

SEQ ID NO: 124726 - DNA, 856 bp, Zea Mays
gaaaaacatgtaaacagaaagaaaccaaggttgaacacagtctccatgacatgtatttgcttttagctggcctcttagattttaaggccaaactagactagcaaaaaaacacaggaacaagataaataactgacatgactacagaagacctaaacaaactggattacctttaaggaagagggatcagattctaatttccaggttactggtaggaaactgatccatcagattttaatttcaggttccttccaggaaactaatcctttcctcaagagatttcagacgggagaacgtggtcagattttgatagtctttaagtaacttattggctatacaaaattttaaagtaccacctaagatgtcatggtctttaagatattgcattgcatcttcgtgggtaatgtcattttgtaatgactgagccaaatgaactttcgagctcttctgccgaacatggctggaagaggtctcgtcaatgctgcgcttcccagtacttgcactacttaagttcccacatctaatattggcacgatacgcaggtactgatggtgacttatgctcatcacagcttataaatatatgtgtgagctgatccaaatattgcaacatacgttcgtatttacccgattcaagttctttttttatctgcaatggaaagcgtcagttagtgttaagttctataaatagagaaagactgaaatgttcaggtgagatacctcttcaagtgagagctttatcgggcctgcgccacttgacaactgtcgcgtaagcttattgtaccgtccccacaaatctttgaaatatttaaacctattttgcagatccttaagtggaatagtcatattcgtgtgttatt

SEQ ID NO: 124727 - DNA, 434 bp, Zea Mays
taagcacgggacattggctaccccacatgaacatccattgaaccagtggaaagagaaccgaccgaaggaccctcaggggctggagcaccctcaggggcaagagcaccatagcaaactggcaggcttacctctggcccggccagcaagccagcagaagatacttcgtccgagcactctacacggacgtcaatgactttgatttcatgcaattcaagcaaaaggtccttaggaatagcgtcttccaacacactatcgatggcaggcatagtcaaacctcgaatattcatcatccccgctaaagcaaggcatgaattgtcaccacaagctttacttcgccgttctcgacagaccagggggagcatttcttctccttattcatcatccccttcctccaccacatacctgccaaccctcacaccacaaccttccacgac

SEQ ID NO: 124728 - DNA, 357 bp, Zea Mays
atgacgttcctgaggcgtccaccatggacttcgtcagaggtaatttgagaattgtgtcgcaacgatggagcctttgtcacatatgtttgtgctctgtgttctcattgaaatgttaacctgagataattatcgatgaaccattcgtgagataattaggctttgtattctcgttatggagaaaagtttgtgcgattgcattgccaaagtgtactaaaaatcctttggtttcatttttcagaaaggtccattggttctaggatatgttcatgttatgcatgattgtgagtgttcaataaatgaacaaggaaaatgctaatattttatgtatggattaattttctgagtcaatcttttcac

SEQ ID NO: 124729 - DNA, 664 bp, Zea Mays
cggcttgctgcgggctttgcgctgctggagatgctgcccgcgtcgcagaacatgatggcgcgtcctgggagctcccacctccaggggacagggagcgcgctggcgagccttggtgatcaggcatcggctgctcccgatctgcagtctcctggtgctggcgttccagcatgtagtggtccgtgatggtgaagggatgctcgcagtccacatccgaggatgctccccagtcccagcgctcgtcctcggcgaagatggcatcacgggagacatgtactcgattggcgatggggtcgtagaagcggtacgctttggagccgtcctggtagccgatgaagacggccttgattccacgatcatcaagcttgctgagatgtgggcgcactttcttgacgtaggccacacacccgaacaccttcaggaagtgcacgggtggcttctttgcatgccaggcttcaaacggcgttatgccatcaagagcactggtgggcgccctgttcaacaggaagacagcagtgtgtactgcttctccccagaagtgaccaggcatgttgcgggcacgcaggatgcttcgcgctgtccccacgaccatctggtttcgccgttccacaacgccattctgttgtggcgtgcctggcgccgagaagtgtcgctggatgccttcccc

SEQ ID NO: 124730 - DNA, 275 bp, Zea Mays
gatgaccaaatctctgccgagtaagtctacgaggtgaggtaggcaactgagtagagccacatgcatatgtcaaccacagtaggacacatcgttaggagcccacacaatagtcataggcacgattgtacacccctttcttataataagcatatcacgctgtttgatgggacaaggcaactctaggcaaaggcgaaaactcagcacgggagccaccacaatagccagtatatcagaagcaacaggacaaggtgccataccgaatgggtgaatccatg

SEQ ID NO: 124731 - DNA, 480 bp, Zea Mays
gagccagaaaaagaagaggctaaattgagtttttgacgccatcggatttatgtatcctgactaccgctacccgtcgaaagggcaaaagagaaaaagtgcaacttctgggaaaggtgatgcttcagctgctccaagcgagcccgcgccaaagaggaaaaaggtgaaggtccttactcaccgaccgcgcttcattgaaccggccacagtgcccgaatttggtggtgagacctcttcggctattgaagccaaaggacctgctcttacacagaagaatgaagagccgggtatgatgccaaaggccgataatagaagagatagaggccgagaaaacaaagatattagaagttataagcccttcggcaggaatgatagtgccgaaggcacaaaaagatcttacggcaactcccaagagaaaaaggatggtcaatgtactagatgtgctggagacaataaagtcttcaagcaccactccgaggaaaa

SEQ ID NO: 124732 - DNA, 299 bp, Zea Mays
ccaagctgatagtccaaacacctcagctaatagtctagctaattattagctccactctcaactaccctttagttcattagctgatcaacccaacaaaaatcacctaatagttagctagctaattctacaatcaatttttagacgactaactattagctctaatggcctaatgcatttaaacatgccttagtccatcactctcctccctatttgttgtctgtcacacccatacctttttctgtccttcaatgagttctcatttttattctataaggaaaatagacatcgtctgatttgtc

SEQ ID NO: 124733 - DNA, 624 bp, Zea Mays
cgaaattggaatggactcatttggacaaagtatgcattttctatgagttaaacaaattgtagtcattatcttcacattaaaaatcaattcctaaatgattttataagttttattcactgtctggactgcgcaccaatttcttggaatcacataggctaatccataaaactccttaggctcaggcaacagtaactacagactgcgggttagttctataaaaatagagggggttcttatgcaaagtgtcgcgactgaaggggtatcgcgatatctggtccgtccgatcaccagtgtgcggtttagattagactgtgacccctcagggcttgcgcgcgacgacgaccgccagatcaaatatctaaggtggagattttaagtacgctctaacccttttcctccgcccatccacagatcagcggctcggatcgtttcaaagcgaaacgttactcttcttctaatcccaacccttcgtgtaaatctgacggtgcacatgcatcgtccctttccccagctcacagacgacggcgcagaatcaaccgcgacggtcggctccggcgagcccgaccgatctacgcagaaggacacccacgaccatcccggaggcatctaaacgcaacattcgac

SEQ ID NO: 124734 - DNA, 279 bp, Zea Mays
ggaagacggagaatcagcccgctagctttcgcccaccctgcagagaatacgcggaatgggcgttggcggagcagatgacggggaaagccggaggcgcgtggttctggtggcaccaggcaaaggatgcgctgccgcctgccggcagtggaggaggacgcgattaattggttcggatcgaggcggggaagcgccgggcgaggatttgaagtgtcagcatgtgggcccaagaacgcttgtattttagcgaggcaaagtggaccttccatcgggggcctcggg

SEQ ID NO: 124735 - DNA, 723 bp, Zea Mays
cttgactcgagctcgccaaaaatacccgcgcagccccaattccctctcttcttcgttcttgctccgccgtgaagagcttcttcgtagccagcgctcctctgttcagtaatgatcaaattgctctttgttttagttagtatgtgatctattgttgcccctggatgcaacaatttggagtttgaccgaagccccttgtcggaacgcacctaggtgccgtcaaacaccgccgtgacccccccactgtcgacccgttcttcgggccttgttctacccaaatcaaagaatgtccgtagacccaagtgcacccatgaacctttccccagcctcaattcggtcatcctcgccgtcgtttgctcggaatgcgttcatcctcttacccatccgctcggtcaccgtggaccgattgattcgtagtcccaaccataaaattgatttgggggaaatgatccgtaggagttcaattgtgttcctgtcgcttgggaacttcagccgtcgcgtcatctggccggtctagctcgtcggagcacggctcccgcgcggttcgccgtcggggacttggtgtggtaaatgaatagaacgcgaagggtgtttctgtaaacggtcagcgactcataaaaacagtaagcaaatctaatttgagttagccaaaaccgtgagggcctctgcgcaaagtctccctcgcgggtgcgggcgcgccccgttttctctgaggcttgggccgtc

SEQ ID NO: 124736 - DNA, 486 bp, Zea Mays
ccccgtcgcggtgcagcgggtgcttcatggccctgggtcgcttccacccgccggcgccggcgccgatctgcggccgcgagctacaggcgccgcatgcccgcaccgcagtccgcaagttgctgcgctgctgcgtggagtgggtttccaattgcagtttgacgactaccggagaccggagtggatccgatttgccacgtgggcgctcgatcacggccgttgataacacatcgaacggtacatcttgcatctgatggagaagaacagaacagaacagcacaaacaacaatccccatttacagatgtgcaggcgacatttacagaacaacaatctgtgcaggcgatatgtttacagatgtcgttggaagcccataatattttgcatctgaggttctgctaaaatactatggtcatgaggttgatgtctggagtgcaagtgtctgaatctaatattctgttgagtggagtccctccttttctgggatggtg

SEQ ID NO: 124737 - DNA, 678 bp, Zea Mays
ctccaagcataggttatagaccagcagcatccacttcaacataagtgggttcaacagtcaagagtagtggtattcggtgcttcaagtgtggaagtcgtggtcatgtcattaaggagtgtccaaataattgtgtgatccttgtgactaatgatggagaatgtacatcagctagtgaagaggaagctgaagcaggaaatgtagatgacattgataaatctgaagaacatacgagatgtgaatttgagcatggtaccgcttttgtggttacacaaatattgagtgttcaaatgaaagaagctgaaattggacagcgacataatctttttcaaatgagagcaaaagtgcaagacaaagtagtaaaggtgatcattgatggaggaagctgtcataatcttgtaagtcgtgagatggttgaaaagcttggtctgaagttgcagcgacaccctcatccatatcatgtccaatggttgaatgaatcatgagatatcaagattggttataaggtgaatgtttcattcaacattggagagtatgttgacacagtggagtgcgatgttgcacccatgtctgtctgtcacttgctgctaggaagaccttagcaatatgattgttattctcagcattatggaataacaaatcagtacacactagctctgaaagggagaaagtatgtactca

SEQ ID NO: 124738 - DNA, 271 bp, Zea Mays
tgcagagcatatggttcacgggccatgtggatcttacaatcagagctcaccttgcgtgaaaaagggtcaatgttcaaaacactatcccaaaaaatttcaaaatgaaactgtagttgatacaaatggatttgcggtctacaaaagatcgaacaataatagatttgtcatgaagtctaacatcaaactagataacagatggattgttccatataacttgacattgctcaagaaatatcaagcacacatcaatgtagaatggtgtaacaaaagc

SEQ ID NO: 124739 - DNA, 317 bp, Zea Mays
ttcaggcctgaaagagactgaagaaaaagttcgaagaatgattcataatttgaagaaagctcaagctcgttaaaagagttatgcagaccggcgacgacaacccttatgctttctcgtaggagattatgtctacttgaaagtttcaccaatgaagggtgtatcgcgtttcgggattaaaggaaagcttgcaccccggtatattggtccattccctatacttgagcaatgtggaccagtagcataccgactccaactacccgaaacattatctgttgtacataatgtgttccacgtgtcacaattgaagaagtgtcttc

SEQ ID NO: 124740 - DNA, 275 bp, Zea Mays
tcttcctccgccgcgaggaggaccaggagaaccgcgacaacccaagcagcaggaggagggaggaggtggagccttcccgcgcgtcgacagagaggtcaatgtcatcttcggcggacacaggtcgcaggagaacaagagacagcaaaagctcaacgatcgtcagatattggtggcggctactggtccaaccgccccataccgatggtcagagcatccgatcaccttcacccgggcagaccagtggctcaacttcgaccacccaggcaaatacccgc

SEQ ID NO: 124741 - DNA, 330 bp, Zea Mays
tgacattatggtgttccgcagtggagccttgtctccgacgagcaattgggccgaagatggtggccttctctgcccgacgatctcacgaaaagcttgcacaccatccgacgatcactcacgaccacatctcatgcactggatgacaacggagatgcgggaccacgacgtatggcgtctctgcgacggagaacccgcattggtgagaaatcaccgcgccttcgtggccacccgcgcttgcactcgatgactcccacatttggtactcgccagagaacgtcctctcctgcgcacagaggtcctttgctttggcatcgcccgagttcatggtgg

SEQ ID NO: 124742 - DNA, 557 bp, Zea Mays
gcgctgccgcgaccagtccgcgctcggccggcctgacacggcgtcgagcacgtggctctttgcttctgcccgagttcaaacgctcataggttggagatctttgcatatttgggcatgatcactgcacaagatttgctctcccaacatagctttgtcgtttatgtgtggaagtcgagcagtttggggctgtgtacagagagttgtcgcgtcgctaaggtggcagtgtcatatggtcgactcccgaggtaaatccatgtcaagatcgtgtcaaacggtggagagaggtttccaaactttgtcatggtgtgttctaggaaatttggcgccactttgctatttggacttgtttgatttaagttttgaaaaaacagagaacgaggttgatctttggaaaggggctggaattcagatttctggatttctgaatttttcccaagtgcattagttcatgggctaatttaggcattttgaaaaattcaaatggcaaaactttcttactatattttatttgttatttagtgtactaaaactttgttttttggtttttttaccaaaat

SEQ ID NO: 124743 - DNA, 576 bp, Zea Mays
ttccctatctagtggcatcccgggtaactcccctagaaagacatctgggaactctctaaccacacagatgtttctgcccacaaatttaccgtctactagatatatggtgggtctggtggatgggttatggtaaacatgacttcaaatctttccccttttggactggtgagtcccacggttcccctagcacaatgtataccaagaatcagatctatactgctctcttctaaatctatatgcatagaccagaattcccttcccatgattggcaatgttaatcggttggtcatataatttgcttcaataggccctttaggggtaattactatcaggggtttttgcatagtttgaagtggtaactcatttgtattgacatatcgagcagaaatgaatgaatgtgttgctccagaatcaaataatatagctgcaggaactgaattaatataaaacgtaccggtagtaatatcagcacccgtagcagtagcatcagcactgacttggttgactctagcaatactgaaccccctgccagaagccagagtctgttgcttgccctgaatattgcttcgagcgggt

SEQ ID NO: 124744 - DNA, 550 bp, Zea Mays
ataccatgcataggggtttgtagaggccgggtggtccctttggtcgcgctcgcgcatgcaaaggagaggagatcgatagggtccccaatccccatagggaggaggtcgacatgaaatgaaagctacgctcaatgaaatgaaattaacaagtgggagagcgccatagcctcaactcgtgccttcatacaggcctttcgttcacaaatttccgtcggtgttgttcattttttttttaaaaaaatcttatgtatacatgtgtgtgctccttcgtattttagatgtttttcagttctttcttatttccttatccttataatacttgtacttattggcctatgtttttagtaggtaacgtttaaggacatactaattaattcattcatgtctgtgtgcttcggccttgtactgccggtgacttttgatgctcgacgcgctaggacagtcggtggatccgccccctatcaagtgagacaaccggcggtgagaatgagatcgtcaaccctctcttgtagttgtagctttggtctcgtctctctgtgttgcgtgttgt

SEQ ID NO: 124745 - DNA, 467 bp, Zea Mays
atcatctggtttgtgcactccgtcactggtttctcccagcttcaaatacaaacacttagtagagcatgcacttcagactcccattgcagtcggagcgcttggccatattttcatcaaccagagcggtttcgctctgcgttcctaagcaaattttgcatcgcacagagtcgtctgcctagacagagatgcatgtacgggtttagttgaatggatggaatggatggatggacggacatggttgtgctgcgatttggagggtaagaggccaccagtttactcaatcaacttctcatcttggtatcattcccttgcctgcatctaaaagcctgggctgctctaggtctcggtcttttatcgcatcttttgctttccgaagatgctcagtttgcttcccaaaatactattctctttctcggttcagaacgactactgactgacttagagcaaatttgttggctctaacttcc

SEQ ID NO: 124746 - DNA, 309 bp, Zea Mays
gtggactggtatgtaggctcatgtggtcttcctttaactcttcgtgacgctggcattccaacgccgtgtcaaatctaagccaaaactcgacaaaagataacttgcggtggataaagcgattgaaaaatgaatttgcgctttcagaccttgaggttgttctgaggagtcctgcaagaggtgtattcataaaatatgctggaatccatgactcacgaatttcatacctattagacatccacccgttcctctctagaccgtacttcattatgaaagcattccaccgtgtctcaaattcatctccagtttctg

SEQ ID NO: 124747 - DNA, 655 bp, Zea Mays
ccaggatgttgaaagggaagccgaacaaacttcacaaatctttgttttttaacacacttgacgaattattcgtttaaataacagaaaataaaaaacgacgaattatattaatttcttaattatgaattctttccttcaaacgtctcatcatagggtgaagcttatctgtattgttcagatctgcaggtgctcagatctataagcacatggagacatcagatctataagcacatggagacatcagacatctagaacgaccacatcagagaccagatctgtataaccttggagatgaagtaccgtccaaataatgtacctcttcttttttggtgagtcaaaaattctaaaacttaactggacacaaaaacccaatatttatgatgtacactttttctgtcttaaaatagttgacaatctaacttttttagaagtctactatgttgaattttaatcaaacatatgaaaacaatatcttgtttttcatgactcaaaatatttgatctccattactttggagatagagtaccttacaaacaatgtgcctctcattttttttgtgaatctaaattttaaacatttaactagatatataaaaaactaatatttataatgtgtactttctccatctcaaaatagttgacgctctcgcttttta

SEQ ID NO: 124748 - DNA, 417 bp, Zea Mays
cagtgatgaaatgtgcagggcaaagggatcctcatagacaacgcaatttgcctgacgatggcatatccccagggaagcaggcaagcggtgctgtgctgcgctagaactgcgtggaggctacaccaagcaaatgcaatagaatagaattgtgcaaagcctagcaaggatcgaacaacgccagcagtgtcgcagacgctaggccaacagacatgttggcatccatttcttgccacaaactgaatgccctccctctcccacgacgacacaacataatcaatcaatcaatgaagagcgacaactccacggtactccttaagatctcatcccaggtggcgccatacgtccatacccatgtggtcgtgtccccccggaccaccatgggagacaggggacgacgaggagtcggaccgttctccc

SEQ ID NO: 124749 - DNA, 531 bp, Zea Mays
tggtgcatgattatcctatggaccagacgatgtgctcaatttatagaaggcaagagcggtggccggtgaatttgggagagacgtgcggcgatcggaggagtgggaggtcactggcgcaaggaattcgtggcatctaccgtggcagcgctcaccggcgatgatcagacggccaaagtgagtcacggcgatgcggtgaatgtgcctaggtacgtggcgcaaggctgtgaagcggctgtcaccggcgagctcatctgaaacgaccgtggccaactcggtacggtggctggagtagtttaatggccggaaaatatccacggcgatgatacttactcaaccctgagcgttatccagttgatccgatcgcgaatcacggctgtgagggcacgaatctacgcacggctcatcggcggcgagttgaccgagctagcagtcttatccaggtactgtaccatggaattcatctttagtgcgcctgacagccaaggtttaaggcaggttttctccaaattttccatggcaacatcatcatcc

SEQ ID NO: 124750 - DNA, 662 bp, Zea Mays
cgcgagcatgttacacagtcttaagtcattgccgacttaagccgattgctctatcagtagggtatagtggtcaccctaagtcgagtaagcgcgagcatgttgcaccgtcttaagtcatcgccgacttaagccgattgctccgttagtagggtatagtggtcaccctaagtcgagtaagtgtgttgattccaagtctaatcaaatcgaagtcaattgataaccaatagtttgaatgcctttgagaatgaaatcttttattgatgacgtgttttccaattacagagtacaacattgctctgatagcttttgaagtcttgctaaggataaaacttcctgaggtgctctatattctatgagttccccacttccgtgccatccatttgaataagccgatatgatcctggccgagtgacctccgataccatgaatggcccttcccatagcggtgacaatttgtgtcgtccttctcctgttagaattcggcgaaggaccaagtctcccactacgaaggatcgatgtcgtatagccttatcatgatagcgcctcagggtctgctggtatctagccgactgaattactgtattcaatcgctcttcttccagcacgtcaatatcttctagcctggtagcttctgcttcagctatgctttcgaagaccagcct

SEQ ID NO: 124751 - DNA, 547 bp, Zea Mays
gcgttcgcgtaccctgcactagtactgccactgctccggcgcacgatggtcgctggctgaacttgagccttttttgcatatactcctcagtcctcacttcgcttgtgcatcgtgctagccagagacagagagtccagaagcggaagcggctcgatgctgtccgtttggcgtttgggagtccatcagttgtggatcgggtagtacggccgcggatcggatcaattgagctttacatacccatccaagatcttgcacacataaagaccgcatcagcggcgcaaagtactccgttgcacgtaggagtagcagtactagtacgcagttacttccctttaattaattccatgggtgcgagatgctgcattagcatctgtggtactccaaaaagttactaagcgtacgagagcagctaattacgttgatgcgccgtactttccagtcgcgaaatcgacgaaggcgacgctacattttccgtcagcagctcccatgcatggacgaacaaggctggcaagtgtgatccatgaataaggctgcctgtagatttttt

SEQ ID NO: 124752 - DNA, 663 bp, Zea Mays
ggtgaggccaacatacacaaccaaaaatacgaagcatggaataatttggcagagttttaaaaagtcgttctaaaggacataaattgtcgatgacacgagtaggtagacgattaataagataggtggctgtgacaaaagcttcatcccaaaatttttgaggcattccggcatgggccaataaagcaagtccggtttctacaatgtgacggtgttttcgttcgaccgtaccattttgttgatgggtatgtggacaggacacatgatgagcaatcccaagattagtaaagaattggttgtgcattttacgatattcatcatcccaatcagattgaacatattttattttggcatcaaggaggcgttcgacatgattttaaattgaaggaaaaaacgaggagcatcagtgcgatcaatcataagataaatccaagtgaagcaagtaaaatcatccacaaaactaatgtagtagcggaaaacaccaatagatataggagcaggaccccaaacatcagaatgaattagctcaagaggcatagtagtgtgatgaatagaatgagtatatggtaattgatgacttttggctaactgacatgcattacaaatagagctcaaactagtgtctttgagacatggcaaattattcaaacgtaaaatagaacgcac

SEQ ID NO: 124753 - DNA, 719 bp, Zea Mays
cgacgacgtagtcaagtcacagcgtaagcagcagcacgaaggacgtggttgttgggtggtgacgaaatccgatgaacgacgaatgacgatgacgtttggcgcgatgagctggacagcctgggcgagctccaataaggtcctcgacgacgaactcgtttcacaagcctagacgtgacatggtggaatggttacggcgttggtgtggcagcagtcagcgtacaacgcgtgcaaggattccaacgacgacaaactgttaaactatgtctagattcatattctgttagcaagctcctattctcacgtatgtaccgagtcatccggctctatcccttgtatagcgtgtgtgctccgagtcttgtggctctatctcttgtaattaggcctatatatactttgtacaccgaatggcaatatacatagaacaattcttcttctattctatttttacatggtatcagaacagtgtatcagcatcagaatgcatttctagttttcaatattatttaattatcctcgatgactatactcattatgtcgggacttttcccatccgtcacaaatctaaggtacccacgattttgcgtcatttttataattatgtgcgcaaccaatttcatctttccattcaatccattcagtgcggcaacggtagagaatttgacaaccatgctctccgtagttttctttctgatcatggtgtcacccttcgtctctcttgc

SEQ ID NO: 124754 - DNA, 352 bp, Zea Mays
cgagagtgcgatcaactgctagagtgtctcgtgagggggacgaaaccaaggctgctgaaatagcgtcgatttcagaagtaatgaaacgatcaggtctggttgcgacagaggaggttgctgacgaaggtgcttcaaatgtcgaagctgaacaaactgtggttgagggtgaaaatgttgatgagagtgaaaaagactatagcattcttatcccaacgaagcctagtcatcttgaatttgaaaaatctaccatgacagaagatgacatgcctatgatgatgaaattgggatattttggagaggctgagagcaaacttattcgatttgctggagaagagataatcccagagccgaa

SEQ ID NO: 124755 - DNA, 665 bp, Zea Mays
cggagccaccacctcgcccaggagcatgaatgcgaagcagcctgacataacgttgggacctctcacggacatgaacttcttccttgtgacccgcaacctaagttcgcctagaccatgcaaattttgagtcatatcgggggtgtgctgaaaaagatggtgaacggtctacctcgcactcctggcaacgagtactaccggtggatcctcactcaagcggcgaaccacctcctaccatcggctcaccccgatggcaacatgcgccaccacatcaacaatcatcgcgacgcatgagccaacatcgatggatcacgtgcttgacgacatgaagaagagctaaggcgccaagaagaatatgagtggggccacgacgccccgcaatggcaagccgcagaccgagtcgactccaccattgccttgatgaacgacctgtaaccgcgccgatctgctcgggaccgactagaagatccacgttgcccgtcgccaccacgggaccaccaccacacccgcgcccgagacgattttcccaaagccgggggactattcgtggtcttgacctttactccttggatgtgggcggtccaatgcccacccaacttcaaggtctccaacatcgacaagtttgaggccaagctagaccctaggggttggctggacatctacacgac

SEQ ID NO: 124756 - DNA, 406 bp, Zea Mays
gggaatgtgatccgctctagcttgtggaaataaaaataaataaagatagagatcctccgtatctgtccgccgacgatcatcgatacccacctcctgcggtcatgctgccaggcaagagtcggtcgccgtatctgcctgccggtgcttacgatcacggccaggacgatttatgttgggaacaaatcggtggagccaaggtgcgccagccaagcctccggtccggtcctacccctgcaatcaattgcgctagtgatcatgcgtttcgctgtccgcccgccctccctcccaccatcagccggcccatacaacactagtgcatgaattcaagtgcgttcacaaacgacacagcagaccgtcaaatccataatgggatggatatagttatcgccaagcttttttagctttt

SEQ ID NO: 124757 - DNA, 324 bp, Zea Mays
gtcccgctggagtagggcatgtaatattttttggttctgtaagatacttttgagaactattaatcaaacaacacttatctgtatgctatttgtccttgctgtgttgtagcgttactaacttctccctggtacttggcccccctgggatgtaggctcgacgtgtcgaggctggataccagtatacctaagagaaaattagttgcccagtccctaggaggtagtctctacggtttgagactacctgcgtctggattgggacctggacctgcacacagcttcggctttgaagtgttagtagcacacccataggacccatcgtctggt

SEQ ID NO: 124758 - DNA, 357 bp, Zea Mays
gaaattggtagggagggtgagttcgtaacatcgttgattgggcgaggaacgaaggaatttggagatagaggtcaggttagccggaatcgccgcgcgctggtggagagcccccgcgggcctctgctccacctcccctggtcgtcggaggtggaagagtgtacgcgcgccgtcggattgccagcgagcggtggagattagaaccacccataccctttcgttctagtgaattgtagccgcagatctcgaaaccgagggttgggtgttgtggggtgtgctggccgttgatctaagatccgaggatcacggttacaaacccctttcatttaaaacgcgatctaatctcggccttcagatttg

SEQ ID NO: 124759 - DNA, 283 bp, Zea Mays
aggtggggttggttgcatgttggtatgttgtcgttccccccattggtttgagctacgtggtgcattgccacttgccctatatggttcgtatgtttgatcgttcctttccggccttctatgtggggctagaaagttttcctgggttctagatctcaaattaataggttgatgcattgtatagtgcgatgggaagtgttgctgggacgggtgaggattcaggtagcaatcctcctcaaaaaggtcatgcgcggactgtccggacattggcccggaccgtccgtga

SEQ ID NO: 124760 - DNA, 441 bp, Zea Mays
ctgtaatccgattccaaaatccttgacgcttctgaccagtgttcacaatgggatcacaactcacagccaaccaagcttgacataccctcatatcctcttcagacgtgaaatttgctagctttgtgcgttgaggagccttcttcactggaggtggtgctggtgatccctgggctggtatctcaggcgaaggagcaaatgcagtgttctgaaactgagtggcatcatcctcggataggtaacttccatattgtgccataacttggttccagtcggtacccatgctgtacaatgaaggtactcgcacaaaaaatagaacatatttaactaaataagtgtagtacatttcaggcaaccatatgaaatgaatagaaaccatgacactgtaaacagtttcatgcacaacaaagtcagaagtggcgaggactacatatattgcaaagt

SEQ ID NO: 124761 - DNA, 545 bp, Zea Mays
accgtctagatttaattaaggtgagacccagtcgtggcccccggatcccgatctaacgccctaggcgagataccccgaaacagtatacctcgatctaatcacacacgttcgtggtcagatcgacgacctggatctaaaacacccctgactcgatctcgttcgtctgtatttgatcagtgacctagatccaacgatccaggggctgtcttcatcccccagaggaccccaatgaaaccgaggtcacacggcggcggacagaatccatggccgcggagctcgccggtgatccctgccccgacgatttcccccaaaatttcgcgggctaaacgacgcaaagatcgccgcgcatcaggtggaggtacctcaccggttcatgcagggccgatcgatccggtcagcaatgtaaggcgggtggcggcgcttcttccccaacggcgtggaattcgcgatgccacggtcgatgaagccgcataggaaaaccaagattacgcgcaggaggcccaggcgactagctttgaccgcatgccaatcccagagccgcgccg

SEQ ID NO: 124762 - DNA, 320 bp, Zea Mays
ctctcaataaaaaagaagctgtgctttttaatgccttcaagaaccgtttggggacttctcagcaaactactatggttttcaacttacctgctttgattcagccgattggtaatctttcagagcttgagcaacctttctctagccgggagatcgatcaaatcattgcatgtctgccttcaaataaatcgccaggtccggatggctttaacacagactttgttaaaaaatgctggccggtaattgcccctgatttctatgacctattcaacaaattttttgaaggatctctctgcatgcatagcatcaacggatcatatgtg

SEQ ID NO: 124763 - DNA, 519 bp, Zea Mays
caatatgtccaggtgccctcaatactgtcggcggagtaacggagacaccctctgtgtatggggcgatcacatacgctacaggattcatgtccattgaaatagacgtacctgctggcgtatttacagatgctacaggtggcatgtcatcgccagctccggtgctggacattttctcgccgccggccgtacctctaacttctgccgccgctaaccgccgccaatacctgagataaagacgtggacgagcgaacgtggacgagctaaccttgtatttgtttccacccgtaacaacgcctttatttacgcgcacatctttccttatctcaaaccggtgggagatttttaaatgttgcatggtttacgctattatgtctcacagcgttatgcaatcgtaaaccggcatgcacatgcaaatattcgttcccgtgattcgtggcagaaacttttccatttatgcatgagttatgcacatttccacatatctttatgcgtgcgtatatcggttgcagcgtctcagcc

SEQ ID NO: 124764 - DNA, 454 bp, Zea Mays
caggggcattagttaagccaaaagacatgactatgaactcgtaatgcccatacctggtgcaaaaggctgtcttctcaatatcctcctcacgaatcctcaattgatgataaccggagttcaaatcaattttggagaaaacctcggcacccctcaactgttcaaagagaacctcaatacggggtaccggttatttattcttgattgtcacttgattcaaagcacgataatccacacataacctcttgcttttatccttcttctcaacaaacaatactggggaagcccaaggcgacctgctaggcctaatgaaacccttatccagcagatcattcaattgtcgcttcaattcgacctgctcctttggagccatccgatacggggccttatgaataggctgcgtacctggaatcagtttgatttcaaaagcggcatcgcgctccagaggaatgcctgg

SEQ ID NO: 124765 - DNA, 1410 bp, Zea Mays
cccctaagtgcatcacattgcagtttcagtaaagcaaggataattggtgaaagcatcaaccatgataaagcagaataatgtggtacaagtaaatactaaattaacagtgtcggtttttaatacctgatcaaggctctgaccaggctcatcaggttttgtaacagaagccttcaccaacactgagtagtaaaccttttcaatcttcttgtttctatcttggctaggcgcttcaacttcatcaatataggcgacccgaagtgatggatatctgccaaaaaaatgccagttatgttattacaataccatcacataacatataacctacagtagtaagtagtaatgtgacctgaacaatttgcatcatcctgttacattactaacacctacatttattggatgaatgacaatcataaaaaaaagttcaggttactcctataacaggacttattcagaagttctcaaagaaactcactccgtcattagtctcaaaatatcatgtgcgcaaggctcattagaacgcttctgaattccatattgttggcatgagacaacatatgtaaacttcatgtcagctatagccttgcattgagtcattaattgcgagtcctcgggcattacttctgttgctctgtaaccttccataagatctaatgagacaagaacagaagttatcacatatgccactaagcccgcattcagaacaacatttcagaaccacagcagactgctattagaaataccatcatcttccgccatatcaagaaaagcctgaagctccaaagcttttcgatagtacatcatccctcttactgcatacacaagaacaacaatgacagcaaaaaggcatcatgcatagtttaagatgttccttgagagaagatgtaggtgcaaccatgcaggaggtacgctataccagttcttgttaatgtctgccccctatacgacgcccaaagacgaagcttctcttctagttcttcatcttcacggagtccctcttcattcttgcagccaaccctttcgaggaaatttttccattcatcttcaatgaggttagtacacaaaaagtcagtttcagtgagcagaggccaaacccaaaaaaatgcatgaatatcatttcaagtaattgttaagcaagtgagaaaataacctgggtaaattttttgtaagtagaaaagaatggaaactccatcctcatttggctcttctagattttgtaatgagaacagaacatcttccttgtaataaggagtcaagatactgcaatacagaaatagttaaaacaatgaaataagaaaatcaagcaaaagatcagatcaaacacacatcttgcaaaagtgccttgccaacaagtagtggaaaagtatgcaaaagcaaacttataggagtaaataaccaactacgtgtcatgga

SEQ ID NO: 124766 - DNA, 335 bp, Zea Mays
ccgctgaaaatgagatggcaccaatcaatgtgagggaaccgctccaattctttcgtcagtagaaccttgttgtaagatatcgatcagctagccgttgggaaaatcagccggttgaatagtattaaaaaacatcggattgacagctcatcatcgttgtctagcctcagtctgtcctgtagctttgaaatcacaaactcatccttgctaatacttagggaggaccgaaggtttgctgcggcattcacttcgtcaatatttagtggcttcccaccacccgaatttggaagacccaatatcagatggacagtctacttggtgatttttagttctttgtc

SEQ ID NO: 124767 - DNA, 542 bp, Zea Mays
ccattctttgcttgtatttcgtcagacacttgtaagagcttggtaagatacattagagcgtgttcctgtgttccacccgagaggagcatgtagtgagattattagggataaccttcatcgtttgtttcctgtttttgtgtttcgatggcaggagacgatgaggaagcaaggatccctacagacttcgatgaatgtgttagccgccaagatcttgaggcaaacaacaagctcctgaaggagcaaatggaggaaacggtccacaagtcagtgcatgatgccttcattaaatggaccttggcaggacttacgagagactggatcgacgattgtcccagatcgtcgacagacttgctgtgttggagatgcaacaacaagcaccgccaccaccacctcctcgtccatgtcttcccgatgatgcggtgattgatcaagaaggtaattataatgaagcggccaccagagatttgcgcctccgtcgtcgtcttcatcaaaacatagaaggtatgccacaccgccaacaaggtaataacaatcgtgctcct

SEQ ID NO: 124768 - DNA, 350 bp, Zea Mays
ttaattcagcagctgaagtggcctccccgccaaactcgggcaccacagccggttcaatgtaacgcggccgatgggtaagtaccttcatctttttgcccatagccttcggcacagattcagctgggatggccgaggcagcagcttttctcttcttcccctgtccccacagcgggtagtggtagtcggggtagacaaagccaatggtgtcaaaaactctatttattctcttttttccccgacctccgaaggctgtagatagtgcattatcttctgccttggaataagctccaagcagctcatcacttgtaacttcgatgcatttcagccagtcattgtttggttcatcgaat

SEQ ID NO: 124769 - DNA, 297 bp, Zea Mays
ttcgatcaagagcatccaactcttctggcatagcaagccgccattcatgaatactagaagcttcatgataattagatagttcaataatgacaacaacactaggaaatccatagagatctggaggttcaattgtactacgatcacgaagataatatccctggtgatttggtaacacatcagcaaactgtggcccatcaacaatctgtagatcatcaaaaacagatggagagtcatcattgttagtacaaacatcaacaactggttcgccatcagaattggccgtgggactagtgcgag

SEQ ID NO: 124770 - DNA, 622 bp, Zea Mays
gggacccttttttctcttgttgggccgaatccctaacccctcaacccactccctttcctccctcaatcgatccaatctgcgcgtgtgacactgactgtgtgggacccaccagtcagaaacatgctcatgccacgcgcgtgtgaaggagtcgtctcctttccactgatattgtgggccctgaaccggacgccttctcttgcttggctcggcatgcttcgacgttgaccggtggggacattccctcacgtgcccatccatcggagtccgcatttgtggcaaccgagcacgccgaaaaacaccaacgatctcgccggactgttgcgccaactcagcatcttccactgcgcctagcgtgcataaatggaacccctcggctgcaatctccatccccattatctgagcacccaacatcgattcgaggcggaaaccaaagaagtaggtgtcagttcgccaccgatgtgcacacgatttgccacctcctcggcctcggcgctcagaagggacgctgggaagcttgaagccaaggctaccacaaattcattgaataagcgatcgatgcagggggcgcttgctcactggggttgtacttctccgcaaatccgcctatggatgtgagcaagca

SEQ ID NO: 124771 - DNA, 516 bp, Zea Mays
cgaggattgttaagagcctgtgtgttgacatttgacagaaattgggagtccagtttgccatatgcagagttctcgtataacaaaagctaccaggccagtatcaagatgtcaccattcaaagcattatatggacgaaagtgctagacccctctaatgtggtccaacgtaggggaaatacactagaagggcatgccttcattaaagaggcagaagagaaagttgccctgatccgcaaaagattacttaaagctcagagtcggtagaaaagttatgcagacaacaggcagagagaactcaggttcgaggaaggagacttcgtctacctcagggtctcccctatgcacggagtcaaaaggtttcaagtgaaaggaaagctagctccacggttcgtcggcccctatcctatcattggcagggtaggacccgcagcctaccgccttgaattgccagaatccatgtcagatatccacaatgtgtttcacgtatcccagctccgcaaatgcctgcaagtgccag

SEQ ID NO: 124772 - DNA, 312 bp, Zea Mays
cttatacactgcttactttcattggttcagtatagaaaatcacttatgtcaataaacctcatgaaaaagctggattacttttggatgtagttcttgatattttctgggattatttgatgactcattaaaatgcggaacataatcatgtttcatcagtttaataatacaaaaataagacacaatggtgattccttatttcagaccattaactgcactttacttgtatgaagtcaagtgtaaaaccacgagatcattctagtggagttgcacagtgtaaggaatgactctcttatctatgtccaatgttctata

SEQ ID NO: 124773 - DNA, 686 bp, Zea Mays
atcgaatcgaacggttgagacaaattttgcagacgtggacacctctgcgtgacagattcgctccccgctttgcatcttggacgtatacgccgaatcaaacggtgagacaaattttgcagacgtggacacctctgcgttacatattccctccccgctttattaaaaggaacgtcttcattgtctgccactcctgactgcctcgtactcctctttccgcaaatctctgcaaattgctcactcaagcgcgggacgtgaaggtcatgtcggatgaagtgaaggcgtcgtcgacggagaaaacacgtgagctcttgctcgctcgtgaaagtgtcatcgcggccgccgggcagacgcccttctctcaaaaaggagcaaccaactccaagagctctgtctggttgtcggtgtggtgtgagcccatctctctcctctgacattgatcgaggcgcctctagttgatcacctgcgggaggtaccaaccatgtggagtgcgctattgccgaaggcatttgtccagggggcggaatcacccttgggcggatgtctctcattttgatgagattgacgccgccgttattgctgagggctatgccgccggccgaagctacgaggagctggatgttatcgatgagcaggtctacccccacgctcagtcgatcgcgagccgagacgacgtcaggcccctcctg

SEQ ID NO: 124774 - DNA, 324 bp, Zea Mays
taagaccagaactcaagaccatcctcgccagccaagatttcctcagcttctcgcacctctccaacaaagccatccaagtggaaagggcaaaagaggaagaaaaagggcacctcaagaggaaatttcatgttctccaagctcagcagcaagaccgtcaccagagagctcgatccttcggacatccacccatgggaccaagcttcaatagaccagccggacccactccgtcacgctatagccagcagagtcagagttcctttcaggccccctcggttgcaagcaaccaaccgccagcaaatgcctgttggcactgcggagacccca

SEQ ID NO: 124775 - DNA, 479 bp, Zea Mays
cccaacccaaactaccaaaccccctcccttcttctcttcttggtccccgcgcgcgcacttgcatcattgcatgcagcacacctgaacaacttgcctgttgtactgtaccacgagcagccacatgatgacgctcctcaagacgtacaaccacaacgacaagcagcaccagttctcgcttcccaagaggaacttcgtcacctacgccgtctacgcgctcatcgccgtcgcgctcctctacctgttcgtcgacccggcagctccgcctgctgcgggttcgggtgcgactgcggcatcatctacgaccaccaccaagccatcatcatcactacctccttctccttattacgaagcatcatcgccgatcatcagcacttcatcagcagccgcaccgctgtgcgactactccgacggcgagtgggtgccggacgcccggccgccgctctacgacggcacgacctgcggcgccatcaaggacgacg

SEQ ID NO: 124776 - DNA, 854 bp, Zea Mays
ctctcaccgtctccatctaccattagtttaaagaaaaaatggagcagaaggcagtactggctgtgcgcctgtgctagtgcttctctgctagcgatagcaactggcatggcgtggaatgggaatcagctgtgctgtgcgctgtgccgctggctgtggacatgccaggaagtggaagcacatggtgcagtggagtacgtagtagtacaacatttactggatgctgtgttgtggacatggcgtgtacacgacgtacgactaatccaataaacgcttagcttatccagttggaagcactgctcgtttagagaggtgagttgacagtagttaacgcatcaactttcatctctattccaaatcccaggtaaccagtagagcctataggcgatacttaactaaaataggtctaaacttatgcgtcacccgtttcggtccaacacattgcttaataaagtagtgtgttgtaccgaaattgtccctttttggacagccttagagtgaacgacatatcaaataggatttatgatgagtcaatgagtttgagcgagatttcgacagcataaccctcttgttctccgttgcaccattacgggcgtgcaatggagaacaacggggttatgctgccgaaactttgttcaaactcattgacttatcataaatctgtgatatgtcgttcactcttaggtgggtttaggacttatcctttcctataattgtaggaccaccggctgataatttatctagaaattaatgaacttgtcttgatctttaattagtcgaacgatgggtgatagtcgtcgctggatgtatgaaggctggcgaaaaatgatccttcgcttgagtggatacagaaaacc

SEQ ID NO: 124777 - DNA, 432 bp, Zea Mays
ctttctgttatctcttcaaattcacgctgtgctatgcttttggcgagaattggggttatatgaatcaagaaatcgcatgggtagttttggataatgtggctcttaggttggggaaaataattttgtgcgtagtgagcatataaattcactagaactcatagcagtagcacaatatgttctgccatgtgaatcactacacaactcttaatcactataaaaacagtgaagcactacacaactctaggccagatgttttttgtgtttattttgcttgtaggtgttctatttttaccaacagacaatacttaactgacatataattaaacacactggggtccaatgaaaactgacataaatatctgcacaatatgcttctgccttggttagtctgggttgttgatttcttttttaacacactgggttcatttctag

SEQ ID NO: 124778 - DNA, 413 bp, Zea Mays
gggtaagggaccacaattgctttcctcacaggctgcaatttgcagcaaagcacatggtcttttcttttaatatataccagttctgcaggacagttattcattagtttatgcccgccaggaatctaaccagcctgcagcattatatatacaagcatcgtcttttgaattccaggtcataattagtcaccaaatattaaaaacccacttagatattaacagaaattttccaaaaggtattaattagaagtgaatcggtgcagccaagactagtatatgtacatgcagagtaatttctcaaactatttatatgcatatttggctattttggtaccaattaaattgtcactaagcaagctacacaggcacatggtcctaatccaaaaactcaattcatcgatgtcttgcggtttggg

SEQ ID NO: 124779 - DNA, 439 bp, Zea Mays
tggggagggatggaacacaccaaaatatgagggagaggaggctatggatacgggacgctaattttttggggaagaatgagggagctgttggagtaagaaaaaccactattcttgactaatatctgttttggggttagtttacacgttattttggagttgctcttaggcgagaaattatacacgacaactaaaatgctgcgatttgggcctttaagtcgcttttttgagacgatgctttctgaataagatgggctacgtccaaataaggcccgttctactagcctgctggtcaaaatggctgataaatcacagggcagctttcacaaagttgcgctaaggcccaagcgtgcagtttttaatttgctcagctcccatgaagataaatgttgatgccgctgtgtctaaaaacacaactgtcgatggcggcggcgagtgactg

SEQ ID NO: 124780 - DNA, 654 bp, Zea Mays
gaaggttttgaacgacggactgtccgccattggttcatggattgttcgctattttagtttttgaatgctctaacatgcatttatagccgttggaattcaagtgcggactattcaggtcttgtaccatggatgaccaatgttcatgaaaaggtactatgacaactagttctagagaaaggcctatacatacatggtgctcggggctaggcactcatttttggccatttgaatcacttgtgaccacatttgaggcttctcttttctctctctcactcacattgcttagtggttgattcctagtgagattgtgagtatcctagtgcattgcataaattgtttgagctttggagcactagcgagatcatcaagcaaggtcagtgacttgttactcttagaagttctcatctcctaaatgtcttggtggtgcaacaccattgaactcttcaagaagattgtgaagaaggtgtttgattgtgagaggctttgtgcttgccttactagagtggtgaaaagtatctctagtggaatcgagatttggaaatgttctttaatccaagccagcttatagactaagtgaaatcttggtagaggagcaattgcaagtcattgactctacctcaatataagataaaacacaaggcttttctcaaatgc

SEQ ID NO: 124781 - DNA, 388 bp, Zea Mays
ttgttggggtcgatgggaggaatgaccaccgcagcagaattctggttcttccgcttgggtgccatcgcaatctcaccggcgggttgaacaggggcgaaatcagagggaagtagaggagtggtttgaggaggaaatgaagttagggctcagaactcaagagcgcgcgctgacatgagtataaatggggttttcccgggttgggcaccgtttctaaaaaaagtgtcaagtcatcactcgggaaaacgagatttccgacatggctcggccgttacctctaaaacgccgacagtatctgccatagctcggttgttatctctaaaaagtcgacagagtcaaaaaccactcagtcgtaacctctaaaacgccgacagtgcctgccatagctcgg

SEQ ID NO: 124782 - DNA, 409 bp, Zea Mays
gcaaaagtctacaccaagaaactgtccgcgcaaagaccgactacaggcgcagccggaccgacataataaatgtgctagaccaagtgcgcaacgcccctatggacatagccggatgcgcgaaggtgcacagcctcatcatacaaactatagttacacacgtacagcgagggcatcacaccttacattggttcaaccttcggaatgattcccatctccctatagttaaatagcattatcctaagctcctcaccctcaaaaagacttcgcaactccccctcacctacactcgccccaaccggcaaggataacaattccctcttgccagccctgcccacacgaagccgaccgccatccacttcactcactctacgcttcgccaccgcccttcgccgcctacgcccagcactcg

SEQ ID NO: 124783 - DNA, 558 bp, Zea Mays
acggaagatgccacctcttcccccatcgggaagtccccaaaggacgagtcgtggtgctcgacgatctataccatcatgttgagcaaggaaaacatgcaagaaatctaagcctaacccccacctgacgtgcaaaatgtcggagagaaaactctagccgggtggcggaatgcacccgcctaatcctgtgaactagggggtgcctagggtttgcctgattaggtcgatgaacacagaatcacaccacagtttatagttgttcaaaccgccgaagcataaaaccctacatccactgtgagttgtattgatcagggcttgggaaacctcaagtgtggacaaatctaagggtgctcgagggtctcctagaaagtctatcccttgtaacgttatgtgccctcccttttatagcccaagggggcacatataaggaagctgagccccgataggcgggcctaggaatatagtaataaaaacataatacatggaacaattgatgtcgacagtggacatagatcttctcttggttgtcgtgtggatttcttgaccagcctctccttcgcc

SEQ ID NO: 124784 - DNA, 397 bp, Zea Mays
atgcatattaggcttgtcccatatttgtcaaatacggaataaatacgggttcaatccagaaaaaacgggatcccgcaaaaacggacggaataagccctctcccgtttccgtcccgtttccatatttttccgtaaatacgaaaacggtcgggtcaaatgaagaaaacggtacgagtcgggacgggattttttccatccgttttcaaccctagtcgcggatgtggggaagttgtcgtcccagtccaacctccggtagaggtagagccccttccattgattgtgccttttggcagtgttgggcaggcaccatcgcaccggatccagttcctctgcggtacttccgggggtaaaacttcaacactgtcggatgtagatcaacgaacccacatactttgtgc

SEQ ID NO: 124785 - DNA, 272 bp, Zea Mays
gtcgaggagccacctacgctggaagcagcagaggcggatgtgcggtggtggcacaccatggaggaggatatggggtcgatcaaggaaaacaagaaatgggagcttgtagacccaccgatcgggtgcaaaccgattgggctcaagtgggtcttcaagttgaagaagaacgagcgtggagaagtggtgaagcacagggcaaggttggtggcggaagggttcgtgcagcgcgagggaatatactttgaggaggtatttgcggcagtggcacgaat

SEQ ID NO: 124786 - DNA, 283 bp, Zea Mays
gccggccagccagggagcgagtggctgcaggtggtgtgtcacggttccattccattccatccagccctgacctgcccgtctcctcattgcattctgtcgacccaggcacacgggtccaaaatctgagaggctagtgggtccagctagctacagctgctgtcactgtggcctcgtgcagccgctaggagtgcagaagcagaagttcacgctccaacatagcttggagcttgcgagtttcctacagagcatctacaatcatttggaatatttgtttttcagtttt

SEQ ID NO: 124787 - DNA, 313 bp, Zea Mays
cttgccaacccgactgttccagcccttgcccttattcacaattggtcgtcggtggctaccccttcagacctacagctcaccaatggctgccccttcagacctatagctcaccggcggctacatcatcaacggctacaccaccctgccccttccctgctcgcctgctgcagtctccacctgcggcggttgtctcaaggttcaccagctgcagtctccagtctccaccctaccccttcccaagctccagcagacctgcaccattgaggagatgagctcgtcatctcaaggttccttctactccccccatctcccc

SEQ ID NO: 124788 - DNA, 339 bp, Zea Mays
caaccaagtactagaggatatgttaagagcttgtgctcttaagcatggtggtagttgggataagagtttaccctatgcggagttctcttacaataataggtaccaggccagtttgaagatgtcaccgtttgaggctttatatggcagaaagtgcaggactccactttattgggatcaaactggtgaaagcagttatttgggcctaagattatacaggaggctgaagaacaagtccatcaaataagagacaatttgagaactgcgcagtcaaggcagaaaagctatgctgatacccggagaagactgctagagtttaaggagggtgatcatgtctatttg

SEQ ID NO: 124789 - DNA, 301 bp, Zea Mays
acaaaaaccaacgctaatcagtaacttcaaccggaatgtgcaatagtctgcagattggagaatgtgtataatgtttttttagtgggtcgacatccgataatattatgctaaaggtgtcgtcaaaacacggcactagtgttttgatccattgtactaaattttaattcaattttgactgtcaattaggagaactaaacatgcactaattgtaaaactaattgcataagttatatctaattcacgacataaatctattaatcataagtatctcatgattagcccactagtcaaatgatcatgc

SEQ ID NO: 124790 - DNA, 328 bp, Zea Mays
cttttacataccttatcatgacatgtaactgtattgtcatattccatcccatcgctagcattacttttattcaactcttctccctggtacaaaataacacgttacttatgcataatttatattacaaatagtataacaataaaacatctgcaataatattaccttgtcttcctcattatcactaacatctgttgactcattacatccaatatctggctccaaacggcttagaacgacatcgagctcatccaacacatccatcgccttattgtaccctgcttttgacatacacgcctaacgaactactttcatagttttcgttaacaac

SEQ ID NO: 124791 - DNA, 328 bp, Zea Mays
cgaatgtcaggtgagtctggaggctagatgtggagagggggtgatgatgtgccacgacgtctcgccgttgctgctccatgccagctgctcaggtcgactagacggccgcctcaccgctgctactccatgctaggtgctcaggtcttcatcagacctttcaccgaaagacagccaacacgtgtgcacagccctcctcttcccttctcgttgtgcgaatccgaggatcaaaccctagcttaagctgttcgccgccgtcccgccgctccacgcgaagtactcaggtcttcgtcgggtctgtagccgaaaaacaaccaacgactatgcacac

SEQ ID NO: 124792 - DNA, 601 bp, Zea Mays
cggagctcaaggtttgtcaacgggaccagggtggtcgctacctcatcatcggtaagtaagtctcccgtggggttgtcgctttctctgtccccttttcgtatggccccgggattcacgtggtggttgtggccggtctgggcgctgaccgcccaggtgagtatcggtcgccctggtgctggcttgcgaggtgagagggtaaggggcgtgaggtagaacacggtggatggaccgttagattggatatggacagaggagattagatcgcaccacttttgaattgtggccattgatcccaaacggtgtggcccaaattagtttgtagagcacccctttgatacgtgtgatccggaccgttgatctcacagtgctcggccaggattagaaaatgcataccctttcgcggggtttgagccgtggccatgggattgggatcctgtggctgtggttggataccgttcgagagcatgggattctaatctgaacccttgtgtcgcgatcggacggctcacagttaaccataccccttcgaccggggtaaattgcaaaagagcccctcggcttttacaaaaacaacccgccatcctttctaggccaaaataaa

SEQ ID NO: 124793 - DNA, 398 bp, Zea Mays
cacagttaatcattccttttccttattgagaacaacttttgtggcctaattccaggtcctccttcgatgttctgacagactccattgccttcatcattgttcatgtagttttggccttcaaatggagccaaattgtattggcttgaaccttcaaatgttgacgggtttggttgagatgaagtaggaacaccaattgaggcctaaaatgtagaaatatagctatgtgagttgataccttttccatggaaaatgcaaaataaatagtgagtcacataccctcgtgtacttagctcccttcctaggctcccaatcagccctaacaggctcagctcccaccagctcgactggctcccagttaacatctccgaattggcgttcagctaactgaactggctccc

SEQ ID NO: 124794 - DNA, 489 bp, Zea Mays
cgcagcgagttccacttggtgttagagttaattcctctaatgttgtgagacagaatttttagggaccagtgcatattctgaggaggattagccatagggaacaacaatcatttcgttaaaatccacaagtacgcatagcatacactggcagaggtccaagaagaaatatgatcgaagacaggtatacctagaagaccagctaagattcgaagattgcatgaaaaagctccccaagagaatcaaacgtgaagtttcccataaaaaccataagaacataccacataaatcccacacattataaatatccatgccgacaacccaagagccataagctcgaacagaggttgttgtggcagacaaaaagggcgccacaagcgcatcaccagaaagagttgttttgttgttatacataagtttgcaccaaaggttttccaccatcactggcacggttaaaactgccaggcccaagagaaaaggcaaaagccttac

SEQ ID NO: 124795 - DNA, 458 bp, Zea Mays
gtagagtatcaaatgctggtgctcctgtggcgtattttgtgtggaacctgccgccaaataggcctttttctgagtttgtctccaatcctcctgctcgtgacggtagcccgggtcatagagtgcgaccctctcctaaggacattgaggccttgattgctccactttggagtcttcctaaggatgagagacaaactcactttgagatgccagccaacactgatgatgctgagatggatgctgtgcttagcctgctggccgaggaatcatccgactctacccgcaccgagccaatggccatcacgactgggcaagaatttggcaaagaggcggagattcagagacctgaaggtgcccgcccaaagcgttcacgccgagtgaaccgcccgactgcctgtcgaggagaaaaagaaaaagaggcgacttcggtgactatcgtgcttggatcaggatgtcggtcc

SEQ ID NO: 124796 - DNA, 369 bp, Zea Mays
gagtgagtgaattgtcgcgaagtggtaggcgttatcgtagcgaggtggagagaggtcgtcttcgcgtggatgggactggtaagcgagaattgttgtcctcgccgattggggtgagtgtaggtgagggggagctgcgaaatctgtttgagggtgaggaactgatgataatgctgttcaactacagggagatgggtatcatcccgaaggttgagccagtgtaatatgtgatgccctcgttgtgtgtatgtaaccataattttgtgtgatgaagctgtgcgctttcgttgatcaggccgctcccgtaggcgacttctgtacggagtcttttggaaaagactttgattttgcgtacctattattccggctgca

SEQ ID NO: 124797 - DNA, 416 bp, Zea Mays
ttcacaacggacggtcccgattcaatagctgcccaactctaatcccggtcgtccaaacaggatctgacggtcgcgaatccatcatcttctacccagaaacgctgcggcggtggccgcgttgaccacggcggcgactacgccggtgaaccccgatttcgcgcccaaggacactaccctcgagcctgtagcgttgacgtgatgcgcacatgatgacgaatacgtggaatgggtaacttaccagcagtggcgtagaagaacctcccagccacggaaccaggtaatccgtggcgaaacccagtcggcggcgagagattgccttcaaccaccgccaagagaagttgcgcaacggataagtgatgcaccgaggctttcatccgtggattgaggcgcaaccctgctgagttcccccgacggcg

SEQ ID NO: 124798 - DNA, 618 bp, Zea Mays
cttgtcatgttgtcgaactaatcctgtgatgtatgtctaagtctcaatgctacctcgtgaacttaagttagtatgatgttaagatccttctagtatgtgaactctggtgactctaaaatgttctaatgctgctgttcgtcgtgaataagttcaagacatgattatattattattatcgttgttcatatgctttgtctgatgtttatgtacctcgttttgtcgattggcttcactttataacatatgactaaatgtgtgccatctccacatatcctagcatggaccctgccaacaatgcgacatcgtcgcaggcgatgtcaaatccctcaaatgcccagcaatttcccccccccaccccctttatggccaacgggctacatgcaccagaatcctgtcgattgcaacatcatgggaaacattaattttcctagtcctggtcaaggtccaactacaatgtgggctccaattcagccagggaatactagttcccaatctaccatgattcctgctccgcaatctgcactctattggaatcactacatgaattttgtgaggaaccctcttggttcagttggagtgagtccatacacagattcttatcctgcatcacatacaagt

SEQ ID NO: 124799 - DNA, 530 bp, Zea Mays
gctctgtcttcccctccttcagttctaactttgctgaaatgttcccatacatctgaccttggagcaatagctttccttttcttgccatcctcctctgttggtgcatcattgggttgctcttccttgcctttgtctgcatctgtcgctatcggttcttttgcgttcacttcattaacagcaacatcatcagtgcccccatctacaagataaagtttgaaaataaaaaatcagaaatctattaatagctcaaagaccacagttgacatttgacaacactacacagatctaaaatgaagcattcagtatccagtatcttcactaagacataaatctattaatagttcaaagaccacattacaagactacaagagaatggagatgagtagagtagagtagtggtaacatacattggaggactgctcagttataggcgccgttgtactgctcggagaacttggcgccgatggctgatgtcgcccaccggccaccgcacaagcgcacaaccacactcgtctcctcctcttgctgcc

SEQ ID NO: 124800 - DNA, 419 bp, Zea Mays
gacgaccgatggaccgttagatcttggtgcacggctctgatcgagtctagacgtaagttgacggggccgttgatcccatagcaaacgactaggattagatctagacgaaataaatcctgagcgacggattagatatgggtggccacgatttgatttggcgtaccctttcgtctcaatgaatcgtggccgtgtgtcgtggatcggatggatccagggggatctcgacttctttaaatccctacccttgatttcagatccaagggttcctgctgcgtaccggttcgggagcgtaggattctaatccgagccatgtgttgccgatcggacggctcagatctattgataccccttcgccgagcaaggcttgcaaaagagaccttatacttttaccaaataaacccgccatccctccattatag

SEQ ID NO: 124801 - DNA, 534 bp, Zea Mays
ataaaatcaagtggcttagattattaacacataataattgaggaagattaataaggacgaactaagagttggtggccatggaggtggggtgattagtgactggtagtggagatagtagggcaggtgacaggaaattgaggttgtgctggcacaatcaagctcataattgccaaaatcgagccccctaatgccttagtatgaagttgcactgttgggtctgtgaggtttatgcggtccagctagctattttgagtggagttgactgctggtagtgtttgatttctgtggaaacagtagtatggaaagagggaattggagaatatatatgtgtatgtggattcatttatttttctctgctgcggtcccatgaactaaacacgactatagacttctagaggcattgaacctgtaaccaaatctctactacatgaaggggccagaaaagcttcagtgaacatgttttgagtggagttacctgttggcgagcttttctagcattcctgctccagttgtgcaagcttcagcttaatgctc

SEQ ID NO: 124802 - DNA, 672 bp, Zea Mays
ctgtccagcgacaccctcccgccagacgtcgacgcgttcatcaaggccggggccgacgacttcacccccaaggtaacacactgacgcactgacgccactctgtttcgttcttgtcgagaagacagacaggcggctacattcttgaatcaaaaaaataataaaaaagaaacagagaaggggatagttgggcggtgtagtttgaggtttgagcggctctgataaatgattattccttcaaagaagactcggtgatcattttctgataacctctgtacctgtgtttgcagcctctgtccaaggagaagctcgtccgtatccttaccaagttccatctcgcttagctctctatttgctgtccaaggagaagttcatccgggtttttttttttggttgccaaattggcaaatacaatctccactttgctctctgtttgggtgcaaatctcaatgagtggataaataaagggtctcgaagaatcgggtgggctttcttccactatggaccttgggccttatatcagctcgtgttatccttctcgcatataattcacacccgctctgtaatctgtacgttggttggtattggcatcacatgacaacaaggccctctttgttaggaccgtctcctctgaaaacagctatagatctgatttctctaaagtagttagagcca

SEQ ID NO: 124803 - DNA, 450 bp, Zea Mays
atgaaactgaccgtgtagatcaaccaggtaaaacgaacgaccaagattgacgcgaggcagaacaggcagaaccagggaggcagcctacccccttaccttcttcatagtagtagagattaacatcaaccctcctaatcaaggacctgattaaggagatagatagttggtttaatctcaagccgcagagtacccaacactacttactcaatcagagactttttgtgcaaaagtaaagcatacaatggctctgaatcggagccgtgctagaaacgctaggtaaacaagggatgcggtgtcttcgttcctccccgcgtgagagcactaggctttagctactgtgtttggaaaatttccattgatctctgcgactctgccacagctttcggcgtcgtgccgcactacgaccgccagtaatatctaacgcgcgttctatttgtatttgtattgtac

SEQ ID NO: 124804 - DNA, 543 bp, Zea Mays
gcaagctatcagtatcatattgccaaggtcgaccaagtaacaaagagcatgcttctcgggcaaaatcagaataagcacccatggagaaaggaacacgcacggaacgcgtgatttttattttaccaccatcattaagccattgaatgtgatatgggtttggatgcttacgagtttgtaacgacaacttttcgatcaacatggtactcgccaaattgttgcaactgccgctgtcgataatgatgcggattgaccgctcctgcacaacaccctttgtatggaacagagtgtgtcgctgattcttttcgggcaaagcgacctgtgtactaagaacacgctgcacaacaagactttcatacctatcagcgtcgcctgggttgacatgtacctccgcctgagctgcatggttagtgacaagtagtgcatgttcaatttcttcagaatcactagcggaagagtactcaccatcgtcacgaatgagcaaagtgcgcttgtttgggcagtctcgaatcacatggccaaatcctctacaacgataaaactgaa

SEQ ID NO: 124805 - DNA, 401 bp, Zea Mays
atcaccagcgctgtatttggcgtccgcagtgctggagagagaagatagagttggatttacagtcaccgctgcaggcctccagctactgcaaaaatttacgggttccatttccagctctccggtgtgggcagcctaaaaaggtagacaggcgctgcgtatgctagctcaatataatagacgctcctgtgtactgtactccctccgtccagggaaacaaatctagcttcccgaggcaaactcattgtcctgcagtcacgtggagtatagactgtcagtggcagtgggttccacaactagtagatagactacattttttttggatacccttaattggttcctagaatttcatgatttcccatgatcgagaatcaagaacaacatgcatggcatgggcccaggac

SEQ ID NO: 124806 - DNA, 686 bp, Zea Mays
gcacaacaagtgcgtaaatcgaagtcttctccaaaagacaatccgcgcaaaagttgcctaagggtgcagccggactagcacagcaagtgcgcaaattccaagtcttctacaaaagactacccgtgcaaaattcgcctaagggtgcagccggactagcataacgagtgtaaaaatcgaaggcgcattacatcagtccgaaagtctacaggcgcagtcggaccaacacaataatgtaccagaccgggtgcgcaacaccttacgaacacacccagatgcgcgaaggcagtcaaccttatcatacaaactacagttacacgcgtacagcgagggcatcacaccttacataggctcaatcttcagaatgatccccatctccctatagttaaatagcattatcctcagctcctcaccctcaaaaagccttcgcaactccccctcacccatactcgccccaaccggcgaggacaacaattcctgcctaccagccctgcccacacgaagccgaccaccatcaaacccgctcactctacgcttcgccaccgcccttcgccgcctacgcccaacactcggaccaggcaaaatttcagcatccgtaacacgcggagaagcctccgcctcagccacatccaaggccgcgaaataatctaagccttcatccgaagactcttccgtccacaaaaccgaac

SEQ ID NO: 124807 - DNA, 376 bp, Zea Mays
gaattcgaattgaggcataaaatgatgtggaatggagccgatacttcatgaataggtttatatgggtaaatatgagtgaagtgtgtgcttggtttgaatttaggcgaagaaaatggaatttgggcactcggctcggaaacaatcgctcgaaacgaggaatttggtgaaattgaagcctggtatgtcggattggcgtgaaatttggcgaatatgtaactggaggtgttgtgaaggtgcctgaaaaatttgggttcaatcgaagcatttttggctggtttggacatttcaccgaacacgtggcgtgcggtgaattaggtttttggagatatggccatttgaggattgaaaccctcccaaagggagctagaaacctgca

SEQ ID NO: 124808 - DNA, 694 bp, Zea Mays
cggggaggaggacccccaccacgacgtcgtggcgctgccggcgcggaagctccaggagctgcgcaggctcgtggacgccgaggagcggaaggccgaggcgcgcgtcgaggaggccgaagcagcgcggcacgcggcgaaggcgcgaagagcggcggccttggcgaggctgaacgcagcgcgcgccaagaggcgagtggctgctgaagctgaagctgagcttcgtcgccgcgcggacggggacgacgcccgcggcacgcgggcaagcgcgctggcccggaggagccggagccggagcgggaggtcgtgcttcgcggtgaagaagctgcggaggttcctgggcaacctaaccaaggcttgagcgttgaggtggctgcgggcgttcagaagagttcttcctgagccgaattgtggttggaggtgagcgtttcaatgggcttttgacaaataactagtagcgtcgtggttcaaaaaacatttacaagagatctttgtgtgcaattatattacgcaaggtttttgcataaagggaggcgatccatacagaaagatgttctggtacagactacagaatgcttgctttgccttggttggcctattatacaaaaagcgagctagatcggcagtttgtttagttgacgaagcaatgcttgatttgcccagggtgacatacgatacaggagggcaaatgttgaat

SEQ ID NO: 124809 - DNA, 551 bp, Zea Mays
cgaaagcagcgggaaggacgacggcaggaagcgacgaagtgagagggtgagagacaattgaaacaccgccctcggaggtcctcaggggaccatctacgaggagcgggagggggacgtccagaacgcctacgtgccaccacctgccacccgccctccgaaggaaacgaccgcgccgacccttgggaaagcaccaactggtcggcctccgaagaccccaccgcaccagctagagaggctctgcacggtcggggagagactgaggacggaggcgtgggagcagggtacccgaccatggcgagggccgcatctttgtaggagcgcggcgccgcccaagaaccaccagaagacgaagagatggggctggtattactccacctctggaatttggaccgccccgcctgggaagtcgaaacggcttgcaacttgagccctggcgccaagagagtgtgatttgtgctggtggtcgccgtgtttggagcgaagtccggcgaggggctgcggcggtgggtgtggccgccagggaggggaagggcagggtgtggtcgccgggg

SEQ ID NO: 124810 - DNA, 288 bp, Zea Mays
aattgttttatgagggggctcagtgacaggcttcagcggaaaatggcaacatgcttggacctcacctacagtaaggctgtcagtacaacactagcagtggaagccaaaaatgcaggacatggaaaatcaaaggggtttggaggtgaaaggtcaaatcaaggacctgggatgagaaccaggttggtgattcgacctttgaatcaaaatcattctttgcctctcccactttcatatccattcaagcagcccgtctttattcgtcccactactacccccgctcctaccaat

SEQ ID NO: 124811 - DNA, 930 bp, Zea Mays
gcttacttggttccctgatttcctaattgtacagctgttaaatatacatatgattcttttcatctgcttacactcttggtgtaaagtaattgttaatctatgctctattcccaatgtattggagatttggactcaccaaaatcacggcatttctatgatttcattgttacagaacttgatgcttaatttcaccgccccttcttttcaacaccaactaatagtcttgtcactagtgctaacagagggaaagggacttgtcagtagagaactagtatgtatttaattcgttgcctgaacattctagccccaaagaggactgtaggatcttctacgagctcatttatgaaaataaagcattagctgtcaaaaatatacgaacgaacacaactactagtcctctctgccaacgtatttgggagagagatagtaatgtggggcttgattgaagagaataatagataacagagagtatgagctggtgggcggcagaaagggtgggcaatcatcactgcttttcaataaagtggtccacttacatgtcaggcatctgtttcatggtctacaacttgaatttggagatattaatcatcacaaggtgaagcattggtccacatatttgttcatgatggaatgcaaagtttattgagatgtttactgtttattcatgagccttcttgaatattttcttataggtgctgttatatagagtaaaatagcaaagttttctcaagtttgctataaaaattgcttgtgcgttgtctatcagaaaagtactgaccaggacccaccagtaaaattccaaagtgaattataactccatgattcatccacactcctcatgtagccaatgagtttcactagtaatgtgtgctagtctcagttgcaaaaacctattgcaaagaaactttcttatggcttaatgtaatgcac

SEQ ID NO: 124812 - DNA, 736 bp, Zea Mays
cttgatgaaagttagagtccctctacttacacagcaccacagatacgagggaccgaatgttgtggaccccggcagcctgagcatggagggcggcgacggtgtcggcgtcgagcccggaggcatgggggagccttaggggtcaacagggggtcagggcggcagagaaggaggtgttgtgctgtggccataaaagcggtcagggcagcgctcatggcacacttttgctccagggccagggacgcgacacgctagtgctcgtgggaggcggtgacgaccacctagatggtggcgatggccgcgacgagcgaggaggatgcagatggaggagtcgtcgacgacggggcgatgttgacccacgtggtgtcggagatggtggggaagcttggcggggtatgacgacgggtactgcttctgctgcgccacgagggtagatgggtgctgctgtggcgcgtacgtagtaggggaggtgccgggaaggggccaaggccaatgatgaacggggccccaacctcggtgagcgcagtggtggccgggctgcctgcagcgggtagggggtcagggaggaggccggtagtggcagcagcgctgctggtgaagagaccgatggtgagaagagggacgacgacggcggtgatgtgcacgccggctgcccaatcagcgacatcagagagggtcgggtgcaggcccacgcctgcactagaagctgcagcagtggctgcagtggagtagctcgtgg

SEQ ID NO: 124813 - DNA, 294 bp, Zea Mays
tacatggccaaggattgggctacgatcctaaggtaccctaaggcatatccgagacccccaggagcgattcatgacggtatcgtagggaggcattgagccctcagaccccatcaaacaggttcggtaccaagcaaatcacccgcaagtacttttgggacgtgtctccggacagctagccgactcctatcgaatggagcttggacccccactcggattacccgataacagctcacctgaaatgtcatgctctttgcccatcgagggtagcatggcactttccttctcttcctcctt

SEQ ID NO: 124814 - DNA, 389 bp, Zea Mays
ggatgcataaacggatttaagctaatgcatagaggtgatacaaattatcaacacatcaagcaacacattagaaaatatattaaagacctactagtacatacaagagtctaagacacaagacagaataagtctggacaaagacacacagagaaacgagaaggacatatgttgctcaacaccacaaggacgtgtttggtgatgcactggatatgagagcattatatcaaaaaagaaaacgacaacaaagtgcatcaaacacacatgtgtgcatcgaatcctagtcatcatttatgtctgatagggcttcggatatgactttgaagagagacataaggcaccagacatgtctggtaaacactcttgataagtcatcggatgcctgatgtcca

SEQ ID NO: 124815 - DNA, 629 bp, Zea Mays
tggctccggagcagccaggatcggcagggaagctaagtgctgcttcaattctttgaaggcttgttccgcctcttcggaccaggcaaatgggcctgatttccgcaggagcttgaagaaaggcagcgccctctcagccaacctcgaaatgaagcggctaagggctgctagcgacccggtaagcttctagatgtccttaatacgagcgggaggcctcattacctcaatagccttgattttctccgggtaagcttcaatgccccggtatgaaaccaggaaccccagcaacttccctgcggagacaccgaagatgcatttctccaggttcagcttggtgtgggttgcccgcagcttgccgaaaaccagggtcaggtcttccactatagccgacccttcccttgtcttgaccatgatgtcatcgacgtaaatctccaccttatcccggatcaggtccccgaaggtcttgctcatcgcccgaacaaaagttggcaaggcattctgcagactgtagggcattacaacataacagtatagtccatctactgtcacaaaagcggtatgcctcctatcctccttagccatccggatttggtggaaaccagagtaagcgtccaagaaggacaagaggtcgc

SEQ ID NO: 124816 - DNA, 917 bp, Zea Mays
tctgggagaaaatcaagctccaacttggtctgtcagacaagccttttactgaatctggcgcactgttcaccgtcttcagaaatatcgcgctgtggataagggtcagcccctcgccggcgataagaacgccaccgcaacgcggatggtcgtcggtggccgcggtaaatatcctcggcgtcgtggcagatggtcactgaggtggtaggctccgattaaacggcgacccccgtgccatcaccagaatccgccgcgcggaaagcttgccagcacatctgaaatccacacttcttccccaactccggtcaacggcctataaattgagctcggactccgcttcttctccacattacgcacctcagtgcttaagcaattgacccaatttcgccaaagaacttgcgcagccccaaatcccctcctcctttgttcttgctccgccgcatgggactccaccgtggacaacactcttcgggttggtagtttctcaattactctctgttctagctcgtgtatagtctcctattgctctctgtactgagcaattggaatttggccgaagtccatcaccagaacgcgcccttgccttgtaaaacgctgccgtgaccccctcaccatagacccgctcttcgggtcttgttctgcccaaaccaaagtatgtccatggaccctggtgaaaccgtgaacctttacccagcctcaatttggccatccccgtcgctgtttgatcggaacatgttcatcctcctgtccatccgctcggtcaccgtgaactgattgattcagtgtcccctaggtgaaattgatggaggggaaatgatcggggtggatctaattgtgtccctgtcgcttgggagctccagccgtggcgtcatctggccggaataggctcgccggagtgcggcgaggactgttcctcgtcg

SEQ ID NO: 124817 - DNA, 512 bp, Zea Mays
caaagcccccgacgtcgtttcgtttcgtctcggctcgggcgctcgaccgctcgtcaatctcatcgccctcgcccctccctcgccctcgcctccgcctccgttccgttccactccactccagtccacccgcgacttcaaagttcattcaaacccgcgacccccgggcaccaccaactccaactccgccgctgggaagaggaggagcgacgacgagctgcccggctccaccacgagcagcaagttgcaggcctaaggaacaggctccagcctccagcctccagcagagcgtgtgcccatctgcctgccggtgccggctactactcacccgcctccgcctccggtgagaagccaagccagccatggggtgcgtgtgctcgagggggttgccggaggacgcgccgccggcgccgggcccgctggcggccgcctacgacgcgcgccgcttgaggtacgggcccggcgacttggactccagcgagctcgccatcccgcggcccaagccgccccactcc

SEQ ID NO: 124818 - DNA, 813 bp, Zea Mays
cgataaggagaagaaaaatcatgaggtaatccgccatgaactccatcttgcatactctatgctgtcgaaacggtacacagagtatttcgatgtgcaggatgaagcacaaagactgggagtaaagattcaaaacctgtcggacgaggtggatcagcagaagaagcatatccacaccctgatggcttcttgcgacagcctggatgagctgtataaggatgttgtcggctctctcaccaccctttagaacaaccacgatctgacaatgaaagagcttgagaaaaagagagatgagctggtcaaatcccagtctacaaatggttggctctcaaggatctgcgtgcctcatcaaagactcaatccaaggaattggaggtcttgactcataactatgaggtcctaaagaatgacagagaagtgctgcaagtttcctatgataaagccatggacaaactgaagcgtgcaactcagttgttagcaacgagatccagcactgtcacttctggggaaactgtgacagagactcctaggctgacacaggataaaacatggtcttcctctattgttaaggacggtaccgcttagtcttggcccatattaggttgaaaacgtcttgactatggcacgatacgagccgttctggcctttgtctcagactgttatgtgttcactgcttgctgtaatgaaaacatctgatttctcttattaacatcagcgttatacgtcaacctaagtcagttgtgattacatctgttgtccttttgtacgagcatgtgttacctgcgtaaaccaacttctgatctaggtcggttgctc

SEQ ID NO: 124819 - DNA, 619 bp, Zea Mays
aacggcgtttgaacgagaaatagtgccataggaggtttggaattcgaattgaggtatgaaatgatgtggaattgagccgatacttcatgaataggtttatatgggtgaatatgagtgaagtgtgtgcttggtttgaatttaggcgaagaaaatggaatttgggcactcgattcggaaacgatcgctcgaaacggggaattgagtgaaattgaagcttgtatatcggattggcgtgaaatttggcgaaaatgttactggaggtgttgtgaaggtgcctgaaaatttgggttcaatcggagcatttttggctggtttggacatttcactgaacacgtggtatgcggtgagttaggtttttggagatatggccatttgaggattgaaaccctcccaaagggagctagaaacctgcagggatattcaggggacacaaaagaacacattccaccacttggattcactggaattgacaagaatttgaatagggcacaaagggtggaaataggggtgctcactggtcatttgaacggagagagaggagagggagccagacctactcaccagaggggagaggaagtgagcaccgtggtgaggtcgccggagggcaaccaccggtgag

SEQ ID NO: 124820 - DNA, 533 bp, Zea Mays
cgaggatttgcatggacaactggcctggatcgacatgcatgatggacgcatgcagtgcaattgggcgcacgaaaagtagggggcattcttcaaactgctattctggtagtggtagatccagaatccgctagttattgtgctgccgcgccaacccacccctccctcttgtcagtcagtcgggcagaaaagcagcatatggcttccaatagttacataaaaccctagccgtcccttggtccacgtccaacgaccaaggtgcatgcggtcggatgcgtcccgatgccatacactaggccaatcttcctcatgcgcgtaaatcaaaccttccggttaaacaccgaaccttccacgtgggacacaagccataaatcgcggttctattttttttgcgcaaatagcgtaaataactcatagtgatagcataaaaacaatgcccagacactggtgcagatcctatttttgtggtagatctgataattaaagtagatcgtggtagtttccactagattattcttgagaaacactcatgtcca

SEQ ID NO: 124821 - DNA, 682 bp, Zea Mays
cgatgaaggctccggatatgcagggacacgatctgcggtaagaaggagataagcaagtagatagtaatcctgacttgtaatgggataactctctctgttcgtgtatatatggccgagtgtgtcgggtatgataattaggggtgcccagactacatccctgaaaaacgcttaaaaccctaaggacaccatcaaggtacatccccgaagccaaggaatcaagaactctgcctcgcctgaggccccccttaggggtcttcctagaactccgcctcgcctaagcccggtctcggacagggcgtgagctcgagcacgtcttcgtcccgtccgaggctccccctcccctaggaagccatgtccgcctcaccggagtccgtctcgggcaagaggggtaggacttgtggcaaggctcgcccaaaggccgctaggggacaaccgcattcaatgcgcgtacctaccccacgtagggttacaggcgtacagtgacgatgagactgtggtcttgtcaaagattcaccaccatgattacgcaagcgcacgccgccggacaacccctgacggtacatgtaatacgacaggagcacggatcgtccttcgggcgcgaactccgtctcgcccaacatagagctcgccctcgagacaaactccgcctcacccgagccgggcctcggctacctgctccccc

SEQ ID NO: 124822 - DNA, 367 bp, Zea Mays
attactgtattcaatcgctcttcctccaatacgtcaatgtcctctaatctggtagcctctgcttcagctatgctttcgaagaccaaccttggtgccccaaacctgagatcagtaggtagcactgcctctgaaccatagaccatgaagaaaggagtattttcatgtagagctcgactaggttgagttcttaagctccaaaccacatacgacaactctctgatccattttcctgtaaacttttcattcttgtcaaagactttcttccttagttcttccagtatcattctattagccctttctacctgaccgttagcccttggatgtgatactgatgcatatttaatctggatgcttcgttgttcgtaga

SEQ ID NO: 124823 - DNA, 523 bp, Zea Mays
cacagagccgaaacaagtggccgttgcactacaataatacactacactgcactgcaatttcgacaggttttgtgcaaccttgcttttcgtttgatcctcgagctgttgagcaacagagacataaaccaaatgcatcggatatataggccggtgatcccagatagtacttttggggaaagggatccaacgaaaaaaaccttttttgtttcataaaggcttccattccatattctagctctcgttgacaactgtgtttgcggcgcacacgctcgctctatcgttgtccacctgatttgggctgtcgaaaagtgtttagggtttagatagatagatagaccgtgtagcccatgcagaactagatgttatatttcttccgttaattcatcgttttcttctcaaaataatcgaaacagactcatgttataagttttgctcaacgactgtgtcaaaaatggaggcgtaaataggcatcattcgtcgagcaactagagtagtgtggactgtactgtgaattttctccgag

SEQ ID NO: 124824 - DNA, 359 bp, Zea Mays
cgcgtgtgtgccgtcgtcagctagctctcgtggtttgtgatggcggagccgacgtgaaggcaggaggggtgcgagaggatagcacgcgcgagcggtttgacctttaaatagaaaaggacgcgggggaggcggggcggaggagctctctgcactggtccccggccggcggatgggactgtagaccgcggatgcagcacgacggaccacggaaggagatgagattcaggcgatggcagtatggctggcaccgcatgcaggcgctctgaaactgtggccacaacgccacacgtgcgcactcggtccactcactcactgtcacagtcacactgaccgccggccgccatctctttgactctttc

SEQ ID NO: 124825 - DNA, 689 bp, Zea Mays
aactcacatatagataaagagaatttgtttctccatttatattatctctaacaaattacaaattgggtattacaccaatgctattgttaggctcaatgtttttatatgggctctccgaagccagagtatggatgccaatgcagaagctttttgccgggtacatgaactgcattatcagacgaaggccaaggcagatggtcttcataagaacttcggctgctacaactttgcatatagaaaagatacaaaggctccagtgattgtctatcgcaccaaatggccaactgggtggacaaatgaatggttttatgtgaaagctgatgagaagagaacggagaagctgatgactatggtcatgaagcctatgagactaagcttcgggatgaccaggcccttgtgccatatgcaacttggctctccatgccaggtagctgaagttgagtttagggtggtagctgccgaaattagtactagagacctagtacaagaatatttggcaaacaagacatttccaacttacagcggttggggaatgccgaagaagaaagaaggggggaagaaacatgagcttgtacgactcccctatcgttttaagtttgaaaaacaattcaagaaaccttgcaacgaatggctggagatgattgagaccatgtgcaatgaaatacttggtaattataccaaaaaagaag

SEQ ID NO: 124826 - DNA, 479 bp, Zea Mays
ccatgacgccactggtttttcagtgtggtggagcagagctgtaagaagggtgcctaaagagaaaaggaaagggatcaattccctaactattttggtagtatggtctttatggaaacataggaatgcttgtgtgttcgatggtcgggatcccagtgtgtcggtaatctgtcaggaggtagaagctgagagtaggctttcggttatggctggagacaaggtgctccaggagctgctcggcagggcttcttagctgcatgcctgagcagctggtagggtcgtgttttgtgttgtttagggagtgagttgtaaccacttgcttttgggttgagggcttgaggcgaggtctaccccctcttgttgtacctttattcctttcttaatgaaatggcaggcagccagcgttgttcgagaataaaaaaaatttaaagcacaaccaaaattcattaggtggatttatacatgtgctatccattttaaac

SEQ ID NO: 124827 - DNA, 757 bp, Zea Mays
gcgggagatgcggggtggacgacgacagttgcgggatggctgggcatagagggtcggattgggatgggagatgtttggtggacgatggtagttgcgggacggctgcacgcagagagttgtatggaagaagaggcagaagtaggagcgttgggagggagacacatacgtggaggtgggaggaccttaggcagaagtaggagtgttgggagagcggcaggcccgctagacttgacggaaggcctccattgctttcgaggcctcatcgagcgaccatgatgaagaggaatcccaccaggaggagcacgttgtaaaggagcgtggcttgagttaatccttgttggttaggtggaaagcgggggttggatgggatgacgtttgcagagaggcgggttggggtaggagatgcggggtggacgacgtcggttgctggacggttgggtgcagagagggttgtgaagaagaagaggcagaagcgggggcggttgggagggaggcgcacccgtggaggtgggaggactgcatgttaattgaagaataattgagagcggtaggctcgtgggactcggcggaaggcctccattgtttctgcggcctcgttgagcaactgcaatgaagaggaatcccactaggaggagtgtgccgtagagaagcgtggcttgagttaatccttgttggtttgcttcatcggcctcgtcgagcgaccgtgatgaagaggaatcccaccaggaggagcgtggcttgagtgagttaatccttg

SEQ ID NO: 124828 - DNA, 324 bp, Zea Mays
tcttgctctacgactttgacttcttctgcgtacagtgcccaccatgcatgataaatgcaacaaggatgggcacaaacgacgcgcgcatggctgatcgacgctgtcacattccaagtacgatgatacaagttcagaagcatgttcggaagcatgcagttgaagaacctgcagcctgcactaggacactacagtcagtcgttgcagaggttttaagagtagcagctagagaatggataccaccaggtccaccatatattcatcatcaatttcatcccaagtagcagatattttcttaattactagaccagttagcagggacaaccc

SEQ ID NO: 124829 - DNA, 415 bp, Zea Mays
agtggttgccctaagatgagtagacgtgagcatgtcgcaccgtcttaagtcgttgccgacttaagccgattgctccgttagtagggtatagtggtcaccctaagtcgagtaagcgcgagcatgttgcaccgtcttaagtcattgccgacttaagctgattgctacgttagtagggtagagtggccaccctaagtcgattaagcgcgagcatgttgtaccgtcttaagtcattgtcgacttaagtcgattgctccgttagtagggtatagtggtcaccctaagtcgagtaagcgcgagcatgttgcactgtcttaagtcattgccgacttaagctgattgctccgttagtagggtatagtggtcaccctaagtcaagtaagcacgagcatgttgcaccgtcttaagtcattgccga

SEQ ID NO: 124830 - DNA, 350 bp, Zea Mays
gttccttgtgatgtcaatttgaccttgtgaggagtactagagctagcaccttcagatttgttagaaacctttgccttccactggtttgtccctccactattactgttcttgtgtgaattggactgaaacctttgcttgtgtttctccaaccattcatctttagctagtagcagtcttcctgctttgtctgtgacttgctccagtttgtcttcaaaccgatcttcagctgcctgaagccttccaactaggtcttcaactgaaagtgtcttgacatcacagaacatctcgattgagacagcaacttgattgaactggggtggcacaactcttagaaacttcttgacaacacg

SEQ ID NO: 124831 - DNA, 500 bp, Zea Mays
ctaaaacacaaaataggtttataccttcggttgatgtggatggattcgagttcccagccatcatgctcatattgtggatacgggcggacacatgaaaaataggattgagggcatacttgcaagaatgagcgctaaaatactaaaggagaggcttctaagttaggagtaggggacttcatagtaaaaatttagatactactacttacaacggagaaatgagcaggggcatgtgcccccactcacatcaacgtaggtccgcccctggatacgagcacatcctaggttgtagagaaagtagttgtcgttgccatgaacggtggagcgacgatgccgacgaccttccctcaccttcgagctagagcagattggatttctctctctatgtgtttgtgggagcgaggtcgtgcagggaacgttgattcctgagccgaccctcctcgatttatttagcgtgtggttaagagggtcgcaatcaatagactgttacacccccgatcgga

SEQ ID NO: 124832 - DNA, 297 bp, Zea Mays
ggtaccttagaccaactcggcatgcaaaactacctaaaattcacctactccaaaatcaaagtaaaacttgttgggcctacccaccccaagtaccgacaactatcttaaccatatgtccctaattcggatggcaactccaagaatgaaggccaaagaagaccaacctcgtcaaggaaagataagcaccaacccaaggagtcaagctagatctctaaaggaatcaagatccacaatccaggatggagtctttccctatcatactctttcttgcccaaacctatccttgctctaaaagac

SEQ ID NO: 124833 - DNA, 443 bp, Zea Mays
tgggccttagagtgcgaccctctactgaagaagttagcgccttggttgcctcgctcgatgagattcctgatgatgaacggcaggtccattttgaggtgcccttgaatcctagtgatgcagagataagtgctatgcttgatttgctggctgaggactcttctgatgctgctcctgctgggacatcggtggtggcgcccctcccagaggctgatacgaccttggatattcagaagtctgccagtactcgcccgaggcacccttgccgagccaatcaacctgatccttctgctgatgagcagaaaaagaaaaagagacgcctccggcgagtatccaatttggatcgggacgttggtgcttcggttcctgctgctgaagaagtgcctgtgactgaatttattgacgctgaccccaatgggtgtgcccgatctgctgctgatcccaat

SEQ ID NO: 124834 - DNA, 414 bp, Zea Mays
atagatttcagcatcgctactggcaagaatgtctcgtcatagtcaattccttggacttgtcaaaaaccctttgcaacaagtagagccttatagatgtgaacatttccatacatgtctttcttcctatagatccatttgcagtctatgggtctaacatcatcaggtgggtcaaccaagctccaaacctaattttctcccatggaatctatctcggatctcatggtgacttgccatttctcggaatctgggtctatcatcgcttctacatatgttgcaggttagtcgttgtcgaacaacaacacttccccattgccgtgcctcacgaagccttgatgaccttcatggttgtggtggtgattctcttgtcatagacgtctcaacttgttctgctacattagcatgacttgttgaatc

SEQ ID NO: 124835 - DNA, 567 bp, Zea Mays
cggcgatctaaggggtcctagcttaattggttgggtcagggagaatccagagcacctaaggatattgaaacgagaaaccagagagtatgaccgaacctagaacgggctagccacggtgaggccctttcacggtggcggagaacagatttggggagaacaagaaattggagagttatggtggctaatcaaaggtgggaatggttgctctggcttcatgataacatggtgcagcataccgggccatcaatttataagggcgctaagcggtggccggtgaatttggtttcacacagtggcggtcggagaacgaggagatcactggtgcaagcgattggtggcagctatcgttgcggttctccggcgatcaccggatacagataacccgagctattgcgacgtggtaaaagggtcatagcatggcgcgaccggggaaaacggcggtgcccgcggtaatggtcgcgtggccacgtcgccggcgcaagtgggcaagaggcagaatggccacagtgacttgtgttcatccgcggcaagatcttttcacgttgagtgtaatccactcgcccgagg

SEQ ID NO: 124836 - DNA, 508 bp, Zea Mays
cggccaccaccaattccacgtgaagaacccgggtgcagtgcaaatttcttgccgtagctgccgcaccgccgtgcaatcgcctcgctccgcggactgcccccttcgccctcaggcgtcgcaccaggggcctcgcacagcagcacggagggtgtgctaagcttcgccttgggcgggttgcgctcaaagccgctgggatttctcatcggagctcccctcgcccattcatccgtcgcgctttgccgcggtaaggactccctacgccaccctctctgttctgaccctatgtcatcgtttcgcttccctctgcacttcgtttagcgcctgtctgattgggatgtcgaacaccagagcgtggggcgcgtgcttcgccgacgaagctccgccatggctctgggcggcgccacccctgttgtggcccaaggttggggaaagccatgatccgttggatctgttgagagcggataggattagaccacgacattgatgttgcgcgtgccgttgatcttgt

SEQ ID NO: 124837 - DNA, 394 bp, Zea Mays
ggcaagtgtcaacaccatccttgaggaccaagttctccgcagtagccgcctctaaggctgagggtccctcaattacttccatgggagcaagacgatccaagtcagtttcctgaccctcgagaccgcgctctaaggtcgacgaggcgcgggacgctgccccggatgatcccaacccggcgtcgagcacgtcagcacaaacctccatcacaccatcgtccgctggctctgatagcaggtcttctggaaccatatcttcaagagtctgatcaaagtttgccagggacaactcttgtagaccaatgagggcagacagagcaggagaaggaactccactactttccccgctggcgacatactgccgactgttcttccgagtcaaagggacctcatcttc

SEQ ID NO: 124838 - DNA, 280 bp, Zea Mays
attatcgtaaaaatcctcaagattgagcataaatagtgttatatgacaatgtaaatgttgattcactcccaaccaacatcttccacacgtccatgcggccaccataaatcaggggatttgattaagggagttaattaagggatttgatatttttggtagttaccaacaccataaatcaaggtagtcccttttcactgtgagcgtggaaaatctgcatgcaagatacaggtggacccacccctaggtttgagcataaaatcctcaattttgagaataaata

SEQ ID NO: 124839 - DNA, 462 bp, Zea Mays
tagtcagggacagggatccagctatggccaaggcggaaatcagccaatgttccaccccggttatggaggaggtgaccggtcattgatgcgtcggggaggaggtcgtggacgtcacagcttttggcgcggtggaagaggaacatcgactggggtcgggtcatcggggatagagctgctcaggttcaaatcagagatggagggagccacggaaggtctgtatcgggaggggtggtgtcaaaccgcgctgctggtaagcgtcaagggcctttggtaagttctccggtagtacctgatgtctccaaggctgtcgatttgcttcatcaagcttttgcagcggcaaatggtagcgggagtgcagctaatcatgtcccggacagtacgtgtgatcaatttgtatcgctactacaactccctgataggagcagtaatgcctctgccagtaccagatgggatgcagtgggc

SEQ ID NO: 124840 - DNA, 290 bp, Zea Mays
gagcaacggccgtaattaggtttggccataccgattcgaggggatgaaatccggaccattgggcagcctacgagcggacatgattagatctgggtgttttatatcgggtgcgttgatgcgggatccattgcgtccggttcggaatgatgaagatttaatccgtagcgtccatttaggatcgggtggccgggatttgataccggttcacttatagcgccatctaatcgtgacccttgatctcagatcttacggcccatatcaacagataccccttcggcccaacctttttg

SEQ ID NO: 124841 - DNA, 317 bp, Zea Mays
atcacgcttggagacccgtgatatgagtgtcggacatccgcacaaccgagcgaggtatctccagtcagccctgtagctcgtccatcgccaacatcggaagggctgaggatccgaccccacattgcagcacatggtaggtgggagaggaataggcgattaccctcctgcataggataacatgactgggttagggggcagcaccaaccagccttatggccgccatagggcggccaacgacagtcgaggcgccggtggcgttggcctgtagggctaacgttgcaggctcaccgtcacaagggtcaacccttgattcccca

SEQ ID NO: 124842 - DNA, 360 bp, Zea Mays
caggctgcgtcgcgaagggcctcctcgttctgatccactttcttcactttaaattgtgagaaggccacataacaatgcgagcacaaaatggccgggggcaagacagacaacccttcgacatcccccggtgccacaaaaaaccaaaagtcctaccagttgctccacacttattctttgcacaacgaacaatatcaatcacttcggcccaagtctttctggtcctcagcgtgaatgtacaggacccaaattgcgcaatcaaaccacctatcttcttctgccaatgtgagcaataattcttggcgaagacctcaacagacggctctccgccatacgacgacaccgcccaaacatacttcgcca

SEQ ID NO: 124843 - DNA, 317 bp, Zea Mays
atccactcttgcctgttgtggtcttttgggagataccttggtgatgtttctttggatcaataacatgatggtaaggttggcaaatagctctagcttcatatttctctttctcttgtctgataatactagtgatatcaacatagctcgtggtctggtaaagcatgaactcatcttacatttgggcacaagtgcatgatgatgtcattactcttcgctacatgccttcagagcaattggttgagttcttcacaaatacccaaaagagagttcaacattgattctttctatctaaacttagttcttgtgatccaccttga

SEQ ID NO: 124844 - DNA, 1189 bp, Zea Mays
gccgattggggctacggctgggttctccgagcagcagacatgaaatcgaggctacctagattgttttccccaacttaatttggctaatgatcaactaaggagctctggccacggtggccgagagcatggcggctggatagatgtgttcccggcggctgggggtctcctagtctcaattgaaggctcggcaagcatcacagagtcatcaaagtgctcaaacaagggagagtgaaggctgaacggacctagaaagggttggccgcggtgagcagttccttgcggtggcggaaagtggatttggggagaattggaaattctcgagctctggtgaacgattgtggctgattagtggtggctggttagctgacgaccttgcggagctagtcacaggctcaatttatagggaggacgggcggtggtgatcaattcgaccgagccgtgctggcggccggagatgaggaagaagtctggcatcgtggttacgtgttcccagccgtggcgagctcatcggcgatgatgggacggcagtagggaatcacggcggtgccgtggaaaggctcggacacgcggcggcacagagatggcacgactgcggcgagcggctttatctacggcggtgagcaaaggggaggggtaccgtggccgatcggggtggcttccagctcaacgacgacgacgatcttttgaccccgcgacgttatcgacttaccccgagcgggaatcacgacgccggcgacgcgaatcgcggcggaggagggatcgacggcgggattcttttgctgcgtccgatctgatccgttggggcactgtaccatcgtgaactcccatcagagcacctgacagtccatatttagggtcgattttctccaatttttgtgtggtgactaagccaaccttctgtaacaaagttgtagagctataaaccgacaataattcggctatagcacttgaacccatttgagcactggatcagggtttaattcaaacccaaagatggctctgttacactaaacatctgaatttttagactgaatcagcctgacagcttaacttcagacctgattatctccaatattttcttaacaactgtgcttacactcttaagcaaagttgttctcctataattgggctacaattttgatgtggtgacctaatatgaattctcactattttgaaagctacacagccc

SEQ ID NO: 124845 - DNA, 549 bp, Zea Mays
gcagattcatataagatcttttattccacctctaagatcaattatcttcaaatattatatctcaaaattatgtagcttcttggctataggatcatataacctatagcccattgtcccagtctcatagccaataagcaccatcattgtgaacctctctgacaacttggaaatgctagggccaactttcttgacattagctacacacccaaatgtcaaaaggtgatgtacctcgggtttcttgttatgtcatgtttcatagggtgttcttccttggaggcttcttgttaggacacaattcaacaaatacactgccatgtccaagaacttgaaagcctcatcaacatgtatcatttatgatcatcaacaataagtaggaaatagctcttaccccatggcgtcttcagtctaatctgctcacgaagatctgcgtggaacaaatcaagtggcttgtcagccctataatttgccacttgtgggaacagatctcgacgttgttttctgagtgcacatccgccatagaattcttcctcttgattcattagtgacagc

SEQ ID NO: 124846 - DNA, 488 bp, Zea Mays
tggccgttggttcggatgtgatcggccgagattaaaactggtgtacccactcggcggggttcgatcctagccgtcgatcgctaagtgaacggatcgggtgtatttaaaaatctggtcgttgattcccgatctagcgggccacgtcgcggaccagcctagggctcggtgatctaatcaagaccgtgcatatctgatccaacggttcatatagcgtaccggttcgtttaaaaatattaagtgatcctcgacgttgatttctaatcggacggttaatatcgagtgataccccttcgctacggctatcttacaaaagagtccccggactttgccagaatgaacccgccatccttggcgtgtgcaaagtaattgcgaatgagcccagatctttacgtagaagaccctagacttattgtaaatattggccgctgtccaggggaagcataatgaatataaaataaaatctagaaataggtttttagtataaaaat

SEQ ID NO: 124847 - DNA, 452 bp, Zea Mays
ggttgggcgagtgcctgtagcgccgttgggggctcgccggagattaccgccgtggctggtaatgtgccgccatcggctagcctgggggaagatgagagacagtcccgttagatgcgctatggacggtctggattcgacgtcaccgtgaccgttgatcgggtatcgacgaccgtgactcagccggcatgccgagtcttctgtggatgatcctagccctcggttgccagatctgcgcttaagattagatttccgttcataaaatctggaccgttcgattgaaatccagtggccacgggtgggtaccgaatcgtaatagcctgggtctaatctgggcccttgggtcgggatcggatggctcagagtccatcatacctcttcgccacgccatttcactaaagagaccctatgcttttagctattcaacccgcgatccactcagggtgcgctcggag

SEQ ID NO: 124848 - DNA, 559 bp, Zea Mays
gcttacgaaaaggaagcatagttcccgacccttgcatatcgtagcaaatggccaaattcatggatgaaggagtagttctatataaagaatgacttgaaagagggatgatatcaagggcataatccaaaggcctatcaatcctagcttcgggttcaagagaccgacaagttacatgaactttgaggctcaggctgctatggttgctttcaacactgtttgcacctatattgggaattgggatcttattcaagagcacttgtcatttaacatctggtctatgagggtcgaatggtccatgccagagccgaaggatgatagttcttcggagcaagaactaggcctcgttaggttgatgtatatgtacaaatttgagagtgtgttcaaagagccatgcgatgaatggctagaggtcgttgaagataaatgcaatgaagtccttcagaaatttaacaagaaaggagatgaagcattagatgttgccttcagggctcggcacaagcgccgcttgaactgcgtgtttgacacgatcgggtttgtatatcctgactacccccagcta

SEQ ID NO: 124849 - DNA, 621 bp, Zea Mays
ggctatgagaagccaagggctggagtcagatgccaagtgcttctgcaacattcatgaattatcctactagatgaaggcaattaggaaggagcagtatcataacaactttgggtgctacacctttgtgcatcgttctgatgtgaggtgtcctatgccaatgttttgaaagaaatggctgggctcttggatgaaaccatggttttatgtcaagaatgatttgagtaagagggaagatgtgaggggtataatccagcaccccatacgatcatgcttcagcatcaggaggccatcgaccgcaagtgggaacgaagtgcaagcatgtttgatggccttcaacatggtgtgtactaacattggtactagggacttggttcaagagcatattgcttataagatgtggccgcttgttaatgactgggagatgccgaaggagactgctgctagctctagcaaaggtggtctagtttatctaagatacacctatcgctatagaagtcaatttgacgagccgaatgatgactggcttgaggctgttgaggctaccagtgacgagctgttgggagcttatacaaaggcagaggacgaagccatgaccactaccttcagcgcccacgacaaaag

SEQ ID NO: 124850 - DNA, 371 bp, Zea Mays
acatacacacggcgagggcatcacctattacacacacacggcgagggcatcgcctgttacatcggctcaaccttcggaatgatacccatctccctgtaattaaacaacaatatcctcaattcctcaccctcaaaaagctcccgaagatccccctcgcctatgcccgccccaatcggcgaggacaacaattctcgtttaccaaccccgtttacccgaagtcggccacgctccatccccatgcgacgacgcctgccgcttcgtgaaaattcacccacactctgttttcccatcacccttcaccgcctacacccagtactcgcaccaggaagatcctcggcaccctccgcacgcggcgaagtctctgccgcagc

SEQ ID NO: 124851 - DNA, 349 bp, Zea Mays
cttatctgtatcgaggcctcgctgattcaacccgggttaccaacagaagaattcctgttgtggatttggtgagccgactcgagatgatactcagaggcaaggtgtcgaacatcggcgctcctgttgcatactcagcctggaatctgcctccttccaaggcctttaccagttttgtgtcaaatcctcctgctggtgatagcggtttgggccttagagtgtgaccctctcccgaagaggttagtgctttggttgcctcacttggcgaaatccctgacgacgagaggcttgttcatttcgaggtacatttgaatccaagtgatgcagagataagtgccatgctggatatgtt

SEQ ID NO: 124852 - DNA, 469 bp, Zea Mays
ccgccgctttatcaaaggattctccagcatagcgagacctatgaccgagcttctcaagaaagaccataaatttgtgtggaccccaaaatgtgaaggaagtttctagatcataaaggagaaactcacaaccgcacccgttttgacactaccagatattcatcaggattttgtcgtcttctgtgatgcctcgaggcaaggcttagggtgtgtgctgatgcaaaatgagaaagtcattgcttatgcatcacgcctacttaagccacatgagcagaattaccccacccacgatttggaattggtagccatagtgcatgctttgaaaatatggaggcattacctaatcgggaacaaatgtcacattttcaccgatcacaagagtctgaggtatattttcactcaaccagatctcaatctccgtcaacgaagatggttggagctgatcaaggattatgaccttgaaattcattat

SEQ ID NO: 124853 - DNA, 388 bp, Zea Mays
gtgttagattttgttatgggtccagtcaagtttagtagttgttcatgcacatggacagaaacatgttccctattcacctctactgggcaaaatgtttatatttgtcatcgtttagaagaactacagatggcaggctcaagctctgaagcagtgaagcctcaaggagggtgtctattgctctgttaactgggccattttgaaagatactacgacagaactgggccttccaatgttcagcttgtcaccaaaaaaaggccacctaaagctctccttgatacgaacccctagtcatgagcattattgtagctgcttctaagatttgttagcaataggacattttcagtgttaaactaattaccaagatttgtagctgcttctaaacactgag

SEQ ID NO: 124854 - DNA, 585 bp, Zea Mays
gtctagattgacccagatcatgagtggatccagttcaagtttgagggacatgactacatgatatatcctagagcaggggcggaccaagaggggcaagtggtccatgcccccctcaattgtatatacccaatgtttatatctactatttagtatagaaaatattgaagatttgaatgagctaaaacggtcttatcctaggtcctctccttagatcggtacagtcctctcgactcccatcctatttattagaccagccctcacatatgttcacaactacaacaacacaacggcctgaccacgtcatctaggctcatgtcgtccacgatctaactaacaggactgtgttgtagtgtattagtcgttgcttgtacgtgtataaatattagtacacttgagatcaatacaaagcattgttgacctaatcactcttacaacatctatctatccggacccattcttctcgatgtcacccgagccacgtcccattccaatcctccttgatgcccccttcccgatgccactcgcctccacttcccttcccaacacgcgacattgtcgcccccacccccttcctagtgatcttac

SEQ ID NO: 124855 - DNA, 296 bp, Zea Mays
cgaggaagagagggagaaggagaggggtcctgcgtacctggtaaccgctgcccttcacgcctgtgatctggatccggggcgagacgaggagctttgcgacggctagggatgcatttatagaaaagagaggatgtagaaggcggttgtaaaatttgtcgcagatcgcgtcatggccgagtgaaaaaagacggtcacgcgacgagttgcgcaatacagtgtacgacagaggctgagtcagacggatggtagaaagggttagataaaattagacgaaaatggttagagctggctcgcgg

SEQ ID NO: 124856 - DNA, 671 bp, Zea Mays
tcaggctataaacctatattttcaaaatcatccgaaagaagcaagccccttgaataaaaaggaagggtccacaaagatatatttgactgaggatcaatatcgttaggttagtattcaatttgttttaccctttttattgattgttgtgattgatataatatgtaacattatgtgtgcaggtgatggttccatggatggcgcccgtgcctgatgcgtactatgcttggtgtcaatattgggcttccgaaggcttccagaaagcgtcagcgcatcacaggcaatgtcgaggaaccaatcttaaccacgagtttggcggtgacgacatgctccgaaaagctaaaagaatggtaagtttgatctagctatgtcgatcaccaaatagtacaattgcttatggatgttttttgtttatacaggaagctacgcgtggccaaaagcctagtgacattgaggtctactaagagggccacaaaggattagaccctaacaaccctgaccagctctgtagccagacagccacggatcggttggtgagttttggccgaaaaagtacaaacgttccaaagtatagaaattcctgcatttgtaaggttgtgaatgatgtataggcggcatatggggaggagatggttcatcgccatggccctgataattcgactggcgacatgaac

SEQ ID NO: 124857 - DNA, 383 bp, Zea Mays
attccggccatcctccgccgcatttgagggagcagcgtcgccgcgcttgtgctcggggtagagaagatgaatctgaactgtcggatccgacttgggcggcacgattaaaagcaaggaaatcccttcggccaggatggatctgggtcgttggatcgcgaatgtgcggttctgattgtaagacatatgccggttcgatggattccttcggaccatcggatttggatctgatgatctcgggcagtaactgatcgggatcttatctggggcgtgcattcctgatcgaacggctgttagcccacgatacccgttcaaccgagcaaaattgataaagacccctgaatctttaggtaatcaacccgcagtcctgagcaaggcgctctgag

SEQ ID NO: 124858 - DNA, 531 bp, Zea Mays
taaaaatcctacaaccaacttcaccagagatcttgatttaacacatccaataaaatttgtcccattgatttatcaattttcttctatttttggcactatttacaaactcacggataaaagaaaaggtaaagcggtgaacagttctgggccaaaagcaatccaaccggcccagaacccgaccaaaccggcatgtggtcgatggcccgcgcgcccacactggcgtctttgcaaaaaggaccccgtgttctgactaaacctgtatcgacccgatccactatttatttgtctcgctgacagtttcacttaggtccctcgactatctttcttttgcaaaaccttaaccccgaccccgctgcgtacaactctgacgagcctccgctcgatcggccatggcaactcgtcacagacgactgcgacgacgctatcgcgaccccaaatctatggcaagttcaggcacacgcttaattttcccgtgggaacccgaggacaacactatctaggacagcgaccgaaagcttaggctggcgagcc

SEQ ID NO: 124859 - DNA, 820 bp, Zea Mays
aaactggtagtggccctggtgagttttaaacacagtcttaaactcctcggaggcgcccatgcgcacctgatgataccccgaagtcatgtccagactggaaaagaattgagtgccagcaagctcatccaaaatctcctcgaccaccggcatcggaaaccgattcttgatggtcatatcattgagcttacggtaatccacacagaaccgccacgtaccatccttcttttgcactaaaaggaccggagaagcaaatgggctcacactgggggtgatcagaccggatttcaacaacgcagcaacttgcttttcaatctctgtcttatgatgaggagaatatttgtagggtcgagcattgaccggaatggatccagggagcaacggaatatgatggtcaaatggtcgagatggaggcaattcagttggtataacaaaaatgtcactgaattcccccaacaacacctgcaattctggatggatctctttgctgttctcctcaatcacctcctccaacaatgcaaacacccagatatcattccctcgcagccatttctccacctgtagagtagaaacttcctccacaacctgatgttgtgcagtattgcctaccaactgaacctccactcctttgtcaacaaaactaataaccttatcatcccaattacaatgcatgggactgtgtctgcacaaccaatcatagcccaaaatagcatcatatgctcccagccccaacaccctcatatcacattgataggtatgcccattggcccaccattccaatgatcgtaccatcgtgtcactatacataatctccccatttgcc

SEQ ID NO: 124860 - DNA, 416 bp, Zea Mays
gcagtgagccctagttgggcatgatggccagttagttcaaaagggaactggcttatcgaggttaggcttgatgctagcgctagagtgacactcatcttgtgaaggttggtgagtggagtggtttgagtcaatcagaaaaacatccagccacctccaagcttgtcaaagtcactccaccaaaatctaccacccctattgtgagacatggagtgcctgtggagcctatgagagatccacctcagaaacaagtgtggtctcctaaacctaaccatctcaggatttaggaacacacttgacacccctacctgacatcactagtgatcccctttatagagcccctcagccacccaaaagaacccactccacaaatagattccacctaagagggaggtgagttccattgtgattattgtgag

SEQ ID NO: 124861 - DNA, 711 bp, Zea Mays
cgctcaaggcaacaacagcgtactagtctcacacgttttgctgctacgcacttgatcagccacagcctattgtttctagctacacaatggcaagattaaatctaacagccttggttgctaaaggaattcgtccgcgaggctgggtgccgtgtgataaagaaaaggttgaccatgctattcagaataaaaaaaaaagttcatgatggctgagtatgagtacaattcttcactcgcgtaaataaacaactaaaaaccggttacgctaccaagttcacgaatcagtagacttggttttattttcattttgtagaattaaacgtccctctgacagcaagcgcgagttcagcttcacaggaagcatggtaccggagtatagtatcagggccacacataccgcgaacaagctagtatcagaacgaagcaccaagaaacgagaatttcctagccagacgaactgacgaagtatgcttgctacaactaacgaaggcaaaagcaggaaacataacgcaagaaagaaagaattttttttgaagcatgagcatcgcccgtcacctgaggcgacctggtggttgattctgaactgctccccctccttctcgtcgtcgtccccgtcctgagggcatcggcacaagcacgccaagaagcccatctctcatcacccgaatcaacgcctacagcaggagaaggagaacacgaagcaaaaaaaaatcc

SEQ ID NO: 124862 - DNA, 365 bp, Zea Mays
gaagaattgtaaatggttgaattgttcaatggaaggaaagaatgctgaaagggtagctagaaatccaaggatacgtaacacatgttcgaaacgaacacagtgcaaggctgggatgaaactttaaaaaatctacgatgatgctaaagagaatgttatttccgtccggattgatctggtaaactatgagcataatcatgaattcttgaagaaagatacagaaaagggcaattgcaatgcaacaaaactcatgatcgtgaatatatggagttccttagtgcgatgcaagaaagcaggattccacaacattgcattatggattttgttacagaaatgcatggtggcccagaaaacgttccaataaccgt

SEQ ID NO: 124863 - DNA, 768 bp, Zea Mays
ctaacctaaatgggcctcccgtctcacttctggcccaccaggaaatttcactcgcgcggcccaaatcccgcttgagcgggtgccgacaccgcggccccactcatcatccagctccagtgcgtgcaacctcactccattctttcgctgtcttgtggggcccctccgtcatacgctctgactggttcttccccaacgacgcgagcggaccttgtgggagaatcgcgggcttatggttgaagaggtggagctcggggataaaacttaccctgcgactgcctagctctctctccctctattgcacacccacgccgagcccgcccctagtaccccaaaccatcgcttagattgtcgccattggtggatcgggtgcctgcgcggagagggtctgtggggtccctacgccgccaccaatcgcatgagcccctttcggattcctcgccaaccgactcttaaccccgagtatacagcccgaggccgcgaccccctcgtcctcgctcgcaagcccctgttcgccggaatccccgtgcccactaccaccattgctgcggattgatagccatcgtcgtgagcctgctcggtcgccgtcaataaggcatcatcaaccaccctggggtgttccctgggacacacagaaggtgtccgcgttgtcgctgggccatcttagcggtcggagccgaactaattgctcaccggagaaccatccccgccgtgttgccgccatcctccgtggacaacatcgaccggacctttgttgtcggtgagaaccac

SEQ ID NO: 124864 - DNA, 838 bp, Zea Mays
agggataaatgcaaaggtcatgctttctcttccttttatacaagatatgcaaagaatgtatatgagaggaagatttaggtacatgtatgaataagattgaatagttttacccttttgtaccttcacatagagatgctctcttcattgtgctttgtccttagtcttagtcgcttaagacctatactcaagacaaagcatgagaatattttgcacaagagagagttctacaacttgtgatccttttctaagccatgttattatgtatcaagaagatcacaaattgcataaataaatcatgaattctccttttaacttagtgcatatcaagatagatgtcgattgaaattaccaattgaaatcaaattgaaactgcatgaagcactaagaagcataaatgataattgaagttattcaatgatcataaaatagatgcgatcaaaagaacaacataggcattagattttcaaacatgctcataaataggagaatccgataaatatgctactttaacattgaaagctacaatccttgataaaagcgacattaattttacaagttggattgatgtgtagtagcatactttatgagaaacttattctcattcaagagactatatgaaatttctaagataaagtaatagtctcaacataatcaagatataagaacagactccccctaaagatatgcatcaagtatttgaaagaattgattcaatgcttttacttttaaagatatatagggagaagcattatatatcttgatcaaggcttataaaatttgcaataaacaacttaagcctggtactctcataatgaaaaagatttaaaatgcttacaac

SEQ ID NO: 124865 - DNA, 525 bp, Zea Mays
agggcatagtggtcaccccgagttaagtaagaatgcaagtcaatcgtaaatgagctgagtatctctgaaatttcttttttattgatgatgtatttccaccttacagagtacatcgttatcctagcagttttgagatacagctagggataaaactttctgaggtgttctatgttccaggagttcccaacttccgtgccatccatctgagtgaggcgatatgatccgggccgagtgacttctgctaccacaaagggtccttcccataagggtgataacttgtgccgtccttcccccgttagaattcggcggaggacgaggtcccctactgagaagaatcgttgtcgcacagccttgtcgtgatagcgccttagagtctgctggtaccgtgctgattggattactgcattaagccgttcctcttcaagtacatcaacgtcctccagcctggtagcctcggcttctgctatgctttcgaagatcaaccttggcgcccaaacttgagatcagcaggtagcactgcctccg

SEQ ID NO: 124866 - DNA, 384 bp, Zea Mays
tacttgtctgttgatcttgctttcttgtttggaactcttcttctctggctgtgatgactgatgaccaaacaccctatgcattcctttattttctagatatttatttgtcgcttatctgttgatcttcctttcttgtttggaactactcttcggcggctgtgatgtcaaatgccccatccacttgaattgtttagggtttaggatttagggtttggtattgtgctcaatacaatgttaaacttggatggcttgtaccatatacaagcaaccagtttgcaactgattgtctcattgccgtggcggtggtgtaccatatacaagcaaccagtttatttccaaatgaacaatcctactcaaaagttcatttagagtaggatgtgtcgt

SEQ ID NO: 124867 - DNA, 307 bp, Zea Mays
accagcagcaggccgtgaggttacgacgccgggtaccagtagcaggccgctgtctctcgttttggattttccttttgtgatttgtttcctttcgaaattttgtcaatctgacgatcgtttaaccaggcatctctaactcgaagctgcttgtaattttggtggcggcgcgtgatagctatcagattgtaaagtcgtgctgggctctactcctatttaactggttgtcttctactgttcacgggcgaaactaaaggttattgttaattgcgtgccgggcctaaaaaagcacgacccgattcaagcacgg

SEQ ID NO: 124868 - DNA, 550 bp, Zea Mays
aacgagtgtttagaccaccctcttaagtactttcggacagccctgatcctattttgccatttttctaaggcattcttccctctaacctccctattccaaacctctgctaccatttcttggaaaccatccctatgaagccatccaagttcaaatctgaacctttgactttttccccgaaaggatgcatttccagtttgtagcaaaagaggtgtgtggtcagagttttcacgagaaagggcctgaaccgacgccaatgggaatttttgttcccactccgaacttactagaattatgtctagtttctcataggtaggattttctcctgcactaacccaagtgaacttcctgccttccatttctagttcacggagattaagtgtttggatacaggcattaaaaagattcggccacctactatcatatctgtcattacttttctcttgtggtgatcttataatgttgaaatcaccaccaattaaaattggcaagctttcattgctacaagtattaacaaactcagcaagaaagcgatccttatgttcgggttgcg

SEQ ID NO: 124869 - DNA, 733 bp, Zea Mays
tagacatgttggctgaggattcctctgattcggttcctgctgaaacactagctgtggcaactatcccagagcctggaaaaactttggacactcaaagatctgatagcactcgcccaaaacgtcctcgccaagccagtcatccaacttctcctgctgaggggaagaaaaagaaaaagagacggcttcggcgagtgtcctgtttgaatcaggatatcggcccttctgctcctgttgtcgaggaagtgccagtgaagctttttactggagctgatcccaatgggtgtgaccttgatgatgctgatcccaatgggtgtaacccggctgacgctgaccccaatgggtgtgaccttgatgatgctgatcccaatgggtgcaatccggccagcgctgatcccaatgggtgtgtcgttcgtattattgatgaggacgaggaagaggaggaggaaatccccttgattcgaaaaaacagtcggtgttatatagtcagtggggagagtagtgatattccttctccagctttgtctgctctcgttggtctgcaggaattgtctctagcaaattttgatcaggctctcgaggatgtggtccctgaagatctgttgtccgagccgacagatggtggtatgatggacgtttgcactgatatacctgatgtcaggttagagttatcccaagcagcgtctcatgcctcatcgaccttggagcgtggtcttaagagtcaggaagctgctct

SEQ ID NO: 124870 - DNA, 363 bp, Zea Mays
gagaaagggtagcctaattggtggaagcgtcaaggggcgggtgtggaagaggatcgaaggaagaggggaaacatggaagctgatgggatcaatgaatgggctggcacagagtggagagtacacgaggaggatgcgacatctgcagagtggggtgcgatcatgtaactaaagaagtgttcagtgcagcatggggtatggatggaggaagaccactgattgtttacgaacaaatgcaaggggttatttcataaaattgtgatacaggacgaccgtcgaaactagtgctttataatagtagggatttcagaagaataaacatgacaaaggtcttattagattatgagatataatcaagatcccaac

SEQ ID NO: 124871 - DNA, 475 bp, Zea Mays
tatattctcacccaaatgtcctcaaatgagcaacttgaggttttctcccatgccaggcttcatagggagttttaccttttacactctttgtgggggatctatttagcaaataaacaacagttgacactgcttctccccaaaactttggtgggactcctttacttttcagtagacaccttgccatctccactactgtttgatttcttctctccacaactccattctgttgaggagaataaggcgtagtagtgtaatgcttgatgccatattcatttcaaaaaacagaaaaagaacctgagttgaactctccacctcgatatgttctcagtgccttcaattttgtccccaattcaacttctgctctttttttatcttctacagatacatcagtgcctgatcatttgttctgagtaactctacccacatatacctgttgtaatcagcaaccacaagcaagaaataggatttcccccca

SEQ ID NO: 124872 - DNA, 1172 bp, Zea Mays
aacaatttcttcagtcgatgataagtagcatgtatgcctgagtgaccccccaacacactgtcatgcatagctgccactatcttcgttctgagcgctgtattgttgcccacccataccagattgcccttcctgatcaatccccgctgcacccgatatcccatttcgtctggactttgaatgcttaacttggctaaccattcttgtgcctcgctatctgtagtgtatgagttcaacacttcttgaatccacatcggttgtacttcactaaccgaagtcatggccatcacatgagccattctagacaacgcatcagccactacgttgtccttaccctgcttatagaccactctaaattgcatacccatcaacttggtcatgctttcctctgcaactcagaatgtaactcttgatcccccaaaaaactgagagccttgtgatcagtcctaatctcgaactcagttctttgcaaatatggtctccatttgtccacagccattatgagagcaagaaattccttctcatagatagatagctatttgttctttatccccagagctttactcagaaatgctatgggtctcccttgttgcatcaaaactgctcctaatccctcatcacatgcatcagtttccacaacaaatggtagactgaaatctggtaatgccaacatcggagtagtgctcatggctgtcttcagtgcatgaaaagctgtagtagcttccttgttccaatgaaattctccctttttaagcaatttgtcaaaggtctcgcaataattccataatttttgacaaacctcctgtaataacctgttaaccccaagaaaccacgaagttcagtcacatttgtaggctgtggccattccttcatggttgctgttttcattgggtctgtagatacccctgttgctgacattatatgacccagatatgtcaactcctttctcccaaaaacacacttcttccttttgagatagaattgctgctctctcaaggtttcgaacaccagtttgagatgttccaggtgtttttgccaactgggactgtacaccaatatatcgtccaggaaaaccatcacaaatttgcgaaggaaaggtgccaagaccaagttcattgcacattgaaaagttgcaggagcgtttgtgagaccaaaaggcattaccctaaattgat

SEQ ID NO: 124873 - DNA, 357 bp, Zea Mays
cgccgctagaccgagcggcgctacctcgcccatgtccgccccctgccgttagatctcggttgttcgcccgagatcggatagtgtagagctaacccgagcggacctaatcgtagccgcccgatccagatccaaccgtctctcctctctccccttcacccgcgtctctgcccatgggcccggctggtcagcccgccctggctcgctggcgccctggccccgcttgtcagtcgtgtttgcgcgtccgcgcccgcgcgatctaatatggatcgtaggtttctgatccgatggctgagttttacccgtaccccttcgcgtggtcgttttgcttaagaacacccctggttttaggaaatcaac

SEQ ID NO: 124874 - DNA, 706 bp, Zea Mays
cctcaatgcactttacctctaatcctttgttccactaatcctcacttcctcaatggtcaattacgtgcactatgttgtgctgtctgtgcacaggctgaaactgacagcctcactggtcaccagcagaccggaagggggcacacagggagacgttgtggcagcgactggcaaggcacgaacaagctccggaggtcggctgcaacgcaccgccacagatgagctcgagacagactgggaacagtggaagctaggaagcctgggaacgacggtaggaggtgggagcctgggaacagtggaagctaggaacggcggctagccgcagaagccaagagaagccggtgggcggtggttggctgactggtgacggccacagagctgtgagagtgggaacgaatgaacgatgatggcggctgcggaagcgtgctggcgactggtacatggggtgggtccgcggatggtcctggacgcttaaactagggtttactgcttcagtgggctgggccgtggtatggcgcagcgcaggccatacttcgccataacgggccctccgcccctgatctttggtaggctgggaggacattgcagctcttcgcggccagtttccaaatgcacctgcttggggacaagcaggctttgaaggggtgacagatgttagcaactcagtggaagagcctgtggatgctgtgaacgcggaagaagaaagcgc

SEQ ID NO: 124875 - DNA, 329 bp, Zea Mays
ccgctccggctatcaccaagtgtgcatggccaccaacgacatccacaagacggcgttccgaacacacgaaggcatgtacaagttcctggtgatgtcgttcggcctctccaacgcgtcagcgacattccaggcgctcatgaacacggtccttcattcgttccttcgacgcttcgtcttggtcttcttcgacgacatcctcatctacagcagcacctggtccgaacaactgcatcacctgagggttgtcttcaccgcgctcaaggaccactccttggtgctcaaaagatccaagtgctccttcgacgcagcgtcggtctcctaccttggcc

SEQ ID NO: 124876 - DNA, 389 bp, Zea Mays
attagtttgtactgcctgcagttctgaattattaggccgtattaatattatacttaacataacaggttaccccatttagtgacttctcatgcattatgtaattgttgctatttttgcttctcaatttgacggtattttctcttccatatcaggagtgtttaatttttttatgggcacgatcgcctctagatgaaccaatgtgctatattgctaggattgttcatgtgatttctattcttagatttgagggtattcttatatgtatatgcatgttaatgccagaaaattgtatggttaaaatttgtgattaagcattttattcaagcttttgccaggctcgaagagcatttctgtgggttctattggggttttagctctagagtatccca

SEQ ID NO: 124877 - DNA, 493 bp, Zea Mays
aagagtagaggagagagtgggtctctctatcgaaggccttttttggtctgaaaaaatgcatgatctctctattcacattgatagcaacgctcccccccccgagaaaaaagtttctacccatttaatccatttgagcgagaatcctttcatccaaagggtctcgaacataaacgaccacttcactttgtcataggctttttcaaaatcaattttgaagatcactccgtcttggtttttcctatgtagttcatggatagtctcgtgcaaaataacaacaccctctaagatgttgcgaccacgcatgaaggctatttgtgatgggttaactactcgatctgcaatagagtttagtctaatggttgctacctgggtgaaaattatggaactcacattcaaaaaatagatgggtcgatactgctgaattagattagccctccgtacattgggaataagcatgattaatacaaagttgagactaaaaagtggtaggtcc

SEQ ID NO: 124878 - DNA, 602 bp, Zea Mays
tggcacaagctccggcgagaacactcctgggcacccagcacccaaacgccgaatcccagggtaaatcgtaatgccataagtaccgtgaattcgtagaagagaaactcacggcgggttatgctgcggaagtctctgcccacgcagcacggcggcgaagcgtcaccggcgagcgattcaccacgctccagtcaccccagcggcacaattaggcgatgaagatctgcggcttggtcccccgcttccgtctgacacctcgctggaccactatgtcgatggatgtgcgcttccacggacgagcccctcacccctgctttacggcaatggtgcgctcgatcccctggccacgattatggctggtatggttgggattttgcgggtaagcggaagaggtagggaggtgcgactcaaatagcactagttgtggcctcagaggcactttcctccgctcaattcgtgcaaagatctcggcgtagctgttaggagttcgctgtgaattgaccgcgagggaggaagacaaccgcgacactgacccagtggtcccacccacaatgaccagtagagacggcgtggagttagactgactgcaacggtgcactctacgc

SEQ ID NO: 124879 - DNA, 500 bp, Zea Mays
atttaaatcggtaagggagccaaacaagttcgtactttttaccccctcctttttcttaggcattccccaaccactagaggttggaaagattctatttgccaggtactcttgcactagatctctagttctgattttggctgctaccactctaaattctacttcggcttccccaaccactagaggttggaaagattctatttgccaggtactcttgcactagatctctagttctgattttggctgctaccactctgaattctacttcggctagctggcatggggaaccaagttgcatgtggcacaagggccttgtcatcccgaagcttaacttcaatggagtcatgacatagtcattagcttctcccttttcttctggtctgcttttatgtaaatccattcgcttgtccaaccggtcgacaacttggtacgatagccaattaccggggccttcgtatctttctgatatgcgaagttgtagcagctaaagttcttatgaagat

SEQ ID NO: 124880 - DNA, 327 bp, Zea Mays
aattgagtgggttggtgagtgtccagggcatgcatgggtactgagacaagaacataaatggcaagatcgaacctggattaagcaaaccgcggcgaggttgcttttatggtggcggaaaactgaattgggggaaacaagaaatttgcgagctctaagggatgattcgaggtgcgagttgcttcactggttgcgtaattacctaacggagcgaacggtggcggcaatttatagcctctaacggcggtggcgtccaatttcaccagggtgtgctggcgaccggagaagagaaaaggtattggcgcaatgaattcgtgtcctacgtcgtgg

SEQ ID NO: 124881 - DNA, 438 bp, Zea Mays
gagacgtcctaagctcgagccagctcgcaagcctctagttttttttagcccagctctaacctaagaatggccctcccgccaatgggcgggtgtgcctggacacatcgataaagctaagtctttagagcattaattatatgcccaagcacttgtaaggcagcccgcaggccccacgggacatttgatagtacaacttgtcatgatggtttagagatccttaccgacgtgtgattttgaggttgttaaaccagatctatttggaagtttatcaaacaaactttccattaggtttgttgtgtatacatccagtgaaggtgatttcatccatgattctgctcgactgctagatgagtgaatagtaagctaactagctaaatcaggcatagctagctagcgtggcgtggcaggcgggttagttatgatggcgaccagcaaaga

SEQ ID NO: 124882 - DNA, 471 bp, Zea Mays
tggcattgaaatctccctcgttttgcaaatttagcatcgcgctcgcataatggtcattagcccttttccagtgctcgtgctgccctcacgtcgttagacacttgccgccgtgttgttcttctaccgtctcccgtgagtctctcgtattccattctccctgtctcctctcctccttattctcgccctggccgtcgtcttcctcgagctgctctgttcgtctccgcgcactgggtgcattcgtgccctgtccttgtccggatctcgcccttccctgcctcgccggttcctgcgcccgtggtccattgccgacctccgacgctggtgagctttccttcttatgtaaccctagggtttgcagattaggcagccggcatggattctgccgccaagctttgtgcccagaagttgtccttggcggctgttgcagcccgtgacacactgaatgcttctgctaccgcgagtattgttgct

SEQ ID NO: 124883 - DNA, 355 bp, Zea Mays
taacctaccaaacccgtgagagtgagtacttgccggcccatagaaggtcgggaagagatgaccagtacgatgaaccacatagggcaaatattagtacaccacaaaactcaagccaatgggggggaagacgacataccaacatccaaacaacctcacccatattggaccaaagagccagtggtctcccacaagcggccatcgatatagtaagagaggaaatagttggggcgttctgagataagctcggagttagcatagtccctgttggcagtcatatcggagaccttatgatagccaatttgaccgtctcccatacccacaagggaccagaatacccgagttcgcaaagttttcg

SEQ ID NO: 124884 - DNA, 461 bp, Zea Mays
ccgggttttagaacacaaaatgcttggagtaaggaggcatggaacaacattgttcgtcgcttgaatgaaaaatttggtacatcgtatactattggccaagtcaaacagaaggagcaagatttgaagaaagattatcgcagtgttaaagaattggtggagcaaagtggttttggatggaatggtgagagaatgatggtggaagcaccagatagtgtttgggcatcttttgctgctcgcaagaataacgagtcagccctccattggagagacaagtcattcccatactatgatgatttatcaaagttgtatgatggtgagaattttatgtgcttttatgagttgtttctaattgcttgcaaatacatccgagtcatatgtgttttcctaaatatgattctgcaggtcgttatgctgaaggaagaactcgtcaaggtatggatcattatgcaaacaagacgaag

SEQ ID NO: 124885 - DNA, 715 bp, Zea Mays
gcccaccattggtattagcatgcatctcatcaaatcgcctcaagagtgcgacaaggctcttgtcaatatgagcaattgtcatttccacatttgcaagtttggtgtttgtgtcaatctgtgtggcctccaattgccccatctttacattcgtcacctgcaagtcattatcaagaccttccgtgtgcgtcttcaccaaccttacaaagtgttgtatgatgcccttggtgcgaggagagtgtggcatattacgagaagcatcatcaacctccaatcctgccatggttagacgaacagaggcaacaagataaaaaaaagaagtgaaggaataaaaactctacaactattaggatgtagctactgcaaggcgctcactctcaacctgccacacaagctcttaccaattcttaccttgctaaataggaggggtcagcaaccaacaagtctgcaaccgtggaataagtgtatcggtgccacaacaacatgacctgtcaagctgtagtcgaaatatgtagagttgtaggtgggctaaagcaaggaatacactagtaccacgttagttacaaaagcaagctgaataatcgttcaacggtggtactgtgctggtcctaggctaaaccatgctagagacgtgagcctaggcacaaaggtagtcactggaaaagaacaactagcacaacacaaaaagaaacaacagattcagagattcagccccctt

SEQ ID NO: 124886 - DNA, 548 bp, Zea Mays
gggaaataggcctaggaagtaaaactataaggttggcatgttcatccaactagccctattgatcccaaaaaaggtataaaactaacgctaatatagatacatttttgcagacatgatgtttttcccacaaaaacggctcctgtttgaggcgcctctataacgcactataacgtaagtagtacctagagatggtttacataggcgactatatccgtggctccatctataaatttaattctagaggatgttgtggtctacaaccgtctcaagaaacggataattttaagacgttttagggcatgcaaaccatcaaaccccctatgaagtagtgtaccctttatgaccccttcacgttctcaacgtttgtcgtcacttatccttggccatatgatcaacaagtcctctagctcctccatttaacttggtcaaccaccatcttaatttggtcaacacgatcaactcctcccatgtacatttggatttgtcgttgtcccaaggcgttagacacccatggttagtctaccggtcttttagctcctcgattgaag

SEQ ID NO: 124887 - DNA, 365 bp, Zea Mays
ttctcccccacttcgatctctggtaatatctttatcactgtcggtccgggatggctgggggacaacactggcttgttggtgatgcaagtctagagcttcgctggcggaggaaagcagagtaccttgacattcctcttaaggacaatatcaaggggtggcgcctggagtggttcatcatggaaaacccctgcaaatctctcccccctcggtcgggcaggcaaccaaatgtccgcacacctagctggatagaatctccgacctcttcggagataacagaggccaaagtactgcttgctgagatctgctcgctgaaggatgggggtctaactgctgaagctgtagttgctgatttcgttttcaagaac

SEQ ID NO: 124888 - DNA, 340 bp, Zea Mays
cgtggcaacctcaccggcgttgatgagacagcagtaaggagtcacgatgatacgacggggtgctcggatacgtggcataaggccgtgcgacgatggtttaccggcgagcccatcgaactttccaccgcggcatacacagtacggtggccggacttgtttatggccggagttatccacgacgaggatatttatgtgacccaaagtgctatccaacttagccaaacccaaattgcggcggcaggtcaccggcggtgaggaccattgcgctggcgatctgatcctcccgatagcactgtaccatggaggaagttcagttagatgaacctgacagagcaatttt

SEQ ID NO: 124889 - DNA, 3186 bp, Zea Mays
cagcaagacaattgttagtatgcgttgctatcaaaggttcaagtgcgagagctacgcgtaccttgaacctgaagaacctccccatgtctttttttttcccttctaccgccattaagtacattcgtcattagtaatactttgaggcgcctaagacttccaaagtaaacacttcacgagcactactccttgctgtctccggcaacaagactttgagttgtaatgtattttttcgtttgggtgcagaggaaacacgaacagagaatagattcaactgtgcttgcaaagaaaacaagaccaaaggatagattcaacagtgcttttgctttattggtttacgttagaggagaagaacgtaccaaaacgttctccccctacccaaccacccccaaacccgtagaattcaaaataaaaccttacaccttgtactagaaagaaaccatggcgactctgcattccatggtgaccctgctgctgctgccgctgcttctactcacagctcggccggcgtcttcctcctcctccatcgacaggtacgaaaaacaccatgaccgtgaagcactgctggcactcaaagaggctctgataggcagctcgggactactaagctcatggaacagcagcagctccgacgtgtgccgttgggccggcgtgacatgcagccgccggcacgcgggcagggtggttgctctgagcctgcgccagagaaacctgggaggcagcatctcccctgccatcggcaacctcaccttcctcaggtcgctcgatctcttcgacaacatgctgtcaggggagataccgcgcactatgacacggctgcgtcgcctgagcttccttgagctggcgtacaactatcttgctggcgagatccctgaaggcttggccaactgctccaacctcgcgtacctgagcgtagaggtcaatcagcttcatggcgggatccctagcggtctgggcttgctgtctcggctacaagtcctgtatgtcggcgagaacagtctgacagggcatgtaccgccatcgctcggcaatctctcggcgctgcagaggctggcactgtatcagaacaagctggaaggagccatcccagagggcctttcccgtctgaggtatctccggtacatccaggcggcgaggaacagcctctccggcacgattccgcctcgcttcttcaacatatcctctctccagtacttcggtttcagctcaaacaggctgcatggtagactgccaccagacgcaggcaggcacctgccggacctccaagtgctccttcttggtggcatcgggaacaacttttctggaacactcccggcttccctctccaatgccactaaactacaagagcttggtcttgctcacaacagcttcgaaggaaaggtgccgcctgagatagggaagctctgcccagagagcgttcaattggggggtaacaagctgcaagctgaggacgatgcggactgggagttccttagacatttcaccaactgcacccgtctagcggttctagatgtcggtggcaacgcccttggaggagtgcttccacgcttcgtagctaacttctctgggccggtgaatactctgatcatggagaagaaccggatgtctggatcaatccctctgggtgtcggaagcctcgttcaccttgaagacctggaattcgggggaaacaacctgcgtggtgttatacctgaggatattggaaggcttcggaacctcaagtttttcacgctggaggagaatctcctgtcaggaggtatacctacctccttcggcaacctcacgcagctgctcagccttttcctgtcgaacaataggctcaatggctccatccctgagaaccttgggagcttgcgcaggttaacgtccatggcattgtccttcaacaggctcaccggtgcgatccccggagcattattcagcctcccgtcgctagctgattcattgctgctttctcataactacctttctggcgtacttcctccacaaatcggtagcctcaagcatgcgacaacattggatctgtcaacaaacaacttatctggagaagtaccaggagcgcttggagactgtgcaagtctagtatacttgtatctggatggcaatagcttcactgggagcatccctccatcgattggtaatctgaagggcttgagcacgctgaatttcacaaggaacggtctgtccggtagcatccctcaggagttgagccagattcatgggctgcaaaggctttgcctagctcacaacaacctgtctggagccattccacagctcctccagaactcgagcgctcttgtagagctggatctctcctacaaccatctgggcagcgaggtgcccacacacggggtgttcgctaacatgagtgggttttctgcaactggaaatgatgggctttgtggtggcgttgcagagctgaaattgcctccgtgtgaggtcaagccacacagccaccggaagcggttgcgactgaagatttttcttccagccattggcatcgctatatgtttatctcttctattggttgcgctccttctgttcaaagggagaaaagggtcggacaggatcagtgctacgcgaaaccatttgttggagaacaagtatccgagagtttcatacctccagctctttgaagcgacggatggttttgcccctgctaatctgataggagctggaaaatatggatctgtttacaaaggaagactgtctatcacaggtgttggggattctgtagtggctgtcaaagtgttcactcttcagcatcctggttcttccagaagctttttggctgaatgtgaggcgctacggcaagtgaaacataggaacttgatcaatattatcacctgttgctccagtatagaccctagagggaatgacttccaagctctagtgttcgacttcatgcccaggtacagcttggacaggtggctgcatccaagaagcgatgaggagacacacaagttgagtctaacccaactgttggacattgcgactgatgtagcagatgcgctagactatcttcacaacagtagccgtccaacagtgatccactgtgatttgaagcctagcaacatcctccttggtagcgactggactgcttatgttgctgactttgggcttgcaaagctgatcagtgaatccatggaccaaccaaatttgaatattgggactgaaagcactattggg

SEQ ID NO: 124890 - DNA, 428 bp, Zea Mays
cctaggctgatttctgagcacaacacaatggtggaaggggaaatcttaggagagaattgaggtaggggtagaactgagcaaaatgtttagactagtgagaaaagtgtaacatcagatgcccagaaatatggacccagcctcaaaacagacgagaggaagcgagcgagctgctgaggatatcgacaaatgaaaaatgtttctcgatgtcgctgtgtcacatgggtttatgaattagggttgtgtaatcatgtttgtgaatctgcgaagatcttttctaggtttcattcaacaactattgtgaccatattggtgccttctcttctgaagatgtccacaagaagcaatagtcttcttatatgttctgtttttgctcgagtaaaaacactacaaactcttagtatttttctagcaagagcgtgcatcatgtt

SEQ ID NO: 124891 - DNA, 699 bp, Zea Mays
gttcaagccgtccagattagatctagcggtgaagattggatctgacgtgttatgtgctggtgagcagcgaggaccattggataatggatcaacggtccaggtcacttttgaacgcgatctaatcctacacgtcggtaaatgatcgaacggtggagataggctctagtcaagttggccctatcttctaatcctggccactgataatgcaatctacggttcatgggttgtcttccaccaccgatagctgagcgcagcagatcccgcaccagcggcggccgcccccaacggcggagaccatcaccggtgctcccgtccagtcgagcaccagagctccattttcccctatgatttgtgctacttagagcggaccagcaagcgaaccaacggggtccagaatctcaccagggttcatgctgaggagaccctcaaccatggtgcagcgactcggtgatgaacatttggattgaaggaattccgtggaggctcccagaccagcgctcatgcccagaatgctcacgtagttcggtgcccacggcagcgcgtgggtccgtggccatgccctggccccaattgagtgagttgctggtgcagaagaggttccatccaccaccgccgaaactcttcagcgaagatccagagcgacgcccgaagcttaagcgagggcgcaccggcggtcgtcggagaggcacgcagtgaccc

SEQ ID NO: 124892 - DNA, 420 bp, Zea Mays
catgtgtcccattgggttcaggaagcaggattgttagcatacgaggaatttgttagccttcgcaatagtgggggtgaacatgtgtaggcgtagcttgcagttggaaagggggagaccgaggtagctttgagggaaaccttctctccaggggagaaaggtattcacgcaatgggtggcgactaggttatccatatgcatcagcactatcacacatttggtgtaattgatgcggaggcctgtagctaaactggtccagcatgatcttcaaggcgtgggcagctggaataattcattcgaggaggattaatgtgcgcgtctccatactgaaggttcgcacctggcttcctaggagcaatggggtgcactatgttgtagtccgacttgatcaaggcctttagaacatcagccaccagaaggaac

SEQ ID NO: 124893 - DNA, 344 bp, Zea Mays
catatttccctctgcgcaaactgtctataaaatttaaggacattctttaaagttttgcctccacggcactgccgggcaaagattttttatccttttcttcttaaacttcatggttcaccttttctccctcgtatcttgctgcctgcaaaatttgagagtgttctggaaaaattttgtagttcggcactgctgcacctacgagcggcactactgctcgacgtttttctcagactttgacctagaacttttactggacctttgggttctctttcgaatttcatgtaaaagtttgggttcaaatcaagtctttttgtccctattgagctctgattgtcctctggaac

SEQ ID NO: 124894 - DNA, 1769 bp, Zea Mays
tggttctcagcctttaaaatagaaaggtgaccaaaaggaacttgttgatttacaaagttaggcatttagccgcagacaggattacgccatagatagtattagcaatttcttaattaccccttctctactttgtgaactgcatgttgctattttaggcagtgcattaataacaaagcactctttcctttctgaagattgcagtgtgctcctaaaaatattgtcttgtctgtcctaaagcaattataataagtcactagagagcgtatttgtgttttttttctgttggccaaaaagcacaggaataaatcctctgtactgctactgctctacccctatgttttcctatttctctgctcatggccataaatacaacatccaatgtcttcatggtttgttagaatctgcctactcagatatgtatgttttcttgtaagttccatcactcgctgcttgactgacttctatgttctattactcgctgcttaactggcttctttgttccagcatttcttttttaccttttgtagtgggaaacaccatcattagtactttatggttgtagaacacaggttgaactacaatagaagccattcgtgcacaattgagtttaggcaaagttcattcaggggttgtcttagggtgattagactatgggtatgatgactagggcagggcacttgtttcatgtcacctaactatctcttaaaaacaacaacaaagccttttaggcttttaatcccaagcaagttggggtaggctaactatctccctaaaggcagttattaacacaattaaaaatgtgtgattctaacctgttaatagccttgaaagacttctagtttgtcttgtttctttctccttttctatcttgttactgttaattctatcttgcgccatttttcagttctgacagtattattattttcgtgcaggctaaagatatggtggaatttctcgtattggtaaaccaaataatctgcaaatttaaatcgtcagctagcgccatattggaggaaatatttcctactattgcaagtcgtttgtctgcgatattatcacaagatgcattttcagctggtcctgcaagcaatactgaggtaatgttgattgcctctgtaaacaagccactgtgtatattactttattttctagctgcttatacttaatatacttttttatgtttctgctgtctctatattgcaagaatgctgcttttaaatgtgctaaccttggggatatattacattatttgctattgtttatgtttgcctgcttatgatagtgcaactctagctataacatgtggcaaatgccatacagttcaacaaagcaaatatttcttgcacgactctctaacacactaaaggaacaaaagtgacatgataggctgttgcccaatatacgtccttacctatttacttatttgtttggcatcaattccattagcttaggttgataggtctgtacaggtacagccatacaggatatatttcttttcgtaatatatctccgactcaccactacaggaaatgcgagaactgcaagagctgcagaggacattatacacattcttgcatgctatggcaacacatgatctttctgcagttctccttactcctagctctagggagtatctggagaccataatgcagttgcttttatttacctcatacaaacatagagatatactactgcgcaaggtgaggattttggtttaatttgatttttttaatcttattttcaatctatctgcattcttgagttcaact

SEQ ID NO: 124895 - DNA, 616 bp, Zea Mays
aaaagcctctgcccagttctctgcggccaggtgcttgacgacaaccaatgacaaaaccataaagtcgagagagcttcgctggtgctaaccgggtaagaagagagaaatatagtcaccgaggaagccgagcgaggagcgtcgagttatgggagagaaaggagtagccgccgccatggatgaagctagtcaggctccagctgtgtgttcacgggatcacctagacagttgccgccgtgagcgccgccatgggccagcccaccaccgcgggagctcacgctctatcactgcagctgaatcgggcgctggatcggcaacaacggtccatattagaggtggaatggcgttttgggttgatggagcctaggccgtctgatccgaatcgggcgcgtaagaatcgattttgaaagttgcctagaggaggggtgaataggcaagttaaaacattttcaacaaaaactagaaacgaactgggtaaaacaagttaactttggaaatgagatgttctaaatgatccatggtgttcaaagtagtagatctgagaagggcacttctcaaaatccacacaccaaagagatatgaacaaaacttccacggaaggtgagagaaggaataacac

SEQ ID NO: 124896 - DNA, 460 bp, Zea Mays
caaagtttgccagggacaattcttgtagaccaatgagggcggacagaccaggagaaggaactccactactttccccactggcgacatattgccgactgttcttctgagtcaaagggacctcatcttcttcctccccatcgttttcatcagcaacacagacaacacccccattgggatcagcggcagatggagcaccccaattgggatcagcgatagatgaatcacacccattgggatcagcgtcagtaaattcaggcacaggcacttcctcagcagcgggaaccgaaggaccaccatcccgatccaaactagatactcgccgaagacgtctctttttctttttctgctcatcagcaggagaatcaagttgattggctcggcaagggcgtttcgggcgaacactgacaggtctctgaatatccaaggttgtaccagcttccgggagaggcgccaccaccaa

SEQ ID NO: 124897 - DNA, 631 bp, Zea Mays
cggtgacggcgagggcgacggtgacggtgacagcaagggtgacggggacagcaagggcgacgacgacggcggtgacggcgtcaagggcgacggtggcgacggcaaagccagtggcataatgctgctggtttagatattagtatagatagcagtagtagtagtagtaagtagcagtaagtagtagtagattagagtagtattagtatagcgtagtgtaactagtagagtagtgtaatgtaatgactaggggtggaagaggccgactcataaagagtcggtttcaagtttgtgacgaactccccttatgaataaaaaatgcagttctttgcttatccattgttgcatgcttttatttgcacattaccagctcgttggcattttagaggtaatgcctgagtgacgattgtgatctccgcttttccgagttatgatctagcattttctgtgcctgacttatcgagccaactcatatttatgctgacgtatccccttgagttccgaacgctatctcttgcttttttcctctgtcgcttctctgttttctgagttcttgagcctgcccacttcgcttgagacactgcgatggcccacaagaggaagagacagagtgctgctgctccaatcattccgc

SEQ ID NO: 124898 - DNA, 333 bp, Zea Mays
gttgtgaagtgtgtcgggatatgagattgggggttgggtcaaaacctatgatttcgataaggtgccgtggtggctaggatgtagatcggcggcacaataatgatgggacataacacgtggggcagcctttgaagcctaacaaagataattgccttgcttgctttcatttggttacatagttctagagtacttttttccccaagcgaactagaggagtccttatcaatttgggctgtcctttcctaacaaataattctatttcttagactgttcacacctattgtaatttgagccaattgcatggcccgtttttttggcatcgacacacataag

SEQ ID NO: 124899 - DNA, 718 bp, Zea Mays
cttgctgggaggcatctcatcgcattggcttgccccgccatcgtcgtcgtcgtcatcgtcgccactgtcgtcgctgtcctcgtcactgcagtcgtagtcactgttgccgtcgtcgtcattctcgtcatcttcgtcgtctgaggagaccatgcccatccaatgtccagacatcgggtcgtcatcgttgtccaaggactccacatctgacgattctccgtcgtacgcccaagaccactcagtgctggtgtcggagtctagctccccgtcaacgaggaactagaggtcgtcccgtcggtgaggtcgccgtcggattccgatgcaactgcaaagtcccatccatctgcatcccagtacaaaggtgccttttttcatacgccgctataggatcccactctagggttggttcacggctagaagaatgggagacaaaagaagcagaggaatcactcggtgatgtcgacatgggtaaagttaggcgttgtggcggtgaatggaaatgtggaaatgtgcctattttttctgatttgcgatgaatggaaatgtggtcgatgaccatttaaatacattcaaatcgagaactaaatcaatgtttactcgaacttcgaggagcaaagaggggtcaaaagtcaccgcttcgtgttcggcgattgacgtttcaattctacagggacagggacagttgaaaagacacaactgttcaacatgaaatggtctccac

SEQ ID NO: 124900 - DNA, 363 bp, Zea Mays
gattgaagtataccttcaggtttggggataagtttgatgagccaaatgatgactggctaaagtgcattgaagctactagtgacgagctacttggggcatactccaagaccgaggacaatgccttgtccgcagctttcgggggtcggaataagaaaagattgaacaggatatttgatgctattggcttcgtataccctgactattgctacccgctgcgagggcaagggatgaagagaaagattgctgattcggccatcacagctgaactaaagggcaagaagatgaaggttctgactcaccggccgcattatattgaaccagtcgtgatacctgaatttggcgaaggtacttcttcagctgcca

SEQ ID NO: 124901 - DNA, 373 bp, Zea Mays
atcgacgcctacaatctcgcctgcaccattagtttcattgattgattctggagccaattcttgagaaaggataccgccagcactagtagcatcaacattttcagcatcctgctccttcttagggtcttcctcaagcacactgaccacactagcaggaataaactcatcactgtttcctccatttataaccattgcggttgcctcactcggtgggtcaggcctgctggcctcatcttcaacgtcaccctccttcttagctgattcttttaaggcttcttcaccttgagcaagctgctgcagtaatccttcatgcgtgtgagttttagcttgcatctccccatcccatgccactgtaagacccatttcactggaa

SEQ ID NO: 124902 - DNA, 428 bp, Zea Mays
aaaatgcgatggcttcccaatgtgcacattgttgttactagccattttgtcccactccgggatgattagatccacaaacaatggagttctcggctctgataccacttgatgctctatgaggcactaagttttacacaaatcaaagtcattgacccctcttaatagtatggctatctagcctactaatccggtcaagtatcttctctaaactcctggagaccggcaaaaacaaaacctatgttatacctttgccttcacttgatccacaaccaatgcttataaatctccaagatttcctgttctatgtggtccaaccctgcattcttatttctccaagaactgttagtccacaaactgttgtcattaattaccaaaacatcactaaggggcctagatgattcacagtcctagacatgggcgtgtggaca

SEQ ID NO: 124903 - DNA, 882 bp, Zea Mays
ccggttcactgcgcactactacagcggcgcattaggagacgacgacgacgacggaggaggagtggtggacggcgtgaggaaatgcgcggacacggatgactgcgaggtggagattatggttctcagaaggtcggtgtcagagccagcgagaagaagaagagcgaggaccttgttggccgcggcggcggcgccgtgggaggagagggagacgatggcggtgaggcggaggagcgacctgggctgctggtaccgccacgtcgacatggcggcgctcgacggcagcgtcgtgaggctgtgggacggcggcgtcgccggccgcgagagggaggacgaagagagggcgcaggattggaattgcaacgactgtcgttataggagttagtgtggtttttgtgcaatcgcgtatctcgaatatggttcctcgccggtctgaaaaaaaagattagacttgcgatgcgagaccacacttcaaagtttctttgatttgattggcaacaaaccttgctacgtctaacttttctttaacaaagagtggcgtactggcgtatagtatgtcgtgttcagtttactaattaattacctaaaattaattgatgagacaagcctagagataagttattagctattgtggcagttgagttcagtatatacagtagttcatagatatacctcaccaaacagttagagtttagtataatcaaatctctgtactcgtcgtcgaatattcgtcaaatctatagtgaaccgcctcgccttgggagttcatagtggcagacaacgtagtccccggccgcgcgcgcctttatttttcttcatgctggcctgctgggtgttgccacctgccagaacgcagctcgccacaagggctagtggatttggtgg

SEQ ID NO: 124904 - DNA, 407 bp, Zea Mays
cttgtggggaagggacttttatcttctttgcacgggttttttctgaaggggaaggtgaggctgatctgaattggcgcttcaaagatggagcatccatgaaatcatcatcggacaatgtggatggagctgaaggaggatttctttttacacgacaagctagtgcctttctacgaacacgatgaactggtgctggttgtggatcagtctgctgctggttatgtggattatcagcttgatgtgctgagctgctagatcgagttcgtcttgaaatgtcaacggaaaaaacctcctgacttgactcaatggttagtctttttgcattagttggagggcgatcaacagatctcatggttaaacactgaatatatctgttgaaaaaaatattgtttttaaatacaacgatttat

SEQ ID NO: 124905 - DNA, 800 bp, Zea Mays
gggaaaaaaaaaagagagagcaagaaactgtaggcgcaagtgctgtcaccatcttggaactggtcgggacgtacctctgtcgaacgaagcgccaaaagattcctccacggcactataaatcaggtaacctttgttttgacagcatgccataaacacacaccggaacaagcgtctcaaaactaagccctctttctttgatagcgagagagctagtaataagccggcccgccacagtgtcgccactcaccacaccgccgtctagtcagtcagtcagtccgccgtgaagcctctgcaatagttggtatctagcgcgtcgctgtcggggggtgtgtgaattgtgatcacatcgcctcgccctcagctcgccaccgggatcagggcggggggcgctgcccgtttggctatgccaaccgacagacagggatcattagcggcaccgggggtgctagctgctgctgctgctcttcttccacttcttcagagtaatcatcagtagcgtgaagaacatacttacatctgtggcagtggcaccagggattttcggcgtccatcatggttagttttgtatcaaccagaccaggatgggcgttaggctacgagtacgtttctccttctctctccggtcacagatgctatacactatactggtcactatgcaatcttgaggcaacgcacgcgcgcccacacacacacacctgagcaaccggtttctgtcgtggcatacatttgtgctgtgagacctggatgatgctcccggaccggaccgtgccgtacagctagctactactgctgcgtaaacg

SEQ ID NO: 124906 - DNA, 317 bp, Zea Mays
tgggttcctaacgacgtcacaaaatggtcgtcgacggtggctcgagctcagctctgatgcgctaacttaccctcccacaatttctctctgtttcacggtgtttctgttaccagcttacggcgaggcgagggagatgtggtggctggtcatataggggtgaggactagggatggcggttgattcacctagggttgtggagattgaatcccacaggaatcggccaggttgttatgtgtagccacgcggaggggaaaggaggagctgatgcgtagcgggtccaggagtcagcgtcagggagagttgggtcccacacgtca

SEQ ID NO: 124907 - DNA, 1012 bp, Zea Mays
ccgaggtattgtcttcatcatcaatgtcatcattgaagtgagggtcccccacctgttcatcagagaagtcggattcctcatcgttgctgtcgggggaagcagccggcctctgaatggcaataccagtgaccttggatctattcaagtcttccggatttagcttggaaggggacattttacagaattcagcacccaattttttgatgacgtcaagatgcatagagggggggcactttgagtgcagcatgagcaatttttcttgccaatcccagtgcaatttttgaagcccttggcctttgccctaagcctggcactccttctgactgtcgtgtcgactgagataggctgcctttttctgggagttgcctctgactggtgagggggttgaggcttagcaggggaatcctgactgggtggagggggaattctgaatgaaatgatgtccatgttgggtgcgacgaatgccgagatagctccggacaaaaggaatttcctggcccaatcaaacgaatctggcctcattaaaaggcccatgaagaaagcagcccaaatctttggaatagaaactgagtccccattgtcagggaacaaaccagcccaagaggaggaacgctttctggccaagaaatcttcaagcgcagggccagggacggtttgatccaagtgtaacattaggcccacattgatgttgtcttcaatttgcatgtcatcctgtccctcgacattgtttccctccaaattaatgttggcatgagggaaagcaggcagggcgagaaccgcttcagccggcgttggggcttcctcctgatggagctggactccctgagggataatgatgtcgttaaaatagcccaccgaatcgtcagaaggaagatcctcaaggcctgaaagctggtagctgaactgctcttcttcattgttcgcagcgttaacattatttggtacagcctttggcacagggggttgagcctgctcaacaggccaagggtcccagccatcatcagcattggca

SEQ ID NO: 124908 - DNA, 488 bp, Zea Mays
aggggctttccttaagcaccctgctggattgttgggatcaatccagaaaggggtataggattgatgtcttgtacctttatcatatcgaaactgcgtcacaacttcaatcatcttcatgataaaaggtgcatgaagacatcccttcaatggaaaacaggcagcatggatgatttcctgccagatcatatcaaagacattgatactctctgagctgctgggcttcatgaatgagagcaaaaccttactctctccaagaatattcatctaatttccccctttaggaatgagggtcatcctgctgagggagttgatgtatctataatacttgtgcatgttggtggactcccaatatttcccagactcagagagatgaagatctctggcttcatctctggtaggttggcagaaatcatggatcttgatcttatcaccagaaatatcattgttagtgaatccaagaatgtgagcaaaccgacggtagttcacct

SEQ ID NO: 124909 - DNA, 369 bp, Zea Mays
atccgctagagagactacgagttttcgacgccatttttcctcttcgggtgtcgtgtgatgagcggtgagggcggcgggggtgctgcacgggtgttagatgacttagatccgaggtttggctctgctatcctggttcgaacgtggctaaatcttcctgtacgaaacctagctgctcagcccgccgtcagataagctccagtccacagtcggatttcaactcaaattttggccgtccgacaacatatatgtttgctaaatcctttaacgccagtcagattctgactcgagtttcggccgtttgacaagatatgtaactgcgtactttgatgccaatgagcttgctcagtcctagtaccgtttaaacctgtg

SEQ ID NO: 124910 - DNA, 709 bp, Zea Mays
gtcgtcgtagcgtcgatggcatctggaaaagagcacgttcagtgagatagtcatctagtgtgttgtccgactcaagcagtccccttctctctgctgcctcacgaaaagtcggtagcgtgacaccatctattgtccttagatccacataggaggtggcgccagtcacgtggtttaggagaacacggaggtagtagcgctccccctcggccggatgagcagagactattctaccgacttgtccacccgtatctcgttttctccgttgccatactttgcccttaccactctgccaagtgtaccactcagggaagtcacgatacaggatgccccgagcctcctcgtgtagcctatttgcctcaaaatatgctgtgagcattgacctatcagcacctggacggttgacgactcgctcgaccatttggcgctcgtgaaacgccaccatgtgcatgtttggaagatgaagctgtaactgcatcacaggtggagagttctgactaagctcaaagtcgtatatcctccataaggcctctggaggggtcacccaccttgcatatctgtactgcttgatctcatctacatcatcatttgccttgctcgcatctctcataacaacagacgcacgatcatggcctttgtatatgtacttgaacatgtatttaacagccttgatgctcccgcacgcctcaacattgatgtgacagttgaagag

SEQ ID NO: 124911 - DNA, 324 bp, Zea Mays
caagcatctttcagtgggggaaggttgactctgataaattcaatcttgtctagcctaccaatgtacatgatgtctttctttgctattccaaagggagtccttcaaaaactcgattattttcgttctcgattctactggcaaggggacgagaacaagaaaaaatatcgattggccagatgggacatcttatgccaacctaaggagcaagggggtcttgggatccaagacctaaatataaagaacatctctcttttaagtaaatggttatataagctggtaacatcagagggaacctggcagcaattactcaaaaataaatatttg

SEQ ID NO: 124912 - DNA, 412 bp, Zea Mays
acgatggtccttcataatttcatacgagagcataggatagaagacttggacttcgctcaatttgatcgtgatccggattatgttccaacgatcctagaaagatataacaaatttgcaacaggcttcgatggctttacgactatgcctaatgcaccaactatggacatgtttcgtgatgcactagccacacagcttgctattgcttggaattaaatttgtaccatattcaaattttacatacattcatatacattgtaaatgtttccatgaagacttgacaatattacaagttctcgttatattggtgtgtattattttatattagaatgctatctgtttacaacaatcaccgtgcatattagcgacaacaatcactgtgtatatgacgtgtcgtacatactttagaagctaa

SEQ ID NO: 124913 - DNA, 859 bp, Zea Mays
agtgtagggcgagcagttggccactacagacaaccttaagtcatgaatgcaaacgtgtctagcttgtgcattaaaccccacgaatttagctacataaagtgaagaatgacttctattatcttatatctctagcccttccaaacttccatggtaccaatttgtagcagggccaagagctcaggttgtccacactcgcggacttgaaaagctaccgtaaaggataggataggacatagagtttaggtcaggctgcaacggtgcactcgaaaggtaactctaaaatacggttggctagaaacaaccctacatgcagggtactcttccgtgcaactagataggagaaaggtggggcctgaagcaaacatggcgggaggctagttaggagagagatgaaaataagtaatataatatatggtagttgatatagtgtagagatttaaggtgaatatgaccgcggaagattgtgggataaagtagagaatctcgttgactagtatgacatatttcttttagggccagtttggcagcccagttcccgaccgggaactcggtcctttccccgtaccaactatccacgtgacaagtttccacgggggcatgtttctagcctgtttggaaggcgcctccgtcggggtaacgacccaccccgagcttagtttctgcgtggaaacacaccccacctccggacgtcgggcgcatattctatcgccgtctcagcctctcctcgtgtccctcttctcatgtatcgtcgtttggtgacgctgcggtctccgtcatcgctaccttttcaccggagatcttgttcaggtaagttcaacacctcttcccacaccttggtattgttggggtttcttttctc

SEQ ID NO: 124914 - DNA, 319 bp, Zea Mays
aaacaatcaagggtaagataggtgagtttgcaatagaatggttgaagtaataattcattaccgagagaagttataaaggaacaacgagatcaccaagaatgtgaaacataaaatgatcactcatggaccattaggaaacaagggtggtcaaggatatgtaaccaaaatgtcttgaacagtcattggggtacgaaaataagtgtacataagaatataagagtatgcaagattccaaggatacgagcataccaagacaagggaatggaaaaaggcaaaggataacgacttaacaatggaataggaagggatctcagaatac

SEQ ID NO: 124915 - DNA, 372 bp, Zea Mays
gctgagagcatgcacagttcgcctcggaatcaggagtcaaccagagtatgatggtcgtgaattcatcgagcatggcacagagaagtgtgtcgtgactgtatacattggatccagtccgcaccatgtggaatggagtgtcactgctggtgggcacatattcaaagacacctgccaagtcgttgctcgcaaggcattgagggccctgtgtcagatctatgaagaagaagtggccgacacaccgctcagattctttccgccctttcagagagaccgtcctgtttggatggccaggatgcgtgcattggaaggtcagcagttgcttgaggacgacctcacagtcgtgtacctcaccgcatacctgctcaccctgga

SEQ ID NO: 124916 - DNA, 296 bp, Zea Mays
tcaaggaggaaaaattatcaagtgcaacgctctggacagcaagcccagagaaataatcagagtcagaaccagcaaaggagcaactcctagaccaaccagaggtctggtgggagttcacaaaaccgtcaaggtggcgctagtaacacgcaggccagaaacaacgcacctgtccaacccaatggatgtttcaagtgcggtgagctaggccactatgccaacaactgcccaaggcgcaaccagcagacaccccagaaaggcaataatcagaggaatgaccagaacacccccgctcgtgg

SEQ ID NO: 124917 - DNA, 456 bp, Zea Mays
ccaacattgtcttttatatctagagtactgttagattgtgtttggttgtaatgatgggatgagacgattctttagataaggttgtttgttttaaagttaggggctgagataggactatttcaatgttgtcccataaaattagagggacaagaggggatatcagatgacattgttggaggaatataggacgagaatctctcctaattatagggtacaatttcctttagcacatgcaagggagatggaggattggaggggctacaattcctttgcttccaaacaagcctttagaattcattgctagagagagccatgttgcttggtttctcctctatcggtctggtatttgttaatcatgtccagttgcattttcttgacgcctaaaaattagttgatatggtagtcgaatttgttcaaacttgtttaaacgtgtaggaaacccattgtgtgcacttc

SEQ ID NO: 124918 - DNA, 558 bp, Zea Mays
ctggcgaggcccctcgccgccaggaatatcccccccagggccgcggaaacagaactcgcggacggggccagggacgtgcgcaaccgccgcgccgattttactgcctgtttcacagcgaagactgcgcccaccaaaccagagactgcccagagacgaaggccaccaaagacaggatggcacgggtacaaccagccgacaaccctagagttgtcgcccacacatatcagcaaccccctccaccatacatccaagcccccgctccgcatccaccgcaccacgcataccaacaccaccaggaagtacaaatcgtacctcccccacccccacctccacatcagcaacaacaaaacatccaccatccccatgctccaaaacaagaggactttgccgatcagccgtatcgcggagtcattcatatgatcaccgaaggatccagcaccgacttcgacacgaagcggcagaagcgggaccattaccgtagcatcaaccacgtcgccattaccggtccggtcgtacagacaaagtggtcccatgtgccactaaccttcgacgcccgag

SEQ ID NO: 124919 - DNA, 658 bp, Zea Mays
ccacgccgcgctgccgttgcctccatggcagttgccccccatgcacatgcaccagcggcgtcgcacgcgccagcttactaggtagtagtagggcgtggacgcgagcattagcggaattatgttattcctgtaatgatcaccggcctctgctagccttcgttacttgcattggtcctgcctgctgaccgtatccaagtgcttttctccttttccaaccccatctcaccaaacggccaccataccaaatactccatgctacagggtcatggcccatcgcaacggtacggtgttccagccattcgtcggtagtagtcgcgcctgaacctcaaacttcaggtgcagcctgctgtttacctgttgttacagttcatggcgtcgcaattggactgccgtgtttacgtgcaaagccagcgccctccttccttgactgcaacatactgtacacgcttaaagtcctaggctctacaaccatctggcttggcagggcagcaaagccaaaggatctgcagcaatttcaggcacaagaactgtacacaggtagactggtctgcagcaatttctcacacgccaccttgataacaagcctgtctcaacttttctggatgctcaagtgactctgacagcgccccagtactcagatactccctccgtttctttt

SEQ ID NO: 124920 - DNA, 462 bp, Zea Mays
tttgaaatcaaattcaaatctgaaattcaaatagaaaactaaaaatagaaaagaaaaagaaaggaagcagaaaatataattctcccgtgcgtccctcgtcgtgggcagggctccgattcgagtatctcacggtgagcgcccctccctcagttttgcctcggcctagagattgttttagggcagacgcgtagtatttcgggcaccggggcacccattcatcggtcgccgtcgagttgggccatcatggggaaacagcgccgccgcctcagtccggcgaggggaggagaaactcgtgcgtcattgatctggcaatgtccggtccagattagagctggccgataccctttcatcctttgattgtcggccgttgatcttcgcgcgtacgtgcgagattagaagtagggtagcgattcacccagataattcccagccgtccgattgtggatggacgttcgtaatggg

SEQ ID NO: 124921 - DNA, 564 bp, Zea Mays
actgtgggtaggaccgtaggagaggtatgcactgtaatagggaggagtagaggaggcaaacaattgcttctccagaactacctatgacgctatagcaggagaatgaaaaaagagtctgcattttttcaagcataacatccaagtgtgcaaaagtcgtcccagagacacatatttctatccacgcaaaagtcgcctgagggtacaactggattaacacatcaggtgcatcatagaggtcgaagtcgtcgccaaggcaaacggtcataccctaacacaagtcgcctaagagtgcaaccagatcaatataagcgtattaacgacacccaagcgcgcgaaaacatctaaagatgtagctcagatagcgcaaatacatttcaaaaggtaccacaacgaaaggcacctcatatttcaaatacaagatgcacaatacgtccaacaaaatcattcacatacatgttcccataatcattcacatacaggaaaagctcatcgtgtataagtgtacatttggaccgggtctgatgggctggcccgaagcacgaaaaaagcacgccccaggtacgg

SEQ ID NO: 124922 - DNA, 477 bp, Zea Mays
cgacgacgaccatccaaggtgggagcgacggcgtcgacctcttctagtcgcgagcggcaacgacggatcccatagacgcgcgggacggcggtggctccccgaggccgcactgcaacagcggtcacctgaggcgcgcatgatggcggcacatccaaggcgagttcaaaggtggtggccccccggacgcgcgaacaactacagatctgggaggcgcgcatgcggcggtggattctagaggcgcgtgcggtgtcggctccccgaagactcgtgcgacgacgacgatgacttgctccaactccaattattgtttatgtatggcgctgttggttgggcacatattaggacttttttcatcaattatgatgcgtgggtagatatttatgcaactctctatgagagtttatgcttttgcacgattcctgtcatccattttttgcgtttatacagtgggaacgaaaatgacattcaaaatttgca

SEQ ID NO: 124923 - DNA, 637 bp, Zea Mays
gcaagatagaattagggatcaagtgggtcaagttcagattgtaaaagtcaaggagaccgcggaagaaaggagaaacgggaagagcgagaccacggataagaaagggaacatagacgacggactcatgagtgtcttccatcggaacagtaactccatggcaaatccgccaagaacagagttcttttgaaggtaaaaccccgacatccacaaggcgcagaagatcaaactctaaaattacagacatatggttacccacgaatgacaactgactgttggggtcgattgacgggatgataaccacggtggagctctgtttcttccgttttggcgccatcacaatttcgccggcggaacgaacagtagcaaaatctaagtaaaacaggggagtggttcgatgcgaaaatgtgaggatagggctcagaaatcaaaagtgcacgtcgacatgagtataaatggggttttcccgggttgtgcgccatttctaaaaagtgccaagtcaacacttgggaaaatgagacttcagacataactcggccgttacctctaaaatgccgacagtgtcaagcaccactcggctgttacctctaaaacgccgacagtatcaagcgccactcaccgttacctctaaaacgccgac

SEQ ID NO: 124924 - DNA, 805 bp, Zea Mays
ccctgcttcctctacatcgacctctgtcccgcctgttctagcaccggcgcctcctctgtgacttagcatcgtcgtctcggccaccccgggcgtgatgtgatgtccaagctctcccgtagtacctccgtttctagttgtaggggatcttttgagcacctctttcatgcttgtcagttaggtcgccatgttcggctcccattccctacctcctcttctagggcagcaggcattttttttatctgatacactgtgatgtatggacatcccctgtaatcagcatttctggctataagtactatttactcatactcgagatttctctcattatttgcggacttttcctcttcatcagaaatcggacacttttcccaccctgtctcacttcttcgcttgggtctccactcagttcggtagcaccatccggagcatccagtgtgacaacggccgtgagttctatatcaatgtgtcccgtgatttcttcctctctcgcggcgtccacctctgtatgtcgtgtccctacacatctcctcagaatggtagggctgagcgcatgattcgcacagcgaacgatgtcacgcactccctgctctttcaggcttcccttcctcctcactactaggctaaggccctcaccactgccacctaccttctcaaccgcctgccaaccaaggcggtgcccaccccactccttacttcgctctttttggcatccacccctcatatgatcatcttcgtgtcttcgggtgcgcttgttaccctaatctcgcttccactgcccctcataaattagcgccccgctccactc

SEQ ID NO: 124925 - DNA, 378 bp, Zea Mays
gaagttcaatgagactttgcaggataacaagttatgcgctaaaggccagcaccaggattgaccccaccaggatcacagttagcaaccccaggtgcacaacatcgctaatccataatagctagacatggtaccccacttacagtcaggacaacccttcgcaacatggttgagggggcggtgcagcaagaggccacaaccgaggtagaggccctcagcagcaaatgaacctttattgtgtctttcatggagaggatgttgagtacaccactaaagattgcccagaaaccaaagaaactaaagatcacatggctagagcagtcccaacaaatagtccaagagccatagttcacacttatcaaccctagtatccccctcgcg

SEQ ID NO: 124926 - DNA, 397 bp, Zea Mays
agaagaaacatagtagtaatgtcataggaaagttcatcattgctagtcgacaatggtatcaggatgtaagtaatgccatcattgcaactgagcacatcacataaaggaactcaaacaaagaaagtgagttaaaaattgtagatagttcatcattgctaatagacaatgttctcagccagcaacttagcacaatacataacaaccattatcccctatgtgaggccctattctgccacatttgttgagcccaattgtccctggtagcagaccaggcagcattgtccatgacaaggtcatggggagcttcctcatgaacttgatttgcaacccatgtttcttccagtggaatatgttcatcattcccatgacgaagaatccagttgtggaggatacaaca

SEQ ID NO: 124927 - DNA, 475 bp, Zea Mays
ctgagtcgtctacacttcacgaatcattcacgacatagaatcacagacctcagctgctgtcacggtcaaaagttaacttccgcttcctccacaaaaaaagttttacagccagcaacagcaaccagtatcttgccatgcaccatcagagagagagagagaaacaaagagaaaaagaaagcaccacgggcatgtcatcaaaacgtctcgcgctcatcagtctgagcattattctgcacctgagttttttggtatatatatatgtaagtatgtttatcgagggattcagttctcttcaagttttcttcttcaaccaaccgttcgaccctgacgacgtacggtaggcctccaggctccagctctctagctagtacattgcttcataactctccatctgctcctcccagattggataaagcccacctgcaaaacattaggcttattagcttcatcaattaaaaagttaattaatacattg

SEQ ID NO: 124928 - DNA, 470 bp, Zea Mays
ttgtaagagaagggatcaatcggctcaacaacaccatgagaaacttgtgagcatgttgaaagggggggagattttttcaggtagatggaaaaatcaagaaaccaacctagcacgatctagggatactcgatggggttcacatcataaaactttatgtcgtattgttctcatgtgggatgctattctagaggtactagagattgtgggtgatgatggctctagtggggataagaaatatatggcttctggtttgttgaaacaaatggagaggtttgaatttgtgcttattttgcatctcatgatgaggttattaggcaagactaatgatttgtcataatgtttacaaagaaaagatcagaatattgtccttgctattagattgattggagccacattgcagaatattagtaaagtacatgataatggatggggggaatggtttgaggaggtaaagacctttcgtaaccaac

SEQ ID NO: 124929 - DNA, 627 bp, Zea Mays
aagaagaagaagaagaggcggcttcggcgactgtcatgtttggaataggatgtcggtccttctgctccggtttgtgatgaagtaacagcagcggtccttcctgaggttgatcccaatggtggcgtccatgttgaagttgatcccaatgggtgtgaccgtgctgaagttgatcccaatgggtgtaaccgtgctgaagttgatcccaatgggtgtaaccgtactgaagttgaacccaatgggtgtaaccgtgcaccggctgttgtccgtatttttgatgaggacaaagaagagaaagaagaagttacgctgattcataagaatagccggcattacataggtagtgggggggatagtgatattccttctccagctctgtctgctcttgtcagccttcaagaactgtcaataacggattttgatcaggcccttgaggaggtcgtccctaaggatatgctatcggagccgactgctgatgacatgaaggttgtttgttctaaaattccatacatgggattagaggtatcccgagcagtgtctcgtgcatcatcgactttggaaggcagtcttcgatgtcaagacattggtcaggattgcccaactcacatggaggtgactgctgcagaaaac

SEQ ID NO: 124930 - DNA, 862 bp, Zea Mays
tctgaggtgagctacccagttcccacattttggaagaggtgggcgggctcctggatgcatgaatggttttacgtgaagaatgacctaagtcaagggaggatgtaagagggattattcaatggcctatatggtctcgcttcggcattaggaggccagccactgcccttgggaatgatatacaaacatgccaggcggctttcaatacagtgtgtacttacataggcacaagagacttggtccaggagcacattgcttacaaagtgtggccacttgcaaatgggtgggaaataccgaaggagactactgctggctctagtcaaggtggtttagtctacttgaagtataccttcaggtacaggagccaatttgatgaactgaatgatgtttgggtaaatgccatagaagcgactagtgacgagctgcttggagcatattcaaaggccgaagatgaagccatgacaaatgccttcggggctcgtggcaaaaagagattaaatagagtgttcaatgttatcgggtttgtgtacccagactactgttatccgtcgcggaaacaagggaaaatgaggaaagctgctacctcggtgacttctagtgcgtcgagataaaaaaggttaaagttttgagacgttggcccaggcgcattgaaacgaccgacgtgacgaagctaattgagggggccactcctattgcagagccaagtcgctctgtgtcagtcgaagctaggacaaaaccggctgaagagccaaaactggagaaggcgacagagcagttaaaagcattgagtccaccatgcacaatggaactgcagaagccatcaagcatccccgcaacaactccaaggaaaagaagaatggccaac

SEQ ID NO: 124931 - DNA, 629 bp, Zea Mays
gccgactgttcttccaaatcaatgggacttcctcttcttcttcttcgtcctcgtcaacaatacggacaataaacggcgcagggccacacccattgggattggctctagcagggtcacacccattgggatcagctcttgcagggtcacacccattggaatcagctctggcagggtcacacccattgggatcaactctggtagggtcacacccattgggatcagcatcagcagggtcacacccattgggttcagctccagtaaagatttccaccggtacttcagcagcaggagcagaagggccagcaccctggtctagacatgatactcgccgaagccgtctcttcttcttcttcccctcggcaggtgcagttggatgactgacctggcagagacgtttcgggcgagtaccctcaggctttcgggtgtccacggtttcttcaagctctagaatagttacaatagccattgtttcagcagggaccgagtcagaagaatccctagccaacatgtccagcatagcactcatctctgcatcacctggactcgtaggcatctcaaagtgaacttgcctctcatcattgggaagatcaccaagtgaagcaaccaggacctcaatatcttcgagagag

SEQ ID NO: 124932 - DNA, 509 bp, Zea Mays
ctcactttggcttacatgaaatgatggttcttgagttagcactgagaagaaaccctaggtgacactggggtgtcacatcaacagcctgaggcgctagcgccgcgctaccactggaaacttaacctagaaaattgcgtgttcagggtacgagctgggaaactgctcggattcatcatcagtcattgagggattgagcctaaccaagaaaaggttgaagccattctgatgatggaaccaccactgtgaagaagaaagtgcaatagttcactgggtgtatggtagcactaagtcgtttcatcccatgactcagcgagagaggaatgtcattctataaattgctcaagaaggtggacaaatttcagtggactccaaagcctcaagaagcactagaggcactcaaataattcttgaccaccccgtcgattctcaagccaccccaccgagccaatgccagtcgaccgactaaagatctactactatacatctcctacatgactcatgtgataaac

SEQ ID NO: 124933 - DNA, 457 bp, Zea Mays
actgtgatgtcggacgtgtatatcgaagtgcattatagtggtaattgcgttaagttaaacggtaatgtctcgggtgcatgccacaatatggttgtatacgagacagggtaaaataaagtgtgctcgacataaatgtttggtcgttgtaggtagaaattgtctcggcttaagtagagaggtgatgacatgccgtaagtagtcatcacttcctctataaatataaatcgagtctatacgcgttaggcgttccttaaattgtgcttcacaaataagtgtatgattgtgtttatgacttgaatagatgtcttcgagtgaactaataggttcctaaggcaattatgtgtaaggtgtttatagtgacgctttatcccgaaaggtgttaagtctgcgcataaataagagataagtgtattttgtgtagtgtggattgatttgagtgcatgtgtcgcaagaaatg

SEQ ID NO: 124934 - DNA, 596 bp, Zea Mays
caagaaacaaataagtctcacacaacgagataaaaaacaaacatgtagaactcatatcacatccatggccctctataattgccatacttggttatgtatttccctgaaagccagttgaatctatgttcggtaaaaaaggtcatgaacatctctttttgggtcagtttgacaaataattcagttgtaatgaagtgctcgttactaccataggtggcaccacaagcaagcacatgtttcatcacttcatcaatggaaatttttccttttttgcagcataagaattagttgaaacagacatagatgtaactgcttattgaacgatgattagtgttgtccctgttttctgttttctgcttcttgcctttattttgattgaaccttggcgttggcggtctcttgtcatttggactgaccggtgaaacttcacattcattggtgtcaccatcttcttgtgtcacaattgattgcctcgtgtggtgtacctccttgttcagcaatggtgaaagcagtggccatatgaggagaccagtgatcaacaccaatacttgtgatgctgccaaaacatatttctagttcctccatattttgaagttccc

SEQ ID NO: 124935 - DNA, 588 bp, Zea Mays
gttatttcgtctggctgatgtgcatctaagaatgagctcggcttatcaccctcagaccgatggccaaacggagcgtgtgaatcagtgtctggaaacttttttgcgctgttttgtgcatgcctatccgaatcagtggagtcaatggttatctgtcgctcaattttggtataactcttctcctcactcagctattggtcggtctccgttcgaagtcttgtatggttgtcgtcccaggttttttggcattgatcatgacactatcatcagtaccactgatctggcgtcatggttgcatgagcggcagttgatatctgatgttatcgagctgcatttggaaagggccaaacttcgtatgaaacgtcaagcggacaaaggtcgttccgagcggcactttgtagtaggcgattgggtgttcctcaagcttcggccatatattcagtccactatcattgtttgtgccagtcagaagttatcattcatattttttgggccttttcaagtgatacaacgtgttgggctggtagcgtataaacttcagctacctccgtcttctcgtgtgcatccagtttttcacgtatctcaattaaa

SEQ ID NO: 124936 - DNA, 699 bp, Zea Mays
ctggactttgggccaggcttggtcttttcggaatccctctgggatgccttggaagcttcggtttgccctgctcgcccctgtttgcggtcgcccttctggctggtggtttcctttggtagatgcatcttcaagttgaattcggtttcggttggtcatcttctccaggctgcccttggtgggctcgccgaggatttcgaagtgcttcagctggctgaccgcgtttttcgattttcggtttcctcgatggcggtgggtttccacatttataacttgggctccattgagcgtaaggagttcagggccttcttcaacctctggaatcgtggtggacccaattggaagcatgaattcaggctttttttggaggaggaagctgcctcctggtcgagggtccgagtcaggaattctctgtcatatgcggatgtggttaagctccctctcactggtgccaatgcggtcccgattcgtcgccctgccaggtcgcctgatggtgtttagcatgctgctcgggctggttcttcggttttcaatcgtttgggctgtccttccactaatcgtgcccaggctcgtaacatctggcgcccgcaggctttgcctcggcctctcccgagggtctccgtgttcaaccgtcttcgcccgcaggcttcgggaccgtggcattctgcttctaatggaagaactggtcttcctcggttcttg

SEQ ID NO: 124937 - DNA, 294 bp, Zea Mays
tgctgcctctaacgctgatgcttgctattccgatcttcatcatcatctggggaggaaaccagaggctgctcctcaaccgacaatgcaaccaaaatagccaccttcactgaaatggagtaaatcaatgtgcgagggaagcaggatccatcttctccaatagacgtcggctcttcaacatggagatcatagcgagaaggcaggcaatccatagagaaaccccaagccttcagtttcagaacaatgcagtgtccatcgagtagatgctctaccgtatctgtgacagaacgtcccaag

SEQ ID NO: 124938 - DNA, 645 bp, Zea Mays
atcatccctgactttgtgatctagggcaattttggagccctttcaaggggccaaccttcgaacccctgatcagtattaggctcgaagccctaaaatcctgaggtggttcatctgaatcctgctgatggccgagcctttgaacctctaaatagtatctttccatgccttttttcctcccgaaacgacaggccgaggtagaagatgactttttctgattcgttgctccttttccgagggtggttgcccgaggcagaagacacttctttccagttcgattgctcaagggataaagggcagtgaagtcgaggggagagggtgtaccttttgagacgggatgcggaacggcgctcagggtgtttttcctcagaggggacatggtcatttaatgcgtctggacgtcttgcctgtcagcaaaccgttcgtggcacacgtgcgtgtgggattcgaaacaaccgtcgcccaaccattttcgaatcacaccttggtggctccgtccgtccaataaactaacagggaggggggcttcagaccattacctttgcttagccctttgccttctaatgtcgttttcgccttctgctcaaagagcccttcgtcttcctctcaccctttcgtccgtctcgatggtggaaaagatcactgtcc

SEQ ID NO: 124939 - DNA, 360 bp, Zea Mays
gccaaagtgaaagagttaatcagtgtttagagatgtatttgaggtgtgccatttctgattctccaacacagtggaagaagtggcttcctttggctgaattctggtacaattcctcataccattcagctctgaagtgttcacctttcaaagctttatatgggtatgaacctgtgtttgatgctgctcctgaggtggctaaagaaggggatcagttggtggatgagtggttggcagaaaggcaagcttatactgctttacttaagcaaaagttggcttctgctcagaacagaatgaaaatacaggctgataagaagaggactgatagagaattccaagttggtgaatttgtgtttgtaaaac

SEQ ID NO: 124940 - DNA, 312 bp, Zea Mays
cgaggagaggaggaggtgtgcaatggccaacggaagagagggccatatagcggtgactcgtgagaggaacaagacatggatctgcagctattggtgatagagagatacggcaaggcagacacatgctgctttttgcaagggcatctgagacttgataatgcaatgcagacacatgtctgctgtgtgttgttttttcactaaaaaatctttgttgatttgggtccctttgctcttatttattggatacatgctctagagataaccgtggatgatctgttatttgactctgatgagatataatttgaactgcta

SEQ ID NO: 124941 - DNA, 521 bp, Zea Mays
ggtaaatctattacatgtgcgaattttatttgtcacacctaatgcatagtttgctagctcctaacactttgcagtaaaaaaccacttttttcctatcgaggagtcgggtgatatggaacagacgagacaaaggtctatgtgaaggattattatgacatggaaatgccaatgtaccactatgactactggtgtgaacccaagaacactgagaagaccaagctagagtgagatgtcgagcgcagcaacaaactggtggtcgacgaaacgaagaaatggtgtgaggtgtccgtcgtacaatgactaaggcaatctccagcagaacgtgcatatgtctgtaagatctaggacaccggctagagggggtgaatatacggttttgattaaaatcaacaacaatagagaaatttaatcttacgataaaagagataaattatctagcctaagttgagctaagttaggttggcaacctagggtgaacaagtaaacaagttgaataataatgaacaatgattcaactaatc

SEQ ID NO: 124942 - DNA, 346 bp, Zea Mays
ggggtttcctctggaagggcagaaaagatatcaagggaggacattgtgctgttggatggacaagggtgtgtagaccacttaagtttggcggcttgggtattcacaacctggaaatccttggtttggctcttaatgtgagatggctctagctcagaaaaacacaggttgagaggccatagactgagttcgacataaaagtacatcccaatgctgaagctctcttccaggccttggttcactcttttgtgtgggatggtgctacaaccctcttttggacggatagatggattcaagggcagtctattgcagtttttgccccttacctgatcagtcgtattccaaggag

SEQ ID NO: 124943 - DNA, 506 bp, Zea Mays
cctaatggcctctttccttttgaacccccttcctcatcttcaagatcattcactgaacctgatggtgcacgactaccaacaggctccattcccgcttggcctctccagggtgttccatgaaccatggcatcccatttcggttcattttttaggcgcgtccagcaatgcatgaaatgaaaaggctttttctgtgagctagcatatagagttgcagctttcgaagtctacacaacaataaaacaaatttgtgagctcacgaataacagtaactacactataatgccagcagaaatgaagaagtaggaaggaatgtaattgtaccttatcgttatctgttaggccactctggttttccctgaggactctagcatagaatccagcaaatttgcctgtttcacctcttattttgtcccatctgctgctcaaagccctattaagtctcattggatactcacctctaagttcattgtaccttttctcaattctagcccataacccctccttcc

SEQ ID NO: 124944 - DNA, 768 bp, Zea Mays
accccttgaaagggttgatcagcgaagtcctcttgctttggtgggggtggtggtggtaattgttgatttggatgccgtggtggtggaggcggtagagctaggattttttggtgttgttggtatatattgtggttttgttggtgaggatggaaatgttcattatggaattggtgctggttatactgatggggatggtaggtgcgggcgataactctttagctgtcagtcggatggtttccggcaatttgatcttttgttgccttggttttaggacaatccctggttgggtgtgctgagtcttcgccatgtaaaagaaaatagaatcttcgctgttgtgggcctcgacctctgcccctgcctctggttgcattattgtcgtggccttgatgtagtgggtaatcatgacgacgagcggtgccccagtctactacaggtttgcaatgttgtgcacctgggactgggtgcggttttgccggcctgagtctggatgcaaagccctgacccatgtcctactagactggtggagtgtccttgcgctttcgcagtgactcgattttcctttggtggagctcttctaaccggccgtaattttcgaagagctgatataactcttgcaagtttttgggtgggtctcttacgcagtggctatatagaacacatgcacgaaggtcgttgattgcgtagtgaatagctatgtggtcatcaaccgaaggcagctacgactttaacaggaggaatttcttatagtactctcgaagggtctctttc

SEQ ID NO: 124945 - DNA, 363 bp, Zea Mays
gctggaaggggagattcctccaggcttcgcagccctggaagctctaagcactctgaacctttcgaacaatcgtctgtctggaaggataccggcaggtaatcagctgcggacactggtcgacccatcaatctacggcaacaacctggggctatgcggtttccctttggaggaatgtgcaaatgcagcgaagcacaatgatgggaaaagccaagacgacgacaacagagaggtgctgtggttatgttgctttgtggttgccggatgtatcttcggattctggctgtcctggtgtgtcctgttttgcaacagaccatggaggtatgcgctctatcactgtgtcgacaacgtgctacacaaggttgc

SEQ ID NO: 124946 - DNA, 625 bp, Zea Mays
ctatattccatgagttcccaatttccgtgccgtccatttgagtaagacgatatgatctaggctgagtgacttctgctactatgaatggcccttcccatagtagtgacaatttgtgctgtccctgccccgttagaattcggtggaggacgagatctcccaccgagaatgatcgatgccgtatggtcttatcatgatagcgcctcagagtttgctgataccgggctgactgaatcaccgtatttaatcgttcttcttctagtatatcaacatcctccagtctagtagcctcagcttctgccatgttttcgaagattaatctcggtgccccaaatttgagatcagcgggtagcactgcctccgaaccatagaccataaagaaaggagtgtttccatgcaaagctcggctaggttgagttctcaggctccagacaacatacggcaactctctgatccactttcctgcgaacttttcattcttgtcgaagactttctttctgagtgcttccagtatcattccgttggctctttctacctgcctgttggctcttgggtgtgccgctgatgcatatttgatctggatgcatttttgttcgcagaaatcaaagaactccaagctagtaaaatt

SEQ ID NO: 124947 - DNA, 387 bp, Zea Mays
gttatagagagttctggatctagaagatgactatgcctactgagatgtgtcgtgttttcgtaggggtggttcttctaccttatggcgatagaaaactaagttacacgcaccacgcccatgcctgttgctagtccgaaacgggctccaacctatacggaagtcagcgagtccttagggacacgtcacaccctctacatgcataggatctggtccacatgccttcacacccatgcaaccattcttctcgcctgtttctggtcgtgcccggcccaccaaggcctcttcatcggcccatgggtcataaccgagtcatggccaccagggggatagtcacccccacacatacaataccttctctatctctgagtagattcttttagatggccc

SEQ ID NO: 124948 - DNA, 485 bp, Zea Mays
cttcagttgaaaagaaggaagctgaaatttctgcagaaattgaaaaacttaaactcaccctgctggaacagggggagaaaaagaaacaactctcagaacttcaatcagctcaggatttagaagtgaagcagcaggaataggcactgcgtgatgctactgcacaggtgagcaagagagccaatgatgacctccaggagaagactatggttcctgttcgggaggctgaaaagttattcactgacctgaaccaattcgcctccacgggcaattgataaatcaagctagaccagccttgctttgttttccattgagctttaaatattttactatttgttggttctaaactttttattcctttaagtttgttggacatgtgtcatgtttaatttgagtctgtaactatcagttgttctcctgtgaactacctgtttaactcaactgcacaccagaacctttatttatttccaatgcagtggcgaagctcg

SEQ ID NO: 124949 - DNA, 482 bp, Zea Mays
cccaaactctaatacaattctaacacttcaggagcatcaacaaaaaaaccatgtggtgtcatgctagtcccaaagtttagtaaacagtactaggcaccaccttcttccccactaatgactacgccaagacgaagtaaccgagttgctggaatcggggttgaattcaacatgtaggatctgggtagcaggaccaccaaaaaagtcatgaggtctctatagatcatcacagaatcagaaggcattagtcacgaagctctagaggactatgtcagactttttaaacaacctttgttgcaatatcatatagaggctctttcagccctttttggctagagcactccaaccgacccagggtctcattagagacttgcctccttcctggtagttcctctgtttatgtttttttatggatccttcaaaaatcctcgtaaggaatgtaagagggctaaacttatctgttcgccaagattttgtgagagagc

SEQ ID NO: 124950 - DNA, 453 bp, Zea Mays
gtaaaaagaaagattgctgcttctggaaaggttgccgcttcggccatcacagctgagctgaagggcaagaagatgaaggttctgactcaccggccgtgttatattgaaccagtcgtgatacctgaatttggcgaaggggcctcttcagctgctaaaacaaaagaaactattccgtccgcgcaaagcactgaagaaccggttgtaatgccgaaggtgccttcagtcaagctagttgaaacgaaggttgataaggctgaagggccaaaagttgaagaaataataaaaatgccagagattttcagccctccaacagaggcaacagtaccaaaggtacaaatgggttctgccataactcctaagaggagaaggatggcaaatgtgttggatgttgtgttagaaacaacaaaaaccttgagtcctgctccttcaaggaaagttgccgaagcttccaag

SEQ ID NO: 124951 - DNA, 359 bp, Zea Mays
tttattgtcaattttctatttaggggtattttcatgagattttggtttaggctataggaacaccatatgcattgctttcctatatattcattgaagtacttgcatatgtcaatgttgatttggtgtcaggaaagctttatccgaggtacattggaccgtctactatcttagcccgagttggcagcttggctcatcacttgcaattgctagaatctatgataggagtacaccatatattctatgtctttatgattgagaaagtatttgcggaatccggatcatcaaatcgacctagagccgatccccgtgtagcaagacctgactctagagtgtcgtctgttgcgtatcttagaatcctc

SEQ ID NO: 124952 - DNA, 641 bp, Zea Mays
gggataaagattggctcctccgagtcgtcatgcgtgtcctccatagggtcatgcgtagctgtactcttggtatggcatatcgcctcgcacatttgtcatacaacatcctgtagctagtccatcgctaacaccttcataatagtgcgtggcgggtcccgcgggccagtcccacagagcggtcgtgcgtggcacgattctgcttgtcaccacaggcctacgtcacccctagcttgcttaggcgtacaccctgatatggtgtatttgttgcgttcttttgggcatgcgggtcattgtagagactctagcactgagactcctacgaacagggtagactgatcagatgagttagtgagggtatatccgtgggcacatgcgggggtgttacgtcgtgtctgacagagaccttttggtactatatgtacggttcaaacgtggtttggcgatgctgcatcttgtcgcgaccatcgggctacgtcttaccgcaaccatcatgggtcggcatcgtcgacttgggttccctccttgtggatcctctcgatggggatttggtcgttcgccacaccccatagacttgatcggcggggactcagtcgttcgccctgcctcttagacttgctcggcggtgatttggtcattttccc

SEQ ID NO: 124953 - DNA, 388 bp, Zea Mays
gttctgtcatgcctaccaaatttgtaagaagattcttctgatattcctagatccctggcacactattgtttattttagaaattttattgacacactgcctaacacagcaccaccctctgtcaaccaactaattcatggtgggatgacgatggtgtgaactgtaaagaggcaggtggctcaacttctcgatccagtggtgcgaagcctcaatcaacattgttcagggtgttgtcagccagattcggcattagcagtagcccacgactgttctagctgccccaaaaatatcagttggcatgagggaagatacaaacaacatctctggcctggttagctatgagtgtcccaaagtcatcatgtaggagagacaccatggattggatttgca

SEQ ID NO: 124954 - DNA, 521 bp, Zea Mays
gattgtccctagattatccatctggatcctttggcagtccactatcgtacagagattcgtcccattttccggtaggaaacaaccctggcctcctaaggccagacaattctcccgacgattctcccgtcctcatctcgtctctgtcatgccgcagctagcgccatccccatgcacgcctcctccgacaccatcctcgcgaccttcatctttgcgcgcctcctctgatgtcgtccccgtgagcttcttcgtcgtcgctccaccgtcttctccgacgccactcccttcccctcgttctgcgacgccactcccttcccctcggcaaggtcagttcctgtaggtcttgatcccgctctgcatcccaccttgctgcgccccttcccacctgtgtacctctagatcccgctctcgatccctaggtcactctagattaagctgtctgtatgttgtaaacgggagtcctgctaatttctctccccccatacgacccttattgacaacgcctatatttatctccatccaac

SEQ ID NO: 124955 - DNA, 509 bp, Zea Mays
agtctttactacgatgtaatctacgtacacttccaccttgtccctaatcaggtccccaaaagtcttactcatcgcccgcacaaatgtcggcaaggcgtttttcagaccgtaaggcattacgacatagcagtaaaacccatccactgttacaaaagcggtatgcttcctatcttccctagacatctggatttgatggaaactagagtaagcatctaagaaggacaagaggtcgcacccggaggtagaatccacgatttgatctatacgtggaagtggatacgggtccttgggacaagctttattaaggctggtgtagtcgatgcacatctgaagcttcccatttgcctttggaacgatgactggattggccagccacactgggtgatgaacctcttcgatgaagctggcgtccagcagctttcggaccttctttcggatgaagtcctaccgctcaacggactgtctccaaggcttctgactcaccggtttggtgttagggtggatcttca

SEQ ID NO: 124956 - DNA, 575 bp, Zea Mays
ttcctctcaagggatgtcttcacgcccccttcatcatgaagatgattgaagtggtgactcagtttcgctatgagaaaggcacaagacatctatcttacaccccttctggattgatccaaacaatccagcagggcgtctgaggaaagccccctctagctctcgtggacctgctacttctgaaccctcgcgtctatctccaggtcgtggatctcccacaccacgtggtcgtggtcgagatcgtggtcgcgggatgggtgctcctctggcccatggtattgcagcattcttttccatgtgcagaaatatatcttcagatgtgcatgagctggctcggcgacagcgggagactgacgacaatcttcgtcgtcaagcttcctctatgggtatgccatttgctccccattcgcctgatgtgcctcttcatcctcctccaccaaaaatcaatgagtggcaccagcaggcatatggggtgcctttcatgactctagaagatgaagaattctttgatgatcgtgagcagtttgccccgcctccccaccaaggggatccgggtcaatcctcttcttatcctccgc

SEQ ID NO: 124957 - DNA, 495 bp, Zea Mays
tgaattgcacagcgaaaaccaaaaaaagaaaaaaaaaaccttgtggaatgaactacgcgaaagtttcgacgagttggagcctgaccccaagtccccacatatcacatcatgattgagtcataagtgcatcctgaaaaccacttgtaagaaattatctaaacaccaaaaaaaacatggttattgttgttttaagtggatgaaaaacatataaaatattaaaccatactgcttacatcttcattgtctgagacttactacagctgcagagtgtcccttgtaaaatttggcgcatcttctgtttataagcatatttaatcggtgatgacatggatacgtattttatgtttttcccctccatgttcaacaaaatcccagagtgagcgatttatgtacaggtgatgccactgtctggattttttgtgagcaaactgttgaaattgccgtcccattatgccgctggactaattttagtggcctgttgccctggaggtgtgt

SEQ ID NO: 124958 - DNA, 575 bp, Zea Mays
gaccgggagcttcactagcagtaaggaatgctaaaacatgaacccgagaggcatgaactgacctgagaatggctggccacgacgcgatgcctcacagcggcgaccttgaccgatttgggtgaaattccaaattcttgggctattgtggatggattgaggtgagaagtggtgctctgagcgtgtaacaagagggtggaatagggagggcactcaatttatagaagccggtacgggtgttccgaattttggacgaaggcgagctcacgtcggtgaagaggtgagtcacgggagctcgtctatcgtgacgctcaatggggtaaggtctcggggaagtaaatggatgtcgaccacgacttactacaacgtggtacgatggcgtatggcgtggcacgaccggggtaaacggctggcatgacggcggtggtcgcgcggccatgtcgtcgggcaagtgggtacggcgagaccagctcgatccacaccccctcagatcttttcatcttcgtggtaacatctcacccgaatcgagcacaaatcactatgaccaaccttaatcaccgcgtggagatcgacgacgg

SEQ ID NO: 124959 - DNA, 591 bp, Zea Mays
gaaaaatctgtggcagaattgtcatggattatggggttcgaaaggctgatccgcaagggcttgcggacacctcagtgaaaattagagtgaggagcagctggtgatgggcacactagtggctaggaccctaatgcgtgaagagctaagggcgtcaccaactcatgttcgagtcctaggaaggtatgactcatggtttattgcaaagagaggtagcaaaccatcgggtccagtcaaacggagtcgtcaactatatcagtcggtgcctgggagtatgaggatgatccccaaatggacccccgcgcttggatcctacgaatgtaaccagggcctcactcggtttactcatttgcaactcaccgagtgccattggtagcccatcaaggaaagcatggttcggctccccttccctcatcaccgcagaagggatgcgcgggggagagtaaaacaaaaggacaggatgaccccgctagacggatctctacatcgagtagaggctcgaggcttgccccgcatgggtatggtgaatgggagaaagtcgcatgaatagcgcccctcggtctgagaatgatcctaggaccaacaagggcataa

SEQ ID NO: 124960 - DNA, 514 bp, Zea Mays
actaatttcttacaacacataatacaatgtgttgctacggatgtgttgctatatggggatttgtgttgtagtgttacgtctaaataggttagccaatcgaaccctattatcctccacagttaaacacgtacggctgttgtgaccatcaactatgccacatttctggcacttcttgctcatcttcttagctcctttcgcacccaatttaagaacttgttgctcactacttttgattgttcttcccttaggcttggccttatctggtcttgctaagtttacaccttccatatgaaactccagtttctacaaatcaaagatattaagtcagttttcatattcacatattcatcatatactgtagcaatgttattacctttctagcttccacatccgtagcaccactatcaaccagacgcatatcagtgttatgttccaatgttaatatcggcatattacattgatcatcgttagcattgcattcatttgtattagaccccattaaaatttcttgtga

SEQ ID NO: 124961 - DNA, 504 bp, Zea Mays
cgcagatgtccatacggcggcaattcgtcggagaaatccccaaccgagggccccatgaccaacctgggtgtttttgggtgcaaaagtatgccaacgcaatagcgaatttgttggagggtgactcaccgttaatcgcgacgtcactcggtttggccacgacgagcagcggacggagatcgccgacgagcaattccagacgcgccaccattccccctatccaaacaccacagcagaaaccatccggtggttcacgctaacaccgcggttactttgcacgctccgaacggcttttcaagccagttactcgcacggcgcccccacgctcccccctcactcttttgcaccggcgcctggttagcccctacccaaaccatggttcaggggatcgaggcagtgcatacgcatttatactctcgccacggggagtccattctggtggcgaacgacgggctaatcgttctgttgtcgtgaatcatgggggaaaggggagtacgctcgagtttg

SEQ ID NO: 124962 - DNA, 549 bp, Zea Mays
aataaatggattacccaactaaataaccgactttattaataactacaccaagttgcaggggatacccacaccttggtgacaatcattaaaaagatccaactttagtacatgtccatcataacaagcatccaacataaaataagcaaactaactctaactaagactgactagactaagacactgaactaagcattattacagactccgactctgtcgatctagggatccaaatctattcgggtcctgcagtctggggtaccatagtcgaagcgaccacagggcggtgaacggtaagggtgttgaatcccgacaggggcgggagatccaccatctagatagtggcatgctacgcacttagcacgcaattccgcaacctccgcccaaaccttgcccaactcgttgagggcgtggtccaactttgtgttgagcacagcagttaagtagaccatgctgttcagcctgggattgccctcaccaactggcgaggcaatcacacctccagcactgccggtcgaacgacgagggtagtacttcaggtcgaggccatca

SEQ ID NO: 124963 - DNA, 417 bp, Zea Mays
tcttgcttgcattgcatgtaagcatttctaaggccggccttgcgagagttgggcagctcgatcgcccatcgctagctacgagcagatcagcaggaatgcacgcatcactcggcatgtcaagctcaagcagcagcagcagcaggggttggtcgtcgtactcccccctgctcttcgccaccctgcttacactactactctgctcccagctcgccattgccaaggagcagtaccatgagttcgtggtaggcatgtcaagtcaaggacgtcgacgaccgatgcatttccacgtatgtataagtataactaggaagaatccatggccatgcactgcaggtgaaggaggcgactgtgacgcggctgtgcgggacgcagcagcagcggatcatgacggtgaacgggcagttccccggtccgacg

SEQ ID NO: 124964 - DNA, 307 bp, Zea Mays
ggtggatagtgctacgatggaagaacatgtagtgcatttgaaacaagtgttagatctgatcagtcagcaacaactttatttgagggagtccaaatgtgtgttcggtcaggaaaagttggaatttctgggtcatattgtaagtgcagcaggtatcactacagatcccaacaaaatcaaggtgatcagggaatggccaaatccggcttgtgtgaaggatgtccgtagctttttgggcatggcgggttactatagaaagtttgtgcctaactttagaatcattagtcatttgtggctctgaaaacaacac

SEQ ID NO: 124965 - DNA, 1997 bp, Zea Mays
aaaaaagtgtcatcacagcttatgctgccaaatgcctcatacaacttaaaaaaagtgtcatcacagcttatgctaccaaatgcctcatacagcttatgttacaatacatggtatgcactaaatgtgatactggcccctgttctcccacatctgatttgcccacacatccctgatagaagcccatgcattattgtcctccatggccactccatgaccattgtttccatggttgtttggctgccaggtagactctagaggtattacctcatcaacaccatgacttaggatccaattatgcaatatgcaacatgcaaggacaagttttacttgagtcttgaatgggtggaaaggtttattgtcaattattcgaaatctattcttcaaagccccaaatgctctctcaacagtcactcttaagcttgagtgcctaagattgaacaactcttttgcatttgtggggtggttcctaccaccatactcctttagatgatacctagtgctcctgtatgggggtaagaatcctgggcgacatgcatatccagcatcaactaggtagaattttcctagaaaaaagtatgaattagatgctattgtctgttctttaagtatgaattaattgatcctagtagtattgttaccttcaggaacttttaacccatcctgcctctcaagtgcatcagcaaggatagtggcatcatgtgcagacccctcccacccagctagtacatatgtgaacttcaaatcaaaatcaactgcagctaatacattctgtgtaggataatgcttcctccccctgaatgcagattgcatgctctctggaactctagcataaatgtgagttccatctattgccccaatgcagtcctatgtgttaacaaataaggtgagatcattgtatcatgaatgcatgcctatgtgttaacagaatcctaagaaattaccttaaaatatgggtaccatcttggactgtttctgattttaagtggggtttcaccagtgggtgccttaatcatgtcagcccttaattcaccaatggcatacaaaacttctttaaaatacctactaactgtctccacagacctcctccaactttggtgtatgaccctaaaacgctggttgtggccaactacatgaaggaacatggctacttgttcctccacactgctgtggatactatctctaagcaggctcctactcttaagcaactcacagagctggaaaaagggggttcttctcatgcgcaacatgttaacacactccacatcattgaagttgtaaattctattcaagttcctgtgcctctcttcatccattgcactcattggggcataagtgatcctaggtcgtgccatttgacactggacaagtctagaaacaaaatatgcatacacagcagcaacaagtccagctgccctcactattaacatgcgcctctcatcatcatcatccatctctagatgcaaaggaacagagccaagtatcacataacagctcaccagcagtaacatgatgcagtactagatcataggcatggcaacaaaataagctcagatctagggaccaaatcataggcatggcaacaataagctcagattaaatgctataaaatcacaggcatggcaacttaagctcagaccattcaagaaatgaagggggaaaggggaggggaaggaatggcgtctgttataccgaacaacaacaggaagaaggacgaagcaccgagaggaagcagctacaaggcgtgaggaagcagcaatccggatgccctgtcaagaaatcaaaaggggattagaaaccctaggtcgcgaaatagaacaaaaaacgaagctccaaacctacaaagcacgaatccaccacggatctgaacaaagaagaagaaatagggggaggatgggaggaactcggcaccagtcaccggcggcgacagcagagcagggcgcgcggaggaaggggaaggaggtggcggtatataacagcggtcacggcgggaaggaggg

SEQ ID NO: 124966 - DNA, 470 bp, Zea Mays
catgtgccatcaggcttgggggcaggatcatcgcgggggaagagggtggtcgaaatcagggtagtcaagttctcgatccatttgcgggctgcgcaattgagtccgtgggtgcagacgcagcgatcgggcgcgccggcggtgttgaacgcccctaccgggtgctcgctaggccgcagcgtgactcaaggaaggagacgcttcttagaccggtgatctggaaatggacggtgtagaatagatcatggcataccccttgcggcttggaggcttgaccgttggatccacatcgtgcgggcacggttagatctcgctttaattaaatcctcaccacagatctctgcaatcaatggcggatagcggcgtaccggttcaccaaagcgtcatctaatcgtggccatcggaatgagatccaatggccagaatccatccgtacctcttcggcggtgcatctttgcaaaagagacccctag

SEQ ID NO: 124967 - DNA, 374 bp, Zea Mays
gaatattgccacaacactgcctttcactcagctctccgcactacaccattccaagtggtctatggaaggccaccaccatccttactgtcgtatacgcaaggaacaacagccacagatgcagtagatgatctattaaaagacagagacatttttctctcggatgtttgagaaagattactgcaagcacaggcatatgcaaaacggcactatgatgaacaccatcgtgagctagaattccaggtgggtgactgggtatggctgcgacttctacacagccaggcacgagcactagttggcaacaagaagagcaaactgggtccaagatatgcaggtctgtttcaggtgctggaaagggtgggcacggtggcttatcg

SEQ ID NO: 124968 - DNA, 509 bp, Zea Mays
gggataccttcaatgtcaccatcagagatgctacctgggcggagtttgaaacggctttccgggagcaccatgtgccccaatggatcgttcagctaaaggaagatgaattccgagaactgactcaagatggaagatctgtcagtcagtacgtgcacaaattaacggagttggcccgctaagcgccggatgacgtcagcaccgaagtcaagaagatggcccgcttcttgaaggggctcagaccagaactcaagaccatcctagccagccaagacttccttagtttctcgcacctctccaacaaagccatgcaagtggaaagggcaaaagaagaagaaaaaggccatctcaagaggaaattccaagtcctccgagctcagcaacaagaccggcaccagaaaactcgatcctttggatttccacccaagggaccaagcttcagtagaccagctggacccaccccgtcacagttcagtcagtagagtcagagctcctttcatgccccctcagtt

SEQ ID NO: 124969 - DNA, 320 bp, Zea Mays
cgaagattaactcgcgcataccgtttcagaggtgcggtccggttcgtccgatccggatcgcgcggatgggaatagatccagggttaatccaatgtgaactgtcgatccattcacggacgatcgtgtttaggcgctagcttaccccttcgcccgataggataccagccgttcgattctgatcctttgcgggtgaaccaatggcgctgtgataaaatcatatccatccgatctagatccaatggcctctattcagtactggttaggagttatgaaaaatctaatctaaaccatcgggcgctgatccaacggctcagatggcc

SEQ ID NO: 124970 - DNA, 313 bp, Zea Mays
aacagcaccaacgtggagagcataggaggacttatttgtaaaatgtcataacaccgttggatataaaacggatcgactggatgcattttgcgcacgagaacacctgccttctttgcctatccatatttgatagagtaagccgctgcaggaaatttttactgcatatgtatgactcgatctgtgtagcgtctcatttaaggttcgccggtgcagatagccttagtctcatttaaggagtagtagcctgggaggacttggggagtagtacaagaagaaatcagtggcagggtttcaaagattgcctcgggatcgg

SEQ ID NO: 124971 - DNA, 430 bp, Zea Mays
cgcggcgggcaacggcgaaggcttgacgacggtgagccccttaatccacgggcggtgagcaaggggaaggaattacggctggccggggtggcatccagctcaccggcggcgaggatttttactgggctatgcttatctgatggccacggcgcacgaatcacggcgagccacaatcaatggcgatgggccaccggcgtcgagcagggggtgggatcggcatcttcttcagtttaatatttactgtaccatggcgatgatcattctgatgaattgacagagcaagtttaggtcacattttctcttaatttcaaatggcaacacatccagtgacctgcagcaaagttgtagagctatataccacctatatttcgactatagtgactgagctcatttgatcactagatcatggttgaattcacactcaaagctg

SEQ ID NO: 124972 - DNA, 868 bp, Zea Mays
ggtttatcagtacaagtatttataggccattagatgggccagattacaatcaaagaaaagccacacaatggcccagattaaacctaatgcttctagaaccacatagatctccagatctactgctacaccaaactcacctctgcttcggtcgttacattttcccccacaacagaactcgcttgtccccaagcgagggcatcaggaaacctgtttttgaccacataaaaatcttcccaagttgctgaagaaacaggcaaacctgaccatttaatcatcacttgaggtactgcatgattacccctccgaaccaaccttctgtccacaatttcctcaggccaaatccctggaccagacaaatctgccaccttgggaagctcagcaaaatctggagtatgtttagggtgaaatgcctttaactgggatacatgaaaaatagggtgtatctgtgcattttctggcaactccaatcgataagccacaacaccaattcttgccacaattttgaaaggatcaaagaacttaaaggataactttggatatggcatgttaacaactttcttttgagcataaggttgtaacttgagcagcacaaattctccaacctagaattccctaggagttcgccctctgtctgccatttgtttcattctattatgagcttgtgccaacctctctctgagcagttcagaggccacttgtctttcctgcaaccaggtagtaacatcatgtcccctttctctctcaaccaaggaacaaccatcacaggaggtgtataaccatacaaaattttaaagggagaacagtccagagcagtatggtaggtggtgttataccaaaactctgctaaagccaaccactgcctccattt

SEQ ID NO: 124973 - DNA, 587 bp, Zea Mays
tattagtagagagtatccaacattggcctcaaaacaggctacaccagatgaagtgtaggagttttataagcttcttcacgcgtcagaggaaaaagtgcatgacgacaccactgtgaccgtgttgcaggtggttacacgttttatggcaatgaaggcaaagtataacttctcgaataattgctataacaatataatcaatctgattattgatctcatcccatcgaaccataagatgccaaaagacttataccagtctaaaaagattgtgcccggcttgggatgaagtataagaagattgatgtgtgcgaagataattgcatgttgttttggaaggaatatgaagcggccaccaattgttagaaatgtggtaaatcaagatatccggaggtactaaaagaggatggagctacttttgctacaaaagtggcagttaaacagcttcaatatatgcccatcactccaaggcttaaacgtctgtttttaaccccagaaactgcgaagctaatgttgtggcataaggaaggagaacgtgagatccaagacctagacattatgatgcatccatcagatggcgatgcttggaaggc

SEQ ID NO: 124974 - DNA, 386 bp, Zea Mays
aaatgatatcccaataccaaatatgagtgatgttgtaccacgatttggtcgatcaaggaaaggtgggagaaataatattaccacagagcatttttatcgtgttgatactttctatgctgctatagattctatcactacagagtttgatcatcgctttaatgagctatctcaagagttgcttgtgtgtttttcttgtcttgacccaagggattcgttctctaagtttgatgtggataagcttgctcggctcgcggatatctattctgatgatttttttcttttgatgattgcaagactataaaagatcagctaagaacttttattattcatgtacgaagaattgaagagtttaaagcttgttgtgatcttgctagtctatcgaagac

SEQ ID NO: 124975 - DNA, 388 bp, Zea Mays
gtggaattggtcttgtcttgatcaaggaaagggagttgtcaccaagtcatcactcgtattgaggagattaaactatcagaggctatcaaggtagtgtcagaattctcagatgtgtttcccgaggagttaccaagtatgccacctgaaaggaaggttgaatttgccatagagcttataccaggcaccacccctatttccaagagagcctatcgagtgtccagactagagttggtggaactcaagaagcagattgatgagttgtcggagaagggctacatcagaccgagtacctcgccttgggcagccccagtgttttttgtggagaagaaggatggcacgaagaggatgtgcatcgattacagagccttgaatgaggttactatcaaga

SEQ ID NO: 124976 - DNA, 484 bp, Zea Mays
ggaaccagatgacaaaaattcagccgagcgcattgccagacagtcggcccactacacactcattggggagacattatacaggaggggtgcatcaggcgtcctcatgaagtgcatcctctcatctacaaggaagcgacttctggaagaggtccatgccgggcaatgtggaatacatgcggcatccaagacgttagtcgggaaggttttcaggtcaggattctattggccaacggcgaaaagtgatgcagccgacttagttcagaggtgcgaagcttgccagtacttgtcaaaacaacaacatttaccagcacagcaactgtagaccataccagtaacttggcccttcgcgtgctggggactggatatgattggacctttcaagaaagctcaaggaggatacactcatgtattggtagcaatcgacaaattcactaaatggatagagttcaagcccattgcctctttgacctcagctaaggccgtg

SEQ ID NO: 124977 - DNA, 812 bp, Zea Mays
ttcgatgtgtccaaagtcataaacatctccctctctgccctcttgacaaaaacttgagatgctatgaagtgttcttttgttcctggaactgcaccacactctttcaccaatgccatgacatctctaatggagcacccattgtcctcctttcttgccaaagactcaacggatgctgtgctcttctcacttgctgtcacaagtttgctcaattgatcttgcacccaatgtcctcccaatggcctaggctttttacccttgtcctttcgaccaatagaaacatgacgctttcctttagcagttgtaggggaaacctcttcacattcttcatagtcttcatccttgtcatcattggcctcatagtctccatccttgtcatcagtgttctcagtggtttcaccctccagaatttgtggtgtagtaccacttgatggagaccaatgatcatctcctgtgttcctaatgtcttcatacatgatggctttttcttcctcatgcaacagaggcccatctttaaacttggcaattcctttgtattgctacacattaggagaaagaagatgttagacatataacatgtaacacaagatgcaataaagacaattatccaaagttctattaccttattcaagttcttccacctttcatttgtcgcactccaggtttttttcgcggtgtcccatcccaaaccagtttccttcgatagtcttttctaatttgtgtattcaatcctcatcttgtcccatttgttcttgaactgcattttggtgtaggataacccagtcttttctttgaatttgtccatcacatttttg

SEQ ID NO: 124978 - DNA, 1130 bp, Zea Mays
gtttccactagttagtagtttccatgagtcgtatatattagtaattgattgagatttgtggcaaaattttggagtcttaaacttttgaaggcaaatgttgaaaggcatcgaaatctattatgtattaaggatataaacacaggttatgtgcaaatttgcattttttaagcatagacagcaggtggtctgccattttcatttagtaggaagcaaagcacaattttacatgatgaatgaaacatgaaaagaagaaaaagagctacaacagaggtaacaccttctacttgcagcgtttctgcctatgtaggctgcttcatcgatagctagtcttcttgaatggcctccagcagttgtgtcttttgccttgtatccgaagactcgccagcatctttctttccataaattccaggctgaatacactacaattacagccccccctgtgcatcttgagtgtttccatggggttatgtttgagttatttcggtccaccattttttgatgtttctctttgtgtgattcatttctagtccttgtagagcagtccaagtttccaccagcctccagagttgtttcaactatgtatggacacgtgcctgcaataacataatctgcgaattgagtttccctggtctctctatctgatggtaagcggctagtaccttgtagtgggcaacctggctgactagccactgccgtctgttggcttagagcctgggcacgggtgcctgccggatatggccacgccatggaggagatggacgacaaccgtcagacagataacgacaactaacggtaagcgcgggcgccagacatcaggccactagggttaggacacatacaaggatgagataggtgtcgtggtgtgtgctgatgtggctgatgcgtgatgggttgcggatgaaggtatttgggctggtctgaagatctgcttctacaaattttagccgaagaccagggctgcaacccctcctctggatccaccactagggatgaaaacagtttcggaattttttgtaattccgttaaccgtcttcgattttttcgatcggattcaccggcaacagtatttttcgaaaatgcaattggtatcagaatcttttatcgcaaacagaatcaaaatcagtatgaca

SEQ ID NO: 124979 - DNA, 585 bp, Zea Mays
tagaaatggcccaagtgcacatttccctttcaggatccatacttggaacactttgagtattccaatttatttccccgcattccttttggtacttaaagcctccccctaatgttgggaaatgttcctcatcaaaaatagaattagtaaaccgggttgtaaatagatcccttgtcaagggttctaagtacttaattatcgacgaagattgaaatcccacatagatccccactttcctgtgtggacccatggctgttctctgaggcggtgagattggaatgtatacacaacatccaaatttacgtaaataggaaatacttggatgatttccacgtaccatttgtattggggaagtagaatgacatgcagtaggtcgtagttgtataaggtcggcagcgtgtagaactacatgagcccaacacgacgaagacaatttgcaattcatcaataatggtcttgcaatgagtttaatcctcttgattagtaacctagcaaaaccattctaggtgtggacatatggtaccgagtgctgtacttgaatatccagcgccatacaataatcattgaatgcctgagatgtaaatttag

SEQ ID NO: 124980 - DNA, 1607 bp, Zea Mays
ctaaaatgctatgtgatgaaataaaggtctaaaataattgaaatgtattgtttggggtctgttgcttaggttagagttctaactaatttgtagaagtaaatatgctagtaacaataattgttatcaatgcaaacaaaacaagatatattggttggggatggaaagagtagattgtagtggaaggaggtcaaagggtgagggacgagtgctcgtaggtgacacatggtgcccgtgcggtgggatgttgggcagtagcgatgatgcaccaccatggctaagaggtggttttgtccacaatgaggtggaggaactagagtagcaatctaagtagaagtgttcttgtggatccactggcattactgaggcgttgatgatagtttatgggataccaacttcaagtagtagcatatatgtagtaggtggaggtcaattgaagttatgtatctacgatcctcatagagaaggatgtagtatggtatcccgcggcatacaagggtggtgcttgcaagtggagttgtagtgaggtcaaacaacttgttgaagacgatgttgaatttggatctaggtcgaccggctatcgtcttgctgggttgcttggcgggcaggttggtcggtagcctcgcctcgctgtgttgcttggtgggcaggatgatgatagtttatgagataccaacttcaagtagtagcatctatgtagtaggtggaggtcaattgaagttctgtatctacgatcctcgtagagaaggatgaagtatggtatcccacgacatataagggtggtgcttgcaagtggagctgtagtgaggtcaaacaacctgttgaagacgatgttgaatttggatctaggtcgaccggttgttgtcttgttgagttgcttggtgggtaggtaggtcagcagccttgcctcgctgggttgcttggcgggcaggttggtcggcggcctcgcctcgctgggttgttcggcgggtagcctcgcctcgcctcgctgggttgtttggtcggcaaccccaagaatgaggccctttttttggactaaacattcggttgattcgatccacattcgttgtcaaacaatgtttcaaatcagatgtaagaataggcactattatttggtttttctaagtacaagagaagcttgaatgccgaaaggggtaaaaagaattaacatgcataaaaagaaatcgatggatgagaactgattcttccttcgcaacacgtattacccaagaccgtgttcataagtgcagttctgaccaggctgggccttggatggcgctggaaactaggttttacgggggccgaccttatcgtactgggatttggacaaatgtaacctcgttatgcgggaagagttcattctcatgctacctttcggacgtaaggtttggggtcgacctaaaccgcccgagctctgccgcgcatctgacttcgaggggtgagcagtgcctggttgaggctgttggctgctaccctgaacaccatgagcttgtggccgacggcttgggtctggggaacactggcatggagagcttccatgggccctcctcaccgcggctggctacctcatgcatgatgaggttgtcgaaggcgcaactcattaatggctt

SEQ ID NO: 124981 - DNA, 890 bp, Zea Mays
ctttagcaaatttgacacggcgaaggggtatcggggtacaggagccgccagatctaaaatcgtcggtccagattagaccgagacactcatgaaccagggttcattcccacacgtcggattcgaagcctacgcttcacattcaccaagcccgcgatctaacagccaccctttgatctaacaccaacggcgcggatcgcgctggcgaagaggtaagtcacttttgatcctggccatcaaaattcaaatctacggccagcacatcgtcttcaatcccccgactacctctctctctcctctattttttttccacggctgttcttcctaacacccgcgcgcaccgagcggcgaatgctccccactccgagtgccttccaccccgcacgtcgccggtgaggcccagaccccgcgcacgcgctctaccctgccccaacgggttgtccaggaatgcatggccctacgataacacgggaaaggagcttgctcaccgggttctagcgcgacgggagaagcggcttgcccacagttgaccggcgactcggccgaggtagggacgccggcgacgacaccagatggtccagggagtccgcgccttggttcgccacgtcccggtgatgccacacgaccccacgaaccgaaggtgagccgatgcccacgatcggcgatgcccccacggtggcgctcggttcctctcccttagccatctctgaaccctctcttgtgcggcacgacttcgctggtagatgcgcaggtgcggcgtccgattttataaaggacaagctgagcggactcggcggaaatcccgcgcgcggagaacggcggatctgttcgcccaggccccaggtctacgttgcggagtccgctcggggtgcacgcgaggaagacgccagaag

SEQ ID NO: 124982 - DNA, 554 bp, Zea Mays
attatcagcatagctcttttgtctggtttgagctaccctcaaattctctcgaattatacggacttgttcttctgcctcttgaatcagttcaggcccaaagaactgtctttctccagtctgatcccaatatagaggagtcctgcacttcctaccatataaagcttcaaaaggtgacatcttcagaccggcctgataactattattatatgagaaatcagcatatggtagacttttatcccaacttcctccatgctgaagtgcacaagccctcaacatgtcttccaacacctgattagttctttcagtctgagggtgataagttgtactaaagttcaactttgtattcatattctcatgaaagcttctccagaatcttgagataaactgtgaacctcaatcagacacaatcttctttggtactccatgtaaacacacaatccgagccatatataactctgctagttgagaacctttataagtagtcttgaccggaatgaagtgggctactttggtcagtctatccacaatcacccatatagagtcatatcctttct

SEQ ID NO: 124983 - DNA, 369 bp, Zea Mays
tcgatggatccctctgcctggcccccgtccccaccccccgcaacatttgctgaacggaaattcaaaagccacttccttttccaccttctgcaaatcatatcatcaacgaacaagacaaaacaaaggacactggtggacgcaaagttttaccaggattcgggtacactacaggtgacgacgtcaatacctgcgccggaccggagcggcgaaaagtaaaaagaacccaagcgcaccaccacagacggcctcttctcgcgtctcgtacagtacataactgggacatcaaactcccaaaacacgccccccaacccaaattgaccgcattcctggcctgtccctgcccttctccttgcactaatccacttcccc

SEQ ID NO: 124984 - DNA, 1294 bp, Zea Mays
cgaagctctctgcagtgcacggatggatcagctctctcctgtcctaatgacagacacgtagcaggtagcaaccgagctatcgtagctttcaagcagacgtcgttctaaatagagacagttggggggggttatgttattacaattattccggatcggactctgcttgtttaacgatacgatcagtgagtgcggttagatagagacgagacgtcgctgctctcccttttgcgcttcttttcggctacaataacaaggcaacgtattatatacgtactgtacgcagaaggcaagagtgagtttttctattcttctccggaaacagtcttgcattggaccatgtgacgtttccactgattatcgtgcagtgcagtgcagtgcatgcatgttccatcaggcatgaatgaatgactgactgactacattctgattgccttgctagctaccaccaatgcaaaagaagaagacagcagcttttctcggatcacccatatgcatgcatggctctggtactatgttattattactgggctccccgttttttttcttcttctaatgatgatggaaaattagggtgtagctatcttgttgggtgcttaattaggcaaagaggagcatggagtactagattccatggcgcaccagctagcgtcaaatccaggccccatggatatgtcgtcgtcgatgcttttccgtgttgccgcgtgacgatcgccaacaagtcccaggagccggttcggttccagggacagctgtcgtcccagtagaggaggggactcaagagagagtgaaatattcacctcagtctagagcagtagagcctttttgtcacaatgtcacccacctgatcttcacttgtgacaaaatccacgctgattaggctatattggctacagattcatgaacaaagtgatgcttcacctcgatatactcgctctgcccatgaaatactggggtcttcttcaacattgattgacgtgtctctctccttatacctgagatagccatattgcttgacatttgtagcagtgatatatctaccacctttttgtttcatggattggaacgtaactggaatattggccattattccagatgtgcttttcccaccatcaacatcttcagcgaaccacaccagtgttgttgggatcctctactaacatctacgcctggcccccttcttccttccaaaccaccaaatagcaaagaattcctccccaaaaaaacaaatgcaagatcggaacgaatcagcctgaaagcataagcatacattgaggctgacccgtcgtgacgcaga

SEQ ID NO: 124985 - DNA, 1128 bp, Zea Mays
ggcatctcacattctatgcctcttttctttgctatatgtgaaggtaggactcactaataccatagacgagttagatcgatagaaaatgttaagctctcttattattggggttcctaatgctctagatctaccgcaactgatggatttgatttaaacattagatatatcgacaattaaggagatctatgataatggttgatggaacaagcatatcttgattttagacgatcgagggagtaaaattcggtgccctaaagctcagattgatggtgcatgtaaaaatactaggccgggaggctcccaaacccctttctggttcagtatatgaagtatttttactcctataagttcagatgtgaagtattactaagcaaatcattcacactttatggtgatctgttagactgttactctataccatgacatggtaatatggttgatactttttgtttcttatatgtcacttctgagtatatgttgttgaaaccttactgttcatgctcttgttagtttccttactttaaccctccttttttatacgtatgtttggctattacactgttcaggtgaatttcaatggatagctttttttcttctagaatatgcacgacagcgtattcagtatctttttcggctacatatatgtgttacatgctcgtacctttgccttcttatagggcaaagaaagatgtctcactgaactgagaaatgagcttaaaatattggagactgaacatgcagaatgtcttgtgaaggcgagatcaaataagcaaatcaagtctttcaggtgaaatatttagtgattagtattggttctcacagtaaaacatatatgatcaaagacttctctgttccacaactccagatttctatgatttttttttcaattttgatgctatttgttggcatgtcgtacttttcatgtttctgtgtggcctagatatctattttcatgttcttgtttctttgtattacctaaacaaactctcctaaatattgaacatcgtcgtactagatatattacaaaataatttacgtgaactgatgtatttcttgtcacagtgtcggcttgcactccaaaggaaacacttgcaatactgaagttataaaaggatttttcagatcttg

SEQ ID NO: 124986 - DNA, 388 bp, Zea Mays
agggaacaacatatacgtgatgttgcaatggttcgtctgatatgatctttacgtgcgcataggagttgacatgttttgctagaagccgctgtcaattattgggccgagtaagagtactcagccatgtctaatttgtacgtgaatctatagggtcacacataaggggaaggaaacctaactcggattagatccgaaattagtctgggctttagggttactggtgggcctcggagtcagaagccaccataacgcctatataatgagggccaggggcgcggttaggctaaccctaattcacaaccagcaaacgagcaatcgctcgcctctcgccctcgcatagccgccatcacgaacctagcagttcggtacgcggcgcttcctccctgta

SEQ ID NO: 124987 - DNA, 317 bp, Zea Mays
acaaagcagaagttccataggtatgctgctaagcttcggtcccaagccgtattcaggactggactctagttttgcaggccccttagacaatcgaagctacctcacaggggatcaaggtacctagggccagtctacataaacctgatttctggcaccatctgtcgtccaaccgggtaggggccacccttgtaaaccctgtgtctagtggttttcgtgcaagaccttacacatccagaaatgaagaaaggtttttcccttggtacgatccttacgtatcggctctatcatttttaacctacgcatgtttctctttctac

SEQ ID NO: 124988 - DNA, 342 bp, Zea Mays
cgagggcaatgcaggctctgtcccctttgctgaagcacccaagggcgacgatcgtcaaagtggaaggtctggtgctagcggccgctgggctgctgcttctccagctcttcttgggcttctacaggcggcgctggcgtagctccgtcctcagcactgtcctgcgggcgtcttccaaactcatggaggcgctcatcatctacacccttggtgcgatgcagtcctccccgatcaagaactcgtcgtatcccgtctgggctgcttttctcgtcatggcttcggcgggcaccaccgccgtacaggactatgatttctgtggcagcttctacaacaagtacatggagg

SEQ ID NO: 124989 - DNA, 421 bp, Zea Mays
cgacccttttctgtactaatctcaatgcggcaaccatatatatatatataaccgtactgtcaatggcaactgagccagtatccaagccagaaattttaggaaataaaacattcttgtagatgagtcaaggcagatcgtcccaagtagtagtcgaaagagattcacggctggtggaatggaaggcaaggcacttttattattgtctttcaaacaattagctgccagaccagacaaggaaatgcagcataccaactaagctcttgtgaagttgtgatcaaccccctactacatttccctatccaaggtctaatgctaagtaaaccatccgccatgcattgtccctacctagtgaacattcctttatgatgacctttgctgcgtcatgattacagcaagaatttgataggtaacattgcacgcg

SEQ ID NO: 124990 - DNA, 428 bp, Zea Mays
gagggagcttcagccacgaaagttgagttatattgatattgggaagtccatagctaaaagtggccatcttaaggttttcaaagacttgataactttgatgatttgaagatggtgatgctatgtggggaagatatgatgccttaaccccaataagatgaatttgttgtctttaagagctttttctatgttggcctccattttctagtgcatcctatgattgttgtagtactaaagaagtataaagtgtttttccatcagctaacgccaagtgtgattttgaggttaggtgtatttatttgggtagtctaaagtcaaatggttgaagcgagtgtcgagtgcagttgtaggattcatgagctccattatcagacaaaggtctatggaaaagaaggtttacatagtaactttggatgctacaacttctagta

SEQ ID NO: 124991 - DNA, 403 bp, Zea Mays
ccgaggctgaacattagcgggagcggggcaagggttcatgtatatatggaagtcggagctgctcttggcttgaactcagcaacgatgacattttgcgacctttcacctcggacggtttgttttcatttggatcatctggaagtggccatagaaaatagttgctgacattttgcgacctttcacctcggacgatctgttttcatttggatcatctggaagtggccatagaaaatcagagctgctggttgctttgcaatcatgcttggcaacaatgacttatgacagtttatgtgctcttccgcaccgtgttgatgggttagcccttagtgtgtgctttgtttgctccatatagggctaacttcttgtatttgttaggttttaggcccagttttttttaaaacat

SEQ ID NO: 124992 - DNA, 380 bp, Zea Mays
gctcaccggagttagccactttgcgaccttgcgccacgtgccttggtgctttaaccatgccgcagtgagtcatcttagcccactcgatcgtcgccggtcaggccgccacagttaatgccaccaatcgcttgcgccagagcacccccttctctcccgccgccgcgcgtctttccccgaattagttgccaccgctcatggatcctataaattgagcctgtcatcggttccgcaaggtagtgcaacatccaatccaccagctcgtgcctctaattactcaccagagagccccaatttgggatttcccccaaacggtccgaaacaccgcacatagtgacctcaccgtggctagcttgttccaggtccgttcatgctctttgccc

SEQ ID NO: 124993 - DNA, 358 bp, Zea Mays
ggtgaagaatagtttggattaaaaggttggattaccaaccttgttctcttttcaggtccctgagttgatctttcacccgcatatccctttgactttccgtgtcccgcatttttggcttcaaccgctagtgttgtactgacatccctgttgtatgtgaggtccaaacacgttgccatcttatgctggagtctgtcatttagtcccctcataaaacaattcttctttttcaagtccgtatccacgtgatcaatggcgtactgggagagatgattcaatttattgagatactgcatcacataatctcccccttgcttcagtcggatgaactcttccagtttcatttgtagcacgccttcca

SEQ ID NO: 124994 - DNA, 807 bp, Zea Mays
aaagactcccctccatccgcggatcctctcggggcgtgatcaccgtgcgctgactataaagtcctggggcccccacctcctgttgccctcgaaccacaatcatcggatcatagggaagcctcagactgcaagaaattcctcaccggaatcaggactccgccgctgagccgcgtcacatcgtgggcaccccaaatcccaacacctccgtcggtaaatccaccatccccaagtttggcctgacctccacattgcgtagcacgtttctgggggaagaaatagtcacctttgggaccatggcgcgttagccggtgggtcccccgacgtgtgagcaggcagcgccgcccctgaccgtcccgtcttgggggggttggttcgggtgccgtcgatgtggtgatgggtggcgtggattaacggctggcataccggttggcaagagttgatcgggatcgtcgatctcggtctgaacgactgtgatcagacctcagtcctggtggctcgatctaggatctgtgccgtcgatctggcggttgacggttgtgatcagatcaagcacgtaccggttcaggatttttgaatctggtacatagtttcacagacgagcgcgctagatgagatcgtggcgtggcgagttctcagctattgacctcggttccagaggctaggaagacctaccagctcggtataagtaaaatgtaatcgtggcccttggcttttgatcggacggttgtggtcgtcccgtaccccttcacctagacgttttagcatatgagcccctcggtaatttcaaaatgaacccgtcatccacag

SEQ ID NO: 124995 - DNA, 1065 bp, Zea Mays
ggccgcttcttccctcgcggcccatctccctggactccgcgcagcccaactggtggaatctgtgcgtgcctgttaaaccctcgtgagtcgctgacatgtgggccgacatgtcaggctatgatttcggtcaccgccgtgtggggccgcgctgcctggtgctttccccttcccccgctcgctcggctttgacccaatctcaacagctcacgcctaaaatcgccgataatctcgccggattgttgcgtcaactcggcatcttccaccgtgcctggcgtgtataaatggaccccccacctcggcggcaatcaccatccccactatccgagcacccaacatcaactcgagcgcggaaaaccaaagaaataggcaccgggccgccgccggcgtgcaggcgatttgacatcccctgggcctcggcgtgttgctcgggcgcttctctcggtcgtgggggaactagtcgtgacttcacggaaggaagggaccgctcgattgatggtaattcctcaccggaaatgcagcactgccactgatccgccatagcgtgtggatagcctcgtcctcgccctagtgcagggtatgaaacctcccttgatgatcgtcgtggtccgctcttcgaatatctagcaacaattcgcgagtttggggtgctctgggggctgcgcagggcctttgccggacatggcgccgtcgggggatggccctgtgtcgctgtgtcggccacctggggagggagatgatacgtaagtcgtggggtggtaaacggacggctgggattcggtcgaggatgtagttcggccgtatccgatatctgccgttggatcggcaatggatgggcgaggggtcacagaccggtgatccatccgtgaacggtcgagattaaaacgtcgacaccgtttcgggtagatcgcttccacacggttgatcttcacgtctagggtcgggatcgggtccatgttactttgaatcgccaccctcggttctgtatctatgggttcatataagcatactacggtgatctaatcggggtcgttcaattctgatctggcggctgagattgaagcatac

SEQ ID NO: 124996 - DNA, 1262 bp, Zea Mays
gcttctatggatgttcatgtcggatcaccaccagtttagtctgaggagccagtgttgatgagtcttcctactgctcttgttggtccgatcactttagaggtcagtgacctgggcgctaggaattcgctgcactctgtcggagctgaggtttcactgagtgctgccttgggcgctagctctaatcctcctttggggctcgattctgctctcaatattgcttttgctagtaccccaccgtctgatagcacattcgtgcctccgactttgggatttcctttgttcctttctaacctttaggtgagctaacttttgccctactttaattgtgttgacaaatagattcctttgataattcttgtatttgcagaatgttctgagctctatgtcgattcagttgaggtcttgcggtgcccctgttcccgatcaggttttgtccttgctgcagtggaatcctctcctgcttcagaagcaaatagatgatctaaaagcctcgaacatcggttagtgggttgatagctttcttccctgctcgttgcttctctcgttttatgctctttcctttttgcctttccagctctggctcggcggtgctccgacgctgaggaggcatatgctcagattcaagctgcttgaaccaggtttctgtgttcttggatggtgcccgaaccctgaactcttccttgaacgctcagcttgattcagagaagagagcccatgaggtagatttttttgaatgttcctaatgcctttgtttcgcgcctttacttcgatgtttagtactcttcttgcctgtaggaggagatgcgaagacttcttgattctcgtgacagtctagataaactgtactgtgatgctagcagttcccttactactttggataggagtcatcgctttactatgtcagagcttgaccatcatagggatgagctgagggtttcctagactgaagtgtcgtggcttaataagttactgtcttcaaaaaattctatcctcaaagagttgtgtgcctcaaagaaacttgtttagcaggagttggaaattgctcatcgtgacattaaggtcttagaggataaccatggtatcatgaaagcaatgtgtgataaagcgatggacaaagttgttcgtgttggtcgaatcttgatgaaaagacttggtgttgtggtgcctaaggacattgttgctgaggttcttgctgcgtccgctagtgtgagtaaacctccttcctctggtgatcctgctggaaaggcccccatcgaaaatgc

SEQ ID NO: 124997 - DNA, 446 bp, Zea Mays
tgggatgggagctgggcagatgggttagataaaacacgatcagaaattgtagggtgagaccgtggaacagtagggaaatgctatcatagaggcatatcttgagagggtagttttcctttatagctaatcatgcatgggtgcaggccaacaggccgagtttatgggggcagaccctaccgggttggcatacccgtgtgcactacctagttacaaaaagggaaaaacttcgacccctcagacttgctctatagataaaacttgcagggatatttcgacactgggggaggcattccttcggtcgtagctagacagttgcccttgggtcggggtactcccattaccatgaagggtccttcccaattgggggagtgttacggagcccaaatctggtctggtacctttgtagggttaggtcccgaccctgggttcccatctgcatttgatga

SEQ ID NO: 124998 - DNA, 423 bp, Zea Mays
tgaatctggtgtctgctcactggtgctcctctctacgttcgattctcgggctgcttatgtgttgtccactcgctggtgctcctttccggtgtctcttggtttgttttctctttatgttgtgtgttttttgtccgggcttcagttgtcgcctgtcgtccatcttcacattctggtcctactctccaacctctaggctccagcggctggcctgcttggacatctatactcatcctcaattcctccctcgccctccttcctatcctatctagttgtccatgtctaccagaatcctagtccctaatcctcaactccttgcgaacgtctctagtgccctggctgcgaaaggttcgtctaatcgatccatattcctctaattttctctagatttatgtttaattgcattattggtggcttgcaattatt

SEQ ID NO: 124999 - DNA, 613 bp, Zea Mays
tgcaaactgcaaaccttatttagtgactgattttttgatatattaaatttcccagctgttgcaactttgtgaggctgaaagtgtctcttacttagatgaagttgccactaatccaaataacatgcggctagggcaaaccttggctctagaggtcagtatacacttcaggagctacatagtatcaccttacttgaattgtagtatatacttttatctgatatgctacctgcatcaaatgtgctgaaagcataggtaaaaacacacaatggcttgcacatactctgttttggaggccaaattccgttgtttgtattctgatgaacagtagcaggccaacggaaattaatacatatttagccaataaaataagaagttggtcctattagaagaggcccagctgccatgtcaattttggatctgcccttgctgggcagtttgggacatgctttactatttgaagtacattttggaaagtatatattgcaatttaaagtgcaactgctaattgcaatatttatttggtctcataaatactatttaaaaaggaatattgttagttaaagggactactgatgcacgactacaaatgtcaatgtggtcatttcagattgga

SEQ ID NO: 125000 - DNA, 652 bp, Zea Mays
caggtgatagtccatccatcaatgtaacactcatgtgtttctttttggagctgagcatccttgtgatgtttcctttttggaaaacctggcaattcatcgtctgacagtgcatctgctattagttgttcttggggagaccattgactttttatactagaaaataaaatctggttcttctgttttgtagtttcactttcgtttgtactgatctagcgacaaggaattccatagtactcaacaacaacatgttccaagatcatttgtctgttggtgtgcatccttttgtgtctgttcattagttgtttcacttctagtgacgtttcgacttgccaacacttgttggtatgaggaggtgagttgagatgctttctgtattatcagagcttgtgcatgtaacaacttctctaagtcaactattgagggtgatgttgtggttgatgtcatatggttattggtagtctgctcatgtgctataatttctgctaaatcaacttgttggagtctagctaccacttgagatgttgcttgcagaaactgagcatgtgccttcttgaactgttccatttgatccttagctggaggagttaccaacacaatgtattctttgcacttagtgacatcatttgtagttgacattccaaggtctgacatc

SEQ ID NO: 125001 - DNA, 344 bp, Zea Mays
atgacgtccggggtgtccaaggcgacgatgccaggtagtagaagatgtggtggtggcaaaaacagcagcagtgtcaggcgacgaggacgaagaagaggtggcatgcgggagccgaagggtgtagagggggccggtgctgtcacatctgaggagggggcaccgagttgccgagtccttcacagtaagaccagaagagtcaaactcgacagaacaagaattatcagcggtaaaacggcgaatagaaagaagattgtggaccaaagaaggagcgacaagaacatcgggaatgcgaaaagagccgagagggccagcggcacccacagatgtgacaggaagacacgagc

SEQ ID NO: 125002 - DNA, 408 bp, Zea Mays
cagaaagctttaactaagctgcttgggttacaatataaaatccaatacaaacaaggcagcgagaaccgggttgctgatgccctgtccagaagacccaatatggatcaagatacggtcactgcacaactgaatacaacatcagtatctactattacacctgattggttgctgcaggttactcaaggttatgaccaagacccggtagcccagaaaatattaactcagctagctgttggtgggcaattggcacattatacgatcactcaaggtgttattcggttcaaaggaaggatttggctgggcagtaaccaagagatgcatcagaaggtgatgtcggcattacacgatagcgcagttggaggtcattctggatttccggttacctacagaaggattaaatctcatttt

SEQ ID NO: 125003 - DNA, 390 bp, Zea Mays
agggagtgtggaggcatgtcgtaaagtgccaaatcatgtgaaggacctaatgtctcaaaaagtaacggatgggagaattaggagggcacgtggtaagaagcttcgtttgtttgttgaaaaggaggttagtgcaataagacatggttatcaaagtgcaagaattccttttgatgaagaagcacagattgatatggcaatgagaaattcattgagggattctttttccacattggaacatgatagttgttcaccttttgataagtcaactggtagtgcaagtggagctgcaagttgttctacagggaagcaaagtaggctgtcaaggtactacaagaatacacaagatacctctagaggtccttttgacattgacttggcacgcagtaggac

SEQ ID NO: 125004 - DNA, 395 bp, Zea Mays
gtgaatagaccctaaggctaccagttctcgaacgaagtggagatcaatcccaatgtgtttggtgcactgttgctgcacgtgatcggaagacatgtaatttgtgctaatattattatcacaatagaccaacgtggcaaagcacaatggagttgcagctcagctaggagctggcataaccaggaagcctcgacgattgcattggcaacgacacgttactctgcttctgcactggaatgagatatggtgttctgacgtttggatgaccaagaaatcaagttatcaccgaggaacacaacatagcctgaagaggacagccaatcagcatctaagtagaacacgaggttagactgactagaagaacatatgtgaagacccaagttcaaagtgccatgaac

SEQ ID NO: 125005 - DNA, 775 bp, Zea Mays
acaaattcagagtctgaatttgtgtgttttgggtaactttggaattcttttgtgcttgatatatggagtattagccataatctctgtatcaaagttgaagagcatataacaatgaacaagttcctttagaagaggttggcttgatgctacattaaaagaggagtaatggttgcttgaagatgggctgtcagggtgtgttcttatctgatttttgttcagaccaatgtaactctgacagtagaatgtggttcactttggagccctactgttactgatccatagtgttttgggccaaagtgtttatactaaattggtagaccatagaaaggaaagaaaggttgttgtggagtgtgaggcctggtactatgcaaaatagtgagtaaaatgttcttaaactagctctgtcaggttgtagtgagtggtgtcagtttcaactaactgaatttgggttcagtgtaatgtgctccacttttgggcaccataactttgaatatatgcatttttggcctgggaattctatagcaacgtgaaagagctatgcttggtgaaccactttgatgtagtgaggtaggtctgtccttatgtagaaatgggagaaaaggggaggtgaatttggttctgtagtcgaactgaagaagttcagagcagtccaaaatatctgaaaatatctcagtccactagtttatctagggagttctagggtgtggcatacaaaaaggagtttgtgtgaagagggaagtagcatggcaccagtcgataatacccacgatgagat

SEQ ID NO: 125006 - DNA, 2476 bp, Zea Mays
ggattagatttcgagcaggtattgcctccaagcaaggtccggcgccgcgcgcgagatttggattttaatagtaggaatcacgcgaatgctcctatacctattggagcgccgagtgcctcggtgttgcgatcatttggtgggcgaggaactgtgtatatgtgtgcgttaagccattaacatctttgctctgaatccttgcactgtccactcatcgtcggtgctctgattgagtgacactgctatccaaattactccaggtgggagatgggaatattctcttgatcgttgcatagctttggtattatggtttagatctaagcatgagggctgcgtacctggtaccatgctatatgtagacttacagtaatgacatatgttgcaatacactgctatccaaattactccaggtgggaaatgggaatattctcttgatcgtgcgcatagcttttgtattatggtatagatctaagcttgaggctctgtgcctggtaccatcctatatgtagactcacaggaatgacatatgttgcaattaaaggacaaatctagttggtattatggtatagatctaagcatgagggctttgtacctggtaccatcctatatgtagacttacatgaatgatatatgttgcaattaaaggacagatctagtgtcggtggctcacatatgagcgaaatccgatgaagtgttggtattatggtatagatctatgcatgagggctctgtaccttgtaccatcctatatgtagacttacatgaatgacatggtccagagaaagggttcgtgtgcacctctaataggcgtcggactctaacagacagagtgttggaccggcacagagttagccctatggctaaccctaacttcacgatcacagcgatcgtcacatcctgagcattggttcgatgatggacgtcagaccagtccgactctccccatagctctttggttgtttttgggagagcgttggactctgatgcgatggtacgatggttgcaaacacggttgtactggacgggacgatgcactatttacatgagtggtcccactgttagccacgtaggaaacttcatttagtatcgtcgaaccctgagcattggcccgacaaggaccgtcggaccagtctgatgctgatggatactctttggtcatttacagcagggcgtcagacccaggccaacgatgatctaactatcgttggactatgggtgtcgaaccatacaactccatagtggttggcacggcaacaataacattgaaatggctagtacatgtggcaagctctaagagcatcggaccggtgcgacatggtccgacggtgggtgttgaatggcccgacgaccctaatttctacatagtgaaggtaccaacggccagttgccttttgggaccttataaatagagcttggttaggcttggggttaacatcttggctttccaacttgaggtacacctagtaatcctaaaaaacatctcactctcatctctagtgatattgattcgttcaaagtgagattgagagtgatctctagtgatttgcattaaattgttgtatctattggcattagtgatcatattgagctacaagtttcttgttattttttgtggttgtcggcttgccgccacctggatgacttggacataacggaggattattgaacaacttttggagaatgccattggctccaatcatcattatgagggattatgaggggattttgtgctcattccccatgtgaagttcacgaagaacaaatataatgcaaccatggcttgttggagtgcctctctagtgtggtttttatggcgccctaattatgtccttgacgtgtgatgccaatcggtacatggaccacctagtttgggttgccacaataagaacgtaggttgtcggcaagcaaattaacctccgggacatttcttgtgcatgggccacgaagtgcgcgagcttcacgattgctgaggaattgctcctcgatgaccagtcaggcgcggcgcgcagtgccgccagtgccacccgaggtgcgggcagactccatcaactctagggagagtgtgcctagaacccaggacaacacgacgacattcatgcgtcgccaggatggcatggcggggtaggtgtcggagaggacatggttggtgagggcgttccgctcgagggcgagtagaacgagatcgcgccatcaattgtagtggggagaaaggggatccataaccacgggcacaagggcgcgtgaaggttggcgatgagggcggtctcatagtcagggtcttcaacagcaccagtgtcgtttgagatgccaccctggggtggtgggaaggcggcgttgtgggcgatggccgcagtgcgctcaaggtcgaaggcagcctggcgttccctggtgagggcgtcctaagcggcacagacctgatcttaggcgacgacgactgccttggctacatcatcggcgacggcgaccagggcctggtgag

SEQ ID NO: 125007 - DNA, 499 bp, Zea Mays
gccactcaattcatcaagcatatcatctaaacgtggaatagggtgttgataccgtatcgtgatattattaattgccctacaatcaacacacatatgccatgttccatcttttttaggcactaaaataaccggaacagcacacggactaagagactcacacacgtaacctttgtcgagtagttcttgcacttgtcgctgaatttcttttgtttcctccggatttgtcctatatggcgcacgatttggcaaagatgcaccaggaataagatcaatttggtgctcaatccctcgtataggtggcagcccctctagtatctcacttgaaaatacatcagaatactcctgcaaaatgttagcaacaacaggaggcaaagaatgctgcatatcttgaattgaaatcaaagcatccttgcataccaaggcgtaggcaacagaagtggaagcaaataattcattaacatcagatttcgtcacaagcaagcaatgtcctttcaatttt

SEQ ID NO: 125008 - DNA, 483 bp, Zea Mays
ccagtgtgctacagttcatcagagataacatagattaatatgtgatgtaaatagccttttccacaatgtgctaggcattttatacagatccaattgatgaaatcactcacacaatagatggaaaggaaacattttaatttacactgtggcctcgaacaagctgctggcatgattccacccctcaatgtgtccacaccatccataattctgtcggtccaaacttttgcttggtatacgctcggtgggtggtgcatgcatctcccaccaagccattccttgtgcaccgtggacagccacttcggtactgaaataaaaaacatggactatagataccgagctgaggaagtatgtgtgatcgattgagaaaaaaagatccaaacatctgcctattggtagctagttgtggggttgggatgaccactactaaaggctaaagctttctcccacatttagaatctgatcccagaccaacaacacttgact

SEQ ID NO: 125009 - DNA, 516 bp, Zea Mays
gcgagaacggaattgagaagtgctctatggcagtctacctgggagaaagccaaagttacccaaaccaccctcctttccaagtcaccttcactggacaccacttcctagacacttgccagaatgttgcccgaaaagccctccaacagctatgccaaaactacagcaaagagggttttgaaaccccccttcgttacttcccacctagcaacaaaaatacccctacctggaggaaaagacttcaggccctgtcaggaagagatcctactgaggatgaccccactatcgtttacatggccgaatatctccacactctcgataaccactatgatgacctttcctcccactgcgcccacctaaactaccgggtggaaagcttagaccagcaagtcaaggaacttaaaaaggagaaagcatccctccaagagagtctcgatatagtagaaggcgaagaggccaacactcgtgaatcctaccgaaccctgatgatggattacgataagaagctaaagaagctcg

SEQ ID NO: 125010 - DNA, 298 bp, Zea Mays
ctggcatgtaagagaggatcatcttagccgacactgtcaacgcctctatctagggttgcaggcactcaagatgacgtcgtttctcactacacgtgtgatgctagcacactagcatcatggaattttatctccgcatgtgtgagtatcatggagacactgttgttgcggtgttgatcaaaaacaaacttaaggagcacgagtgaatgtgttggtgttgtgtgaggacatcctttcactatatcaacatgctcttcttttgttgcagtacgtgtcttctggtaacgatccatgatcctct

SEQ ID NO: 125011 - DNA, 566 bp, Zea Mays
attgtgtctaacggcccatgtcggtccaagtagctaagggaaaatactataaaggcgcagtggaggtcaggacgaagggacatgagagaaaatatcagaaccttttattattcatcttcctactttgtctagcgctgatcttcttccccaactctctcttgtacccggatcttttagaacattatagcatcttccttttagctgtgatttccctacttgctgtttccttcccaaactccatctatccagcacttgttgcttgagttatgctttgtctggttcagtgattgatcatgttctatcggtgagggttgctaacaagtggtatcagattcatcggtcctcggatcctcgttccatggcgtcttctccatccatcggcaccaacatcaccgtcacccaggcgctggatcatcaaacacgcgccctcctctcggcgttggacaagcgttttcaggctcgcgacagcaaatgggatttccgcgtcgccgccccggagtcccgcgtagcggattcgaagcgcgttacgttccttcggacaacggcggcgggggagaagacgctgg

SEQ ID NO: 125012 - DNA, 510 bp, Zea Mays
tcggcttggtgctgtccgctccgacctagcctatctgtagagggggcgatggtgctcgagttttatacccggtgtttaatctgtggttcgccaaatcccaacaaccttgacgaataccccggaatccgcgcacctgagtgacggggtttgttacgcgagatccacggagtctgttggtgctcaccccggttcgcgacgacgaaggagaagagcattacaagtgggcctcacatgcaagagacacataaagccacacacggaggtgagcagtcactgggcactaggacccacccgtcggcgcgagtggccgcgtggacgagtgtgggcagatggttgctgggccgaggggatgagaagcggcccaaacgtgagtttcctttcttttccaatttttttcttttcctatttcttattttcgaattccaattgaattcacttttgaatccgcatttgaattttctatctcaaacaaaatgcacaatcagaatccaacatggtgcaatattcatt

SEQ ID NO: 125013 - DNA, 412 bp, Zea Mays
ctccggtccgcgcgcccgccatggtcgcgcccacgtccgcgcaattcccggccactacccacgcgcccgacccctactcaaaccccctcccatccgctctgccatttcctccactcgcagaagctcccagcccaccctagctcgtgcgctgcctcttccccaacctcgaaggaccactatcgttcaccgcgcccgcacgtccgttctgctaccgccgttgaggcctcgtcgtgcccattgcctcggtgagttctgcctcggtgtctacaactcgagacgcgcctcaatttgccctctccccctctggttctctctgcccgttctcaccggagctttccccgcgtagccggagaaccaccgctgtcgacctaggccctcgccgtgtccctgtcgccgttcaagggtcccggag

SEQ ID NO: 125014 - DNA, 351 bp, Zea Mays
ttctcgataagggaaaggggaacacgcttctgccattgcttggctccccccacccgaatcttttctgcttgttgaatctgaaatttgtgctgggttgagcagcgtccgtccttgcgcttagcgaattcgcggtgtttacgctccgatgcctcacgtaaggctatctctcaggcttcccaaaagctcgggtaggttgaatcgtggagagttccacagcgtcctagccgccgccgtggcctgacctcgccataaccttccattccatggaggtctccaccatcagcttctcgtccccgccgccgcgggccacgccggccgacctcgaggccgtcggcctccgccgcctcagcg

SEQ ID NO: 125015 - DNA, 528 bp, Zea Mays
cgcattcctcgtttgtaggtgtagcgttagcgaatcagaatttgggtgaccatagcgcacgaaatcattcgccggcatttatcgtcgtgtcgggtttgcgtcgtcgcgctcggtcgtcgggcagaagaagaatgtccgccgttcgtagatctgagaaccgacggtttagattaaaagaacataccccttcgcgtagaattagatcctggtcattggtgctagatcgtacgcctcctattcgatcgcgcgtatttaaggtttgggccatagatcggggatccaacgatggagattgtataccggttcggtgatcgccaaattagatcggggcgttcgtttctaatccaacggcccatgaccctcggtaccccttcgcaggtgcattttgttaaagaacccccgagaaaaatgaaaatcaacccgtcgtccaccacgataatgctctgagtcctgaaatattttacgcagaggcccctagcctttctgagatttgacacctagtccagaggaaaataaaaatagagaaat

SEQ ID NO: 125016 - DNA, 467 bp, Zea Mays
ctaaagcgttcggttgctccgagagcccatgctacgccaacatcaatttcagccatctagagcttggagaatctcatcgtggaatgtcggtgtttgtgacaccgcacaccccggggttaccctcatggtgcttttgagtaggatggcgtcattgattgtgactcgatggttcatgcgatatcacgatgagagaaacgctcgggcttgaacaggttcaggccgcttcgagaggcgtaataccctacgtcctgtggtggttttctgtattgaggtgagttacaggttgtggctatgagagtggtgggttgagggtgagatgaaaatggtaggggttcctcctggccttatatatacaaccagagagagccccctgcacaggtgtcgattacaatctccttgcttatctcctgatttgtagcgaacagtcttcctttatactatggaaatcttgcactcacgcgtccgag

SEQ ID NO: 125017 - DNA, 655 bp, Zea Mays
cctctcaaagacagtatcaagggatggagcctggagtggttcatagttgagaattatggaaattctctcccccccggtcgggaagacaaccggacgttcgcaccccaagctggaccgagtctcccacagatcaggaggtagctgaggcaggtgcgttgctagctgaagttggactgctgaaagagaggggtctgactgctgaagctgtggttgctgattttgtcttcaagaatatttagccgttgaaagacagggcatacccagcttatctgtatcgaggcctagccgactcaactcgggttaccaacagaagaattccctctgcagacttggtgagccgacttgagatgatccttagaggcaaagtgtcaaatgttggtgccccagtggcatactcggcctggaacctgcctcctcccaaagccttcaccctttttgtgtcgaatccacctgtcactgatgaccgtttgggccttagaatgcgaccctctgctgaagaagttagtgccttggttgcctcgcttggggagattcctgatgatgaacgggaggtccattttgaggtgcccctgaaccctagtgatgcagagataagcgctatgcttgatttgctggctgaggattcttctgacgctgctcctgctggggcattggt

SEQ ID NO: 125018 - DNA, 434 bp, Zea Mays
atgacaggtacttatgatgaggcctttgctttggtactcctggtgcagctttctttaagttgtgccgagaagcttgtttagatctctgtgaatgccaaatttattgatttctgattcactccgttccactaagaaaactatggaccgtggaatcttttgattgagcaatcacatagtgcttgctaactatttctagccctttgatacttttgcatgtgtgttactgagacatcctatcttggttttgcgaccattaaaatatgcaaatcttaccccataagtgacaaacgttgcctggttatctgtcatggtaactatatttttgacatcgccgagaaatgatatgtaccttactcatctgacttgtcccttacacttacacccaccacatttgatcaaaccgaatgtttactacctttgaggttggcggcatg

SEQ ID NO: 125019 - DNA, 573 bp, Zea Mays
atttatttctaaatctacaaccattattactatctcaccacccaggcagtctccctccctggctggtatagcgacatccgaattgagtagccagacccagcaattagacgatgaggtggtttggggtcgtacggccgcatggtcaagtactgcaagactacacacgccccaccgccctattgccggtcatgttgcatgaatcaaaggataagaaataccaactagcggaccttatgggcgcgctactaaggatacctggcctaggccgtgtgcaggtaaggtcccaatagggattgcccgttgggggtgatggcaccaatgccaccttaagaatcctggcatccggccctgacgtgtcgaggccatatcccagggggccaagtactgggaaagaagctggcaacaatgcacacagcagaggaaaaatggcttacagataagttgtaatgtcaccgacaagtagtacctaaagagtaccttacaaaatcaaagacatattgcaacccgctccccagcggaaccctcgtttttctccatgcagacctggctactcatcgtcaacaggatcccccg

SEQ ID NO: 125020 - DNA, 612 bp, Zea Mays
aatgccgcgaccagcttgttatgctcatctagcatgttaagtaataaacgggccacctctggatccggacgatcatggacatcagcctcattctcaaacatgcccaacctattttgtacctcatgttcagtgtcatatatgtaaagttgtgcaaactgtgggcgcaatccattattgggtagtagcgagccaatgccattgattttgaaaacataaggtgcagtaccgttatttatcgatcgatcaacgacagcacctagtgaggtaaacgcgaaaagggaattgtacgagcggatttgcctaaggaaccgtcgtgcacgactatcaccatcgaatcgcagtaggtaacataagggtgctggtggacatttgtaaggctctaaaacaatcttacctcctctacaacaaagattgtacacaagcctgcgctgcgaaacagcagacaaacttttgacccgttcctgaaaccagaaaacggcgccacaatgtgggcactcgtctgatgggccaccatagtatgagcgatctttgtaggtctctacaggcaaagatgtgtaaatgttgcatgggttactttagaaatatgtagagaaaataatccaggtggtacac

SEQ ID NO: 125021 - DNA, 291 bp, Zea Mays
cttcgatgttgagagtgagaacgaagatgccgaagatcgaatgtggagtccaagccacgttgtttttgggaaatctactatccgacaagggcaaattgaagcgatgaaaggcaagtatttttataatgtgtcaatagtgagggctgggggagaagacatcggtccccaccctgaaggtgatgaagtggttgtttacaggagcttcatgaaagctaggcttcgctttccgctgcacaaaatgctagtcaaagttttgaagacattagagatatatcttcatcagcttacccc

SEQ ID NO: 125022 - DNA, 380 bp, Zea Mays
cacagccataaagcatatggctttggcccctctagatgagacaacgctactactagctcgctaggacagttgctaaaaaccatggaagcacatatctgtttgggacttatggagaatggcttcgactgaatgcctgaatcgggccgggaagcacggagcagacagaattgcagatagaagtgcagtatatcctctgtgtcccttttttcctccccaaacaaaaaggtgtttctgatcactgtcaccccaggacctatccaaatcgctttccaatgcagttagacagagaaggcatggctgtgatgttataatgctgaaggaccccaagaagagattatggcctgtcgtttaccacgacagcccgttaattgtgggcttca

SEQ ID NO: 125023 - DNA, 321 bp, Zea Mays
gcggaatgattagcaatggaaaacgtacccatcatcataggctctccttccggtgtagcagccacttgagtatagcagacccgtctagttctcctatcacctttgcttgcctaagtgcttgtcatacttcccttgccttgagaagtacttccagaagccttatggaggtttgatttgttttgcttcggttaaggacaatccttgatcaaatgtccagactttccatagtgaagcagctgttagatgaacagggtagagctaggaagcaagtactaggggcacccggctgaataatttgagtaggggcagcagttggacgga

SEQ ID NO: 125024 - DNA, 274 bp, Zea Mays
cagggatcctcttcattgctcctggaggtgaacaactcaagtatgcgctccagttactatttccagcatcaaataacgcagcagaatatgaagcactgatccatgggttgaatatcgccgtgtcactgagcattaagaagttgatggtatatggagattcactagtggtcataagctagataaataaagactgggattgctcggctgattctatgggcaagtactgtgtagccgtccaaaaattagaagacaaatttgaagggttggaattcca

SEQ ID NO: 125025 - DNA, 363 bp, Zea Mays
cggacggcgatgcgcagggctctgacgagcatgtgaaccggccatttcgctcagcgatcggtgtcctactttggccgaagccaaattcaatttctaaggaccatttcccctcaatcaattttataaccggggctttgaaacaactggttcatggtgacaggcggatggttatagggacgaacacgttccggccaaacgacggcggggacgaccaaattgaggctcaggaagggttcacgggttcaccaggagttatgcacacactttggtttgggcagaatacgagccgaagagcaggtcgacggtgagggtgggttacggcggacaccgagcttgggagcacacgttcccgccaaaccatgg

SEQ ID NO: 125026 - DNA, 574 bp, Zea Mays
gtaaagccttggatattcagaggcctatcagtgttcgctcgaaacgcccttgccgggccagccagcctgcttctcctgctgatgggcagaaaaagaagaaaagacgtcttcaccgagtgtctagcttggatcgggatgctggtcctttggttcctgctgctgaggaagtgcccgtgcctgaatttacttaggctgatcccgatgggtgtactgtccgtgttgttgatgaaaatgaggaggaagaagaagatgaaatccctcttattcggaagaacagtcggcgctacatagctagtggggaaagtagtgtagttccttctcctgctttgtctgccctcgttggtctgcaagaattatctctggcagactttgattaaactcttgaagacatggttccagaagatcttttatcagaaccggcagatggtggcgcgatggatgtttgtgttgatgtgctcgacgccgggttggggtcatttcgggcagcgtcccgcgcctcatcgaccttggagcgcggtcttgagggtcagcaagctgacttgggttgtcctgctcctatggaagtgactgaggg

SEQ ID NO: 125027 - DNA, 458 bp, Zea Mays
gttatatggtgtggggttttgcaggaacacttgtggggctcctgtcagtcctcaccaggtaataatttctcatgaatgaacttcttgactgagtttttttagttttcttccctttcttgaccacactgttgttcatcataacaaaacaaaccagtcacggccagttcctctgaatcatcatgatgtggacatatgtcgacaacactgcttatgacttgtagatttcatggtcttgggcaggactaattggcttggatcaggtaacacgtccacacaggtctagatgcgatgcccaattgtgtctcctacatgacaatcgaatattccaaatccagtctggttaggtgctgcctccaggttgtgttgtgtacatactacattctgggcgaattggggctttgagcatccataggtcactatcaccagacatctcgaaaggaaaccaaatgtgaatttca

SEQ ID NO: 125028 - DNA, 850 bp, Zea Mays
gttttattttttgtagatgtttcgtgcgtccgtgtgatttatatggggctctaatcccattttttttctttttataataatgatacacaagcccagctctcctgcatgttcaagagaagaaaaggcagatctaagccaatatgaaagagagaggcgagaaaccacaagttaaacggtacaataagcaaacacaaatcccggaagaaataagatatcaaacacagtctagaaagaaggataaagataatatatgatctgtagctatcttggtttaatgtgatatcacaatagccaagaaaacctttgactttacaaaagggaatccctgtccgtgacttttattatgtgaacaaaactgaatgttcaaatattgagcagttcaaatgtcttagtcaaaggtagtctaaacaggctatatgaccaataatcataattatcagaaatgccagaaccctagtaatcaacatggatttatgaatgtttcataaaagaggtggttgaaaattatagcctggtagagtcctttccggagttataaaaaaaacctgcaagacgtaagaccaccaatgcggcattatattaagaagatcttctcatataggtcgagaaaatcccctgaacccttgccccagcggcaccgtatcccatgagacaacgaccggccgaccgcaacatgggttgggtcttagatctgtgctttggcatgggacaaacgagaggttttttttttttacctcagcctgaaattcgttctaaagtcgaaataagggcctggcctgagtgctactcagcccacataaccatctacaacatatcatgttatatgctaacatgtaagagtaagatgcta

SEQ ID NO: 125029 - DNA, 776 bp, Zea Mays
tgttctcaaggtggccttttttagggtggtccggtttgcctagaggaatggctcaagatgcttaatccacttggtatcgtgctccttgagtcaatcatatgttgcggtctcaagaccctagaggattttagtgttcactcacttgatttgcccattgcttcagggttgatgcagtgaggcaaagtaaagtttgatgcccatgttctcatagtaattgttgaagagacaactggtgaattgagtaccgttattggtaatcattctttttgggaccatgaagcgaggtacaatatccccaaaaaacttgataatagtgtgctttgttagtttttatgatagccatgactttgaaccactttgtgaacttatcagtggctatgtaaagatactcgtaaccattgacaaccttaaggaagggccccaagatgtgccaggacagagagatgaactatcacacttgcgtcattgtgtggatttgctttgagtataattgacatgctcgtcatttctttgccagcttagttcatccttgatggttgttgactagtaaagttattaccaaaagactttattggccatcgtgtaagacgatgaatggctagctcactcatcctgatggatgtcaacgtggctagctcactcatcctgatggatgtcaacgtggctagctcactcatcctcatggatgtcaacgagtatatcattgccctctccacggtatatatgcgctttaagagaactctgttggcaccatgacggtaaaagttcccttccac

SEQ ID NO: 125030 - DNA, 808 bp, Zea Mays
ctaaataaataccaagcccagacaaaagcatggcgcgaccacacagtcatcccgagggaattcagcgaaggggacctcgtactcgtccgaacaactcggacagagtccaggggcaagctggagcccaagtgggagggccctttcattgtcaagacgaaggcttcccccagcgcttataggctcgcaacgccaaacggcgaagacctggagcactcctggaacatcgacaatctccgcaaattttttgtttgactcatcaatgccgattcgcccttgtaattcgcaaaaacaattttattctggcccgcactcttttcctcccggggggtgaggtttttaacgaggcggagtcatgtaatatacaagcgaaaaatcccccgcaaaaacctgcgtcgaaaaaagaccgcgccgacggtcttcgacattcgaccaatacaaagtcaccgcaaggctcagcgctggccaccctcgcgtgcgacaactccgcgcaaaagtcgcctaagggtgcagccggactagcacaacaagtgcgaaaaatcgtagtcttccgcgaagactatccgtgcaacagttacctaagggtgcagccgggctagcgcaacaagtgcgaaaaatcgaagtcttccgcgaagactatccgtgcaacagttacctaagggcgcagccggacgaagcttaacaagtgcgaaaatgactacgccaaactgtccgcacaaagaccgactacatgcgcaccagaccaacataacaaatacaccagaccaagtacgtaacgccttcgcgagcatagccgaatgtgcgaaggcac

SEQ ID NO: 125031 - DNA, 439 bp, Zea Mays
atttggactccctcccatctcagccgatctcctcctttgtctcagtacattcattgcgtatactgtatggatatgacttcttcagaaaatcttttgaaaattcctggctacacacccaatgggtgtgcccaaggggtgtcttggtacacaaagcgtttagcacactgtcctggagtagtaacttgatgtgaccgtggggtgtaatcatatcgctcgagcagttgaccttggtccaaacggtgtcgtgttacgcgaagcggcgtctgttgcctgactcattttcaggtggcttgaatttattattgaatacttgcgactgtttggcaagcgtggtaggaagtggacggtcacccccggcctctataaatagcctgcttgcaccgttgttctcttaactcatccattgatcatctgttgttttctctccctttctcttctt

SEQ ID NO: 125032 - DNA, 528 bp, Zea Mays
cacaacactattttatccataaggatccttcaggggctcatgcataccattcgtttggagccattagttgacttcagatcaacaagtaaaatgaccatcagggtctagcgctcacaaggacattcactggttgcattgtgcttttaagcacataagaaaatgtgtgcacatataatggtagtaaagtgcatggcatcaggccaatgctgccaagcacaaatgtttatatgcagagatgtatagtccaactcgttttaccattgcccatggtttacccaattactcataccggtctgaaattgggtttcaagttatgcaacatttttaggtattataattttgagagagaacttataacaacagttaattatttgttgtgtaggctgccaatagggcaaacttttctcctcatattatacaccaatttgttctataaagcattatttcgatctcttcattgttcagcaaaaagagaagctttggaatagaacagacaaggccaagaattcattttagctgggaaaatca

SEQ ID NO: 125033 - DNA, 446 bp, Zea Mays
ggtcactgaccctacaatggctggtttttacgaagctatggagaagaccaatacagaaaaaataccaatgagatgctggctgggttgtctgagaactccagcgatagtgaaagctttgatattgagagttaggatgagaatgccgaaggtcgaccgtggagacctagccacattgtttttgggaaatctaccatcaagcaaggacaaattgaatcgatgaaggggaaatattttcatgatgtgtctttagtgagggctaggggagaggacaccgttctgctggcagaaagcgatgaattggtagtcttcaggagcttcatgaaggttgggcttcgtttcctgcttcataagatgctagtcgatgttttgaagacatttgagatataccttcatcagattacccccgaagctcatattaaagtgggggtttttatctgggccatgag

SEQ ID NO: 125034 - DNA, 546 bp, Zea Mays
aaaaaaggtcatgtgtaaccatgttaattttgatgctttcatctacacgttggctttacttctgatgacctacttcatttcatggcactgacaagcacatgacatacatgcctgcctgagaggctacaatcgcgtgaacaagcatgcatgcgtccttgcacagccatccatcataggcgtcttagtgttgggggtcttagaattctgaagctgtggcctatggtcgggaactctagatctcgccgatgtcgagctttgtacttcacatggcacaggcatccatcataggcatcttagttttgggggtcttagacgtatgaagctgtggcatgtggtcgatgtttgagagcaaagttgtctggcaggctccgaaccaaacaacatctaagcctatttctagcggctattctatcttatcttctacttgatcctttaatttaaacttcatcctgtaaacaatgataatgtacttcatttcatgacacaaacaagcatggcatacatgctacacgctgcctgcctgacaccgtcttcgaaggctcgaac

SEQ ID NO: 125035 - DNA, 363 bp, Zea Mays
ttgtttatcctgactatcgctacccgccgcgggggcagaaaagaaagggtgcaacatcgggaaaggctgctgcttcggctgcttcaagcgagcccacaccgaagaggaaaaagttgaaggtccttactcaccgaccgcgctacattgaactagccatagtgcctgaattttgcggtgagacttcttcagctattgaagccaaaggacctgctcctacgcagaggattgaagagccggctgcaatgccgaagactgacaaaattgaagaaccgagaatcgaagggacaaaaacattagaagttctaagcccttcggcagaagtggaggtgccgaaggcacaaaaaggtctagcagcaaccccca

SEQ ID NO: 125036 - DNA, 473 bp, Zea Mays
ccgggagtttaggtgggtgcaatgggagaaaaggtcatcgtagtggttatcgagagtgtggaggtatccgaccatgtagacgatggtggggtcatcctcggtagggtctctccctgacagggcctgaagtcttttcctccaggtgggggtatttttgttgctaggtgggaagtaacgaaggggggtttcaaagatctctctgctgtagttttggcatagctgtttaagggcttttcgggcaacactttggcaagtgtctaggaatcggtgcccgatgaaggtgacttggaagggagggtggtttgggtaacttcggctttatcccaggtagaccgccatagagcacttctccattccattttcgcggtattccttccagacatattcgggcttcttgcggatccccatgcgtagtgcgcaactccgtaggaggtgaggaaatccttcctcctctgagcagtaggatgtcctaa

SEQ ID NO: 125037 - DNA, 388 bp, Zea Mays
cggggatcaaatgggatgatcggagctctgggtagtgatccgcgcgtgctccggctagggagttccgtcgtgcgtggcatgtcaccgggattgggtgttggctggagaagactcgcgtgcagcgtgggatgggggatgtagggccagtattagatggtcgcggggaccgttggatctacgattgagggccgcgattagaagtgatgtaccctttcgttcagtgagatccggaccgtcgaccttgaatccaatagtggcgattagatctcgggttgggtgaatctgggtcgtaggatcggatggatcagagtagcgccagcttcataaaatctgaacccttgaattttaatccagcggtggcaatcgcataccgcatcatgaaacgtct

SEQ ID NO: 125038 - DNA, 443 bp, Zea Mays
aaattggaatggtaccagtgtgatacaactggtttttgggtactttaatttgtaatctatgttgtttaggtccaagaaccctataataactttgcagatccttgtttagtgaacaagctctgttaatggagactgacctattcttaaccagaataaggagaaaaggatgaatgaagaggggaagattagtcaagtgctgtagattcaaaagtgcagaaatatctatccctgatcttttcctcttgtcgtgtcttactttggaatagagtgaagatagagatgaggagatggcagggatgttcaaaactttgtccatcactgaaatatcacaaagtctgaaatatctgctacagtgacatcttatctccctaccccctgccatggataaactcacccttgccttgctatgctctgggaaccggcatgggtcttcagggtagagc

SEQ ID NO: 125039 - DNA, 600 bp, Zea Mays
gttgggagtcagctaatgaagatatatctcaaagttctttaaaactacccctatcatttcattcaaggggaatcacagccctgctctgaagaagctcttaaaaatgacaacttcatccttttcggctctgggattaccgcttccccagcaaatcaaataagtttgctctcagcctctccaaaatagcccaatttcatcatcataggcatgccatctttcgttacagtagatttttcaaatataagatgactaggctttgttgggatcagaatgctatagtcttcttcactctcatcaacattttcaccttcaaccacaacttgttcagcttcggcattagaagcaccttcatcagcaacctcctctgcctcaaccagacctgatcgcttcattacttctgaaatcggcgctgtttcggtggcctcggtttcgtccccctcacgagacactctagcagttgatcgcactctggccatttcaatggtttcaccttttgacgaagttaactttaaatgatgaagtgtttgctcgagacgcaatatagaaagcttcggctatggtcaaattttttaacagcacaacagtgtgatggcaatgaat

SEQ ID NO: 125040 - DNA, 380 bp, Zea Mays
tgaacaacaggttcgctttgaggtgcctttggatcccagtgatgcagagataagtgccatgcttgatatgttagccgaggattcttctgatgccgctcctgctggaacattggtggtggcacctctcccagaagctagtaaagccttggatattcagaggcctgacaatgttcgcccgaagcgcccttgccgagccaatcaacctgcttctcctgctgatgggcagaaaaagaagaagagacgtcttcggcgagtgtctagcttggatcgggatgctggtccttctgctcctgctgctgaggaagtgcccgtgcctgaatttactgatgctgatcccaatgggtgtgacccgtctgacgctgaccccaatgggtgtgttg

SEQ ID NO: 125041 - DNA, 344 bp, Zea Mays
attggaagtaggaccgacagtaacgagtcggccagatgccttggatgtattttaattccacgtacctatctctggacgtcgtggcctctagtcatctgtagaccatctaaggtaggtcaccggaccatccacatgtggtccagaccatatggcaataggggctggactatctaccatacactggataggagggtcagattgattatccgatcgtgcatacccccagtactctaagtcttgatgatgatagttaatgtctccttcccatcaggagtcttttgtgcaatcacctccctggaaataatttgtttgttctcattgatcacacgagggtcaccgatgac

SEQ ID NO: 125042 - DNA, 367 bp, Zea Mays
tccgcaactctcccccggctgggaaggacccttcaaggtaacgggagtacaccgacccagggggaaccatctagctacgactggaggagtaccttaccctgatgccaaatatctctgtaagttctatccatagagcaagactaaggggtcgagtctgtttccttcttttcagtaactagataacgcatacgtgtatgacaacccggtgggtctgcccccatgaacccggactattggtctgcacacatgcacgacaagttatgaagaagaaactacccccctcagtcgtgctcttgtgatagttccatcttgctactccatggtcctaccttgcaatctttcagataatacctttcagctaacccac

SEQ ID NO: 125043 - DNA, 588 bp, Zea Mays
aaagacccaaccgaccaaagaatcgtaaatctcattatgaccgaagattggagggccccataaccctatacctgcaagggaaccatcacccctcagatcaagttgaggccaaaagaaagtcgtaggttcacaataatagaaggctagctttacaaaaaaggactcaaccaaccttagctcaaatacatcacagaaatggaaggcatcgagcgcctccgcgagatctacaaaggagtctgcggttgtcactcagaccccaaggccctcgccgccaaattcatgcgccaaggtttctactagccaacaatgtattgtgttcatgtgaggcatgctagaagttttcaccacgaatcgtggaactgccgcaccttacaagactaattactcacacatggcctctataaagttggggccttgatatagtcgaaccgcttaccaccacacaaggcaaccttaaaaacacaatgactccataggagctcaagcatggctcacctcaatcagaccccaacgcaatctgaaacatcgatgaatcgacaacaaaagatctcctcgacggagaccgagttcaagccctcgacacactga

SEQ ID NO: 125044 - DNA, 425 bp, Zea Mays
gcacgactagattgggcatggagctagtggacaaccaacacgggtaggatgctgaagaggcgagggagcgactgtatgcggcggtgaggaggcaagggcgtgattgaaagagaatgggaaaatgagggcacaaccacattgggggtagaacatcgagccattgttggtcggatgcggagatgaagaggcgaggaagcgggcaaatgtggagaggaggaggcgagagcacaaccgaaggagaaggggaaaatagagaggaggcggatcaagggcggagcgacgatacattgtcagctggtgggggctggaggaggaggtgagggcatgaccgaaagagaaggtgagaacaggatgcaaccggatcagggatagagcgacgggccaacgctaagatagatgcggatagaaggagtcgagagaacgac

SEQ ID NO: 125045 - DNA, 1032 bp, Zea Mays
aattttctgtagtccacacaaaatcgccatgacccatctttcttttgcaccaacaatactggtgaagcaaatggactgacactgggaattataagtccacttttcaaaagctcagagacttgcttctctatttcagttttgtggaatggtgaatatcgatagggcttggagttcaccggtataacatctggaagtagtggaatatgatgatcgaatggtcttgatggaggcaaagatgttggagcatcgaacacatctttatattcctccagtaaaaactgtaattctccttcattgaactgctccacttctgtgactgtctccaatactgcaaaagcccaaatatcattaccctttatcatcttctccaattgcatcgtagaaattcccatcacctctccctgctgaccagcagttcccatcaattgaacctcctccccattatcctcaaagcttatgatcttcccttcccaatcacattgcataggactatgtcttcttaaccaatcatatcccaatattgcatcataagctcctaactccagcaccctcatgtcatttctataggtgtggccattagcccaccattccatcgttttaccactctgtcacttttcaagatctccccatttgccactttaaccttcgccaatgaacactgttgtgtgggtaatcctactcgatccaccatagcctggctaatgaaactagccgaacttcctgagtccactagtatcagtaacacttggttctgcaatagtgccctgacccccatacaatcttcagccatagtgccactgattgcatgcaacgacaacttgaaacactcctctgctaccagctcctcctgctccaatctgtccagcacttcgtctgtcaaagtcatcttcagttcatcagttgatagaacattcagctgcatttgtaccttcttaggacatttgttttgatgcctcggctcgaacttgtccccgcaagtaaaacacaacccgttctttcttcggtactctccgaccagtttctccttggaca

SEQ ID NO: 125046 - DNA, 347 bp, Zea Mays
gctgtactggatatgcgtgtccttcctctgcccgctcgactactaacgcggtgctcaccacgtgagccatgcaagagatgtacaacaacagatcttctgccggctggtttggtgtggctcggcgtggcggctttagcactggcggtgtggtcaggaacttattcagtgcatcaagggcttcctgagcttctgaggtccactggaacttgtccaccttcttgagcaatttgtagaatggtaggcctttttctcctaaccttgagatgaacctgcttaaagctgccatgcatccagtaagcctttgcactttcttctatgaccgtggtgcttccatcctcatgatagcc

SEQ ID NO: 125047 - DNA, 654 bp, Zea Mays
ctaggggtggttctgatccgggtcgtgggcaatctgatcaacccagaaatgacgagacccctctggctgaacccagtccagtgcatcatcagcatccatgtgtgatcggttggaacagtttgatagataaagcagaagaggatttgaagaacacagtgtctatctttatggtcaatgatgtgcttgtgccagtcgctgacatcgcagatgcggtcgctcaaaaacttgaagtaaattatgattcgctaatcctgaggcaattggctcatggacatttcctgctcatgcttcccaccctccagtcagttgaccagctaacagtgagatggaacactattcgtgcatgcgccttctccctgcactgtaaaagatggtccaggttctttgggtcttcaggtgcaagtttgactatccctgtggaattcgagctaaatggcattccaagtcatgcctgggaactgtccactgtccgacacattttgaacccttttgcctgggtgcagaaggtacatgaggagactcttgagctcaagaatttggaggtctttcactgttatggttggtgttatgacctggcctcaatccctcagtctagagacctctggattactgattcgctgggaaatggaccaggcgttggaaggctatctcttg

SEQ ID NO: 125048 - DNA, 349 bp, Zea Mays
ctttatgctgctagttatatgacaaaggttgagctgatgcgggtggttgaggcagggcccatctggccgaagaatggcttgctgaagcgactgaagatgaaggctgctggattggctgttgattgtgtacatactctgggatgtatggagaataatatgaagtagtatggaggacctgtttcgactaattctgccttgcctcagcttcggcaatttcaatctgcttttgaattgtaacctggcaggttcttgttgtgtgccccttatcttgtccacaaaataagcagaataatcttcttggctgagtgttgtatctccctccgaagcttcttcctcccttcctcctctt

SEQ ID NO: 125049 - DNA, 582 bp, Zea Mays
cacttcgttgtccttcttccccctccccgcgtacggcccatcacggtcacctccggccatcgcctctgtcccctcctccgtcttctcgccgcacagggaagttgggcaccgccccgtcctcgccgcagcggccgcgtccttgcacggcaccaccaccgtgtggtctcgtcatcgccgctgtgcggcattaactccggtacggtgcgcctcaccggcaccgcggagctccgccgctccccttccctcgggcgcctataaaagggccgccccgagctcctccttccccgcaccggcctcagccacccctctcctccctcgtctgagctcaattcgtggaagaaccgccatcgtcttcctccccggtgagcccttccctctcttctccctgcccctctgttggtccatcaagcgattgcttaagcctcctagcttcgccacaccgccacgaacgcagtacaccactcacccaccccgattcctcgcccaaagctcgccgacggcaaccccgccgtggagctccgccacctccccgcggacaacccccctccctgccccctctagccaaattgagcccacccccag

SEQ ID NO: 125050 - DNA, 282 bp, Zea Mays
tggctcctttgtggtgtttctcgaggtggttgtcggcacaatcctaagagtacttgactctcgagtggtcaggcgcagctagaggtcgagcaagacatggtgtggtttcgttccctgatctcttgggcagttagaggtcgggcaagatagagagtaacggtcaatctatcctatccttaatcctcgagggttggggtcatgttgaggcggagacatgactattttagggagtcaggtaagacatgatattgagggtttgtgtcgtacctaggttatttatcc

SEQ ID NO: 125051 - DNA, 320 bp, Zea Mays
acgctggatgaaagtcctttaatgagctgatctgcaagtattagctctatgtttgcatgctcaacttcaatcatttgatcatgaactctccctcctttataatataatacttaatatcaatgtgtttaacatcaacacttgaacctatatgttgcataacctatatgttgcataactcttttgcttcttacctacgacgccacctgcatctgtgtgcattatacgaagctatatattcttgttgtgccttcatgtccatactagtaccctatggatagcaatgaagacaaaatccctgtggtagagtgcctagaaccaaa

SEQ ID NO: 125052 - DNA, 329 bp, Zea Mays
cgtcgagcgacccagcaagacgacaccccgctctgaagaagagctgacctagtaatggcaagccacgtcgacacgatgggacatcaccgagccatgcccggactgtggaagcggtaccaaggggactctttcaagcacgacaccggatacacatctccactgactagtggggaccgaacaacccaagtcgtagagacctcaaacatcagggtctctacagtgacccatacaccgggagggatagagcaatacctcgtaccagacatagacctacgcatgatggagggtgacgctcagaggatgacggaagacaaagttggactgaagac

SEQ ID NO: 125053 - DNA, 826 bp, Zea Mays
cgggtcacacccattgggttcagcttcagcaaaaaccggcactagcacttcctcagcagcaggagcagaagggccggcatcctgattcaagcatgacactcgacgaagacgtctctttttctttttcttcccctaagtaggagaagttggatgattggttcagcgaggacgctttgggtgaatactatcagacctctgagtatccacaaccttgccagactcggggagggatgccacagccagtgtttcagcaggggctgcatcagaggaatcttcagccaacatgtccagcatggcacttatttctgcatcactcagattcaaaggcacctcgaaatgaacctgcctctcgtcgtcggggatttcgccaagtgaagcaaccaaagcctcaacctcttcgggagaaggtcgcactctaaggcccaaactgctatcaccagtaggaggatttgacacaaaactgatgaaggccttggaaggaggcagattccaggctgagtatgcaacaggagcaccgatattagacaccttgcctctgagtatcatctcaagtcggctcaccaaatccacagcagaaatccttctgttggtaacacgggttgaatcagcaaggcctcgatacagataagctggatacgctctgtcttttagtggctgaatgttcttgaaaacaaaatcggcaaccacagcctcggcagtcagacctctctccttcagcaatccaacctcagcaagcagagccccggcctcagctacctccaggtctgtgggggattcagtccaacttggagtgcagacatctggctgtctccctgaccgagggggg

SEQ ID NO: 125054 - DNA, 569 bp, Zea Mays
gggagggggtgttttgtgtttaacagacgaaagggtgtggtattttggtgggctcctagcggtctaggccaccaccgagccaactattgtttgttgattgggccgcccgagcacgagcagcagccctgctagctatgtaatgggtcgtgctgctgattctagcccacacaacatttgcccgtaccgtgtatatgccagacagaaaatcgtgcttcgtaccgaggaaggtgtcgttcgtgacccgggttgcattgcacctgcacgcgtcggcgtccgtccatcatgagcgaacatgagttaggtcctaggagaccgactggccctgcagttactgcaccaaccaacgcatcatcagcccgcgctcgagcgcgtcgcgtgacacgccaccatgggccaaggccaccttttcgtgatcttccaggaatgcccacctgcggccggcccggacggggttttaggtgtacgacgttggtagggtacgcgacgggtacggggagatgatggccctgctttcagcttcacgagaagcggagaagctatgtaccgtagtccgtagactcccaaatgct

SEQ ID NO: 125055 - DNA, 893 bp, Zea Mays
gtcgccatggccggactcgtcggcgtcctccgccagctcggcgacctcgccgagtacgtgcgccgcaccattcccgttctccagccttgctcttctctcctttgtccgcccagccatgaataaggattttgctgtcctcgtctgaattccgtgggtgcattcgagcgtctccatttttcctggaccagctgttgatgccacgcatttcgaatcgctgcgtgcgtcatggttcctggaccgatcgcgtttaatttggatttcggtcgtagtggatcacctaatgcttttttttttgctatatgctatgttttggaacccttcctccctttttttttagaaaaggtaggcgattgatgcattagacatttgactttccaggtcgttaactctgtgacggccttgtgctaggactcctagctcagcagcggggagataaatgtgccgtcataatatttttccgatcataataagtgcgtaattgtgaatcgaaatagctgctgccctttctagggggagagaagaaaaaaaaagaccaaattccaaaagcctttcttatcttcatctatgtaagaacgctccgattaattagtttctgatacccggagattggagcaaagaaaactggagtaggaaacggaacagaaatcgcaacaggaagacaactgaaaactcacctcattgttgcacggcttgcaggtttgctgcacaggtgttccacggcctgtacgacgaggtgatgagcacgtccgcgcgagggcacggcctcatgctccgggtgcagcagctggaggcagagctgccgctgctggagagagactcctgccagagagactacctgcatgtcgcttctaacaggggtgggttcattcagcaccaacaagtgcagatttctc

SEQ ID NO: 125056 - DNA, 752 bp, Zea Mays
atgagatgaggagtatgattcagtaactcatggggctaggtatgattggccccaagactttgactatctcatccgaattaaagttggaactcgttccaaatgctgtgaagctagaagggagcaagaattacttgagttggtctaggagagtgcgagtgctcctaggaggttaaggaatggagcactatttggaagagggttgtgttgaacctgttgataggctcagctctgaatggagggtttggtataccaccaactcgattattgtggcgtggttgttagcatccatgtattcgtctgtaagtaagatggttgaagccatgcgcactgctgcacaaatttggaagaccttgagcaatatgtattcaagaaaggggaatgtaatgatgatgatggaaatccaaagtaaggcagatgtagtgaaacagatagggagaccagtggaacaatatgctagtgaacttcagtacttgtggggagagctagatcactacgctcctctgcaaatggtttgtcctcaggatgcacatgttgtccacaagtgggtagaggacacgagagtgactcactttttaaagaatttggatccggagtttgagagcaggagagctgccttttgtcaccaagagagtcttcctaccatggatgaggctatgtcagcaatgattaatgaggaaagcaggcttcgagtaatgacaactaatgatcctgtgaaatcagcctacactgcaactgatgatagagactgttat

SEQ ID NO: 125057 - DNA, 683 bp, Zea Mays
caagaattttatcaaatatgtataagcatttttgtacccgtatataaagtgggcaaggccaactgctgggagcattggcactacacgacagtgaaggaactacttcagatgaagtgctgaaactaataaagctaagcatacgaacaattgtttcattagatgaaaatggtagttcacaaatcaggatggtgccattgtatagtgcagataactttcatacaggaactacagcaaacacaaaggactagggcaattaacctttataaggtcgacatgcagagagggagaggagcaagagggcaacctcattattttcatcgtctgatcactgtgtaaaaattctgaatctgtggactaaacttgaattctagtttagaattcaaagttcccaatctgttacataactatggtagtatgactgtacaaacagtatgagagggaaactacaggctcctgagcaggtaggtgggaaaacaggtgaatctgaagccaatgagtcatcattgctaaacctaggctcataccgcgtgattggtagactgcatgaccatagaagttgcgcccgcggatacgtaaagttgtatttgtttggttcgcttctttatacatccaagctccacacatgcaagaaaacgggcgcagccaggcccgcgaggaacgctccaagcgagcgtacgccggca

SEQ ID NO: 125058 - DNA, 392 bp, Zea Mays
gtgatgagttgtgcaagctgaacttggaagttgtttcttcaggtaccttaaattatatctcggtggagcccaccttacaagagaaaatagtcagggcacagattgaagacaagggtgttaaggtcatcaaggaaatgatcaagcagaaagcgaaaaaatacaaatgcttccgccaggacagcaagggaattctatggtttggagatcgattggttgttcccaaggaccctgagctcagaaagaagatattggatgaagctcacctttcaaaattctccatgcaccccggcagcaacaagatgtatcacgatctcagatccttatactggtggaccagaatgaagagggaaattgccaagtacatatccgaatgtgacacctgctagagaatc

SEQ ID NO: 125059 - DNA, 686 bp, Zea Mays
catgcaacagactgttttgaaggccatgcatagttctccagtcggaggacactcgggttttcctgtcacatatcatcgagtgaaacagttgttttcctggcctggtatgaagaagagtatccaggagtttgtggcctcatgtgatatctgccagcaagctaaaccggatagaagcaagtatccggggtcacttcaaccattggctgttccagctggtgcctggcagacaatcactcttgattttgtggaaggtcttcctctatctcgtggtaaaaactgtgttttggtggtggtggacaagttctccaagtacggacacttcatacctttgaagcatccttttactgctgcttcggtggctcatgtgttcatgcaacaagtataccgtttgcatggcttaccatttgctattgtgtcggatcgagaccgaatttttacaagtcaattgtggaagagtttgttctccttggcaggcgttgcattgaatatgagcagtgcttatcacccacaatcggatggacaaacggagcgggtcaatcaatgtctggaaacgtttctgcgctgttttgtgaatgcctgtcctcataaatgggtgcagtggatttatttggccgagttctggtacaatgtgagttggcattccgctcttcagctgtcaccatttgaagtattgtatgggtacaaac

SEQ ID NO: 125060 - DNA, 2231 bp, Zea Mays
tttgatcatagaaatgagggggtcctcaagctgctgctggttgacaatgctgtgcacttgttgcttttgatttgggggcagaggctgttgatttctgggccatggtttggagtttgttgagtgtgagggctcccttggcttacacagcgcctcaatcttacgatagtgcgggggctctcttgtcttcgaagttggaccttagcatacttttcgaagagttggtacaactcttggagggacgtttggggtgtcacaggtgcaatgattgtatacgtggcctatgcgcggcgctgatggcataatggatagcgatttcgtcttcgatcgacgacaactgagatttgagtgatagaaatttgttatagtagtcacgaagattccttctctggttgctggcataaggatagctccatgagggcatcggtctatggtctgtatccctgaaagttgagtaggaatttctctcgaagggctgcccatgagtcgattgataacgatggcagcctgatgtaccatgtcagagtaggccttcgaggcgattatgaattactctgtcattgcattgtcgtctccttcggacgaggactactgccacctattagcccatgatgaattgcaaagggttagctttactgttgtatttgggccaatttcctgctctataattgcggggccagggtgtcgcctgtagcctggctgacagagggtacctttcgtcggtgaagttgaaggcctggaaggtgtcttggtgtggagtctgtctggtttcttcgaagttgtcctgtccttatctatggtgtgaaaggtgagatggtagttgctgagtctgaagctctggaatttctcgttcgagggccctcgggcgctcctttttctgctggataaggtattggaccttggcctggacttcgttgtgttgttttttggctatgaaagtgtccctttgcttctggaggttgctgttgcgcatgcgaaggcttgtgagtagttgttcctctgtattgatgttgaggtctacgtcgtcttgtaggtcttcgtcgtaatctgaggtgggtatccctagcgagtggagatggtgacatgttgttggtgcgaagcctgggggaattggtgacatgttcctcgtcaagtatggccatattttggccttgtagggatggctatgtgggttgagtggcgcgtcatttggggtcttggagctggaggtgtgggcgcttggcacaggggatgacaaccgtttttgtttggggggttggtggttttcaccttctggttcggcggtggcttggggaatgttgttagtggatggctataggatgtcgtcgacaaagaccaccttacctttttggtgctagcgacgagggccgccatcgttgcctatccttgggtgaggagttggcccggatgttatttttcttgggaggcattgtgggattggccttcgtgacacaaacggttggcgccaaatattgggtcctgacaagtgggccccaacactcgggagcggatgaatgaaacaatgaacgacaaaacattaggtaggtgaactgtagcttcttgttgtgtgtgtcccgtccagctacaggacgggagtatttttagggcaaccgagggttggtggcccaaaatacattcatatccccggttacctactacatccttggaatattccgcgtaacggggtaattacagcgaggtgatgtccggtgggcaggcacacctaaatgtctacccactgattgcactaaccggtggggactacttctcctggtccatccatatcgtggggcctttgcgtcttgggacccctcgtaccaagcgtaggatgatccatgtcggggttttccgaaccgtcgtgggtaacgaagtcctcgaccttgctctccgcgtttgggccttcgcctagccgccatgctggaggtcttcattcgtggggagccccctgagctcccctggtgggctcctgccttcgcatggtggtcggtagtaactggagcgaaggccccgcttggggtgagcctgtcgaagtcttcggtttggccaggccctgcaatcaggcatgatggttagtcatgtcctagaggcaagtttacgaagggtcgatcgaggtcatcgacgttaggttcggtttccatcccatcaatcgtgtatgaatgggctgtaaacaacaattaacagtaccacatttattgtttactcagtgcaaatcatgtttgacggtaccacatagg

SEQ ID NO: 125061 - DNA, 620 bp, Zea Mays
cttgtcttttgggattctttcctctgccgtcattaaattgctaccatttggtaatatctattcctttggtattgacatactcgtatccctagattcctcaatactcttgtctcaaatacttacctctgaaaactttgttgcctatttaaacattctagtttatatgtttacaaccttcttgtgttttgagacctcttcctatttcgttgttaagtcattatctttggacaatttctattcccttggtcttaggatgctcgtatccttggagtcttgtatactcctacatctttatatatgcttatcttcataccctaatgtccgtttaagacattttagttaacatgctcttgaccacccttgtttcttaacgatccatgagcaatcattttatctcgcacatccttagtgatcttgttgcttccttataacctccctcggtaaggaatatttacttcaacccttctgttggaaccttacctatcttacccttgattgttttctccacttcgccactttgcgagtcttgccttaactctatcctttgttatacttttcattattatcgtctttacccttgacacctctatatcctacattgatgtttgtctcatacctgc

SEQ ID NO: 125062 - DNA, 531 bp, Zea Mays
cttgatgtttcttgggacaggaatgtagaggaaaaactgaaattacaatagatttttcaaatcagcttcagatgtctgatccaaccactcaggtgcttcagtagatgtgcttcgattctggtaaagtattgttcactattctggccttggattattcgcttgcgtctcgctatggtgtgttttgctggatctgaagttgtcctagatgttgttgctcatatgacaaaggtgctagtgtaaatggctggggcaaaatccatcgagccaaagagtgacttgtcgaagcaactgagcccgagggttgtgaacttggctgttggttgcaaacatattctgaaatgtatggggaataatacgaagcggtgtgaaggacctgctttgattgattatgtcatgcttcagcttcgaagatttccttctgcttctggattgtgacttgataggctcttgttgtatgccccttgtcctctccacagaaaaggcagaagattttccttggttgaaagttggatcttcctccaaaactccttc

SEQ ID NO: 125063 - DNA, 842 bp, Zea Mays
atttggactaaatatgcattttctatgaattaaacaaattctagcatttatttttgcataaaaatcattttctaattcctttttctagattttataattctctggactgggcctcaattacaggaaagtccaggggttaatgcgcgaaaagtcccaagacacagatctacctcgcggtggatggcgggtttatttttactaaagacgggggctcttatgcaaaacgcaccggccaaaggggtatggagagattcgagtcgtccgatagcaagtcaagggccgagatcagatctgcccaagatcaaaacggtatgcgccagaagccgcaagattaaaaaccgatggtcaggatttaaacacctaggaactaatctacagtctacattcgcaatccaacggacagcatcgattggaacgaatgggtaaactaggatctaatcctagccacccatcgtgaggttgacggccacagacccgccttcctccttccctgagccaggccgagcagcgccgcaccggggactacacggcggtgcgccatggctggtgcatgtcgttctgcgcatcagggcacaatccactaatcgaaaaggctcaacacgcagtagagggtagggtgattcgggtgtgcttccttttaccagagacgaaggtgccgaagcggcgtccacgcgagaggggcaacccgtgatgtagacttgatgctggcaccagattctagctccgggaagagatgtgtgaagccgtggccaagtgttccatttataggcgcgaggagggacggagcttgcctggtttcgagggatttccatcgatggttgttgcgattcccccgcgagcgc

SEQ ID NO: 125064 - DNA, 754 bp, Zea Mays
gttgaacagtgctgggctgattctagcccagccggcccagcagtacagtgaacagggggggcgcccacgcgcgcccgcgtgcgctggcgatcttacagaaagacccttacggtttttgattaacccaaggaagtccaaatactattgaatccagtcgctgacactttgtaaaaatgtccctagacttctgtctcttctccaaacacacccctggccatggcgcgctcgccgttcgcccctggcgacgcacggactagccctggccggcgatggctgctcggtttagctagcggggaggcttcactgacctaaagagaactaggaacaaccattaatttgacaagaaacccactgggaattgcttgtccacgatcacggcggacaccgggcatgggagcacacgttcccgccaaaccatggtcgatcagagcaaacgagcgccaccatgagctttgtaagcatgcagaggcatggaaacgacacttgaattggatagggactcaccagagtggcctagccacggacgggctgttctacgcgatgtggcggaccagttttggggaaaatggcgcaacggcgtctctgggcgaaattgggagatgggattggggctacacggccgtaaagaaccactgattccccgtgtacaaccaatttggagagtgggagaggagacacggcgaattttggattgcgatcggtttgctggtaaagaggaaaacacctcgccgtggaccaccgtgctatttatagc

SEQ ID NO: 125065 - DNA, 816 bp, Zea Mays
tgttgctagctgtgcccgccgcctaaaaattcgtcgggcgtgaatctgttgcgaagaacgagtcgctgttatggttgttaggattttagcgaatctatagcgattcggttgtgcggtctagcacgtttctgccgcctctgcctatatagtctttccgcgacctcccctctcatcacaactggttaaacatcgccattgccgaccagagagcgccacacaccacaaggtcgcggtgcttgtcgtcaacctctacgatctctccaaatgctggtatgaccccccgtggatagcttcatcgttctcctctcatcgtttagcacatatgcacgcgagggattatgcaccggatcgccgaatgcgcttcactccggcagggctccaccttggatcttgccgcctccgctcggtctgtctgagggaggaagatgcacagcggccgtcagatgtcaaaggtgtggtcaggatttggacgagatcacgccaccacatacccctttcgtccatcggatccccgccatcgatcctcgatctaatggttaggatggcgtaccggttcgggttctgatctggtgcgttggatcttgatcgggcggcccacattatgttccggttcacttaaagcacggttctaatctgggccctcgattctgattggacgactcaagttggctgataccccttcggcctgaccgatttgcaaaagagcccctggctttcttaacaataaacccgccgtccgtgggcgatgatcacggagtcttgggtgtatttgtagatcagtccctaggtttttcagaatttagcgcccaatccaga

SEQ ID NO: 125066 - DNA, 301 bp, Zea Mays
acggtgtagatatttatgaagtgtggtagactgcgtaaaaatcagtttcttgctacatgcacataaaattaggatggcaaagaatgtgtgttgaaagaaaattgtaacatcccaaaattctaacccaggtttgaaaccctaatctacccctcccctcttttcatcttctattccaaaactcccttagatttttcccatcatatgcatacactttgtttgatcacaagcacctcacttagattttattttccaacacctagattatccactaaataattttgttcaaaaagaaaagaaacaa

SEQ ID NO: 125067 - DNA, 285 bp, Zea Mays
agtctgtcgaggttggtggggtaacgtagctagggtggcttgttggcttggtgtctcatgtccttgatacggttgttgattctcctcttgtactacatgctcagctgaagctatacctgcattttctagtgtgttagctgatgcagcctattctatcacttgttcagctgaagcatcctgttctacagtctcgggctgatcagctggtgcagccttatctactgctggaggttgtggtatttgagctatatctctagcctattctaccacttgtttagctgatgc

SEQ ID NO: 125068 - DNA, 325 bp, Zea Mays
tctattcgtcaaggcagaagatcccttagaagctgacgagtggattcgggttatcgagcaaaagtttggtcttctccgatgctcagagacgcagaagccgttgttcgccgcacaacaactccgtggtcctgccagtacctggtggggaaattttatggctattcaacccgacaaccatcaagtcacctggaatgagtttaaagcagctttccgtgaacactacatccctgagggagtgctgcatatgaaacaagaggagtttatgaagttacaacaaggtggagataccatcactcaatacctcaacaaattcaatcacctgtcg

SEQ ID NO: 125069 - DNA, 790 bp, Zea Mays
caacacacccattagggtcagcagcagatggagcacccccactggggtcagcatcaggtggagcacccccatcggggtcagcagtaggtggagcacccccatcggggtcagcagtaggtggagcacacccattggggtcagcatcagtaaattcaggaacaggcacttcttcagcagcaggaaccgaaggaccaacatcccgatccaaactagatactcgccggagacgtctctttttccttttctgctcgtcagcaggaggatcaagttgattggctcgggaagggcgtcttgggcgaacactaacaggcttctgaatatccaaggttgtatcagtttctgggggaggagccaccaccagcgtcccaataggagcagcatcagaagagtcctcagccagcaaatcaagcatagcacttatttctgcgtcactaggatccaaaggtacctcaaagtggacttgccgttcatcatcaggaacttcctcgagcgaggcaaccaaggcgttaacttcttcagcagagggtcgcactctaaggcccaaactgccatcagcaacaggtggattcgaagcaaaatgagtgaaggctttggaaggaggcaggttccaggccgagtatgccactggggcaccaacgtttgataccttgcctctaagaatcatctcaagtcggttcaccaagtctgcggagggaatccttctgttggtaacccgagttgagtcagctaggcctcggtacagataagccgggtaagccctgtccttcaacggctgaatgttcttgaaaac

SEQ ID NO: 125070 - DNA, 278 bp, Zea Mays
gagcgatgcaatgcaaggcggtccggggctgatcgatgaagctttctctcctgtctcggagagagcgaagtctgtcgggcacacaggtctggtgctgcatttttcaattcaaggccgagtgtctgtacctgactttaccaacttggaactcaactagcacgagtccgctcccggcaaccgaactctgcacgcaaaggaaaggctcctcgatcgtcctacacagcgcctttgggattgcaattagctagcaaatagttgccatcatgccctactcattg

SEQ ID NO: 125071 - DNA, 519 bp, Zea Mays
atgaatgggttgtaaactggtgtcgtaaaccaaccaggccatgaataacaacttgacctacataacaggttgcataacttatccacccaatctagaagcaaaaaaccaaactacattctgactaatcttgttcaacttatagctacctactaaactagctactcaacctactaatgtgttacctacagatctatcttaacctcttgtcccaaacccggacaaagacaccaaagcccaagaaggaagagatcaacctcgtcaaggaagaaaagtgtcaaaccaggtctccaaacgagtcaagatctatctagttcaaagcttttctgacctaaatctttctcaccacgacctttcattgacataaccgtatcgagtccaacctgattgattgctggacataaagatacacgtgcgttcctaatcacctactaatttgtgttaaaaacttgaaaagaaaagaaaacctttgattctcgaactgatcagggactaaaagctaaactgcaaactaaaccgtcc

SEQ ID NO: 125072 - DNA, 604 bp, Zea Mays
gaaaacgtaggggctacggtgcaaatgtttctaagacttcgtggactgtttctgtgtaccgcgggttaatttctaagaaatccaggggctcttaagaaaacatgccagggccgaagaggtatcgagggttttcagccgcacgatcaagattctagggccccgattagatctagcttttaatgaatcgttatgcgctgaggattgtcgattacgccttctacggtcaggattttatgagacgaaagggtacgccaaaacagatcgtggccacccaaatctaatccgacgctcagcatctaattcgtcaagatctaatcctggccgttcactgcgatccgacggtgcacacaccatcttccttatggcgctccccagaaccgcatcaaccatctgaacagcggtgctcccaggtgagcacaccgttgaaaaccgatcccggtctgtccttcgccgctttcctccctagaaaatactatacggtgggcaagccaaggcgaattgatcccaataatccctaccaagtcggcacaaagaatcgcacccacacgagtaagcggcatgacggcgaaggcgcctccccgatgagcaatcagggcggcatcag

SEQ ID NO: 125073 - DNA, 279 bp, Zea Mays
agacggagacctgcgtccggctctggcataactgcaagcttacctatcaagaacatgggtgtcgctgatccctgaactgtgcgcctgattgttcaggctgccaacaatggtaacaacttttgactagcaagtctttaattagccggagttaagataatttactttcaccgaaggaaattctggtgattttttgtgtgcagtctgatggagtctgtttcagacgttgagtgttcagttagagtaattttatagctttctagactagatattccaatttag

SEQ ID NO: 125074 - DNA, 500 bp, Zea Mays
ctcggaggccccacgattttttcaactttttcaaactagtgttgagcgcctccttgatgccaagataaaaatagttcaatctgattgggggggagagtaccaaaaactccacaatacctttttccggtctttgggcatcactcatcatgtctcatgtcctcacacccatcaacaaaacggctctgctgagagaaaacatcgtcacattgttgaaaccggcctagctctgttagcccatgcttcaatgcctctcaaattttgggatgaagccttcctcactgccacatacctcattaatcgcatgcctacccgtgtcatcgataacactagtcctattgaacgcctgttccacaaaactcctgattattcgctcctaaaaatttttggttgtgcatgttggcctcatctccgaccatataacaaacacaaattatctttccggtcaaaagagtgtgtttttcttgggtatagtgcatctcataagggctacaaatgtctag

SEQ ID NO: 125075 - DNA, 513 bp, Zea Mays
agaggatttttctgatagacgctgatgtgtccccagactcggagggacgttgtaggccatcccctgcttggctcgggtcgtcgtcgtcgtgcgcatccgccttgccgtttaggccaccacgaaaacaagctgggccgccgtgcccgtgccgcggaaacaacgcgccaaggagggccacttctgtttctctgctcctttgccccctccttcctgccttcccgtcccgctgcgtggcgtctgccgtctccgtctggcgtggctcggtacgggtagcggggtaggtaggctaggccgaacgcagtctcgcaccgcgccggcatccgaatccgacgcacacaataatatgcacggatcggacgggagcgtgcggccgtgacaactgtgtccgtcacacttacacatgggtcgcgccagtacagtgcacagcacagcttgcaagcgcgtcccgggaccatgtgatagtagttattaacgtgcgtttcgtttccaaataaaattatatccactttttcg

SEQ ID NO: 125076 - DNA, 845 bp, Zea Mays
tgagaacgtgcacgacatcaacttgtctgatacgggagcatcggcagcagccagccccagcccctaggtcctcctactcctggcttcccgggcgagaaatttatttgtccatttgtccatatctagctggatcttcgtggctccctccactcacgctgcatgcaagcatcgaagccgacttacccaacaactgctatcggccactatgcactaaggaacgctatgcctaatgacgtgtgaacccagccacatcctcggaccatgcgtcataaggccatacaacccgtctcttctccatggtgtgtgagcaaactggcccgcgtcacgcgcgcgttctagaaggacctgcaacgcaccaagcgcttcactaacaaatggacaccgtgatgtcgtgcccccgcataacgcttgcccccgttcccctgctccgtcgtcctcgtctgacgcccccatcccctcgggacgttggttggcaagagggccggtgaggcgactcgctccgctgttcggtttgggagagatctggacctgatcggatcagtcagtgccaccgatccctgatcgagtggcgtaaatattctaccgtcacatctgatctaccgactccttccgacaaattctgaccacccgtcgtcgactctcgtcttgcggtcttcacacttttgtgtctatttgcttgttcggcttgaatacgtgcttcagcttgtgcaacacaagacatgctagaagtttaactatttattgctgacattaatatttatgaaacagggattgtgtggagctcatttgatttaatgatgcgattctaggaatcccttccttcaaacattatcgcacatattttt

SEQ ID NO: 125077 - DNA, 733 bp, Zea Mays
ttcattccacccaaaaaaaacccactttgtcaatcactttgcaaaaagtgaaagtacaaagagtgaattaaagaacataaggcaacaatggctttggcttcataaagatatatagttcaggaaaacttattgtatatcatgttgatatgtacatatttaagaaaaaaattcggtcagcaaaagcatgttaaaggggaacatactttggaggaactgtagaaatgctgcagtgacgaatacactagatagataatacaaaaggtctttccgaaggatttcggtcactgaataatcattccaagcaaaaatcagcattgcctgttaaataagatactagaatattagcaggtgtcaaactgtagtcaagataaaagaacatccatatacaatttcagtatagtacctgtagagccaaaatatagaaagtccacattcggtcaaaacttcggaagatgtgccaaaatgttctagtctcaacgaaatttgtcttccctgtacttttcgtggaatccttttgtggtgagcttccagcctacaaataaagtttgtcacaaagcaatcccaatcaaatttgttgtcaagaaatattgacagaacacatacgaatatcaaatttgtaccgttgttacaggccttgaatcatgcacggatttgaaaaagtcaccatcatcccgcataggccacccaagcgagaaacaatcagatgtcctgagtgaatggagtaggacttgtt

SEQ ID NO: 125078 - DNA, 345 bp, Zea Mays
tgctgctgctcctgctcctgccgccacctgctacgtagcatacgcggacggacgtaccaccaaacccccaccgaactagctgccggtccatcgcgctacgccgctacctacgacgatcgggcaagcgaagcgcgcgagttcgacgtcgtcgtcctctggcatcatctctatccgccgtcctgtggtatcgtcagcagcaccggtgtcgtcgtcgtcgatcgtttccggttgtgaggagaggcggcgatgaagaggaccacgagcaggagcggcgcgtcgcccgccgccggcctgtggctccggccgggccggctcggtgaggttctcgccgtcgcgactctgctg

SEQ ID NO: 125079 - DNA, 424 bp, Zea Mays
gttcacctagagctggagtgtattgtggactgctgttgctgctgtgcttgaagtatggatgtatctgtgtatgatgcctgaagcagaaactttctgtgtttgtggggtgtggacagtggagagtggactgctgcagtgctgctgctattgtgcttgctgtgtcttatttcatcgaagcgaccaagccaattagccaagcactcaactgctatgtttgtggactactacctgtaacctgtgtgactgtctttgtgaaatgaactcttttatgtattatctgtctttagtctgtgtttaattgttttattagtggactcgcctactgtcttcagtctgtgtttaattgtttattagcgcagtggactactggactgccttatgcccttatgtatttgtgtgcacttgtattctcgcgggctgcttt

SEQ ID NO: 125080 - DNA, 427 bp, Zea Mays
tgcgccgccgctcggtctggctcagggaagaagggaacgtcgtggccgttgatggggttaatcaacggtgtggattgggggctggataccgggcaacgagggccgtagatttcgaatctggcggttgtgggttaattgggtttcataaaatctgggccgcagatctggggatcgggacgacgtgtcgatgaccgtgatctagtgatgaagggctgggaatagatgtaggagtacccctttcggtgattggatccgaaccgttgggcagatcggatggcccatattggagcacgtcccattaaatactgactgtagatccatgatctggcggccagtagcgcgcaccggttcacaggattcgcaatctaatctgggcccttggcttttgatcggacgaccctgattgactcataccccttcagccgag

SEQ ID NO: 125081 - DNA, 558 bp, Zea Mays
actctgttggctaagcattcctgaactaaatctctagtaccaataagttcagatacaattctaaattcgtccacagcatctgggcatggtgcccccggcgtcatgttgcactgaggcctagtcaacccgaaggttagttccagcgggctctgagctagcttctcctttttctcatcaattttaacataaaaccattcagttttccaaccggtcggccacttagtacggtagctaaccaccggtgtcttcatgtccttgcggtacgcaaaattataacagccgaagttttcgtgcagtccatcctccctagccttcgtctgatagtgaagtttgtgtactcggcagaaggcttcggcaagcggctcggctccttggcttcgaagagcccagataaacacgctgagcctaacgatagcgttaggagtcagctgatgaagataaatctcaaaattttccagcacatctgcaatcattccgtgcatgggaaacctcaaccctgctttgaaaaagcttttaaaaactaccacttcatcattttctggtttcggggtggtctcc

SEQ ID NO: 125082 - DNA, 338 bp, Zea Mays
actacacgtcgtttgacgagggcaactcgcgggagcagcgggagctggcgttcagcagggatgcccgcatctaccagggcgccatccaggtctccccggacaccggcaacgtcggcagctaccaggacatcatggtcaacaagtccggcaacgtcctcctccagcgccgcttcaccatgtggcgccgcctcgacagcggcaatggcaatggaaccggtgccccgccgcgcgtgcaggtcgtgtcgttcaacagcaccttctccatcaacgtgttccacctcccggactcgtcgccgcggcccggcgagggcctcgccttcgtcgtcgcgccgtcccgc

SEQ ID NO: 125083 - DNA, 362 bp, Zea Mays
agataacataggctagggtattgcttgccgaggtctgcttgctgaaggatagaggtctaactgctgaggctgtggttgctgatttcattttcaagaacattcaacccttgaaggatagggcataacctgcctatttgtacaatggtgtcaacgattctacccgggtcatgaacaagaaagttcccactgaagatctgatgagccaattggatatgatcctgaggggtagagtttcaaatgttggtgctcctgtggcctattctgcctggaacctgccactacttaggccattttccgagtttgtgtccaaccctcctgctcgtgatggtagcctgggtcttagagtgcgaccctcttctaag

SEQ ID NO: 125084 - DNA, 323 bp, Zea Mays
gtggcaccaaaccataactattattgtctccccttcctcctagggatgaaaatgagatggatacagccggatacagggtcatcccgtatcctatcctaatgtatttctctcggatacatgaccggacacaggtagttaagattcgggacagatacaggacgggaccgggtaataatccgggcgggtaagaaatggataacatgtactactcgggtaggtaccggatacttgtcgggtagttcgtcccgatgatattaattgcccaaccatccaacaaacacataaattaagcaatacataatcatgtatatgatagatcaaat

SEQ ID NO: 125085 - DNA, 3067 bp, Zea Mays
cgacggggcgtgcttgaagaggtacaccgacccgtcctccttcaggacgggctccgcatgtcctacgaccttgctgcaggaaggaactcgagatgatagaagacctctgagagccgtggtaataaacaaaatcaggtgcaccaaaaagagaacgacatcgtccaacggaacattttttttttgaaaaaaaacattttttcccactcttgcaggagatcagtcctaaccttcagaatgctgagattttcagatcccccaatgcagccgacaatttctccaagtacctttcctcttacaatttggtttgtattttttgcatgctatcgtctctgcttgcttattctaaaaacgtcatcttgtccatctctgtactgtagactggagaccggttcatcggctggagctctggatgaagtgcccacaaaccgcagacgactcaagttccgccagctaaatggatccgtgtttcaaagcttcagaccgctcatgcagaatctgcatgaaaagccttcatcagaggagagactcatcacaggcgaccactcaaaagtgcatgtatttatggttgagtcacctgaaccaggtgctgaagagagagatgtcatggtagacacgtccgacaacatggagaaaggcaagctcaccgttcgcaggaaaagatcagtttctgaagaagcactgtcacgttcgtctgatgctcggtcagcaggaagcagcaggggcggctacgactccgaactggatatctacgtggacgcattaaccacgatggattctgaagatttcagtgctccggagtctggagcaagagagcaagctactgaagaagaagaagaagagcagagatgcaatggcagtgtcaccagtgctgtatcaaatggcacacgagatattactaagaagaccaaggaagtcaaggagaactccaagaaaatagcaagcaagaggtccaagtatgttggcagcatggagctcactgcttcaaaagttggcattctgccaagggagctctccgagaagcatgcccctttctctggttccctccggtacatggcgaagcaactccttgaactgaggtatgatggcactcaagacagcgaattatatgacgttgaagcagacggcgtgggacgtgatgtcaagtaccaggaaatttctgaccatgctgttgaagctaaggagagtgatgctgtgcacaaaattctgtcaggttcaccctatgatgatgcgggtttaggaaaatgcccgcaggaagaaattaaccatgggcaggagcatgatgttccacctactgacagtccacatgattcggcccctgatgaaggaaatgggtttcaggactccaacatggcctacttggtaggcatcatcacatcttccagttcccaagagggagaaggatgtacaagtactgcactgcatgagaattcatctatggcagtgctcaaccatgttttggaacatgctcaagagaggtttggggaagatcttgacaaggaagtggatgtggacattcatacagaagccatttctgagaatacatctgataagtgtgaggacttgaaagaagtcagcatttacacggagcaggtgaatgtggaagatatggaggaaatcaatgaatctgatgtatatgcgttggacgatgaaagagccgagtacatagaacagcaagtagtttcagatggtagtatctcttcaccggtttcatccaagcaatcggatgatccttgctggataactccactcaccctcgcagatgaagatgatacagtggcatgtaaggtcgtcgacagacctgaaggggatcatgttatattatcagaaacattcaagggcattgatctacctaatgtggtaactgagtcagtaatcaacagcaaacatgacatgccaaataatggacagtactatttacatccaaaagctacttttggacaagatctgtgtcttggcagctataagattgttggagaaaatggggaagttccactatgcagctcaaccactgcgactacaactccagaactaactgtaaacacagagacaaagcatgagtttcatcaagctgtgtatcaggaaccatcgaattcattcaatagcagtgctgaagtttttggagatccactagctcccgactccagagatgatgcaccgtcagtcatctcaagctttgattggatgctcaatggtgcaacgcagaagtcattcaatatctttccttctcatccaactaatggaaatgcagaagaaaatggttcttctgaagatgtgccaccgcttcctcctcttccaccgatgcagtggcgaacaaacaagatacagactgggccatcaccgttatctgcgaaaattgggagaccaccaaggccaaaaccttcagtaaaacaacaacaaagtgaagcttctcatgttcttcaggagaacagtctgcacaaaggcttgagtttgcagaatgaactagtgcaggcaaatatttctagtgaccatgagaaaaaccaaattcttaacatagattttcgtgaaagtcatcaccaggaaggagaggagtatgatgcacaggattctaatccatttgcctcgtcagaagttgaatgcttggccgaagttgcttcggtaaaaagtgaaaatctgcacccattgcagctacctgagcttatagttgttctggaagaggcatggtcagagttcggtaatataaaattcatgccagaacaagaaggaaaattccaactaagcaatggactttctgtttggaatgacttgtgcacttctggtttgtcatcacaaaagaccagcgagaagcctgaattttttgcagattataagggaaaggaattttcatttgcaggtagtgacgaagttgcagattcagaagaaaacaaaccaaatggtgctgttaaacatctgcagaatcctgacttgccagcacaacagaaagacgacatacatgattgtgatggcaaggtaacaaagttttcctctgcattagaagaggactcgtcacaatcaccaactcatacagtgtcaggaccacctagatatcctctacttcctgttacttctc

SEQ ID NO: 125086 - DNA, 356 bp, Zea Mays
ctccgctccacggctatagctgccttttgtacgcacgcaggcagctgtatataaataaatagtaagtaatatgctgtcgtcagtgctgctaaacacacaccttgaagtgaagaacgactgaccgattcgtgtgagcctgcctgttaaagctccggtccagatgtaatgtaaccaacttgggatattgaagaaaaaggccgatgagcgactccatattaaaccacatatcctaaattgctcgtttaggtaggatcgtgacaagagatattcgaattaatgaacaacatatccgaggccgtcgccgtcgccgtcgtgggatcaactttctttctttttttttgtttgcttgataaaat

SEQ ID NO: 125087 - DNA, 547 bp, Zea Mays
ggtgaccggagctaggccaatggctcgacggagcaattggcgccgctgtggatcgctccgcgccgtggccgagggccaccccaactccaaccactggtaagccacctcgattcagatcactcggatttcctccttgcgttgcaccgacctcgagagcgaatagggtagtggatagcggtggcacagccgccgtcaacctgggcgccgccgcggttgggcaaggcaccgcccagctcgggctgagaaagtagataagcgccttgccgttggattgatcgccagcggctaggattagtggatcgcctaccccttcgtagcttacgatctgggccatccaatctcgatccaacgaccgtgagtgcgtaccccctttagatttatgatgatataatcatggccgtcggttcagatctagcggctgagactccaagataccccttcggcctcaacaattcgctaaagagaccctgtgttttactaaaatcaacccgccgtcccatactgttgtgcgctgtgtcttaaggtttcttgcgctgagccccctgga

SEQ ID NO: 125088 - DNA, 606 bp, Zea Mays
aagctcttattgataaccttcgaacaagttttggggttaaagataaattatcataaaagtgagctttttggttttggtctgactgaggaggaagaaacactctatctctctctatttagatgccaaaaaggcggctttccttttagatacttggggatcccaatgcattatataaagttaagtaatagtgattggaaaaccatagagataaagtttgaaaagaaattgagcagctggaagggaaaacttatgtcggtaggtggccagttagtcttgattaattctgttctcacaagcttagttatgtttatgttgtatttttttgaagtgcccaagggtgtattggaaaaaatagactactatcgctctaggttcttctgtcaaggagaacatcataaaaaaagtatagacttgcacgatgggatattctttgtcaacctaaagaccaagggggtctaggtattcagaacatagaggttcaaaataaatgtttgcttggcaaatggttatttaaattgattaatgaggatgatctatggcagaatttacttaggaagaaatacctcaaatcttgtaccttgtcaaaggtaggtagaaaacctggtg

SEQ ID NO: 125089 - DNA, 534 bp, Zea Mays
gataattttgctcatgaggcctgagtgctctggatgcgtaggcgataactcggttgtcttgcatcaaaacacaacctagtcccatgcccgaagcatcacaatacacttgaaaagatttggtgttgtcaggctgtgctagtacaggtgctgcctcaaggtgtgaatggcatcttcgcatttctgaccccattcaaacttcactcctttcttcaacaacctctgtcattggtttagcaatcctggagaaatccggaatgaatcatcgataatatcctgccaatcccagaaaactctgaatctgctgaacggtggtaggaggtttccaatccatcacttcttgtaccttctcaggatcaactgctattccgtcctgcgaaatggtgtgacccaaaaacttgatctcccttagctagaaatcacatttggagaatttggcgtacaagcgatgattgcgcagtcgctgaagtactgtgtgcaagtgctttgtatgctcgtcttcactttttgaatataccaaaatgtcatcattgaaga

SEQ ID NO: 125090 - DNA, 467 bp, Zea Mays
gcggaactgcgcgtgggattagctttaggatttccagagtagtactatatgcagagctgaagagggcattgacggctggccgacgacacaatattactggcgttgctgcttccccctcatctagtgtctagtctagtcctgcttgctgcctgctaacagcaaacacaacatgcatgtacagcagcaccaacgccaccatgcttgctagatgatggagtgcgtgcactctatagctttgttgcaatattgcaagcaaggaccatgctatgctactggcatatagggtgttgtgtgttgttggcttcattctttcatgctctccctcaccctccaatgataatgatggtccgacctagctccatctctgattgttccaaaactgacatctatcctgatagtctcatgcatctctgatcatccatgcatgtatggagccagtcaacctgcagagccagagccagtactac

SEQ ID NO: 125091 - DNA, 469 bp, Zea Mays
aaggggcctcagcacgaagctccgaaaacatcccaatactgtccgagcaaatagttataatgacctggtcaaccgggccatctctcaagaggattgcatcctggctcaccgggtcgaaaagaagagaaatacaccaatgaccggatcttcatcacaaccccaatgatttcggattgttttatacaactaaagtagaggatttcagcagcaattgggaaggtgggtgataaggccaccccaacagcagcaagcacccgaccgcattctagcacctgctccaagaaacaatcaacctcagcagcaaccacaacagttatgacaggtgactagaaacaaatgttatgcttgcaacaacgtaggccactacgctaagggttgcccatgcaatcaaccaagacccaggatagttgcagctctaggcaagggcaagaagcagaaagttcaagtcaagcagcgaaggctaaacttc

SEQ ID NO: 125092 - DNA, 312 bp, Zea Mays
aaaagggggagattgtaagaaaaatggaccgatgcccatttgaacaatggattttggtgctttatgatcaacataaccattgggactaatgaggttgctagtgtttatggttataattcaaatgatgcaatctggacttggacaaaggcaacaaggtgattgtgaagattaagaccctaacgaaagtatttagaagactcattgaagacttatgacaatcatgtaagagtccaagacaaaatatagaataagtacgaattaagatacataaaaaatgaagaaattaggctacacatgaccactgaatgtgtg

SEQ ID NO: 125093 - DNA, 272 bp, Zea Mays
gaggaaccaaccatgagaccgagattgataagcttttagagacatgagtgatccaaagataacagcaacatccattgaactaaatggatacgccgtttaaagaaaaaattgataaaacaacgtcatgatcctcgaggaacgagtataagaagtatcagaattgagagatttaggcagatcaacatccgatacttgagaacgggttatagcagataaccagataacggggcagaatcaataggggatcccgagattcggatgataaagccaac

SEQ ID NO: 125094 - DNA, 600 bp, Zea Mays
cgtcgccagggcatgtggaccttgcggcatgcacgattgagcttggagttgcaccatggggcgaattattgctcgccggagcaactttggcatcccggatccgtccaacgccgtggggagcttgtttctgccgccactgccggtaagaatactctctagtatactcgcgtttatgtcagctacgtgtaggattagttggcgatggtgtctgggcgccgggccgatggatggccgtgggcggcaatggcatcgccggctgtgcaggacatgccagcggccaacgtaggagggggaaagaagacggagcgggagcccttgatccgtgaatgaacggtcctgttttgaccaggctgatacctcgttcgtccctttagtctggccattggattacgtgtagacggcttagattggtcgcgcgaatcgtttaggcaagggttaatccgggccgtaggatcgaatcggatggatccagggtgatctcgacttctttaaatccctacccttgatctttgatccaagggttcctgctgcataccggttcgcgcgggtgtataatctaatctgagtcattcactctagatcgaacggctcagatggtcc

SEQ ID NO: 125095 - DNA, 577 bp, Zea Mays
caatccttgccctcaaggcctcggctagatatgtaagtggatcgaataacttactcgaggtgccgagtttcgatgaactcgttcatttccaaggaccattcacgcaaagttgcaaatattacaataaccaatccagaacataaactttaaaaaacaggagttgagcggaagtgactgggccgaaaccgacccgctcggcccacgaacacatgagaaaactggccccgcgccatccgcccacgccagcgctgtgcaattttgcgcaattacccccgttgcatcagctaaccgaataaaggtcctatgtcatatttgattgtttcactgacattagcactaagatctctgtctttttgcttattaacaaactcaagtccacgatagtgactccggcgaccctaagccgggcacgaggttgcgcgctcacgacaagcccacgcaggttatctccggcaaggatttgcattcttaaacgtcacccgagcccggcccgacctaacccgtaagcgaatcagattcaaatagtctagactgcccagatcacggcgacgacggacattgggatcctggtagggta

SEQ ID NO: 125096 - DNA, 641 bp, Zea Mays
aggcggcgaagggcggttgcgaaatggagagtgagtgaattgtcacaaagtggtaggcgtgatcatagtgagatggagagtggtcgtcttcgcgaggacgggactagtaaacgggaattgttgtcctcgccgattggggcgagtgtaggtgaaggggagctacgaaatctttttgagggtgaggaattgaggataatgttgttcaactacagggagatgggtatcatcccgaaggttgagccaatgtaatatatgatgcccacgttatgtgtatgtaaccgtaatttgtatgataaggctccacgccttcgttgatatgagtcttttgtgaaagacttcgatctttacgtagttattgtgctgtttcggctgcacccttaggcaacttttgcacggagagctttgtttggaaaagacttcgattttgcgcacttattattccggctgcacccttaggcgacttttgcttggagagtctttttgaaaaagactttgattttgcgcacttattattccggctgcacccttaggcgacttttgcacggagagtcttttggaaaaagacttcgattatcgcacttgttgtgctgttccggctgcacccttgggcgacttttgcacggatagtcttttggaaaaag

SEQ ID NO: 125097 - DNA, 344 bp, Zea Mays
taattgagtatggtacttctagtgttcaaaatgacatggataagaattagtatgtctacttattagtcctcatttgattaatttaacactaacaaatggtaaagtgttagaatggttcgagtctatagaacgcggcaattcttgaagtaaataggagctgaaattattagttgctgttttggactgcacgcagtgatttccccgtgctgtatgtttgatgaaccaaattgtgttttctgtagatatgtgctatagaaaagtggtagataactttattatcttgctggtgttaaaatttgacagacataagtctgatcgtttaggagctatgctttttacaaatt

SEQ ID NO: 125098 - DNA, 327 bp, Zea Mays
atgcagcttagcttatgcagaagctggacggctcctaaattaagcttgtctcttgactcttgagccctagctagtttcttgggtgctgtcgaatttgagcatccgtcgcggagggtgcgtgatagcgaaggagtctacctatgttctgaaacttcagccagattcaaccattccaagaattgtttacgaacggacgacggcttggttgttgctgttcttcgaagtaacaattatttttaactgtagggtccaaaattccggggaaaaaattctatgcaggagtcatgtacagtgaagcgtttacaggattagcaagataggacgttc

SEQ ID NO: 125099 - DNA, 322 bp, Zea Mays
aattattatatattcgggtcggatgtcaatatctacctacggatttttcacgggtctttgaacttctcacctgaccggtgagctccggtgcagaaatcgagccaagcaaaggcacatcagtggtcagctaaatcgctggcagtgcccagttgatcttgcaaggaaatagtagcttgcaagagtaccaaatccgtcctaaagcgacaagcccaaccatccatcgcaagggtaaccaacgaccaatcagaaatgatccgaatgaaaacaggcagaatagtagatagagcgtacgtcgtggttgacttgatgtctgtcactttcc

SEQ ID NO: 125100 - DNA, 1192 bp, Zea Mays
ggagatacttgtgtattagttgtgacataattgtacatttttaatgagctatataccttgccaaacatattttgcaaattgttccatgtctggtgataattgccttatagtagtagtgtcatgctgttgtgaatatttgttacagaacaattgagcctctctggtccctgcaccccccacacagacccagagattagctgcccaagttgaagtgaaaatactgatggttgtccctttcaggctttaggaatgttttttttttctgtctattactagttaggagttcgagggcgtttttttatccaacaaaacatcaagattaccgttgattcaccaaactgttggagatactctaagccatagactgcaagtaagattgtttaagtacatttgtgaaacgaccatgcttgattttatcatttgcttctcataaatatacaagtttgagtatcccttcgcagcctgcaaaacattttaccagagcagcattctcaatatgagaaataagtggagaataaacaagtgttagatcaaggactataaacagtgacgttttacacatgatgatgtaggaaagattttcaaaagtaattggatttctcatcccgcgtctggatttctcatggaggcattaatggtttgtctggatgaacacactatcctgtactttttttttcattcgaaaggtaactgtcagctgcaaccaagatgatggagcttgctctctgttccttgtcgtcatttgcttgaatttatgattttattctcttcatgatcccaacagtgctctcgtccaataaaatgctcttaaaattctataggtggatacggtgcgcctgacatggacgtccgcatcaggaaatcgttcctgtttatttgctccatatttctccatcagcatttggttctcgttttcccgggatggagtcgaaattgtgtcgtcttgtgtggacataaattgtctcttgatttgtggcgatacgatgcaatgattgttatgattaaggtcttgcattatgcagatccaaagtaaggttgtatccagcggatcgtgtatattgccgtgtacagagatagcataatgaaggtggaacactgtcaacaatcaaggtctctttccacagaaccttaatactgatttctgttctgttaactgcaggcttctctgtgttccgttccatgtggtgactca

SEQ ID NO: 125101 - DNA, 561 bp, Zea Mays
caagaggccaagcgatttgcactgaagtactactacttaataaatcactatagaagtgatgttgcttctactccagcaagagggtatgcttctactccagtaggacaaaagcaacggacatcggagtgctcggctcctccaccctggaaccatagtttcactacaccgtcgggggcatggtctgcagcacctcccatctgcagagacggaggcgacatggctctagatctgcttgtccatgaaccgcgacacattcatcatgacgacttcgagcttgcttctcccgccatggctctcaaggtcaaaaataatgaggcaaacaggtgagatgtgcgggcgtgagaggattgggggagactttgcctcaggcaaatatacgggatgaatcgtcggagaagcgtcactgcgaaaaaatggggaaggatgtgggttctgttggaggcagagaaaatggagtttccctccaaaaatgtttttttcagggccttttagcaatctcttggacttgctcttacagtgtgtttggttggatatacatagagggatggaaggggacggcca

SEQ ID NO: 125102 - DNA, 567 bp, Zea Mays
cacaaaagtttaaagctcaagtgtgctagtctcctatgccatttcaaaatcaaagaagaggatcctgccagcaaacatctagaagggcgagaagaatatgaaaaatcagcattgaaaactcgaccaaaaggggaaatctgacaaacaagtccccctggacatcaaaaacccgagacaagcactttttaaagcgcacttcatagccatactcaaggagttgtgaaacagaaagaagattgaaatgcaaatttgaaaccaaagcaacatccttgaggacaaaactcccgttcactcgaacggagccacgagagacaaccttaccgctcgacttatccccaaatgtgatgtattccttaccaatgatgggggtcgaggctagagaaccatttttgcttctggtcatgtggcatgaacagccggagtcgatgagccaattgttctccaagcctccatcctgcattagtagaaagatacagggtgagcaaatggcacaacactagggttaggatactgaggatcataccagtgctgtggcatctgaccataaaaagtgttaggaaaagcacc

SEQ ID NO: 125103 - DNA, 489 bp, Zea Mays
agaggttgaagcatttgaagaaatacttagcaaccatggggatttttgtgccttcgccggtgccagaggggttgcaacagttttggagaaaactggctgtgaacatgttaaagctgcagcccaggcagaagcgatcttctccatagacgacacaaaggaaccttcagtcaaagctactctgatgggcgggaaattctattccgatgtttggatgaagggcgtccgtgagatagccgacgaagcaataaagaagagtgaaaaagaatcccatgatgcccgagtagaggtaaaggaagctaaagaagctgttgaacgtgcattgattataggtacctctatttaatgcccttttgctttattattcgtttctagcttcgaacccttattatcatatactttgctgtagccggccttttgccaccaccggagccattcaatcctgaggctgaccccgtcttgaaagaagctttggaggtgatgaaggtcgcc

SEQ ID NO: 125104 - DNA, 335 bp, Zea Mays
ctctctggtgtctgtcctgctgctgagctcggaggacttgaaactttctcttgaggtgacctttttcttgttctctagccctttccacttgtatggccttgtttgagagatgtgagaagctgagaaaatcttggctggcgaggatagtcttgagttctggtcttagccctttcaagaaacgggccatcttcttggcttctgtgctgacatcgtcaggcgcatagcgagccaattccatgaacttgtggacgtattcactgacagttctccctccttgggttaattcccaaaattcttcttctttgagctagacgatccctaggggcacatgatgc

SEQ ID NO: 125105 - DNA, 274 bp, Zea Mays
gcagatggcagatctagatgtggtgggggaggaacacactgcaatgtccctagtcaccatcatcttcatcatcttttggagtcatgaaggagacaccataatgatgtttgtgccactgatcaatgtatgtgaaatgtttatgaattggtatgtcctgggagcgaggtggcaaaggcacaccagaagaagacgactgacgacgcaagatatcatcagtctcccgctggttccaagccaaatcatgcacatctactgaaatgtcacaaaacatcaa

SEQ ID NO: 125106 - DNA, 339 bp, Zea Mays
gtccagattagtagtgaggtatagagaaatctagagctgaaccaaacagatggatgaatctcaaatctatcgtaaagcagctctacgatagatatagatgaattattatatatctagattctcttctttcggtgctatagctatatgttaaataaaccttttgattagcctgacgtctggggccacatacacatggaagaaacggagacaggtcgacgagctttagttaggatgtcgatgtcgataagcagtacgtcctctgataatatatgtggtgttgtcagcgtgtcacttagcagggatgaaactagaatttttttagaagaaactaaatttaac

SEQ ID NO: 125107 - DNA, 395 bp, Zea Mays
gataacgatcctcggtgaaaaatcgggcgctggggatgagtttgggacactgttcctgtaacaccccaggtgttaccaagaccatggttacatttatgcactaatgactgtgatcacatgtggaagaaaagaagaacataaaaccttggaaacatgggttagctaagagaagttagtggcaagggtttcaaccacacaattggaacaatggtcatgaggacccaaggtgattaaaccctaaggacacctaagagcactattcttccaagccagggatcagtggataagttaaccaaattgccaaagcatgatcttagtccctaaacaagttttagtaaccttgtaacctagcaaaatgcagggagggaacattgcaaaaagaccccttgaagacc

SEQ ID NO: 125108 - DNA, 483 bp, Zea Mays
ctgaagatcctcgagggccttcctggtggcctccaccgcctgggggtccggtgccgcctatgctgcctggaactgccagatccgctcctctagcttcttctctttctcctccgcctcaagctcgtgctcgaccaacagcttgccccgccgagtgagcatttcttccctgaagacgagatccgtctctcgcctggagaggtccgtctcccgcctgtccaaggactgctccttcgccttgaggttctcctcggtgagggcggcgtcactggccttgccctcgagctcctgctgccacttttgcagcctctccacagcctgggtctgatggacccgctgggcttctagggtctggtccagggcactcagcttggcccagaactctgttgcgaggacctcccgctgagacacggcctcctccctcctggtcaccttcttctccctccgggacgcctccagctccctggcgcacaccttctggaggtc

SEQ ID NO: 125109 - DNA, 493 bp, Zea Mays
attcaaagggaaccttaaccctgctttaaagaagcttttgaacacaaccacctcattttttccggcttcggagtaatctcctccccgccaaaacgaaccagctccttttttgtttcactaaagtagcccaacttcaccatttttggaagatcagcttcagagatggtggactttccaaagtccaaatgactaggttttcttggcatcccgcagctgtactcatcttcggaaccaacttcttcaacatcagcttgcattgcttcgacagcaggtgtgtcctctgatggaaccagcctagagcctcatcgcttcagaaatcggaacattttcaacggcttcggtctcgtctccatcacgctcaaccctagtagtggagcgtattctggccatttgattttaaattttcttgaaaaaattctttggaagtcaataaccttttttccgaagctatcctcgtgacgaagcacaatccaaactggagcttcgtttgaat

SEQ ID NO: 125110 - DNA, 436 bp, Zea Mays
ttcaaattcatactcctgattccaaaattaggtcatctaggattatctgttcaaaatattttaacttggactaccaatatagaaaattactttcgcaaagcatcgttcatgttaccatatttgatattcatcatggaaaagtactttcatagtatataattttcagtattcagaatggtatattttaaaaaatttacaagccaaattgttgattggagaccatgtcaatgtcctaaaagacatacattgtgaatcaaaggtagtataatctgtatatatatactagttaaaaaaacatagtggctccactctccatgatccatcgtctgttccactcagccctgcgccctccctcacctgttcctcctttccatcccaagatttgctcaattccaccagtgaatcccacctcctgctgtcctttcctctcctacat

SEQ ID NO: 125111 - DNA, 476 bp, Zea Mays
attgtctccagcgcatctagtacattgaccattcttttcctcttaggggtcgctgtaagacctttttgtgcctttggcactgagacttctgccgaagggcttgtaatttctgatatctttgttccttcgacccctacattatcagccttcggctcagctaatttggctgaggatgtcttcggcattgcagccggctcttcaatcctctgcgtaggcgcaggctctttggcttcagtagccgaagaggtctcaccgccaaatttgggcacttcggctggttcaatatatcacggctggtgggtaagaaccttcacctttttcctcttcggcgcgggcttgcttggagcagctgaagctgcatctttcccagaagttgcactctttctcttttgcccccgtggcgggtagcggtaatcagggtacatgaacccaatagcatcaaaaactctatttagccttttctttttccggcttcc

SEQ ID NO: 125112 - DNA, 527 bp, Zea Mays
attgtgtcacggtttgtgaagggtttaaaaggggagttgcaggggcatgtgatggcccaattacctcggacagtggatcaagcaatactgttggctcatatacagcaagaggtgatcgaaatgaataaggccaaatttcagaagaatttcctaggggacaaggtgatggtgaatacaggaaaaagagatcctagagcaagagtggtttcacctgatttggctatggagaggcagttaagatattttcgaaggttgaatggtttatgttttgggtgtggagagaagtacgagccaggacatcaagcaaaatgtcccaaaagggaggggcttagttgcaccatttgactatagaagatatggggttggtattatcagacgaagtgctgcaacagctagattaggaagataaagaagtagaggaagcatgtaaactatctctgaatgctattagtggaactgaccatgaggaatgtatgagggtttgagctctgatccaaaaccaagtgctggtgatgttggttgactcg

SEQ ID NO: 125113 - DNA, 899 bp, Zea Mays
cgcgtgaagagatatgggtggatatctgccgtccgatcgcggaccaccggtcaagattagatcagcccattaccgaagcggtaagcaaccagaaccgtaagattaccggccgatggctaggatttaaaacaacggaattgagtcctgcgcgcacgatcatgatcgaatggcggagataggctctagtcaagttggccctatcttctaatcttggccactgataacgcgatcttcggttcatgggttgtcttccaccaccgatagctgagcgcagcagatcccgcaccagcggcggccgcccctaacgacggagaccatcaccggtgctcccgtccagccgagcaccaaagctccactttccccctacgatttgtgctacgtagagcggaccaataagcgaaccaaaggggtccagaatctcaccagggttcatgtcgaggagaccctcaaccatggtgcagcggctcggtgaggaacactggattgaaggaattccaccgaggctccctggcattcacccgactcccgacgacggagagaacggctccgcataacggcaggactccacggctgtaagctaaggccacggcgcgagcaggtcctcggtggtccggtcgaggtagaggtccagtattccccgcggcggcgctcggttttctttcgcctccctactgagtcaatggtagtgaaatccggctcgtgatgtctaacgacggggcggttcaatcctctttatactctgctgtgaggggattccggccgggttgttggaacggccagcgacatccacgcggattcctgggttcagttcatgcgaacgcgagggggaagggacgagtccatgccaaggaaatcggcagcagtttgacgcggaatctagggcacgagctcgttccggg

SEQ ID NO: 125114 - DNA, 489 bp, Zea Mays
agtatcatgttctgccaaagagtatgtacgaagcacaaaaaatccttcgtgcactcaagatgacgtatgagtagatacatgtatgtccgaagggctgtgtgctatttaggaaagaatacgtgtaggcaaagtattgtccgaagtgtaaatcgtttaggttcatggaggtagaatctggtgatggacaaaagaggcagctcgacatccccgtcacaatcctacgccaccttctgttcataccgaggatccaacgtctatacatgaccaaggaatccacgaaacagatgacatggcacaaaaatggaaaatgatacaatcctgacaagatggtgcacgcatccgatggtaaagcatggaaatactttgatgccatttaccgtgagaaagccgtagaggctcgtaatgtatgtgttgtgttggccacagatgggttcaatccctatggaatgagcgctgccccgtacacatgttagccggtgtttgttatcc

SEQ ID NO: 125115 - DNA, 622 bp, Zea Mays
ttcgtggtcatgtcgtttggcttgaggaatgcgttaacatcattctagtcccccttgagaattgaatagcactcctagctgacaccatggactcatcgcactcttcatgggttgcctggcctcacgggcttctaccgcttcttcatcaacaactacgacatcatcaccacaccatgaacatccctcaagcgtgttgccttccagtgtgctgatgtggcgactacatcctttgaggccttcaaggcggccctcacctatggactggtgctgcagttgttgagcatcacggcttcgtccatcatcgattgcgattcttcgggcattggttttggcgtgctcttgcccgatcgccttgtttagactgtggatggagccccagcctaccaaacttgccacctaagagcgcgagctcattggccttgtgaaggctgtgcggcactagaggtcgtatgtctgggaccggccagtggagatagaagattgggtccctaatgatttctcccctactagaatactacaacagaacctttgaatcttttagtcctgaacaagttgtgcaggctagtttcgaaatgcaacaagggaccacaatatcgatgatacagctaggcatacatcaaag

SEQ ID NO: 125116 - DNA, 499 bp, Zea Mays
gaccatttaagcacataaagggcatttgggaaaagacttgggagaaaaatacaaattttggtaaaaaccaaataacaaagttttagttaactaaataaccaacaaaatatagtaagaaagttttgccatttgaatttttcaaaatccctaaatcagcccctaaactaatgcacttgggaaaaattcagaaatctgaatttcagcccctttccaaagatcaaccgcgttctctgcttttcaaaacttaaatcaaacaagtccaaatagaaaagtggcaccaaatttcctcgaacacaccatgacaaagtttggaaacctctctcaccgtttgacacgatcttgacatggatttacctcgggactcgaccttgtgacactgccaccttagcgacgcgacaactctttgtacacagccccaaaccgcttgacttccacacataaacgacaaagctctgtcgagagagaaaatcttgtgcagtgatcatgcccaaatacgcga

SEQ ID NO: 125117 - DNA, 625 bp, Zea Mays
ggcggcacgtcgtttcctcaataaatgcaggggctgcgtggcttttcgtcagggtcggcccggtagcttatgtcatgggccataagcagcgggtctctgcctgagcgggaagcggaggcgaggcccgcacacgtgtcagcgccggacccctgcacacaccagggtcctcctcgctccgggaccctgttggagttcggacttacccggaggctccggactcgtatataggggtctggtgttctttcgtgggggtccggccttaccggggtgtggtgtctttccctgccacgtggcgtccattggcctgcccatccggcggggtcaggcgcagtcctccgcgcggttaggggacattgcatgggtgcgatgccttcatgctgcaggagagggtacccctgatttagggtaccgacagtggctcccggtcccgcctcaggggaggatgcgagcttgcacgcaggaccagagtctgattggtggttagaccgctacttccgagcgcctgctactgcaattactgccggcccgcctatgaccacgccaactgccgtgcctattcccacggctgactgacccatgaccgtcgtacttaacggtactgtttggccatgcgcggggctgcctc

SEQ ID NO: 125118 - DNA, 555 bp, Zea Mays
ggagttgcgaaatctttttgagggtgaagagctgaggataatgctgtttaactatagggagatgggtatcatcccgaaagttgaaccaatgtaatgtgtggtgccctcgatgcacgtatgtaactgtaatttgtatgatgagtctgtgtgccttcgctgatccagccgtgcctgtgggggacttgtgcatttgatctagcgcgtttattatgccggtccggctgcacctgtaatcggtctttgcgcggatagtttttcgacgaagattttcgcacggatgtgccttcgattttgcgcacttgttgtgctagtccggctgcacccttgggtgacttttgcacggatagtcttttgaagaagacttcgattttgcgcacttgttgtgctagtccggctgcacccttaggcgactttagcacggatagtcttttgatgaagacttcaattttgcgcacttgttgtgctagtccggctgcacccttaggcgacttttgcacggatagtcttttgaagaagacttcgattttgcgcacttgttgtgctagtccggctgca

SEQ ID NO: 125119 - DNA, 365 bp, Zea Mays
cacaagttcacagagctggcccgctacgcgcctgaggatgtcagcaccgagtccagaaagatggcccatttcctgagaggattaagacccgagcttaagaccatcctcgccagccaagacttccacagcttcccgcacctctccaacaaagctatccaagtggaaagggcaaaagaggaagaaaaagggcacctcaagaggaaattccaagttctccgagttcagcaacaagaacgtcaccagagagctcgaccctttgggcttccacccaggggaccaagcttcaataaaccatctggacccaccccatcgtgctacagtcagcagagtcagagctcccttcaggcaccctccgttgcaagcaa

SEQ ID NO: 125120 - DNA, 516 bp, Zea Mays
atcaataatggtgaaggcacaagttctgcacatgtgggtgttgggaaacatgtccaaaaagagacctccggtaagcaaccatactgttatcggtgtctgacgaaagggcacacgatgcaaggctgcactgcaaaattattttgtgacatttgccgcactgaagctcataactctggaaggtgtccggtgtttagaggagataaacccggagctttaacctgtgggtatgcggttgacggtcttggcttttattatattcctcatgctccacggcagaaaaacaaagatgattctcattctgcgcttgttcgggtcactagtggttctttatctcaagaacaaatagcttcagagcttgggaggttggtttctactaattggaattgggagatagtcaagacaggaccgttcttgtttaaaactctctttccatcaagagaacagttggtccggatgatagaatggggagtggttcaaaccaaatttaatgcctctatgaaaatagaggaaggcttg

SEQ ID NO: 125121 - DNA, 473 bp, Zea Mays
ggggcctcttgcgttctcccagctacgttctcctggctatgtcagaagccgggtctcgaggagcgaacgcgggttcatgaaaatggcaaggccgattgagccgaggaactcccgtacctccgggttagggatacctcactcatcacctgccacggagaatggtccaactcgagaagccactctattatcgacgagctaggacgaacatgcagacggaaagagaggagagtacgactccatgcaagaaagacaaaagtgttcaggcctcagcggccgtggtgagacacacgttcaacaagaaactgttcaagcgagaatcaggtgccgccttgggaaggagccgcgccttcaactccacccccgccatcggtggggtccatctcgacctccggtgacgccgcaggaggaaggacctccgcctcaaaggtagtcgccagcaccgcgctcgggccggcggcaaccgcgtcaagccg

SEQ ID NO: 125122 - DNA, 514 bp, Zea Mays
ccgacgctgaccccaatgggtgtgatccatctgtcgctgatcccaatgggtgtgctatctgtgttgctaatgaaaacgaggaggaggaagaagatgagatccctttgactcggaagaacagtcggcgatacgtagccagtggggaaagtagtggagttccttctcctgctctgtctgccctcattggtctacaagaattgtctctagcaaactttgatcaaactcttgaagatatggttccagaggatctgttatcagagccggcggatggtgacgcgatggatgtttgtgctgatgtgttcgacgccgggttggggtcatcccgggcagcgtcccgcgcctcatcgaccttggagcgtggtcttgagggttaggaaactgacttggatcgtcttgctcccatggaagtaactgagggaccttcagtcttagaggtggctgccgtagagaactcagccctcaaggatggtgttgtcgctcacccagcccccgagggtgttgccggggatgattc

SEQ ID NO: 125123 - DNA, 345 bp, Zea Mays
taaattttcccagacacagctttaactcgcggtggacggcaggtttatttttcaaaaaccagagggctctttagcaattaggccacgacgaaggggtatcttcgatcgccagccatccgatcccgatccaaaggctcagaatagatcgtgaagcgatacacggcaggcaccacaggatccaagatccccggtccaaaatctctcccttgcattaaaccgttctagcctttggattttcaatctacggccgatacaacccctcttacctcaatccttcatcgcggatccaacggtcctccaccatcttcttcacacgaggcatcaggcaactgcgttgtagctgtt

SEQ ID NO: 125124 - DNA, 913 bp, Zea Mays
gtttgccccctgcttgaagccctggatgttctatttatagccccaagtaaggtctctaggggtgcctgggtttgtcgcgtacggtgaggagtcgaggtcgagcccctatagtcggtacgacctgtggtatgatccttgtactcgctgttgacttatgcccgatggagacgtctggttcctgtatttgaatcttttactacgcagagagccgaggccagggctaagggatcgctcaggtacccgagtggagctagcctgatggggaagctgaccatgcagtagtggttggagtagtgctgagtatggcaaagcgccttcggtagtatgatagctctgttgtttctggtgacgtcggacgttccttcattggttttatcaaggccgaggctgggctcgggcgagctaggcggagatcttcccgaggttgttgggagcaggtagcagaggacaggctcaggcgaggcggagtttgttccgaggctgaggtcggcttcgggtgaggcgtagtatcctcccgaggaacagctcacgctttgtcgtttgcgtgtcccattaggggttgacaggaggcgtgggggaacagtagctgatgttgcttagcatgcatcactatagtcggtgaaagttgatgggaccacagtcttgtcgctctagttcgtatgcgacgttgcatggggtaggtatgcgcattgaatgctcatgtcatctacggcctttggctgagacctggctcggggttgtctttcttgcccgagacgagctcgggcaaggcggagatggtagttccgtggagaggggatcttggtcgggacgaggattttcccgagtacatacctgttccgcaggctcggttgaggcgagtttatgagtgaccaccgagagggcctcaggcaaaacgtggtttaccatttct

SEQ ID NO: 125125 - DNA, 726 bp, Zea Mays
cccgtggcattagagttgtggaggatggcctttaacgggtaggaggtcaccaccacaaccctgtgtgcctgaaaatagtggtgcaacttcctggacgcaacaagtacagcatagataagcttgtgcgtctcaaggtacctggcctttgcctcatggaggacctcgctgacgtagtagactagcttctggatggttcggacccctgtggtcggtcccgggtcctcaacctcctggccttccgtcaacatcatggtggtcggaccaccaccttctcctaggggaacttcctgactcccctagggatgttgtgtcgtcctttcgacgactagcaccatgctcaccgcctctgaagttgttgcaatgtataagtacaacggctccccggctctagagctaccagtattggcagggacacaaggtgctgctttaactcttgaaaggctcgttctgcctcttcggtccaagagaatggaccggacttccgcaatagcctgaagaagggcagcgccctctcagccagtcttgagatgaagcggctaagggcggccagtgaccccataagcttctggacgtccttgatgcgggccggaggcctcattgcctcaattgcctttatcttctctgggtttgctttgatgccccagtgtgaaaccaggaatcccagcaacttccctgcggagacaccaaagacgcacttgtccaggttcagcttcgtgcgtgttgcgc

SEQ ID NO: 125126 - DNA, 579 bp, Zea Mays
gttatacattaaaaaaatagtatgtaaatctattgagaacggatgagtgaataatatcgctggaagtctacaggtacaagttatatccgagtactttaagttttgggatttgattcaggggtatagcttcatctagggctccttgatatgcatagatggctaccaacatcctcaggggaatactctaggggaatactatgtaaaatcagcttatgaacaacttcgagctaggtcaattttgtttgagccaagtgaaaggatattgaaaaaatgggctcctccgcgatgtaaattcctttgtatggttggcctcactaaaaagatcttggacgactagctcgtcggggccttaaccacccaaaaagatgccctctatgtaattagcaggaagaaacaatcgaaaacattatggtgtcctatgtttttgctagggatatttggtttcaagttctaagcaagttgggcttgcagttaatatctcttgggactgctggcgttgtgtccaggaatagtggagggagactgaaagcaaggtgcctaaaatccaacaaaagggttttaatttcattgtgatcctag

SEQ ID NO: 125127 - DNA, 554 bp, Zea Mays
agaagcatcatgaagcttaaaaggcatgtccatccacaggcaaagtgcaggccgcgcatacactgaacttccagatcaggctttaatgcttcgcttgatctttccctacaactagtcacgtaatctattgaattttgatgtgataagaacggaactaaagtcaaaaagaccaatgcgatcaaccaagccatcagtttttaattgacaacttaccaagattcctttatcccaggccacttttatcgattagttaatcttttcgatgctaatcgtagaggcaactatcattcctacacttcaaatcttctttggcctttcttgatgctctagctgtgagaatatatttgtgtaaaaagtgctttggacttttaatggctgttacttgaatggaacaaggcagggtccaacaaaggatgatcatgctcaagatgctctggatcaaactgatggtgacattaagctttgtaggcttagtggaagaagtagagagctggaaaccagcagcacttagggtgcggcatcttggaaggctagctgcggtcctcctgacctgt

SEQ ID NO: 125128 - DNA, 590 bp, Zea Mays
attgccttcgtttggtaggataattcatgaatgttgcaaaaacacttggcatctggctccagcccttggcttctcacggcccaaataaaaactccgactttaatcaaggcttcaggattaagctgatgaagttatatctcaaatgtctttagtacttcgaccagcatcttgtgcaacggaaaacgaagtccagccttcataaaacttttaaatactaccacctcatctgcctcaggaagaggaacaatgttttctcccccagccctcactatagatatatcatggaaatatttgcccttcatcgcttcaatttgcccttgtttgaaggtggactcccgaaaacaacatggcttggcctccacggccgatcttcggtatcttcgttctcactttcaacattgaagctctcgctatcgctggaatctccagatatcctagctagcatttcatcagtgatttttcaatattggtcctctccacggctttgtagaaaccagcgagcgcgaggtccacacttttcttatcttcagccatttcagtgataatcgcaacacaaagtcgaagctaaaaaacaattgcgctcacaagaa

SEQ ID NO: 125129 - DNA, 605 bp, Zea Mays
tttgacaaatagtatatagtacgcgttgaaacatgaggaactgcaacagcatgaggatgaccggcccaagcacgacgtctgcgattgaccaatcgccagactgcgtacaatagatctatcgttgtcaggtttatccttgcgactttccatgggtcgccgcatcaaacagtgagcaattgcagcagtaaatgcttgcgaagaaaacaaatgcacaaacaaaggacgtcttcttatccaaaagtagcattcagtcaaaaggggattgcggcttctaaaagcctgagacatgcctcaccccaatgtaaaatcgacacgcaaatcaaaactatttcaatctaatctatcgaaaatgaagagtgatgatacttgctggcgatcgaaagcacgaacggaacgcaaacctcaaacggagttgcgcgtcgatggcgtcgaaaagcgaggagtgtgtatagatgcgcttgcccaccacaagcaaaaccaatctggggctcaaaggtagaaactttaataacagccaagccaagcaacaacaacaagatcgcgaagggacgatgaatcctcgtccataggacttgccttttgagaaggaaatcgaccaaaacccg

SEQ ID NO: 125130 - DNA, 497 bp, Zea Mays
cgcgcacagaccaactacaaggcgcagccggaccaacgtatgaaatgtgatagaccaagcgcacaatgacatggacatagccggacgcgtgaaggcatacagcctcattatacaaaccgtatttacacatgtacagcgaaggcatcacactttacattggttcgaccttcggaatgattcccatctccctatagttgaatagcattatcctaagctcctcaccctcaaaaagacttcacaactccccctcacctacactcgccccaaccggcgaggacagcaatccccgcttgccagccctgcccacacgaagccgaccgccatccaccgcactcacccttcgcttcgccaccgcccttcgccgcctgcgcccagcactcggaccaggcaaaacttcagcatccgtaacacgcggagaggccgccgccgcagccacatccaaagccgcaaagtaatccaagtcctcatccgaagactcttccgtccactcaaccgaa

SEQ ID NO: 125131 - DNA, 1407 bp, Zea Mays
ccgggatggatgctacagctagtgtttcagcagggaccgaatcagaggaatcctcagccaacatgtacagcatggcatttatttctgcgtcgctcggatttaaaggcatctcaaaatgaacctgcctctcatcatcggggatttcaccaagagaagcaaccaaagcctcaacctcttcgggagagggtcgcactctaaggcccaaaccactgtcaccagcaggaggatttgacacaaaactgatgaaagccttaaaaggaggcagattccaggctgaatatgcaacaggagcatcgatattcgacaccttgcctctaagaatcatctcaagccggcttaccagatgcacagcaggaatccttctgttggtaaccctggttgagtcaatgatgccacgatacagataagctgggtatgctctatcttttagtggctgaatgttcttaaaaacaaaatcgacgaccacagcttcggcagtcagacccttctccttcaacaatccaacctcggtaagcagaaccctggcctcagctatctccaagtctaagtagtatcgtccaacctcggtaagcagaaccctgcaaaataatccaagccttcatccgaagactcctccgtccacgaaatcgaactcccagaatcatcagactcaaaacacttagacacagagccacacgaattatcatcggcaggcactacggttgaggccgccacaaaattagtatcgtcagtagcagttgcgtgcgcaggcccaaacgtcggaacctgcgcagcaaccgaggttcagtatcacatagacaaaatttacacctaaactccccaacacctattcagccacctgcgaaggcccgaccgcggccgcggggtcttcggcatcctgttcgaccaccaccttcgaggcgtcctcgcccgtcggcgcatgggctggcgcggggtcttcgccagctccagtcgacgcgggggtcaccgagggacccttgcccacatcggtcgaaggcgccagctccacccccggggcctcgggcagcatgctgtctaggtcgccaaggtcttcaacctcttcgtcatgcgccatctgcagcaatagcacattcattcagcaaaaccacacatacccacacatataaccacacaaaatgagcccttacctgatccattgcccggccggacctctcctggaccgtctctcggtcgtgcagaccccacatcctgtcgaagagcgcccccgccgaccgcttaagcaccgggccctcgacatggaagatgtcgtgttcgaagccttcgtccgactggtcgaagacctcgaaatgcccgcacccctcgcgggacaaagcattcatggccccctcgcaggtgacgagggagggaaaggacatgaggcccgtaacgattgttggtaggaccccc

SEQ ID NO: 125132 - DNA, 273 bp, Zea Mays
ggtgcttgtcccgaggtggaactggtggtggaggtggaggcagtggtgcttgttgctgttgctgttgcgcccttctctcttgacgtatctcctcccgctcttggcgcatctctcgacgtacatcttctctttcctagcgcatttcttgacgctcatgttgcatctgtgcgtgcatgtctgccatagtgtccgccatttgttgcatcatcctcatctgagctgcaaccagttggtcaactccgcctggtggaggattaggaggattcatctctg

SEQ ID NO: 125133 - DNA, 359 bp, Zea Mays
cttgggaaaatctattgaaaattcatggacgtccccttcccaatgggtgtagccaagggacggcttggtgccctgagcgtttagcaaactgcccttgagtagtaacttaacatgatcgcggggtgtaatcatatcgtccaagcagttgaccttagtcccaatggtgtcatgttacgtgaaacggcgtctgccgcctgacttgtttccagacgatttgaatggcttattgaatacttgtgactattcagtgaccatggtaggagatgagcggttgtctcccgcctctataaatagactgcctgcttcgctggtgtgttcacacatctcctggccatttgttgcttattctccaacttttc

SEQ ID NO: 125134 - DNA, 964 bp, Zea Mays
cacgccgagatccctgaccacgtcgcctgcccatgcaccctagctcccttttgagcaccgcccgcacctgcactctctcccctgcatcgtttcgcgcaagctcaccctctctcgcgctctgctctcgccgctcggcttcgccggagtccagtggccgcgctgccgactgtccagctcgctagagaccacgccaagccaccgagagatccgtaccgaggtgagacatcgattcccatgctcgatttctcccaatttcactttgtcttggccaattcggcttcgccggggttcggtcgcgccggttcaccgtgcctgcacagtgactggccgaattagcccaaccctgtgcccctgctttggtccatagtgttccccttaccctgtcgtagctagtccaggccttagcgcaccctagaccccctctccccggccagaattcctcgtcggagttgcccgatccgcccggagtgcctccccttcgtcgttctctcgttttcggtctcgttcttgcaaccggaagcctgcgagtgagttcgccagaccctcttcacccgttccagccctcaccggcgccccagaccccccggcgaccacgtctacctcgccaccggcgacctcgctgccacggagggagcaacaccagtcaccgagttgtaaagccccgcgcgccccatcgcaaccgtccgtcctcgatccaacagttcagatctgcggacaccggttcacatccgcgtgctctgcttctgggccccatctgtcggtgcctatgccccctggcgctaggctcaactggtcagcccgccttcctcctcaggttgttgacacccttgccccacttgtcaaccgtgctcgctcgcccgcgcccgcgcgctcgcccaccgatctaatctgacggctgaggataccctgtaccccatcacgtggcggttttgctaaagaagccctcggttttgtaggaatcaac

SEQ ID NO: 125135 - DNA, 882 bp, Zea Mays
aggaatctcttcctaaagaaagattggtcgttgttcctctcaatgtaaaatatgattgacacaggactacaaaataaccatgtgagctcatttttaatgaagcaacgaccttacaagttgttgccgaaattcagatgaaaatctacacaaaagtaccagatttgtaagaactgaccatgcaacaaaccaaaccagttaaacaaaaacaggcatcactcattaaggaaacaagaactcaatccataatatttaaatatcaacggggcaaacgttacattgcaatgtgcaatgcaaggcagatggttcacaaagtaattgtgcagggacgcaaggcatggcgacagcaactacctaccacttcaaacaagacataaaatgtatgatccagtttgcataccactcataatcatttttatcgccgtctgtgttaagcaattcatggctttctccatgggcaggaatgttgacaccaagttttacttccgggaaatatctcaatttttctgatggatagaaagaaataactttaaaatggtaagtaacaaaaaaagagggactgtataaagaggaaggaagatgaaatttacaagcattactcattgaatcatcaaaatccactgacggttccagtaagaagttgtccgtctcaactttctgcatatcagagaacaaagcgagttcatcatcctttgattttgcaggaagcacatttctgaaactgtttgtcctcttttgataagtctcctgtgcaggagaccttgatgtcctcggtgagggtgacggtggcattttttctggtttcttaagcctggtacccttcttttagagacagtagaatgcagtcaaattccatccagaacagatggaacatatatcatggcc

SEQ ID NO: 125136 - DNA, 613 bp, Zea Mays
ctcccacacccgcgtggcccacacgccctacttcgactgaccaacagggctcatgcctcaatttcatagccacacccgcgcgccgaacaaagagactagcaagtgggacctagacgtcggtttcttctgctccacgaatttagtcaccgagttcgttacaatccgagtataggttgttgggattttgttgattcagttgttgtaatcccaagcccacaccttgccaacagacacgccatgtgcggagcgtgaccatagccgccatgaggaacatgaagaactcagactgccactgttaggattaagactcaaccccccattaggcctacaagagcaaatgagaaaggacctgaaacccaccgcgcgattgtgacgcctagccgagagcagggagccaccgaacgagggagaaaacgttgttggcaaaccgtgagacaaatctagagccatcatgtccaattcgcgcgtatgccgacgacgagcccttaggatctggccaaggtgcatcgtgggctatgctgtgggtgtctgtagcctgatcatgcagggttacggtcggaggcatggtgaatttctcaatggattgcatcatcattgttcaaaccatcgtgtg

SEQ ID NO: 125137 - DNA, 569 bp, Zea Mays
cgctaaacaagtttctaagttcatttgtatattaaaaattcatctccggattaagttaataatccctttggactgacgctactattaccagaaagtacggggtctaatctgcagataccaggactctatagtaataacttttgtaataccctagagtgcgggttagttcactcaaagtatgaggacgtttttagaaacttgcccacgctaaagaggtatcggctgatatgaaccgtaggatcaaaatcctgcgcctccgatcaaaccagggtctttatgaagcggtatgcaatctcaaccatcagatcccccatcaacggatcagatttaatatgaccgagatcaacccgcatccgttcaattgcaaacaaatggcttggattcaattacgcgaaggggtatcctgcttctattttcagtcgtccatcgccgatccgacggccagcccagcttcttctccctatgggctgaccgaccggcagggcatcgccggcgcgttcccaatccagtgcccacaaccttcaattctcgattccctagcgctatgcgtagaagagatagcagcgaac

SEQ ID NO: 125138 - DNA, 520 bp, Zea Mays
cacgaatgccctttttgcggcgccttcttttggttccaggagcgtgtcaagagtgcttctgctgtaactcagcggaggattgtctacaacctttgttgtaagggtgggcggatcaggttgggaccttacaaaaaaccacctgaacctctgcgaactcttctgaggtttgatggcgacgctcgctcaaaacggtttttgcgccagatacgatattacaactcacttttcgctttcacctccttgggtgctgccgtcaacaaggctataaacaacggtactgcaccgtatgttttccgaattaacagtgtggttcatcgtcaaattggaacgttgctgcctcgtccaggttcacagcccaagtttgctcagctttacatacatgatcctgatgctgagctacaaagtaggctccacgttttttagagcgacgatgccggtgctgcttgcctagactccactgttacacagtccctgatggagatgcttgacgcgcataacaagcttgtgaaggcctttcgtt

SEQ ID NO: 125139 - DNA, 313 bp, Zea Mays
ctgcaatccaatcgattatatgtttatctttgcgaatcggtagaggtgctgtccagaaattttgtgggtgggcgaacagcagtagttataggggtttctgagaatttttcgtgggaaattagtggggatcagtgggagaatcatgtagagctttgtcatacctttccaacgagtgcttatgcgctcgattcggaattatattttaaaagatatcgctgtttgaatccgggtatgttgctgtccaaaaaaacagatttctgcaggtgggcgaacagcagtagtagtagccgtttctggggatttttcgtggaaa

SEQ ID NO: 125140 - DNA, 566 bp, Zea Mays
gacactcgcaacagctcgggcatacgagcgccaatcatagagcttgccatggggtcacatgccagcaggacagaggcagccacggtccacacctcgccctgcagctacgggaacatcagtttcagagtagttaaccagctcaaaccccccagcagtcgacacagagattcaaacgcctgacacccaaggaaatggccgagcgacgcaagcaaggcctctgttacaattgtgatgagcaatatgtctgggggcaccgttgtcagcgtctcttctatctggaggtcttagattatgatgaggacatgccgtctgaagaagaagacccagcagcaatagagcctgtgctctcactccatgcttttatgggaacccggacagaagacacaatgcagatcgtgctctctatacatggccatcacctgacagcattgctagactcaggctccacacacaatttcctcgacctagcctcattgaagcgactgggcatcaccatgggaccaagcctaggccgtcaggtgaccgtcgctaatggcgaaagagtggcctgcaagggattcacagag

SEQ ID NO: 125141 - DNA, 790 bp, Zea Mays
tcaccccgagttaagtaagcgtgagcatgtcgcaccgccttaagtcgtttccgacttaagccgattgctccattagcagggcatagtggtcaccccgagttaagtaagaatgcaagtcagtcgtgagcaaattgagtatctttgaaaccccttttttattgatgacatattttcactttacagaatacatcgtcgtcccgatagctttttgagatacagctagggataaaacttcctgaggtgttctatgttccaggagttcccgacttctgtgccatccatttgagtgaggcgatatgatccaggccgagtgacttctgttactatgaagggtcctttccataagggcgataacttgtgccgtccctcccccgttagaattcggcggaggacgagatctcctactgagaaggatcgctgtcgcacagccttgtcgtgatagcgtcttagagtctgctggtaccgtgccgattggattaccgcatttagccgttcttcttcaagtacatcaatgtcctccagcctggtggcctcgacttctgctatgttttcgaagatcaaccttggcgccccgaacttgagatcagcgggcagcactgcctccgacccatagaccatgaagaaaggagtatttccatgcagagctcggctaggttgggttcttaggctccaaatgacatagggtaactcccttatccactttcctgcgaatttttcattcttatcgaagacctttttcttgagtgcctctagtatcatcccgttagctcgctcaacctgcccgttggct

SEQ ID NO: 125142 - DNA, 514 bp, Zea Mays
ccggccagccataatccctcccccttgctcaccgcccgtggataaggttctcaccgtcgtcaaaccttcgccgttgcccgtcgcgtgtctctgtccatctaccgcatcaccgtgactcacccttgctctccgttgatcaccggagccatcgccacgacggtagacgcaagttcatgcgtgccagtagttccctgcccctccgaccgccgcgcgtcaccattaaaattcccggccgccgctcttacttcctataaattgagccctccaccagctccgcaaggtcatcatccaccccgccaccaagaatcgttagcaaccgtgcatccgagagctagaattttggtttcgccccaaatcagttctccgccaccgcgaaactaacctcaccgcggccagccccaatccggtcagctcatccctctctctcccttgtttgagcactctcatagctctgtgatgcttaccgagtcaccaattcgaaccgagagaccaccaatcatcgggaacgcgatca

SEQ ID NO: 125143 - DNA, 514 bp, Zea Mays
tttcagtttatatgaccatgaccttcctgtcttctgagaccctttcctattccgttgttaggttatttaatttcaacaatttctatttcattggttttagtatactcgtgtccttagagtcttgcatactcacgtattttttttattttcatacctcaatatttgtttaagacatttcaacttacatgatcttgaccacccttgtttcttaatgatgcatgagcggtcattttaccttgcatatccttggtgatctcgttgtctccttataactccacttggtaattaattttctttacttcaaccattttgctggaaccttacctatcttacccttgcttgttttctccactttgtcagtcttgccttaactctgtccatggttatgcttttcatcattatcacctttacccttatcacctctatatcttaccttcatgtttatcttatacatgtcctttaaaaccttatctcttccatctcaattttatagttgtattttacctattttcca

SEQ ID NO: 125144 - DNA, 543 bp, Zea Mays
aaagaatatttgaaaaaattgtagaaataaatgcaaaatcgaggcttccattgcagaggcatacatactagaggaggtgtcaaacttcacaacaacttactatggtgacaaactgtcgagcgtgcataatctaccccctcattacaatgatggcgaagatgaatcgagcctcagcattttttgagggaaactcgaaagcacaagtggttcgaccaccaagaccctaaaacatgaagtggcaccatatcatgctatatgtattgacgaaccatgaagaggtgacgctatacttggagcaatttcttcatgaattctggcatcaattttgcataattatgttttttataaaagaaaaggatttcaaaaagataagaaaaaccttgaattgacctgcccaacccattcaccctagcttttggtcagtttctctacagcccagttcctctcgcgcgtgttgcttgctatgcctggtatctatgatccacctgttcggcccacaacattccccatgcttgtgtccttgcacggttgcttgcattcgcg

SEQ ID NO: 125145 - DNA, 383 bp, Zea Mays
gctgagcgtgtgggatcggagacagagttgggtggttgttagaagtgcgacggggctggcggcaacacattttccctgttcgtagtcggagagcatgtgggcagctgagccttggagagtaggtggtgtgtcagccgagcaagagattagcagagcctgggcggataggtggtgcgtcgaacgactgagcatgcaacagagccatgtgatgtggcacaattttgtgcttgtagtgccaagcaaggtgggagatccagcggtggcgacgtgattgaggggcggtgggtttgtagtgaggaggctagggcaatggggtcgcggggaggagtggaagggatgatgttgatttgagtaaggaagacaagggttattcgataatctga

SEQ ID NO: 125146 - DNA, 356 bp, Zea Mays
ttgggatcagactggagaaagatagttccttgggcctgaacttattcaagaggtagaagaacaagtctgtacaatccaggagaacttgagggtagcatagactaggaaaaagagctacgctgataatcgaagaagactactgtagtttgaggagggtgatcatgtgtacctcaaggtgtcaccacttcatggaatgagtagattcaaagttaagggcaagttatcccctcgctttattggacccttcagaatctttaggcgagttgaggagatggcctaccagctcgagctacctgatcatctatctgatgtgcatgatgtattccacgtgtctcaactcaagaagtgtctctgtg

SEQ ID NO: 125147 - DNA, 373 bp, Zea Mays
cgggcggtttagacttaacccgaacggatctaatcccagccctccgatctggatccaaccgcctctctctcttccccctcccccgcgtctctgcctctgggcccagctagtcggttcgccctgacccgctgacgccctggccccgcttgtcagccgtgcctgcacgctcgcgcctgcgcgcgcgcccgtgcgatctaatctgggccgccgatctctgattcgatggtcgacattaccccgtaccccttcgcgtgtgagttttgcttaagagccccctggttttagaaaatcaacccgtcgtcctctgtattaacgcgtaggtccctgctttgttttaattagcccctgtacttttatttaatcccagatttag

SEQ ID NO: 125148 - DNA, 360 bp, Zea Mays
ggcagcgtcttgctgaagcaaccgttggcggtggtgcagttgacgaagcaggtggcgggattggggttgagcacacacgtgatcccgcagattatgaggcagttctggcacgcgggcgggcagaactcgccaacgccgccgtgctgttcagcaagaaggctcagctcgagctccaggaactcccgcaggagcgcgccggccgcggcctgatcctcgtcaccgggggatgctgacgacgcaacgcagcgcgccaggtctgagccgacaaacaggagcagcatgcacacagcggcaatcttcagagcagccattgcgactcgatcgtgactctgatcgttcctacttccccagtgattgatt

SEQ ID NO: 125149 - DNA, 378 bp, Zea Mays
gattattgtagggtagaagtaacgacggtcgtccaaggatctgaggatgacatgctagacatccctgggcccgaaggaatcgagacacttggacaagccataaaaaatttcatcctttggcctcgaagggatgtcgaattggttgatccaccaacgctgtcgtcgtctcatccctaaccatctccgcctcctcaaactttagtacctttacatccatcatcacctccataatctttccatgctactcctcatcctatttctaatccaccgtctctgccacaagcatcaacatttaggacaccatcaccttctccatagccatcaagggattcacgacaatcaaagaaatctaaattccctctaccaaaattggtgtcc

SEQ ID NO: 125150 - DNA, 389 bp, Zea Mays
gtaatgttcaagttgtggcttggtaatgaggatgccatgaacaagcttctgtacctaggggtagcgaatcttttttgtctatcaagacctcacttacaaagtagacggggcgctgcaatggacgaatgcacccatcctcctactttttggttatgagtactgaactaaccacctatgtggtcgctgctatgcagagcaagaccgtctcattgtctctcggaggaactagaacgggagctctggttaggaggtctttaaggctatcaagggcctcctgtgcctttggtgtccactcaaaatgagcagcctttcgcagcaactaatagagcggtagtttgagttccctgggacatgaaatgaagcggctgagacgagggcctccgtgatcc

SEQ ID NO: 125151 - DNA, 488 bp, Zea Mays
gttttgtggaaaagcatggcatcccctctacccctctagagattcccttggtcacccgaaccccagggtcagaccttctatgctagctcaaatgctcccaagtcagaattcttttaagtggggtagtgttcttggcagacttaactgcttgccatcccaaggggttgatgttatcttaggaatggattggttaaccaagcacaaaggcatcataagttgcgcaaacaagacagtccttctcacagaccaccaaggaaagtcagtctcttgtcaggctcagccacccgccaatgatccaatggtgtctaatctagcaacagaaagcatatcagtggtagaggaattcatggatgtattcccagaagagttgccaggaatgccgccagaacgagaagtgttgttctacatagatctgatccctggcacggcgcccatcgcaaagagaccataccgcatggctcctaccgagttagcagaattaaagctcc

SEQ ID NO: 125152 - DNA, 285 bp, Zea Mays
gttgtttactagtaacaaaaaagaagctaagaaaatgagaagcgcttacagatagtaggacttgctggcggctggccgagtcacgagtgggcactggccgtctggccgtttggccgagtgttacttcacggaatcatcacatagacgcataggaatattcgaatatgcaccgaacgcctcaccttgcttcctgctggttgaacgcacgacgcaccgcgcacgccggccgcacggaacctggacgcgggacgcctggctcactggctggatggttggctggaccgg

SEQ ID NO: 125153 - DNA, 398 bp, Zea Mays
accgctctcgcttttgttacatcttaacaattattgtctctgtcagtcaacccggccatgcctgcaagtgttggtgcatcaactcaagactgcgctaccttttttgcttatcggaccaggttaggtttctgagtggatgtcagctttgtcctaatacaatattagtatcagcattctgatgcaccaagtagtgccgtggtggcatggaagcttgtgtaatgcctatcacattataatctttggcttgtttttaaatgatagccaaaggaagaagtgccagccatcacatacctgcactaaccaagcaaacaggaattatcgacaggattccagcgtattgctcgagtgatcttagctaggaaacaattgttttgcaaataaaaatttctgccctaact

SEQ ID NO: 125154 - DNA, 630 bp, Zea Mays
gaaaatcagttggttttgtcgaacatttacttacaaaaggctgttagcttcttctgaacatttacgaacatttacgtaccttatctgcatcagtcatgccacttgggttttgtcgaagcacaaccatcatgtatccagcaaaggtagaacattgagttttgatactgtcccacctgctcatgagagatttcgtagacctctctggcattgatcctctacaagagttgtatgcctctgtaatccgattccaaaatccttgacgcttctgaccagtgttcacaatcggatcacaactgacagccaaccatgcttgacaaaccctcatatcctcttcagacgtaaaattggctagctttgtgcgttgaggaggcttcttcactggaggtggtgctgatgaggcctgggctggtatatcaggcggaggaggaagtgcagtgttgtcaaactgagtgccatcatcctcggataggaaactgccatattgtgccataacttggttccaatctgtacccatgctgtacattcaaggtagtcacataagaaccatgtgaaatgaaagcagaaccatgtgaatgttaacaggacaggcacaagaaactcagaagtggtgcagactagatatattgcaaa

SEQ ID NO: 125155 - DNA, 709 bp, Zea Mays
ccactttactcggcctatctaggacctctatgcttgtgttgcatacatctctcagaatttaaatacttatagccgctgaattgacttgggatagtcctttgactggtatggtatatactataaaccaaatggtaaaggtcgattctgaatagacatatatcttgggtttatgtagcagaactacattgtattccaccccttggcatgcttaccataatctatatctgatctaccagaagtaagaaaagtacaaatatagtcatggaatcccacatcaccacagagcttgaagctacattaggcattaatttgtccttggtttttggcgttggaagagccacaattctcgaccgcaatactgtcattgatggtaatttgtgatagaaatataaagatcttatggagacctgttgtattctccctagtcctgatgactccttcatatgagagtagtactatctgttgttgaagacggatcctaggcagatactagtcttgttttcgttcttgccaagcagttatcatcatttgtttcatgaaaagctagttatatggtgattttcccagataaaaatgaattcttggccttgcctgttctattccaaagcttatctttttgccgaacaacgaagtgatcaaaataatgctttatagaacaaaatggtatataatatgaggagaaatgtttgccctgctggcagcatcacaa

SEQ ID NO: 125156 - DNA, 888 bp, Zea Mays
gctagggacatatcctcgacgtcggacaaattctctatcctggagggaggtggtgctggaggggctttcttcttccgctcagtctggcatccttggctcttggtcttcttttggattttcttcatgggggcgagcttctttagcttcttatcgtaatccatcttcagggttcggtaggcttcacgagtgttggcctctttgccctctgctatatcgagacactcttggagggacgccttctcctttttaagttccttgacctactgctctaagctttccacctgagagtttaggtgggtgcagtgggaggaaaggtcatcgtagtggttatcgagagtgtggagatatccggccatgtagacgatggtggggtcatcctcggtaggatctctccttgacagggcctgaagtcttttcctccaggtgggggtatttttgttgctaggtgggaagtaacgaaggggggtttcaaaaacctctttgctatagttttggcatagctatcggagggcttttcgggcaacattttggcaagtgtctgggaagtggtgtccagtgaaggtgacttggaaaggagggtggtttggataacttcggctttctcccaggtagacttccatagagcacttctcaactccgttttcgcggtattccttccagacatattctggcttcttgcttatccccatgcgaagtgcgcaactccgaaagagatgaggaaatccttcctcctctgagcagtaggatgttctaatgatccaagagccttccatctggtaggagaaaagaagggtctgttaatatcggggaaaggagagaagatttttcttagaggtaagaggtgttttcttgttaaggcaaacttttaaggtcagggctgcgatctac

SEQ ID NO: 125157 - DNA, 551 bp, Zea Mays
gttaccgagcactagcagaggcaagggcaaactagagtatagggaggaaggagtaggcggaaacgaagcaagggaagcgtaagcgttaggagacgaggcgccgagggaggcaagccgatcacaccaaacgcttcgtgctgctgccccgtctcttctcatcgtgatctcagggcagtggatcgatctcacgtcggaggcgaccttcttaggcgcgccaccgccatccgagccgagccgcagcgatccagatccaggtacccccttttggaccgcccctgcccctctatccctcgccccatcggcgtccgcgtgtcctcgtcccctgagacgccaccggcgtggagatggagtgacgatccgatcagatccgattgctcgttttctccgagaatctctcccccttttgtcggttgtgagctctgaaagtcgaatatgccctgtttccctccaatccatccagttggcagcttgtttgccgcgtggtggagttcgtactgatgtaggtgatttggtccaacttttcgattttatctgtgtgttcaactgagcct

SEQ ID NO: 125158 - DNA, 424 bp, Zea Mays
ttgcgggtttttcggactgctgagtcatgaatctttattggcttttcccggtactggagatctttttgaatctgaattgtctctgcctcgatgtggttctctggtacttgcaggcacttatggagctgggacacatgaaacacattgtggatatctgacatggattctggtaattcaaggcggtatgctgtgggtctcactctgccaatgacgggataggggccaacgaatcgcggtgctagctttcctttcatttggaaccttttgaccccacgcattggggagaccttgaggtatatgaagtctccttcctcaaatatgagttctctccgtctgttgtctgcataacttttctgtcgactctgagcttcaagtaacctcttgcggatcagggcaactttctcttcggcctctttaacaaagg

SEQ ID NO: 125159 - DNA, 408 bp, Zea Mays
caccaccctttaatgttgtccttgaggggaatgtcgaggtactctgctttcctcccgtgacgaagttccagacttgcgccaccaacaagctagtgctgtcccccagccattccgtgccgataatgataaaggtatttccagagaccaaaatgggggagaatcccaagaaaggcctcacatagatgtacaaaaatggaaaattgcaagatggaattagggttcagatgagtcaagttcaattcgtagaaatcaaggaggccgcggaaaaagggagagatgggaagagcaagaccacaaataagaaaagggacgtaaacgacagattcatgagtatcctctgttagaacggtgaccccgcgacaaattggccaaaagtagagcactttcggaagcaaaaccccaatgtcg

SEQ ID NO: 125160 - DNA, 474 bp, Zea Mays
cttaaatgatagaagtcctaaatgacagtttgagggagtttttaagtagcaacatattacacttgaagtatgtacattcggtatatgacaatcgaagcatatgtcaaattgtgatgtgatatgaattcatgacataacaaggcatgttaaatctttattagcagaataatctagtcaaatatatttaattatgacggattaataaaccacatgtaataatatataacaatagaggatgactgacctcactgatcggaagaaaaaatgttgttctagaaaatgcagctccaaatgcttcagtaaatcatacaagagtaaatcaagcaagaggagaacctacagcacgataagtcaaaaaatatagataagtagaatatgaatgatcaaagttaaacaagcttaaatgatagaagtcctaaatgacagtttgagggagtttttaagtagcaacatattacacttgaagtatgtaca

SEQ ID NO: 125161 - DNA, 932 bp, Zea Mays
tttcacacatcttcataccattctccttatatcccacaacaaattcaacatcaagagttgaaaccacaaccttcgggctccattgcttcaacaagtccctcacctagtcattaggcaattccactaccattcatcctagggcctccatcgtatgagcaagtgcctgcatgtcaccctcaatttccaatacaggatatgcttcaggaggacaggagggaaccatccaaagctcgtacggtgaacagggtggttctcaagtccaagaacatatattagagcctgatgggccgatctgaggaaccaaagttgtgcaagaaagctagaaatcttttacattttgttattttcgtacttgtttctaaactacctccatcgcaatggacaataacggcatgtacccttcgcaagtttgtaaatgtaactctaaggttacaccttcgagtgtaacagaaagcaaaaagaacttgaaggccttcgtatgaaggtaggatcaggcacctagtaaaggttaaaagactgtgaagtccatcaagtggaaggcagagtcagaaagaaaaacacctagtaaaggtgataaggctccaaagaaaataggacaggactaaacaaagatcaagtaatgaagaaggtatgttaaacctttgtcagcataaggcctttatctatttcaaggtctaagctcgttatgaaaaaaaataaattaacaccacgagaggctaccgttgagaggtacataccgaaggatgacgaagcacgacttcattcggaaacaacactcgagacagtgtatatatagagacgaagccgagaattagcttcggctccgcagctttaatgcgtgacgaaggaacggcaaggaagataaaatcttcgaggcttgggcaacacgctcgaagatgcatggaaaagactttcttacccttaggaagctc

SEQ ID NO: 125162 - DNA, 846 bp, Zea Mays
aaaagaatactgaggcataccgatttgcatttatccagatttaccatcgaaggcagtgtgttatgtaagcaattttataacacattttggtcaaacgactgaggattcttactatgacgttcctgctcttcaaaatttagcagagcctagaaacaatatagaaagtgtgtcagtatattcagtgaataattacaataattgtgaagaagaacataccccaacattgacatcaagtattaatctattagaagtcatagtccgacgatgatttttgaaatcatcacggacacactcaatgaagcactacatgaacacgttctcaagacacttcccctctgagaaagattcaaaaacatcgagacagtttccactgtattcactgtaatctatgacaaccctgtatgaagaatatcgttatatattcatattacatacgtgaaacaaactaataaatacggtcttcataatttgtgtaacatgtacctgctttggtccatgtccttggaacagagtagatcccacagagaacgaacacagtcaagctctgtaaggagtggagcagttctagaaagtgttgtccctttcagtgtatcatctcgagatacaacctggttataagtgtttggacattagaataattagtttaatggcataaagtgcattatagaagatgtatgttattatactgacatgagaagttggggtctgatcaaagactggtccactgtcattgtgttccatgtcatttgttgccatttcacctctctacttaaaggtatatgcttagtaacttatgtaatatttattgtactaatgtaatcgtaaaatggaagtataacatgaaac

SEQ ID NO: 125163 - DNA, 594 bp, Zea Mays
ggcttcggagagcccaaatgtagacgctaagcctaacgatggcgttaggagttagctgatgaagataaatcccaaacttctccaaaacatccgcaatcatctcattcaaaggaaatcttaatcctgctttaaagaagcttttaaagactaccacctcatccttttctggcttcggagtaatttcctctccgccaaagcgaatcagcttctttttggcttcactaaaatagcctagcttcatcaacttaggcatatcatcttcggtaatagtggacctcccaaactccaggtggctgggtttagatggcagggcactgtaatcatcttcagattgaccttcctcagcaccaacctgctcagcttcagcggcaggtgcaccttcgtcagaaacatcctccggcactaccagccccgaccatttcatcacttcggaaatcaaagcggtttcagcagcttcggcttcttctccgtcacgtgtaactctggcagtggaacgtacccttgccatttgatgatgaattcctcacaatttttgatgaagttgtcgacttttttaatttccccgaagctcttcctcttgtgacgaagcaaaac

SEQ ID NO: 125164 - DNA, 656 bp, Zea Mays
gggcaccatatactacatcggctcaaccttcgggatgatacccaactccctataattaaacaacattattctcaattcctcaccctaaaaaagatttcgcagatccccctcacctattctcgtcccaatcggcgaggacaacagttctcgtttaccaatccggtctaatcgaagacggccctgctccatccccatacgacgacgtctaccacttcgcgaaacctcacccacgctgtgcttcgacaccaccattcgtcgcctgtactcagtcctcgcactaggaagatcagccgcatcaccaacctccacacgcggcaaggactccgctgcggccacatctaatgcagcaaaataatccaagccttcatccgaggactcttgagtccaggaaaacgaactcccagactcaccatcagactcaaaacactcatatccagaaccagataaattatcatcggcaggcacaacggttgcggccgccacaaaattagtattgccagcagcggttgcttgcgcaggcccaaacgtcggaacctgcgcagcaactgaggttcaatatcacaaaaacaaaactttacaccgaaagccctagcccctattccgccacctgcgaaggcccgaccgacgccgttgggtcttcggcagctggttcgccc

SEQ ID NO: 125165 - DNA, 2530 bp, Zea Mays
acctccccaccaagtttgtcttcctgagcacactgcgcatacaaacagtacgcaatggccaactgattgtttgcagtagtgttggtacgagttgaatcatgtgagatcttttgctggttagatgaacaaacattaatctatatctcccttctttgtaaataacgaaaggcaatatgtgatccaaactcaccagtaaagatatggcatcacgtagagactcaaggcagttttttatgttttccactccagatgcacgaagtgcacctgcctttctaataagaacccttgatctctccaaaaaatgttctttcgtacagtaaattttatgaagcagaacatctatgatccttatctgcattttagagcagaattctatgcttcgggcttcagttaatccatatgctaataactcctgcagaatacaatgaattcccagagtagttagccccaacaacgaagaactacagatacaacaaatttaatcaaacagaataaaatatggtacctgctctactattaagcctatcagcttaattggccatggagaccgatatttcagaagaaagggatagagaagtggagcatcatccaccttagtatccctaaaatccttgtgtactgcctataatttaagaaacagaacataagttgcagtaacataataagttttaaaaaagcagaattgtttttagtcagcaccttaacccatgccttgatcagtataaaagaacatttgttatattcagaattgtcgccatcaggcaacattatagacaaactcttcgcaacaatcacaagtggtgtttctatctctgtgccacatctacagagagcatcaaccatctttgcaattcttgaaaatgcatccaaaatgatatccatatccttcagtgtatccatcgacagatctgtcataatgtcgtttccttttgttcttgaagatagtctatagtaaaaaaggctgatgtgtgcccatattgtttggcagcacagttctaaagcctttggtgcctaaagcagagacaacaatattcacttcaatggtagctcaaaggggttggcccagcaaaaagaagaaaagaaacttagaaggaatacctctttaacatgtccagtgttatgaagtgtcactccgatgttgccaagtgaaggtatcaagaatttgagctcctcaagtgtaaaccatttacttgaaatggcacagacgatgaaacccaagctcttctggactatgcaagcaaaaggtgttaattgacaataaggatggtgatacaaagctagtaacagcaagcaactcaatggccattttcaacaactagcatctggatataacaaagcaagtactgatcactacatcttaacaaaataataattctcacataaatattaacagcacgatataaccagggatcttgcaattgcactaggcacaatggcaatgtagcaatctagcataaacataggaaacacactagaatacctggatatctttcttggtaagaaaggaaaacttgatcgcggaaacaaggactgtcagtaaggttccatgttgttcatgctgtctctcgttgtccccttgagacatttgcctacagctgttacagcgcaaatgataaaacaccttgtgaaatcaagaaccattgtctgtttcataggccatagcttctacagtaagcattcattaataaaggttctggcatttcactaattacagtgccaataccttatcttatggacctacctaaaagacgtgaagctcgaatcaatgaactgatgcagtgctgtcaagacatagtccatgttaccagaataatgggttggttttccttcagagaagtccttccaaagtgtattcacttgctgtgataatatcttgctaataaactccaaagagtccaagtatgtgaccaaagatgtattatcatgtgggcatcgtgctaatgtgccaagacccttctctaaggcatgtagatacttttgatccttgggaatacccaccgataaatagggtggtatttcactttctgcttgctgggcactcaagtataacccagtcgcataaagaagaagcattgaggcagtaggagaggaaacctatacatcacatgaatttacataaatcaaaacgaatgtgcactaacatggtatgcttaatgagaattcagtgcttaaaaaataatacagcaatgtacctcagagaaataaccaccttgtttataaagtagttctgaagcgccaacagataaatccctattggcagaaagaatgaaccggcaaaaatacgccacaaataccagaagctcatttacagattttggtaaatcatcctgaaaatggtttgcattgcattacaacaggtaataatgtcttgatgataaaagacccattagcccattatttatatcttgatgaacttattactgtgatacgatcaagagcagagaacattaaataggcggtgagctcaatacaactaataaatggggtacataagcacatcagaaatatacaccataataccatattactc

SEQ ID NO: 125166 - DNA, 480 bp, Zea Mays
cgagcaaatgtcgcctaagggtgtagccagaaatgcacgataaatgtgcgaacatagtctccaagcaaaagtcacctaagggtataaccagaaatgcatgataaatgcacgaagatagtctccgagaaaaaaccttctaagggtgcagtcggataagcatgataaatatgcgaagactgtatccaagcaagaagttgcctagggatgcaattagatcatcaagacaaaaatatggaaacaaaatgtgaagactatatccgaactatacatccgcatcctttgccgatcaccaaaaggggcgagggcagtgtttcacatgctaaattatcagtcgacgacatgcgaaggaaaacaagcaaaaacccattacaatgccaacccaagaacggtacaacatacataagaagagcgaacacatctctgaatagtcccaacatttcctttttggaaggagaccaagctccctataatcgaacaaga

SEQ ID NO: 125167 - DNA, 381 bp, Zea Mays
ccttggtaggtatgaaaaaatcacgggcattgattttatgatgatcatcaactgaaatgcttgagtaatctttatcgcttttccctgtatcgaattccaccacatgctcaacacactacatagtaacaggttaagtcagtaggttatttctcaataactgaaatccaaacaaaacatgcaaagcatttattacaactaaaggacctgcagatttggctcctccatggacaaacggccagtggcagttgacgtctgaagccaatttccatgtatgatgtacctttgtgattgagtgcacaattgagcacgtgaacaaatggaccacaacgtgccatttaacagttttgctaatgttctgtgttccttaattaatgggataat

SEQ ID NO: 125168 - DNA, 440 bp, Zea Mays
cttgattgtaacttcgttcaaggatcgataatcaatacacattctcatacttccatcctttttggtaacgaaaaggacgagtgctccctagggagacaaactgggacggatgtaccctttttgttgcagctctgtaatttggagttttaattctgctaactctgtgggggccatgcggtatggtctctttgcaatgggcgcagtgccaggaatgagatctatatagaactccactcctctttcgggtggcattccaggcaactcttccggaaatacatcctcaaactcttcgattacggacatgttttctgctgccagattaaacatcattggatcgttggcgagcggctgggcttgacaggaaactgccttcccttggtgatcggtgagaaggacggtcttacttgcgcagctgatgatacccttgtgcttagttagcc

SEQ ID NO: 125169 - DNA, 666 bp, Zea Mays
ttgaagctaaggaaacagagaataataaattgaagagaatctagttcagtacaccaaatgatgtacagtagtggagtaatgcaactgatgaggattggtcagggggggaatatgaaaaggtgctctcatggattccagctgcaaagagcgtttccttctactctttgcttgatcaacgcggagggcaagaaacttcccccctacctctctcgtcttggctgaagatgggtgacagagaccataaaactatgtacagatggctgtgatggggacatgaacgcatgtaagtatcaccggagaatgcaatcccaatcaggctcggtttgatcaactgaatgacaaaccaatacatgtcaagtagggaaaaagcaggataagttggtgcgtagtgcaaggagagaacaagttgtgacaatgacagccagtattataccaagtgtaccacggatacttaccctaaaacaaatgaccaaaagaaaagttgatggcgtcattcttacacccatgatcgggactcccagttcaaagatagagttaaggatcaggtcctcagaaaaccaagtctggttagcagctggcctaatgtgttctcatcgcaaagaagacagaaagacagggtcggtcaaccaagtttcatgggcacggacagagatgctcacattcgac

SEQ ID NO: 125170 - DNA, 553 bp, Zea Mays
gaaggttcctgcgtctgagagcacaagtgcctacccgaagaactccgctgtccacctcgcccataaaggagtggacacagatcacaagaaagaaggaggcaaacgtcccaactaaggggacgagacctcgccgagtcatctttccggcaccttcgccctcaaaggaggacgaaaagaagcacgccatcacagcagctcctttctactccaacatcctcttcatcggggggagatttgagtcgtctcccatctttgacgacgagccaaccgtgcaaggggaagaacctccccagcgtgaagcgcggcaacgaaggaacagacgccggaatgttcggcgacatcacaaggctggggagcaggacccggcgtagctcgtatcccatgacgaagtttcagaagtgggagaaactccggacgagcgagtacaccgagaaaggcaaaattctcgtcgccgtgattgtcgacaggctcaggaccgagagagggagcaatccgagcaaggcacaaggttgcaccgagagaaccctctcttcgctcggaacatgtacaccga

SEQ ID NO: 125171 - DNA, 470 bp, Zea Mays
attggctaagcatgtttggatgtctctctcgtaagtcgctccagcattcttgaggccaaacaacatggaggtatagcatactctaaacggagtgatgaaagctgtcttttcctcatcttcttttgccaagctgatctgatgatatccggagtagcagtctaggaaggagagcatagaacagccagcagtcgagtcaactacctgatctattctagggagcccgaagggattcttcggacaatgcttgttgagatcagtatagtcgacgcacatgcgccaatcaactttattctttttagtacaagaacaagatttgcaagccgctcaaggtgcagtacttccctaataaaccctgctgacactaagtgggctaactcagcgcgaatagcttcccttttgtcaggtgtgaagcgacgtagtttctgtcgaatcggccttgcttgaggatacaccttcaatttgtgctcgtc

SEQ ID NO: 125172 - DNA, 515 bp, Zea Mays
gagggctctgtgtcagatctatgaagaagaagtggctgacaccccgctcagattctttccgccctttaagagagaccgtccagtttggatggccaggatgcgtgcattggaagagcagcagctgcttgaggatgaccccatagtcgtgtacctcgctgcatacctgctcaccctggatgcgcagtatgatttcttggctcgacaccaccgtcagatgattgcccgagcagaagatggagagaagcgcaaccgtaagctccatgtggatctcaccacagctcaagcccgtgtagctgccttggaaagtcgtgaagtcattgctgttgaagccctaaagcaagccaaggatgaggatgtccagaagttgatggaggcctacttggtaacccataaccaacgtagagccctgcggatccaagagcccgcttcatccaacccagttcaacccaggagagttgaagatccccagattcttgaaggtcatctggtctctatcagaggagagaagaagactt

SEQ ID NO: 125173 - DNA, 439 bp, Zea Mays
gagactcagagaatagggtccatggactgcgggttctaaatcctaaaaacataaggtttcttttgtaaagtgtacccgcgaaggggtacagtcagatctcggccattggatcagacgcgaacggtgtggattagattgattttatcccgaaccggtacgctgcgcgagacgtcggattcacatctgacggttcaaaacgtatgcacccgagttctaacttcgtgcatccgatccaaaacgaacggctcacgctaacctaacccaaccggtacccaatgtctaatctaggccgaccaccatacatccaacggctagcacaaaaccccccttccagcgtcatccccaaacctcgacggtcgtgcctaccgcggcggagcgccatgaccggagtagcgcccacaccaatcccaccgccatccagaaattaacttgcgctaca

SEQ ID NO: 125174 - DNA, 511 bp, Zea Mays
cctgaaagcacgcatggattgggtagtgggagagagagagggacttggatgacttgtcgggcgccgggcggcaagagaattcatgcggcggcagggaaggttggagcatgaaagatactccagctagctagccggtagtagccacattacattatattcatgcctggtttgctgctgagggaccctaccactcgtgttagcgcctttgttagttattagctagagcctctataccagatatagactgtcgtcaaaaataaatttagatctgttttttaagccaaacgcttatatagcttcaccatcaccaacttcaccgtgcatatgatgcaccataatccgggataatataaagatgaattgagtaatttaattaaattggtagagtagctctaacggtgctctgtcaaatccaacagtttagtggtgttaagaaaaaaatattaaccataccactcattacagtaaaaagaatagtacttatggggtgtttgtcactgcactggattcc

SEQ ID NO: 125175 - DNA, 454 bp, Zea Mays
gtcgccatgttccaacgaattcctcgccgtcgctcctacgccgccgcgggtccgctcctcgccatggctagctctcgtcaccaaatttctagtctggtaagttgcatccctaggttcgcctttatcctgtagtcgtattgcgcgcgcatgtggtcggtttgggtagcggagtgcggggttggacgttcgccggcgagtacgccgccgggcgagctctgtttctcgcgcggggtgtttcgtcgatggagtggggcgtatcctccgtcgatcagtgaacgaacgggcgcgattagttcatcttactggtgcgaggggaacaaagtttggtcgttggattgtagatgaaggagtgggatcggatctcgcgcgtattaaatctggggccttggatctagatccaacgatccctggcacatacagattcctcgacggcaggatctaatcctggccgcag

SEQ ID NO: 125176 - DNA, 287 bp, Zea Mays
tctagtggtgctaaaccagatcaacaaggattggaatgttccactgagtctatgggcaagtattgtggagttgtttggtagatagaaggcaaatttgaaggcctggagttccaccatatggaaagggaccataatgtggcagccgatacgctgtcaaaacttggtttcagcagagcttaggctcatctaggtgtttttgtgcaagagatatagcaccctagtattagtcagggaaaggatgcacaaaagcaggaaacactgtactgatcacagaatgggacctgaac

SEQ ID NO: 125177 - DNA, 826 bp, Zea Mays
atttgggtgggaaggaaagcataagggaaaaaaaggacaaagcaaaaatctgttgcaggtacaagtaccgaaggtatgtcaaaatcctgaacacgagcatgccattcaatattcagttccatgtatatctgatttttttattttgtttcttgcaaggcccgagaggtaggggaagcaagcaatcaagccggcattgccattcattttcataaagaatataacaccatcaattcctccactcaacttgtgattggagcaaaaaaaactgaaaaaatatttttgttctgaagcaagtcagtgttattttgttgtttatggttgtttttttgttattgctaattgcaaggcagatggaatattcagtgaaaacaatctcaaatggatgaatacttgtattctctttctttcaaatccagcttaacaatctcaattagcatgagattttgcttctctgcactctgtttggttgaacaatgtcaggctgtgtactgctggatagggcgtcggcttggctcaactacgacccctcgtcggcggcttggagagctggggcctgcaggcgcatggcgcgggtgaacgtggcgtcgtttggtcttggcgacatcgttgtctcagcgacaacatcattggcttgacggcattgggcgggcatcattactcattggtttggccggatgaaagaaatgagggaagtggactgggagattgctcggcagggccgctccatacaccgctgaagggggaggattgtgaagatcaacgagtgcaccgcacgatgcagtaatgcagcggatctggttcctactctgcacgtccacaaccaagt

SEQ ID NO: 125178 - DNA, 302 bp, Zea Mays
ttggcacgctggggtccacttgaactcaaccttctttgccagtagggcttccattggcctggcaatcttggagaaaccttcaatgaaacaccgatagtagtcggccattccaatgaaactcttgattcctcagacatctttttgtgctttccaatccagaatagttgctaccttcttcagatccacaactagtccatctcggtttataatgtggcctaagaacagaacttcactgatccagaacttgcacttgttcaggttggcatacagttgacaatctcgtagcctcagcaatactttcc

SEQ ID NO: 125179 - DNA, 310 bp, Zea Mays
aggcaggtgctcaagcaagcagccggtgtgaagactgaagagtgagcagtagctcatgcgtgggtgactttgtgcgtgtggcgcacaagccaaagagaagagcagtccgaaaagttttaggcgtgacgcttccgacaggtgaactgctagactagctctttgtttgtgttgctgaataagaaagaggagcaaaattatgtgtgatatccagtgtaagcgaagtagttgggtctaatctagttgcgccactaataaaatgggagaaaatcaagggatcaagcaagttcttggtaagctggttgaactgtta

SEQ ID NO: 125180 - DNA, 757 bp, Zea Mays
aaccgggaggtcgttgtggctctgatagccagagcaccacttttgctatgtcatgcatcatctcagtatcagaggccccccttctttttgaggggcatctaaagatgtcatcgtggccattttatagtcatcttaattctagcaattcagcaattgtcaaagctcaagatcctgatgctcgtaggaaacaatggtggaatcaagcttcagagtcagagaaaatggtgacagtcggttggcaagagctagcagtagatgtcctggccgtctagcagggaccgaacttcgttatataggtaagaaatcacataagtaaaggagttaagcgacactcattcgctggctggtgaactgctagatgtgtttcccatgataccttgtaaaggaatttttgtcatctgttttcaaacgagctcatgtaaatgtgtttttcagaccttcgatgcaaggcccctccatcttaacttgtttcatggcttgagcccgttatagaaaatgagctaatcccgcgagaggctactgttggggatgtgcttttgccgaaggccctcaaactaatgagttttagttgtttcgaagcatgtttcagggctagcagtgtgatctttgtctaagggatcttcgagatctgaagatggaagtaacaacttcgtcatcaggtgttggacgaaggattcaagaaaggtcgaatgttgctcttggtatcacagaaacaaagggggttgaaaagacttacacaacatgtctttcgatagaa

SEQ ID NO: 125181 - DNA, 481 bp, Zea Mays
gtaaagaccaaggagtggaagaggctgactcataatgagtcggtttcaagtttgtgacgaactccccttatgaataaaaaatgcagttctttgcttatccatcattgtgtgcttttgcctgtgcattagcggctcactggcattttagaggtaatgctcgagtgatgattgtgatctccgctttttcaagttatgatctggcattttttgctcccgacttatcgagccaactcatatttatgctgacatatccccttgagttctggaccctaactcttgctttttcctccgtcgcttctctggtttctaagttcctgagcctgtcaacttcgcttgagagactgcaatggcccccaagaggaagagacacagtgctgctgctccaatcattccgcccatcgatcctaatagccagcttctatttgccggtaaccatatgtctgttgttttttgagtctgatctcttgcaccttgtcaaaac

SEQ ID NO: 125182 - DNA, 567 bp, Zea Mays
gctgcacgttctctgggccactgtcgcgcggggccacctcatcaaccctcccttcttcccccgcaacaaatagtgtgagaacgccggcgaccactacgggatctccgaaccgaccgcacctcgggccatggctttgaccaggatataagacgctgcgcgctgcactcacctgaccctatccctttatccccaatccctcgcataccgccattgcgccgccacgatctgctcgggatcaaatcgctgccgcatccacctcccgcgtacgtcgccgccgggcatcctgtgggtgaccaggtgtgttcatcggacatcagggatcaagtgcggatcaaccagccggtcccaaatcgatcggctccggtgggattcctcgacggagtttcgcgtccgtttttgatctggcgtgtccgtttcgatctggttgctttaaatccagtgtgttcgctaaagatcggacggttcctagcttgttacaattcataaagacctagatttaatctgatgcatccatgtctgatccgacggcccatcgtggcccgtaccccttcgcgagcacattagtta

SEQ ID NO: 125183 - DNA, 901 bp, Zea Mays
aagatgaattattaaaacatgagtattgtagttcatatattagtggtcgcgccacattgattgaagtgtctcaagtgcacgccaccatatggttgtatgcgaggcaaggttatgcgcatgatgagtttagtaaaaatccatcggtgtcactagtgttaagttgagatttatttgcgcatggaaagtaacagtgtgtttaatacttagaactcttagtcgatagtagaaattgttttggcttatgtagagaggtgatgacatgccgtaagtagtcatcacttcctctataattataactcgagtctatacgcgttaggcgttccttaaattgtgattcgcaaataagtgtattttgtgtagtgtggattgattgtgagtgcatgtgtcgcaagaaaagaattagtgcgcatataggcgatgaatgggtgtgatgaaaaggtgacatgccttcatagtcatcatgtcgtctgttagtgacctaactgaaggtcgtagagaaaggtcgattacctgtgtgttattattgtcaccttgcggttctgcatgaattgcaatgtgaagtagtaggctctctatgtgatgctagatgtctaggtagactttcgtgaattgtggtgctcggaccgttgagatgaaggttaagtcggtcgatgccgattaagtagttaaaatgattagtggaataatcttggggttaaaactagaaactagtgttctcgcaccagtttgggatgttgtagcccaattgcgcatggttatgatcacgggtaaaaatcagtaatgctcatggggtgtctaagccaaaatgcaaactattgggtgaaaagcgcttcgatattgattgtcatagagaatgcgttgttaattgagtatggtacttttagtgcttgaaatgacacgg

SEQ ID NO: 125184 - DNA, 640 bp, Zea Mays
ctggcttaaggcgacctaggaacatccatttaatcgacacaaaccccactggaaactatctgtccacgatcagggtggaacccgtggtggcgatcctgtgttcccaataatctacgctcggatgggtcaaacggccactacgaggagcttcatgaatacacagaactgctaaaacaaagcttgaatcggacagggccttaccagagagggctggccacggtgaagttgtgctttgcggtggcggagaccaatttgggggaaaagggaaattctctagttatggtgggcaattgaggggaagaatgggtgtgtcggcttcgtgatgacctagcgcagcagtcccggccttcaatttatagtgagcttcgacggtggcgtgcaatttggccgagcaacgcaggcggccggagataaggaagaataccggcgcagtgaatacatgttcaacgccgtggcagctattccggtgagcaacggggagctaaagtgaatcgtggcggtgcggtggcgaggctcggacacgcggcgtaaggccgagaggcggtgatcaccggcgagctaatctgctcaagccgcagagcaagggggctacgacgatgagtcaccggagtgacctccagctcatcggcgacaaagatcc

SEQ ID NO: 125185 - DNA, 383 bp, Zea Mays
gtgggtggtatgcacaggcaagaaatgagctatcttggttaacctatccataatgacccaaatggaattgtggtgccgggaggtgttgggcaatcccacaatgaagtccatgctgaggtcctcccatttccaagatggtatagggagtggctgcaaggtacctgctaccttcaaatggcttgctttgaccctttggcaagtgtcgcactcagatacatacttagcaatttctctcttcatcctggtccaccaaatataaagatctgagatcatgatacatcttgttactccaggggtgcatggaaaatttgaaatgatgagcttcgtccaaaattttcttcctgagttctgggtccttggggacaaccagtcggtcttcgaac

SEQ ID NO: 125186 - DNA, 501 bp, Zea Mays
gggcatgttcctttgttgactgaaccttttgagagcaagatgttgacctgtgtagttgatcgaaaagaactcggtgcggttgcgtcaggcaaaaagcctgcttagcctgtagattgagcctatttgccagaaggggcacagaggataggagaggtgaggtagtgtcctgtgtgcggactgccgaatgctgctactgttacacctacagtaatcctttcgtgatgcccgcattattgcttacagtacagggctaaggcctacagcgttattggctggcaggtcaaggcaccttggtccataggaaacagtagctttgcttagaaagcgaaagatccttttactaacaggcatctaatccacgagcgcagtttgcatctaatcagttgatcgcgtcatgaatgaatgtgtcatgggcaaacacaggactggaatcacgcattttgagacgtctgatcgagcgttggttgcagcttgctgcgtcacggcctgcattaagggagg

SEQ ID NO: 125187 - DNA, 1766 bp, Zea Mays
ctgcaggaaatagctcacgatgtgcccgaccatactgtcacgcaattttcagcctcacaagacactgaaaccgccgccggcgatgctgccacccacgactccgctcagcctaaagcggagtcggcccattgtgcggttggcgagccggagcaaaccacgacagaggcagacggtcagccacatgtcgcaaccatgccacaggaagttgccgcattgccgtcgccagctgagacaccggtgcaagagagtgcggcgcagcccacactgccgccgcagaagcaagaaagccctgttccagaactagcctcctcagtccacgaggaggagaaggacgcgtcaaaggcaaggggggacgaaggagaagagaagcccaccgcggcgcggaggccgcaactgaaagagactgtaaatttgggcgctgttgagcaaaccacgacacaggaagttgccgcattgccttcgccagctgagacaccggcgcaagagagtgcggcgaaggccacaccgccgccggagaagcaagaaggcggtgctccggaactagcctcctcggtccacgaggaggagaaggacgcgtcaaaggcaagtggggacgaaggactagagaagcctgcgagtcgtcggtggcgatggctccgcgccgtcgtgggcttgttatttctccgccccaaaagcggagagacgaagatgccgacaccgccgagcgacaagcagccggtgtcagggctggaggacacgaagcctacgacaggggagatgccgccgccccacaaggacagcggtagccctgtacttgttccatccaagcctgaagtggggaagaccgaaggcgagatgaagacggcggcggtggacgtcaagaagccggtgtcagggcaggaagaacagaagccagcggcgaagaagaagccgagccggaaatacagctctggcgctccaaggagggagatggaagacggcgaaaggagcaagggcggccgtgttgaaattgaaacccaagtggggaaggcgacaccacagctggaaggggagcgacctatgcgaaagaagctccagaaggcgatcaggttggttcagctcctcatgtccttgtacaacaagcaccgctcccaatcccaggagaagaagccagacacggcttccgatccaggtggtgaggaagacagcgaggccaggctagagtcggcgccggaagacaagaagccggcgtcagcagagcaggaagagcagaagccagcggcgaagaagaaaccgagccggaagtacagcgatggcgctgcacggaagttgaaggacgacggcgaaatgggcaagggccgccgtgatgaaatccaagtggggaaggctataccacagctggaaggggagcgccctatgcggaagaagctccagaaggcgatcaagctggttcagctcctcatgtccttgtacaacaagcaccgctcccaatcccaggataggaagccaggaacggcttctggtccgggtggggaggaagacagcgaggccaagcgagcgtcggcgccggaggaaaagaagccgcagcatcggaattggccacgagaggaagtgcgcctggagcacatcctcgaggaaactttcacaaggcttcttttgacagagtacaacaagcagctgagcggcgtgagtcagaagtgcctcctcaccttctccatcttcgagctcgcctccgaggtcaagaagcagatcatgatctattggtgggtcgcggagttcaacctccggcaccggagtgatccagcgcg

SEQ ID NO: 125188 - DNA, 309 bp, Zea Mays
ctgctcccttgtactgataggctcgactgggatcagcccatttttagcacactcacttatgtaatgatacctggcctctatatgcttgctgcgatcgtgcagcattggaatttttatcagggagatagtagacctgttgtccaccatgatcactagtgctgctgcttcttttctctacagctcagacataagtcttgccagccagataccttgacatgtttttctcgacgatgcttcggtagtgggtggcgtcaactcctagtgtgtcgctattcttgctcagtcacagatgggcttccatgggcgtgc

SEQ ID NO: 125189 - DNA, 298 bp, Zea Mays
catagatttaacgtgaaaaatctctccaaaacgaaggagaaaaaaccataagtaccggccagcaacgatatcatttttttcgggtggttatatatcgcataagatttacaatgaggtgacgatcttctgtatattacaatcgctaacttgaccatcttctttagaatttggatcataaactcaacagccacacgtggaacaagaagtgtagtaagccgatgcacggctctcagtcagtactcagtatgcctccgcacacggcatacgcgtgacaccagttgctgtcaaggcagacaag

SEQ ID NO: 125190 - DNA, 500 bp, Zea Mays
cggagaagaagagggttactggcgcacacgattggtggccacacccgtggcaaactcaccagtgacgagccagggctatggagcggtttatggtgactcaccgcgacgtggtaaagcggcgaggcacgtagcctggccggataacagcggacgccggtgatgccagtgtgattgaccacggcgggacacgatggccggtgagaacagtggccggaggttatctacaacgcgatacttcttaccgagaagcgctatctgtgttcgaccgggcgtgaatcgcgacgccaaagtggatctaggcgcaagatcaccgacggcgaggggggtgaatatgcgatctctttcagtcactgtaccatggaatccctattcagtgcacctgacaaaccaatttatagggcctagatgtcaaatctttacatgacaacttgctaatctgcctgtaacaaagttgttgcccgatgatccagctacattcttgctatagcaaccataggcaa

SEQ ID NO: 125191 - DNA, 331 bp, Zea Mays
aatgtaaaaaggctaaaaatatggagaaaaaattgtccacataaagtttcatggatgtcatatgttgatgacacaactacttctagtcggtggagtcgatcaaggaagagggtaacagctaggtagcgactgggtttacttcttgtcggccctcttagctcgcgtgatatatattttagcgttctaacgccagctgaagatcgcacatatgccgcaatgtagtatcaacaaaaactaacgtttgtgcattttctctttgctcctttgtttgagtttatcaatatgcggggatctcacttggtgatggccattttcctaccttcgctacctc

SEQ ID NO: 125192 - DNA, 300 bp, Zea Mays
caagcatagcatgtcctatccaagttaaggaatgtaggcccactttgttacgacgactgagacttggtttctgcagctcttctatcactgcagcgctattgtagtgtacacagctgtagaccgtcttgctttcggacatggtacacgaccagtttagatcatggacgcatgacgtgattgaatgctgaacgtacgccgtcgttatacacgcagacgcagtaggggtttgttgtgaggcgcagtgtgagctagggtgaggccggcctcacgtcagaccagagctattcagctaggcccagc

SEQ ID NO: 125193 - DNA, 1078 bp, Zea Mays
caagaatttgcaaagcgataggatggcaggtcgagcaataaggtgaagggagaagggcgataaaggctgcacctttgcgcattctgcaaaaatagcttgctacaatcaccaaacataggttagcccaagtttgaagatggtacctgaagcacaaacaatgaattttcctaagagtagaatctgcaaaaaatatagccatgatcaagagttctagcatttaatttgaggatcaaaagtgagacttttgcaatgaacatgacaacagaagatcactctcaatgcataatacttcatgcaaaaagttgcaaaagagtcaatctaaggacaagcagactacataataagcaagcaacattttgagcatataactaatcctaatcaacactaatcaacaaatcagtccaaatatattctatatattcaaagcaaaaaacacaatggaagccaacaaatttccctgcctccgcagcatttgagattgagaaaagccctaggtggacattttgtcaatcagactaaagaataactgaaggagaaagcaacaaaccctaattatgtggctgctctactgcggggcacgaggagcagaggggaacccagagaggtggaggcacccacgggtgtgtggatgaggatctatcctcgtggttggggaaggtcctgcgttgcgcgagcgtgggcgaggagcagcgcatcgagcggcaccagaccgcacccaacctcatccctgtcaccgtcggttgcgctaggaagagtgggagatgaggaggtgagaggaggcggcaaccatgtcacggtggaggctggtcggggaggcgaggacgcgtggttgtgggcggctggggaggtggagcagaggcggagggagaggcggtgagggcaccgagcgcagagacggaggaagggaggaggccgagcgcagatccgagcgcagagacggagggaggggcaagacagggaggaggagtgggagacgtggtgcgcggcttggagctccacgaggcaggggtggccgcggcacgcctcgaggcagcggacctcgcggcagaacatcttgtcgaatgcgtcgccctcgccg

SEQ ID NO: 125194 - DNA, 588 bp, Zea Mays
cccaaccgaagcgcccaggtagcgtttctcccttcggcgagctcgccggtgcagttacaaccaacgccgacgccccagaatccccaccgtcgagtcaacctaatacccccggagtcgggaaaacaaacaacgcggaagagagcgatctagtggatcacgacagggaaaagaaaaataccggcaacgacgtaatataatcctgcggtggcgctctgccgaagggccacgatggtttgttctggcggcggtgctgccccccaagtgttcgaattcaactgataatccccgaaattaacatggaggctactacggactcgagaagggacaaagcgtctttaaccaccccggctaatgcaatttcaccccctgcagcggcaaccatgccacaccaacaccggtgagaggtgtcccaacgcccgattgcatttttcccagacgagagccaaagcgtagggaatacgtcgtagtcatgcacagggttctttttctgaccttgacgaactcggcgaggagggagggtcaccgacgcacgccgatgaagcgaggtttccgccggtgcgttgctgcaggacggcacgcaggtgaaac

SEQ ID NO: 125195 - DNA, 377 bp, Zea Mays
ctgatgagaggttagtggctctttggtcatgcatgcaacacactggcattctagaggacatttgcattgacggcttcatctcagatgttcgacgaggacgactcttttaaacgttgacgccaccacgctattgacaatacaaccaacaccaaaatctgaagtattgaacgacgacacactccaacccgtgtagttttagctttgttagaagccaaatatttcaatgttctctatatatgttatgagcatatttctcatggatcatctaaaaacacaaaccttgttatgataaactatattaaacttctaggaattgatggttaataaagaaagaaacgtttgacgacttcagacatttaaaacaaaccacctttcag

SEQ ID NO: 125196 - DNA, 514 bp, Zea Mays
tcaagtcatgttatagcacctaaaagccagcaaaaataagttttagagaattacccgctgttaaataataattgtagttcaaagcaccccttctgccctaaaatttggtaattttgtccagagaaaactattcaccttctgacccccaaattttgaggcaaagaaatgtacaccagtaccaagccactgtaatttttacagaatttttagaattttatttaagcaacctgtagttcaaatccactccaaaacattaaagagaataaaagaaaagggaagaagaaataaacctcactccaataagtctagcttgagtacttatcaattctcactaaggcttaaaaagaattcagtggaaccccaaaagtaaacataccacttaccttagctaaagtttgacccaatttatcaagtataccacccaagggtcttacataagtaaggtttaactttatctaactcaagtagatcatacaccgtcaaaagttgaaatttctaaagcacatatcatatc

SEQ ID NO: 125197 - DNA, 1062 bp, Zea Mays
atggccgcacgattagaatcagtggcgcggattagaccattcctatacatgaaccggtatacgctggtggccgctagatcggagatcgacggctacaacttaatgaaacacgatatgttctaatccgcaggataccgatctgacggcacggatccaatcgcctaaagcggtacaccccaaactaatctccaccgcccatccaaatcctacggccaggacccaatttctcctttcccccaaacaaacactgcgccgacggcgccgcacagcacccccacggcggagcttcgccggagcgcacaaattcctgccaccccgagccccaaactctaaatcgctcagccctcgtgagatttacgacggcccgaacctatgttgcccatcaatttcagctgcaaaacagcgtagacccccgacccatggcgcagtccaatccacggcggggacacacgcgacggcgagcaattgctatggtcatatggttcgaacatggcgcggtataaactcctatcatccagagaagattccgcaagcgagaggagggagttaccgtcaaggatcacaggggagaacacggttgcggcagcggtcgtcccagatgtcgatggcggcgcccttctcgtgtcgcccaggatggtctagataatgcgaaagggcagaggagtgcggcgcggtgggttgagcaggaggcgagacgtgattgggttttataccccggtcgagttcggtcagcgaggtccgcaacggcagccgaagctcccgcgcgggttctgttacgcgaaggggatgaacccgacaagtgggtcccacctgctagtgactcaacactagcgctgaatgactataccatgtgaggctgggcgcggggtccggatgtcagtgggtgtccagcgcgcgcgcgtggaggattaggagttgggccgcgcgggtgaaaacatgaattgggctggaaaggaggtagtcggcccatgtggctttctttttctttttctttttctttttctgattccctctttctctattttcaaatccaatttgaattcaagtttaaattcaaacttg

SEQ ID NO: 125198 - DNA, 332 bp, Zea Mays
gatcttttctggcttctgtccttccttgtcttgatgaggtcggtcaccttcgattctctggtcttgacgtcatcatctgagctagggacatatagttaagatagcggttggttggatagaacagatagtaagtaggtaggtagcatggaccgagtgtattatggcccaatccggtttgatgttgggttggaatggatagccatcatgaatatgtcggttgggtcatttgttcatgtccaagttggtcgaaggtactactttaggtttaaaacatatttataggagtaaggtctaattaactaacctatttggtaactaattttagattagat

SEQ ID NO: 125199 - DNA, 515 bp, Zea Mays
gaactcatccctcagcccaactttgatttccaagagttgtacctaccccacaccctcgccatcagccttgatgcccctttcaccacaaaagaaaccatagataccatccttgccatgccttgccagagcgctttaggccttcatggcttcacccctagtttctacaaagctacctggcgtaccatgaaaccaactatcatgggtgttctccatgcattccactctagcaacattaaccttgatagcatcaacagatcctacgtcaccctcctacccaaaaaaccctgatgccatcgcagttggtgacttctgccccatattccaccaaaactgtagcataaaacccctctccaaaatcctcactatgcgcctcaaacctgacattggatccctcatcaacctagaccaaaatggtttccttaaagggatatctatcttagaaaacttcatatatgccttgagctgatccaatgttgtcacaaacaaaaaaacccaaccttgtcctcaaactcaat

SEQ ID NO: 125200 - DNA, 637 bp, Zea Mays
atgaaattccagcccttcaaatttgtcttccagctttcggacggttgtgcagtacttgcccatagagtcattcgagcaatcccattctttatttatctgacttatgaccaccagtgaatctgcgtataccattaacctcttaatgcatagtgatatggcaatgttcaatccatggatcaaagcttcatattctgctgcattattggatgccgagaataacaactgaagcacatatttgagttgctcacctccaggtgcaatgaagaggatccctgcacctgccccctgcagctttagcgagccatcgaaatacatccgccatacttttgcagtctccgggttgtctggtacttgttgctcggtccattctgatacgaagtcaactagtgcttgagtctttatcgcagtacgaggccaaaactcgatgtcgtgagctcccagctcgcaggcccacttggctattcttctaatggattctttgttgtggagaatgtcccctattggaaacccggtgactactatgacttgtggtcgtcaaagtagtgacggagcttgcgtgcagttagaagtactgcatacaacagtttttggacttgaggatacttcttcttagatgatcccagaacttcgctgatga

SEQ ID NO: 125201 - DNA, 1076 bp, Zea Mays
ggacagaagagtctttggatgaggacttggattattttgcggcactggatgtggctgcggcggaagcttctccgcgcgtgataggtgttgatgttcttcctggtgtagtgttgggcataggcggcgaagggcggtggcgaaacggagggtgagtgaggtggagggtggttgtcttcgtgtggacggggctagcaaatgggaattgttgtcctcgctggctggggcgagtgtaggtgagggggagttgcaaaatctttttgagggtgaggagctgaggataatgctgttcaactatagggagatgggtatcatcccaaaggttgagcaaatgtaaagtgtgatgccctcactgtatgtatgtaaccgtaatttatatgaagctgtgtgccttcgttgatccggtcgtgcccgtaaacgacttgtgcgcggggaaccttttggaaaatacatcgattttgcgtacttattatgctagtccggctgcacccgtaggcgacttttgcgcggagtgtcgcacgtgagggtagtcaacgctgcccctcgcggtgacttcggtgtggtcgaatgccgaagaccgtcgatgcggtctttttcgacattggcttagttttttgcgggggatttttgcttgtatattacatggctccgcctcattgaaaacctcacccccttggaggaaaagagtgcgggccagaataataatgtttggtgaattacaagggcgtgatggccctgaggattcaaacaaaaaatttgcgaagattatctatattccaggaatgttccaggtcttcgccagattatgttgttaatctgtatgcgctgggagacgacttcgtcttgacgataaatggtctttcccactttggttccagcttaccccgtgactctgtccgggttgtgcggacaagcacgaggtccccttcgttgaattctcttgggacgactacgtggtcgcgccaggccttcgtttgggcttgatacttggcgagggcctgcagggcgaagacacggtcaccgtcaatgaggtctttggaagttggctcatcaacgtcgggtactgctgaagcgcttgt

SEQ ID NO: 125202 - DNA, 748 bp, Zea Mays
gaagtacttatatcattgtcggcctagaatggccgggggcagcaccagctcgtgggtggtgtgagtttggagatgcatcgtgggaggaagatagtacctcgacatcccactcaaggacagcatcaaaggatggcgcttggagtggtttattgtagagaatcatggcaagtccctccccctcggtcagggagacagtcagatgtttgtgctccaagttggactgaatcccccacagacttggagataacataggccagggttctgcttgccgaaattggtttgttgaaggagagaggtctgactgctgaagctgtagttgcagactttgtttttaagaacattcagtcactgaaggacagagcgtacccggcttatttgtatagtggtgtcactgactcaacccgagttaccaacaagaggattcctgttgtggatttggtaagccggctggagatgatcctcagaggcaaagtgtcgaatattggtgctcctgttgcatattctgcctggaatctgccaccttccaagacttttttcaattttgtgtccaatcctcctgctagtgacaatggcttgggtcttagagtgcgaccctctcccgaagaagttgaggctctggttgcttcacttggtgatctccccaatgatgagagacaagttcactttgagatgcctataaacccaagcgatgcagagataagtgctatgctggacatgttggctgaggattcttctgactctgtcccta

SEQ ID NO: 125203 - DNA, 320 bp, Zea Mays
tacataagcacaacttagctctgattcttcactaccactatataatccaacacttcaaatataaatacaaccaccccaataaatcacccccatatacatgaatcaacctacatgcaccaaagcaacaacacttagaaaaacaactcattacctatacccattatataacgctaaaccctaaacaccactaagtccacataacaaattatcgacatcaaaatcccaccattaaaaccaaagttctagaccgcttcgtttacctcctctctctcaatcaatcgcatccaacgtcaatgtttttttggatcatctctaatccc

SEQ ID NO: 125204 - DNA, 1190 bp, Zea Mays
gatgcacaatagtgcgggaagttaggtccacagtttaagtgattgccagaaaagctgatcgtggaaaaagagaattccatcattcactaacaaaaacatagaatgaaagaaaaaaaataagagaaagcttcatatacttgtaacgtgctacttgaaacagcaacccaggtatctgaccggacaaattattatatgccaggcgtctgtaatcaaaatattttttgtcaacacatgacaagcacatttaaatgaacttgagttataagaaactgaaaggtatcatactcagtcttacatgtctgtcaagcttgaaatgttcgctatgctaccaggaattgacccattgaaattattttgactcagtatcctggttatgagagaaaggaagataagattacatgaaaaaggtcacatataactctatttcttttctcaaatatgtaggacatataactctatttataagaagggaactctgattttaaaatacttacaacagctgaagcttagaaaggttgccaagggaagctggtacttctccaactaaaagattgtcctctaaatctaagcttgtcaagctagatagattgccaaactcctcaggtatggtaccagtaatcctgttaccagccaatgacctgcaacatcatatgctatacagtttcatagtagtccgagaagtatcaccaagcttgaacagtagttcatgtatgacaaatatctaaaggtctggaataaaatatgttagcatatgtgacactggtataatgcaatccatatcatcctagtttacttgcacagatggctagcccactatgatcttgtttcagtacatatcagtttgccccaaaacatgaagagaagcagaagcaatagagtcatagaacagtaagattcaatagagaaaccgattcctaatttctgacatgcaaagtgtctggaatgtattcattataaatttattgcatgtactcattctataatcttactttgaatatcatgatgtaattctctggaaaaatatattaactattgctatagtgtaagggtaaaccatccccttttgatgtttataaaagtgataatgtcaaaggcatatataatctacagaataatacaacgtactcacaggacactcaaattttggagttcgccaattcttggtgacaaaacaccagtgaatcctcgcg

SEQ ID NO: 125205 - DNA, 389 bp, Zea Mays
gtcccctaggacgccagcaggagcggtggtgcttgcagcgccgctcagctacggcgacgatgccacggacgacgtcgacgcggtcgccacgaatacgaagcagcagccaccacaatacgactacgatgccgacatcgacgccacgctccagaccatggagaaagagaccatagagtggccgtcgccagactacctcagcgatcgacgggcaggggagatgctgatgatggaccgcgccgacctcgtcgagaatatgcatcgcttctgcacaagctacgacctcgcaccgggagcgctgcaccgcgcggtctccttcgtcgaccggttcttgccggtcaagaagatcagccgtgacgagcgccagatccgcctcctcggcgctgcagcca

SEQ ID NO: 125206 - DNA, 434 bp, Zea Mays
aaaaaaagaattatctgtttcaggatttttctatgacaagcgaataaagcagacttttctatgacaagggaagggaaagtgtgtccaaattatgtatgagccaagagcagctattacaagatcaggtacccttttttgatgtacagcatcccagcacttacaacagcaattacggaacatgttctaaatttgattcataaagcagctacacatgcctatcactctgccttagagcaaggtgcattccacgatagtgccatagattaaggagtcaaccgtcaaaaggccgagtgatgcaaatatatatagccccctctcctggttgtctcattaatacttctaacaagcatactacacacccctcctccctccccatccttcataagctctcatacgtctctctctctctcccttcttcaaaacaccccacccca

SEQ ID NO: 125207 - DNA, 569 bp, Zea Mays
gctgccgcatcttgaggttggagaccatgggcctgaacttgccattgaggccgcggaggagggtaaggaccagtgtatgatcgccgatcggatcgccgtagtcgccgagggtcgccgccatcgtctcaagacgacggcagtagtcggtgacagaagatgagccctgtttcgccgtgcgaaattccgccgagagcagcagggcgcgtgattcgtgctggccgagaaactcgttctcgaggtatgtccaggcgccgcgagcattgggcttgcggttcatcgtcgactgctgaagatcggcatggatcgtgccgtagatccaagtgagcacgatgcagttcatctgcacccacgctggacgatcggtgttgacgacgtcggagaggacatgatccgtgagggcatatttgcccaagacggtcaggaacagagcgtgccaccggttgtagttgtccgcggcgcgatccaaaaccaggggcacgaggaccttgatgttgaggacggcgatggcggcggcgtggacggtggcgtacctggcttcgtacgcgtcgagcgcagccgcgcgttcgcgc

SEQ ID NO: 125208 - DNA, 317 bp, Zea Mays
ccctcaaaaagatttcgcagctcgccttcacctacactcgccccaatcggcgaggacaacaattctcgcttactagtcccatccacgcgaagacgaccactctccatctcactacgatgacgcctaccacttcgcgacaattcactcactttccgtttcaccaccgccctacgtcgcctatactcagtactcgcgcccgggagctcctcggaaccctccacgcgtggtgaagactccgctgcagccacatctaacgctgcaaaataatccaagtcctcatctgaagactcctccgtccacgcaatcgaactcccaga

SEQ ID NO: 125209 - DNA, 409 bp, Zea Mays
ctttgcttggatagtagtcttggcggcgctcaccatcgatgtggacaccgtggtgccagacatagtaaaatctgcttgtgcacctgcctcttctcctctgtaaagcacatcgtcagcctctcatcccctaaccccaactctatctgtcattctcccattacctttgtcgaagctttgagccactagccacaattcctcctccccatcggtcctttctctagtctgccactgcccgagcttcccctcaacttccttagttttttcctcctcttttccatccttcccttattggatcgagctattgtcgttcttccttctcgctgacgtatctctctccatcatctgccatctttcggtccttctccgcccaattatttgctttgatgaacttcccatggcgccactcgtg

SEQ ID NO: 125210 - DNA, 296 bp, Zea Mays
cgacttagattttttgtggcgttagatttgtctatggtggagtctatagcggcggagtcttcgtctagggtttccccaactgcggcaaggtgcaagagaaggatcggagtgctcaaacggagaatgggagcctttggcgagacgttacaaggcaccagaggctcctgaaggtgtcgccatatgggaatggaggggcctttaccacgggcaggaatgcagtcggaggaggtgactcgccggatcatccttgcgccgacaactggacaacgtttcaaagagggagatctgagggctct

SEQ ID NO: 125211 - DNA, 613 bp, Zea Mays
cttctctcctcttccagccttcctctctggtgctgcgggacgacctcgttcctttgctgagaagcacgacagagaaggtagcagatcgtgcacgggcggagtagcaatggaaggacaaaagaaccagggtggagaagagtaggcgaaggaccgagcgctagatgcacagggactgtggcgtcgagattgactgaactgatgaggatggggatgacgatgctacggtgcaggctctgagctttgggccattcctgatgcctcccttgacgcatcaatggttgattctgttctggcctttcctcgcgagacggtgagtacttttcccatcatggaggaggctgacgtcttggagctccctaccctttttccagggccgatggccctggtgttactcgcccttccgcctaccgagccctcgtccgaccgaccacttgggtgacttctgggggagctcttctgcctcgggcttctcggaggtcccgactgacacaactctgggtacgctcgtgctcgctatgacatcccagttttcactctaaaggttagtatagaaaacctagttacctaacccgttaaaaccctggcatcatgacatttttcttttgaaactcgc

SEQ ID NO: 125212 - DNA, 581 bp, Zea Mays
ttcgactcatcagggtcaggtatacacatggtaatgatctccccctacgaagagcaaagccctaggcccataccccatggctttgcctttactctctatctctgaagcttctttgtcatcaagttcaccgccatcaatgcctcacaaaaaagccaagctcatctacctcttcacatgtagtctgagtaggctcgggtgcatcttttcctagcaaaaggttcgaatctttcagctctttcatgccccgaagacctgccacctttggcagtcattttctaattgtcttcatcggaaggtgatgaacctccaaaggtagtatcatcaagacccaaaatacgtgggctctccacttcttcctcaaatggaatttcttaacccttcgaagggtggcctccttcgtcagccccctccgtggttgacataaattgagtcagtgttggtcctaagagacttaaaggggagaatggtaatggttgtgtcattacctcaagaattcgtgtgcatcccaaagaagaggtggttgtagtactccctttcccttgcaattgcgcagcggtagaattttttgaagaagtcttggc

SEQ ID NO: 125213 - DNA, 525 bp, Zea Mays
tgaccaatgagatttttgatgtgggcgcaaaggtggtgggtgacaaatcgtccacccaagcaagcccatcaacctcaagtcatccaagtattgaagaaaatcatcaaccccaaaggatgccaacggtggtagaagatgaacatggaagtgttgatggtgaagtgcctcttgatcaagtggatgatgaggaggagcaaattcaaagacaaccatcagtgccccatcctcgagtccatcataccattcaaagagatcatccggtggacaacatcctgggtagcattaggagaggggtaacaactcgatcccgtttagcaattttttgtgaattttactcgtttgtttcctatcttgagccacttaaggttgaagaagcgttgggtgatccggattggataattgctatgcaagaggagttgaacaacttcacccgaaatgaagtctggtccttggttcaaagacccaagcaaaatgtgattggaacaaaatgggtctttaggaacaaacaagatgaacatggtgttg

SEQ ID NO: 125214 - DNA, 327 bp, Zea Mays
aggcattcagcacccacagtactgtagagtgcatggtatgctaaactgataagtacataatacattagggagcacaatagaaatactgctgcttatcaatataaaatgtagggaaatgtagtatcacaataccactcagctataaccacagtccacggtaaattggccagctatttttatcagtacatttatttagatactgtgtaaggtctttgatgcatacctttggtcgctaatagcttacagaacatattcttagagtccttcaaatatattatattctgcaagtgttttttctaatacatatctaccctacatgtctccaac

SEQ ID NO: 125215 - DNA, 978 bp, Zea Mays
ccatcattttagctttccagattttttttaaataatgtttttttttcattctcggcgttgccattttctctcgctgctgcttcacgccacgcacctttccttcctcgcaagccccagctcgtaccagctttacattactgcccatgtactcattagtattaagctaagcagcggctcggatttgagcgggcaggctgacagcggggggtgattagattagagaacccgagcacggagacagagatgggcacgcagggtgggtgataaaagaggaagggggaacagagacagagagagataggctcgatttgcatctcgctttcgcattgcacacaccaccatacaccgcactgctgagtgcagattgctgacctctactacactctactctactctactcctcctagtccttgttctgtacaaacctgttttcggcgtctggctgtaccgctagccttaacccctagagccagacggaggaggcctgcggaagcgggagcggaagaggaggaggagagtgtgttcagaatttcagaagcaaagtgctgtcttgccatacccctacagtgctactagcctgtgctgctgcagagaagccaatcgaggcggggcactcgttcctccccgttacaaggagaggaggaagatttaggggcggaggaggtcacagactcacaggaaggaaagatggactcttgatccccgtcgcggtcgcggctggtttgttgtgggcaagccgaaccattttgctgctataatactcgagcagtcgattcgcggctcccggggccagaatcttgctctgagaggcggaatttgtgcgggatttgagctttctttcctccaacgaggtgccctgaggaagggagggagcgccagttctcccactgctgtagtgcgtggtttcagggaggtatgagacaatgagggaagagagcaacaagaagagcaaggtatttgcttgcttgctttccgttc

SEQ ID NO: 125216 - DNA, 502 bp, Zea Mays
gcgggagtggatacgggtccttgggacaagccttattaaggctggtgtagttggtgcacatccgaagcttcccattcgccttggggacgatgactgggttggccagccacactaggtgatgaacctcttcgatgaagtcggcatctagcagcttccggacctcctttcggatgaagtcctgccgctcgacggactgtctgcgaggcttctgactcaccggcctggcgtcagggttgatcttcagatggtgctcgatcacctccctggggatcccaggcatctgcgatggctcccatgcgaacacgtcggcattttcctggaggaaggcgacgagcgtgagttcctatttttcctccagatcacccgcaatgcgagtggtctggggggaatccgtgcagagccggatggccttgacagagacgtcgtcggctccggatggctgcaccttcggcaccttggtaggcgccttggtgccggaggtcgaggggttcctccctccgtc

SEQ ID NO: 125217 - DNA, 658 bp, Zea Mays
gcacaaggcaataaacgaagttgttgacaaagttatgaacgaagctactgaaaaagatttgaacgaagactaaatagtttctgtaacaaattttttaagtatgtctttgttgtgtgtaaaaacaattgtgtgaaatgtattctctatataagtaaagtttgcacaatatttctttatgtagcgtgaaataagagtacgtaccgttttgagtcaaaggcgaaaaaacactttcccttcttttcatgcttcatagagaaatgttcttccgaccaaaggtcttataatgccataaaaatgtctgattgttgaagaagaactatttccctttcttcgcccttctgtctgtattatataatctttacaatggtataaaacatcatatacgaagccaaaagggggcatcaaatttgaacgtggtttcatcctttagatttaactttgcatttcgtagggaaatgctacggagtcatttttccacctgcacctggggagagcaattctccttcttttccgcttgtgtttatgaataataatatgtatgatgtgatgatgaaatgatggtatgatgcatgatgcttggtgctcaagatgatgataagaaaggaaagaataccggtgtatctttgtaagcttttgtatcatgactctacattccctt

SEQ ID NO: 125218 - DNA, 462 bp, Zea Mays
tagcacaacaagtgcgcaaaatcgaagtcttcctcaaaagactatccgcgcaaaagtcgcctaagggtgcagccggactagcacaacaagtgcgcaaaatcgaagtcttccttaaaagactatccgtgcaaaagccgcctaagggtgcagccggactagcacaacaagtgcgcaaaaatcaaagtcttcctcaaaagactatccgtgcaaaagtcgcctaagggtgcagccggactagcacaacaagtgcgcaaaatcgaagtcttcctcaaaagactacccgtgcaaaagtctacaccaagaaactgtccgcgcaaagaccgactacaggcgcagccggaccgacataataaatgtgctagaccaagtgcgcaacgcccctatggatgtagccggacgcgcgaaggcgcacagcctcatcatacaaattatagttacacacatacaacgagggcatcacac

SEQ ID NO: 125219 - DNA, 632 bp, Zea Mays
ctacacctacgagctgggagctcacgacattgagtttcagcctcgcactgcaataaagactcaagtactagttgacttcgtatcaaagtggaccgagcaacaagtaccagataacccgaagactgcagaagtatggtggatgtatttcgatggctcgctgaagctgcagggggaaggcgcagagatcctcttcattgcacctggaggtgaacaactcaaatatgctcttcagttgttattctcagcatccaacaatgcagcagaatatgaagctttgatccacggagcagtcgccccacaaggtcgtctcgtcgtgggctgaacaaagactacaattgaaatgggccgacctaagaaggcggtgggctcgtgcccggatcgtccgtggattatgcctaatcttaagggaaccgtccgtttttcccaggcccggcgccctcaaagagcagagatagatcgggatgaagtggtcgggttttccttaagataagctaagttagttcgctattagctagatgtgcttgaagaatgtgatcatcgtgtgcgtagggagtgccccacggtcgtgtatataaggcccaaggggaaccccatcattttcatctgattagcacctctccgttcaggaaaca

SEQ ID NO: 125220 - DNA, 462 bp, Zea Mays
gactagcacaataagtgcgcaacatcgaagtcttttccaaaaagactctccgtgcaaaagtcgcctaagggtgcagccggaatgctaggcaagcaaaatcgaagtcttttctaaaagtctccgcgcaaaagtcacctacgaatgcagccggaatcataggtatgcaaaatcgaagtctttcccaaaagactccgtacagaagtcacctacgggagcggcctgatcaatgaaagcgtgcagcttcatcacacaaaattatggttacgtacacacagcgagggcatcacatattacatcggctcaaccttcgggatgatacccatctccctgtagttgaacaacactatcctcagttcctcaccctcaaacaaatttcgcagctccccctcacccacactcaacccaatcggcgaggacaacaattctcacttaccaatcccatccacgcgaagacgacccctc

SEQ ID NO: 125221 - DNA, 615 bp, Zea Mays
gggggggggtttagggtttcaaacctgggttgggattttgggatgttacaagcaactccaaccctggccatgtggtcgaccgaggagattaagaaggccaatctcggcctcctggatgcatgcaagacgacgatcaacaactctagcctcaccaacaaataggaagatgcgctcgtctgatccctacaaggtaactgtaatgtgtttccatggcagtctgtagacatgctcagggttcctagggagttggccgagtacaaattgaaggtttaccctcaagcaaataaagtggattggtgcatgtgcgtcgattatactgatcttaacaaacgctgccataaagatcccttcgggctccctaggatcgaccatgtggccaactccactgcagggtgttcctttctcttcttcctagaatgttacttggtctatcactagatcagcctagcagaggaagaacatgtgaagactactttcatcatgcctttcggggtgttctgctacacctctatgccattcagcctaaagaacgctggggtgacctatcaacgggccatctagacgtgcctagctgaccattagggcaagcatgtggaggcctatgttgatgatgtt

SEQ ID NO: 125222 - DNA, 630 bp, Zea Mays
cataagacagcatttcagactcatcacgggcacttcgaatatcgtgtaatgccattcggtctgaccggagccctggctacatttcaagattttatgaatcagctgctggcaccactactccgaaagtgcgtagtcgtgtttctcgacgatgtcctggtatacagcgccacaatggaagaacatgtgaaccatttggaacaagttctgaacctgataagccaacaacaattgtatttgaaacagtccaagtgtacgtttggtcagacgaaactggaatttttgggtcatattgtcagtgctgcaggcattaatacagacccaaagaagataaaagttatccgtgattggcctattccaacttgtgtgaaggatgtgcgcagtttcctgggcatggctggctattataggaaatttgtgtctaattttgggatcatcagtaaaccgctgaccaaccttttaaaaaaggacactttattcgtatggactgaaacagcaaaccaagcatttgtggctctaaaaacggcacttgtgcaagcaccagtgttggcaatcccaaacttttccaaacctttcacgattgagaccgacgctagtagaggaggtattggagcagttctgcaacaagatggg

SEQ ID NO: 125223 - DNA, 473 bp, Zea Mays
tctcaattcgagagtggtgttttacttaccctacgcttggtcataacctcatctttgccacgtgcaaatcttgccttaacgccattctttgttgtactcgtacccttggttcttctatacctttacctcttatcttacacccttttctgttatcaccttcaacccttgtaatacctgtattttttacaacaacgcttactttgaacctagcctttggagccttctcctttccatcctagttcaggagcggtgttttacttatctcacccttgacaacatcctcttctttactgcgtgtaagcttggacgtgactccattatttgttgtactcataccattggctcttcaatgccttcatcttttctctcatacccttgtctgttatcgcctccgacccttgcaatattgatgtcttctacctaaattctcaccttaaacttatcctttaaaagcaccccctttcattccaccc

SEQ ID NO: 125224 - DNA, 668 bp, Zea Mays
ccgccgcagccgtggggagtgaaggagatggaatcgccgccgcaagaccccagacaccgccgccgtcgacgttctccgcttcggtcgtcgtccggagttctcggtcggggtttggggactgattcacgttccctggaagaagttcacggccatccgaggaggaaacgaccgcggtggcggcctgaattcaccgtcggagcttcgtttccaccgcggttcggactcgaccgttgccagagcgcttcacaacgtgatcactggtaaggacccttgtgtcgagttcaccgttgcctctgcatcctattgtcgctggcacatttggcgctggtgaactcttgcgccagaacccggaactccggcggggattgaccgcgcttctaggtgtcgccgccgtgcggagctcggaggtaggagagaaaatcgtgaccgttggatctttgtgcaacgtccccgattagatttggggggatgtcactgggtgaccgtagatctgtgcacgggtggccgaaatttagccatgacttatccctttgtgcgatctaacctggaccgcggatccatgatcgtgtggctgatattgcgtaccgtttcgtttagaaagaaatctaatcttagccctcgattctggatcgtgcggctgatgtcctcccgtaccccttcgcctcggc

SEQ ID NO: 125225 - DNA, 377 bp, Zea Mays
atttgatcggcgacagattggacgtctggtagatggctcttggctggtcttcatttcgctttgtgcttcaatgcttctgttgattagacttgtacttcagtagctatatttggctttcctccgatctccatcgatatctctcttctgtcttgatacattcattgcgtatattgtatggatgtgactgcttgggaaaatctattgaaaattcctggacgttccctccccaatgggtgtaaccaagggacggcttggtacgctgagcgtttagcaaactgcccttgagcagtaacttgacgtgaccgcggggtgtaatcatatcgtccaagcagttgacctcagtccaaatggtgtcgtgttacgtgaaacgacgtctg

SEQ ID NO: 125226 - DNA, 476 bp, Zea Mays
ccgccgtacccgcctgagtcacggccgcttcggataggttcaccggagttagccacctcgtgaccttgtgccacgtgccctggcatcttaccacgtcgcactagctcatgttatgcatatccggtgatcgtcggtgagctcgccacggtgaaagccaccaatcgcttgcgccagtgcacccccttctctctgaccgccaccgcgcgatctcaaattcacgggccatcgctcaagggccctataaattgatcacaccctcgtctccgctaagtattcaagcatccaatccacccgctcgtgccaccaattactcaccagagagtcccaatttgggatttcccccaaatcggcccgaaacaccgcgcatagtgacctcgccgtggctagctcgttccaggtccgttcatgctctctgctctcccgtttcagtgcccttatgttctcctgatgctccttgacccgtccaattaagctag

SEQ ID NO: 125227 - DNA, 649 bp, Zea Mays
cgccgtgtgcctttaacgaaagggagaaatcgccgtcgctgctgatccgcgcaggcatcgcgccgggggtgttgcaccggtgtggggagctttgtcgcgtctgcggaaagctgccagacactttcgcgggggaaaaggaggctctcgtggtcggtgattgctcaccggaattgccgatctaccgcggggccgcgggacatcgtgggcagaaacaccggcacgattatagtaagtaagaacaccctaatagacttcggttttgcccccgcaaaatgtagatacgtttaaggctaaaccctggtggtcggagtctcgcgtggccgagtccggcgatgccgctgccggtacggctccaagcgccgccgtgctccgcgttagagaattggggagaagcgccctgaccgtcgatcagggaacacacggctaggattagttttgggcataccgattcgctaggatggatcggggtcgtcaatctgtcaatctatggcttggattagaccatagcatacccgcgtctctcggcaagttttcttccgttcgatctgatcctatggctggcatggggcggtagcgtggtcgcgcgatggccctcggatctgaatccagcgatccgcgagcgcacgcagagttagttaaacctagatct

SEQ ID NO: 125228 - DNA, 509 bp, Zea Mays
gtttacaccagattctacccctaaggagtatttcccctcacttaattgcatctaagatcaactaaagagctctggccacggcgaccgagaacatggcggctagatcgtcgtgttcccgacgattgggggcatcctagttcaaattgatggctcgtcgagcatcacagagtaaccagagtgctcaaacaagggagagggagcaatgaattaacctggaaacggctggccgcggtgagcttgattctacggtggcggaaacccgatttggggagaattggaaattctcgagctctggtgaacgattgtggctgattagtggtggctggttagctgacgaccttgcggagctagtcacgggctcaatttatagggaggacgggcagtggtgatcaattcggccgagccgtgctggcggccggagctgaagaggaacgtgggtgcggtgaattcgtgtccaccgccgtggcaacctccccgtcgacgatgggacgggtatagggagtcacggc

SEQ ID NO: 125229 - DNA, 345 bp, Zea Mays
ctttttctcgacagtccattgctcagcccactctccatacaagtagttcgattcctttctctagcggctagctactcgatctactcgtggctcgatcgctccttcgatcatgactggatcggtagtgggtgaccagacccgtccgctactagtgtcaccttgtcttctcgtcactcgttagttcattgcgttgtcgggatcccacacgcagctccactactttgcctcctattccgcatcgactggtgggcaagctattggtgggatcctgccttggcaccatggttccaccatcatctgccctcactatgtcaccagggtcccaccacgtcgtcgcaatgcaac

SEQ ID NO: 125230 - DNA, 480 bp, Zea Mays
cttgttttgatgtttctagcctttgtgtgttttacacttgaagttacacctgcacagcttatagacccccacagcttgaccgctagaccaacccaagtctccttgtgcacttgtgtcaaaaaaaagtatatttgttgttggtgtctagttgcgcaaaccctatcaaggccatgtttctttccataaatccttgctcctaaaacatcatagcatttttgttgatcatcctagctgatcctgttcgcctacctctcctttcgcctggatctggtaatccttcttcttgtgaatcatgtttgctttatcgtccgaatctcaggatccccaattgattctgccccgttatctggttatctgttataacccgttctcaagtatcggatgttgatctgcctaaatctctcatttctggtcattctcataccccctttctccgaggatcatgacgcttgttttagcaactgtatctctaaacagtgt

SEQ ID NO: 125231 - DNA, 318 bp, Zea Mays
gtgttcccaacggagctaccagacattacaccggagcgcgatgcgtctttcaaaatcaagctgattccgggtacgtagcctattcataaggccccgtatcggatggctccaaaagagcaggttgagttgaagcgacaattggatgatttgcttgctatgggtttcattaggcctagcaggtcaccatgggcttttccgatgttatttgttgagaagaaggataaaagcaagagattatgtgtggattatcgtgctttaaatcaagtgacaatcaagaataaatatccactacctcgtattgatgttctctttgaacag

SEQ ID NO: 125232 - DNA, 404 bp, Zea Mays
gggttctggcatgccgaatcgtgggatgacgaccatggcgctgccgtggatggctccatgcaccgccgcctggggtcttgggtgaggaagggcagccgggggtcgttgatctacctagggacggttgggattagatcgatctttgccggttcactcgattggatctgactcactgatttggaatccaatggatcggattagaagtcacatacaccccttcgcgtgatcagatctgggtcgtcgatcttgatcgtacggttccgattcaatgaaggatacattaaacctacgtcgtggatctccgatctaacgatcataattgcgtatcggttcggcgctgggctgggataaatctgtgccttagatctttgatcggacggtcattgtaaaccaataccccttcg

SEQ ID NO: 125233 - DNA, 679 bp, Zea Mays
cagaaacgtgcatgtttttaatcctaaacaaacaaacgagccctaggtggatttaaaatacatagcaagtcaaaatctctactaatttttttaattatatccaatccatatggtgtaggaataattgaacaaggctttattaattccaaactcacagcagttaccacggcaattacccaccgagacatacagggatataagtaaacacccttactttatttaactcatagtttatttaaatgataacttaaaagcaagtaaccgactataaaaagaatggtaatcagaaacgaaccactctggtggccttagccataaacagtagagatttgggtagttgacagttatatgaatccttcttcacataagttcacgagcattacttgttgctttaggacacagtactggtcactttgcttgcttgctcgctcgtctcagccacacactctgtcatgcacgtcactgtcatccctgcaaaaaccatggaagatgagttcaaagctttccttatggatcaatggtttcacgagaaattgtataattaagacaaaggtgatgcaaactttttgaatttatccaatagcctgtgacagttttggatgatgctcaaccgtataaaaaaacagcacttgtgatccatgtatgagttattggatagaaggaacaaccatatatggag

SEQ ID NO: 125234 - DNA, 807 bp, Zea Mays
gaaaaagaaaaagagacatcttcgtcgagtgtcatgcttgaatcaggatgccggcccttctgctcctgctgctgaggaagtgccagtgccggtttttgctgaagctaatcccaatgggtgtgacccgactgatgctgaacccaatgggtgtgaccttgatgatgttgaacccaatgggtgtaatccggccaaagttgatcccaatgggtgtaccgtccgcattattgatgaagatgaggaagaggaggaggaaatccctttaattcggaagaacagccggcgctacatagccagcggggagagtagtggtgttccttctccagctttgtctgccctcattggtctgcaagaattgtctctggcaaattttgatcagactctcgaagatatggtcccagaagatctgttgtcggagccggcagatggtggtatgatggaaatttgtgctgatgtgcctgatgcctggttggagttatcccgagcggcgtctcgtgcctcatcgaccttggagcgcggtcttaagagtcaggaggctagtatggattgctctattcccatggaagtggttgaaggtccttcagccttagaggtggctgttacagagggctcggtcctcaaggatggcgctagcgtttacccagcccccgagggtgttgccggagatgatccggctcgaatgggtagcacgagctatgacccagcccccgagggtgtccgagttggttctccctctcatacttccatggatgttcacgtagggccttctcctccgcattatggttgcatggcagcagcacgagcttcggg

SEQ ID NO: 125235 - DNA, 634 bp, Zea Mays
caaaagtcgcctaagggtgcagccggattctccgtgcaaaagtcgcctatgggtgcagccggactagcacaataagtgcgcaaaatcaaaaactttgtcaaaagactctccgtgtaaaagtcgcataagggtgcagccgccccccgccggactagctcaataagtacgcacaatcgaatactttcccaaaaagaccccgcgcacaagtcgcctacgggcacggccggatcaacgaaggcacgcagcctcatacaaattacagttacatacatacagcgagggcatcacacattacattggctcaaccttcgggatgatacccatctccctgtagttgaacagcattatcctcaattcctcaccctcaaaaagacttcgcagctccccctcacctacactcgccccaatcggcgaggacaacaattcccgtttgccagtcccggccacacgaagacgaccaccctccatctcaccacgatgacgcctatcacttcgtgacaactcactcactctccgtttcgccaccgccattcgccgcctacgcctagcactcgcacccggaagaccttcagcacccatcacgcgcggagaagtctccgccgcagccacgtccaatgccgcaaaataatccaag

SEQ ID NO: 125236 - DNA, 328 bp, Zea Mays
cctcccatttccaagatggtatggaaaggggttgcaaaaggcctgctaccttcaaatggctggccttgattctctggcaggtgtcgcattcagatacatacttagcaatttccctcttcattctggtccactagtataaggatctgagatcatgatacatcttattactgcctgggtgcatggagaattttgaaaggtgagcttcatccaatatcttctttctgagctcagggtccttgggaacaaccaatcgatctccaaaccagagaattcctttgcagtcctgacggaagcatttgtatttttctgctttctgcttgatcatttc

SEQ ID NO: 125237 - DNA, 407 bp, Zea Mays
ctcgcagatgaggctcgtgcaagatacgttcaggaaaaaatggcgatggtggagctgatggaggaggaggacacatcaaggttgagtgagcttatcgcgatcggtgaggcaggattacatggggaagcggaggacgacacatcaaggttgactgagctcattgcactagctgaggcatgattacatgcgcaagaggaggaggacgagtttatgtctcaggccaccaaagaagcagagggcgcttattaaaagaagaagtgtgatgaagcggaggctgaggaccagctattctcctaaaccgcagatgaagcagaagccacttattacaagagaaaggtagtagagtgttatgtaggacaatccagcaagtggaacgaggttatcgttgaggattgcgtgacggatga

SEQ ID NO: 125238 - DNA, 719 bp, Zea Mays
ggaactcgcgctcgtcgctttcctctaggcaaatgccgatgtgttcgcatgggaaccgtcgcagatgcctgggatccccagggaggtgatcaagcactgcctgaagattaaccccgacgccaggccaataagccagaagcctcgcagacagtctgttgagcgacaggacttcatccgagaggatgtccgaaagctactagacactggcttcatcgaagaggtacatcacccgatatggctggccaacccagtcatcgtccccaaagcaaatggaaaacttcggatgtgtatcgactacaccagcctgaataaggcctgtcctaaagacccatatccacaaccacgtatagaccaaatcgtggattctacctcgggatgcgatctgttgtcgttcctagacgcatactctagtttccatcaaatccagatgtccagggaagataggaagcatacggcttttgtaacagtggatggattgtactgttatgttgtaatgtcgtatggtctgaaaaacgccctgccgacatttgtgcgggcgatgagtaagaccttcggggacctgatcagggacaaagtagaggtctacgtcgacgacatcgtagtcaagaccaagaggagggcaaccctagaggaagacttaaccctggtcttcgacaagctgcgagcaacccgcacgaagctgaactcggacatatgtgtttttggcatttccgcaggga

SEQ ID NO: 125239 - DNA, 634 bp, Zea Mays
gagggcggaaaaagaagaggctgaatagagttttcgatgctattgggtttatgtaccctgattaccgctacccgctgaaagggcaaaagagaaaaagcgcaacttctggaaaaggtgatacttcggttgctctaagtgagggtgcgccaaagaggaaaagggtgaaggtccttactcaccgaccacgcttcatcgaaccggcctcagtgcccgaatttggtggtgagacctctactgctactgaagccaaagaaccttctcttactcagaagaatgaagagctggctatattgccgaaggccgataatattaaagaaatagagaccgcgaaaacaaagatagtggaagttacaagccctccggcaggaatgacagtgctgaaggcgcaaaaagacctcacgacgactccgaagaggaaaaggatggtcaatgtactagatgtgttagagacgataaagtcttcaagctctactccgaagaaaattgccgaagctccaaaaacgcaaattgagacgacggcctctgaagccgaagctacaaagcaccaggctgagactgaagctgggccttcggagcccgccaaggggaaatccttagaaaccagaggaaaagaaacagaagcggcggaacaaat

SEQ ID NO: 125240 - DNA, 835 bp, Zea Mays
tacatgtagctccgagtcttacttgtggactatacttaaccattcatttcacatgaaatcattagtccacaaaaacccaaatgacactttcacatttatagctagatttctttggatggcccaagtgcaaaagatgcatagccatgcacgccatacactcaaagccaaatatgcattctagtgggtgcaaatgcacccacaaccaaaagaaaatttagaggtaatcattagatattgacattatctgcacctcctcccaacaccatgcacccatcaagtcagccaacttgtgcctattacagataacatgctctagactctatatgcatggtagtgaggatgtagaagcttgacacgtgcctgaatgctaggtacaagctaacaaactcatttgtagatctaccatgacctacttggggtcctcacctcactcttgcctttttaacaagaatgcaaggttgttttaacttgtaggtttcaccatattcacccccatgtaggtggcatcaaggtcctttcatatggtgtgatgtagctaccactagggccagacaatagtttagaccatcagtatgccatcatcataagcaagccactagaagcattagaagagtactcgatcaatgaagctgctaaatgaaatgacatcatcaaagatgacatggcatgagatattagcacaacaagtagcaatgttaaggcaacgagagcctttatgcagtgctgactgaataagaaacaaacatgtggtagatcatggtaataatgaggggtcatggtagcaaggtttgcataacaaagacaatcaatcacacataagtaagcgtaattcgag

SEQ ID NO: 125241 - DNA, 831 bp, Zea Mays
atttacaaaatttcattaaattgatataggacatgtgggcttgactcttaaatatagcacctagccagaaggccctattctgtctcatgccaacaaattattctgaggaaacttccgtctgcgctgctctcctgccgccgtcggtaatcaaggtacaactccctgccgccgatctccacttcaacctcgccgcccccacgctctggcaatctcttccttcactatcgtctagtgcctagttggagcctcttccccaccgtcgtccagtgccaggcttcaacctccgcctccccgtcgttgtcgagtaacctgttccccgctgttgtgcagtgcctaggacttggtccctgctgttgtctaggagattcaacctccacccccaccggcaatcaaggcaacttgtggtgagtgcttctcggaatatcttctaaatcccattctcatgtgctccatggagaacagaacaacagccacatacttgctttgatggatggatagggacatggtcatgtaggattagaaaaggtatctttggagtgaaaggggaaaatggcagagtgctttgtttatttttttaatttataagcaagctcatccacataaattcccagctcgaccaattttttgacaatgaattagtttgcaagtctcatttcccaatccataacctgcccctttctatcccatatatgtgaaatccatgagctctctattgcttgttataacaaagaaacatggattttatggtttgatgttcttaatccttaaattaataatgatcttatttgttggcgacatcaaggcacctcatggatcctaggcagccatcaa

SEQ ID NO: 125242 - DNA, 342 bp, Zea Mays
aaaggaggagcatggggccttctattgggggcgacaggacttcacggctcacaactgacctcactcccgatattggcactcacctcaatcatgcttacagacttgggattcactccctctcgactcgcttgtatcccctactacgagcacttaggtgtaagataatacaagccttcctcccccactggaagtagggtcttctctttcccgaaccaagataaatcttgtgtcttcttgcatcaaccatccgggacaggagcacgcatcacaaatttactagttggttaggacccccaatttccaaaacaccgacaaatagggaatcaatctctggtatatcta

SEQ ID NO: 125243 - DNA, 463 bp, Zea Mays
ttgttttttttttttttttgaaatggaaacgcattccatggctattaagcagctccaggcacatcgccggagacaagattacaaatgaagtccggtgcatgatctagccatagactagagtcaacgtcacctgaatttgctccatgagcagctaaacagacagcaactaaattacaggttctttgacatttagacacaatacaacaagcaaactcagaaaacatcctactccttatttccttgaatactacgcccaaagcagagaggtcatattcttgtgaggtcaacgccgtcttcaggatcgcagcatcagtttcaatcatcacattttgcattccaaggaaaacagccagctccaaacctttcatacaggcgacgctctcagcacgaagggcagaggatatgccagtcaaagcgccagcccccgcagccaagaaaccgccatcgtggcccctgataatac

SEQ ID NO: 125244 - DNA, 335 bp, Zea Mays
taaagggaccaaagaacttgaaagcaatcttaggatgagaccgactgaccactgaattctggacataaggctgcagcttcaataacactctatcccccacttgaaattctctatccaatcgatgtttatcagcttggatcttcatgcggttctgagcagcagccagtttagccttcaacatctccgagtaagccagtcgctcctgacacaattcctccacagattgaacacctcccactgctatcgttggagcagcagcgaaaatggagtcatacccatataaagctttaaaaggtgaacatcctatagcagtgtgataagaagagttgtaccag

SEQ ID NO: 125245 - DNA, 399 bp, Zea Mays
atttctattaagaatatgtaggtcgatcgactcatggcttctagcatttcatccccatccattcgtcgtgttgttttaaatgaagaagatgcaaagctcagcttccatgattttttatcactgccccctcttgcttgggttgcatgaactcgaacaaggaaaaaggaggtttcattttgagagtttttggacaagaatggagggttttatggaagaagtgcaacaatcttggttgcaacctttggagtgcttgtgccctctatagtgttttgctgggaaactaaagaggctgtccaagcatctgcattcttggagtcagaaaaaggtgggcaacataaaaatataggtgttgatggctaaagaaattcttcataagctggaaattgcaagagattccag

SEQ ID NO: 125246 - DNA, 378 bp, Zea Mays
gagagagatgcctccctaggtcgatgtggtgggtcttctatgggccatgtgtggccgtacctccggtatggcgctgcacatcacgctggtccctgtagtccatcgctaacgtcctagcagtagtttgtagtgggtttcgcggtcagtccaaaggggcgctcataagtgggattgttttgcctaccgtcatgcgccacatgtcacctttcgtcattcacggacgcacatacgttcggtatggcgcactgtcctgtcttttccgatatacgggtcactgttgagtctccggtgttgagatctcctacaaccaaggctgacggacccacaaggcagctagagtacgcctgaaccggtcgagggacacatactaccatgctg

SEQ ID NO: 125247 - DNA, 477 bp, Zea Mays
ctggatcagcacaacaagtgcgtaacagcatccaagggtgggaagtcgtccaagagacgcatatttttatccaagcaaaagtcgcctaaggctgcagcttgataagcacagcatgtgcatcacaaaggtgtgaaggcgtcgccaagacagacgtgtataccctagcacacgtctcctaagggtgcagttgaatgagtacaaacgtgtttgcgacacctaagaacgcgaagtcatccaaggatgcagctgcgatagcgcaaatacatttttacatagtaccacaacgagaacacatcatatttcaaatacaagatgcttaataagcacaaggaaatcattcaaatgcataatatcggctcttcttttgggataaggccaacttcatggaaattgaacaacatcggtctcaactcctcgtggtcaaaaagaacccatagactccctctccaaaacacgacccaaccgtcagagcaagga

SEQ ID NO: 125248 - DNA, 364 bp, Zea Mays
cgcgcgccgccgtgtgagtgctcggcttgcctggcgtgggaagaagaccatcccgcgaccgttcgatctaccgccaacgcgtgtgatcgtatcgcgcagtgttgagctttggaccgtctgatcgggatcgtggggactgggtcgcgcgtggactgaagctaacttggggaatcgcgggccgtcgatctaggaccctgcggcccgggttgaataccatttcacctaagatccgatctaatccgaaccctccatctcagatctcacggtccagatttggacatgccctttcgccgcagcgtctttgtaaaagagcccctgtccttttcacaaatcaacccgccgtccgtgggcgatgatcattgag

SEQ ID NO: 125249 - DNA, 298 bp, Zea Mays
tgcaaagtttgttggccacaaaataattccatctgtgatgaagaaattactaacaaaaactagaggtttgaagatgacaatgataaagcatgcaccatttgaggcagaggtgacagcatatgacagagaaaacaagaaatggaggtacccagttaacttagaaaagaggacatgtagttgtaggcaatgggatattactgggctgccatgtatccatgcactcttcttcattacctctcttcgtggtccagcaactgaaattgaccaatatgtagatgcttactactctgtggccaag

SEQ ID NO: 125250 - DNA, 603 bp, Zea Mays
tggttaagcaagtattgtgttgttgttgtgctgtcagtgctcttttgtggagtttttggtatttcttcgatgaactgtgccgcatagaatgttattcgcttcttgtcggctttattgctccattagttctgtagactttctcctttttgtggggtgtaaagaatgtgagattacatgattatcttttcatgatggcaagaacaaggtttaggaagattaggagttttgtttcaatagaactacttgtcttgtggtgctttgaggtgaggtgtttgatcttcttatacattcatctggtgtggatgtttcaccattgaattaaaatgaattgttgaagctggtaagggttgtgcttagtgcatattaccccttcataaaagagtgttgttttaagacattgatgttgatgtatagctgcatccaaattcgatggtgtgaaatcgtagtgttgattgcatctatgacttgctttgagcttcattgcatgttgtttcatgctggatatcaggttgtgtagtttccttagacaattagtccgaggtagaagttcttgtgttaattaagaccaataatggacctgttggggacttgttctcaaatgct

SEQ ID NO: 125251 - DNA, 641 bp, Zea Mays
ttcaccgcctacgtcaagccctcggtggtcgatccgggaggaagcacagcgcacatgaatgctctccgcgacctcatctgggaggaatcaagctccggcccaccctgattcctcgccggtgtggaagcttcactgcatcgccgccgtgagccgtgggcagcctccctggcagcattcctgcgcccggtacgccctcccaccttgtatgcgttagatcaggaacacgtagatctctctggtttcgggtgtagggcgtcggcgtgccgggatggtgttcaccggcgggagctccgctgtgtagacctgtgcgtcgccatggctgggtgcgggataaggttggggcgatcctgtccgttggatccatggtgggcgcactcgattagatctgagtgatctcatagcatcgggcatcgcgggccgttcatttgttgatgagcgccttagattaaatgaggggttagaactgatttgagccatccgatcggatcgaacgggatcagatcaccatcgtgcggttataattgtgtaccggttcacagtatgttatgggccatcgatcgttcatcgtgcggttctagtgtctcggtagggttagatctaatcaagaccgtaggatatcgatctaccggccagtattcaac

SEQ ID NO: 125252 - DNA, 705 bp, Zea Mays
gctgaatcaagaatcttcactggtttttcacggtactgaaggtctttctgaatctgtactgtctcttcttcgatgtgactttctggtgcttgcaagcatttgcggagctgggatacgtgaaacacattgtggatgtcagacatggattccggtaattccagacggtatgctgcgggtcctaccctgcgaatgatgggatagggacctacgaaacgcggggctagcttcccttttacttggaacctcctgacaccacgcattggagaaaccttgaggtagacgaagtctcctttctcaaatcggagttccctccgcctgttgtctgcataactcttctgccgactctgagcttctagtaaccttctgcagatcagtgcaactttctcttccgcctctttgacaaaggcaggtccttctagtgctttttcccctacattggaccacatgagagtggtctggcatttccgtccatacagtgcctcgaatggcgacatcttgatgctggcctgatagctattgttgtatgagaattctgcgtagggtagactggattcccaacttctatcaaaagctaacacgcatgctcttaacaaatcttcaaggactttgttgactctttctgtctgcccatcggtctgagggtgataagcggtactgaaatctagcttggtgcccatagctttctgaaggcttgtctagaacttg

SEQ ID NO: 125253 - DNA, 368 bp, Zea Mays
gtgcactggaagaaaatgtgccactttcgtcaatcggtccacaatgacccaaattgaatcatgatgtcgagaggtgttgggcagacccacaatgacatccatgctgatgtcatcccatttccatgaaggtattgatagggattgcaaggcaccagctgattttaagtggcttgcctttatcctctgacatgtgtcacattccgacacatactgagctatttccctcttcattctggtccaccaataaaggggcttcagatcatggtacatcttggtgcttcctggatgaatggagaatttggagagatgagcctcatccaatattttcttcttgagatccttatttttaggaaccaccaatctggctt

SEQ ID NO: 125254 - DNA, 373 bp, Zea Mays
tacggggataacgaagtggcatcttactatacttctataatcatttttataatcatttattcattttctttgacctctggattgtgcatcctaataacgaaaaactcatgggctaattcatatttttccaagactcagattactctggcgcagtactgcgggttgattccgcaagaacagagggtttcttatgtaaaaactccagaccgaaggggtatcacaagctctcgaccgtccgatcatcatttgaccgctaggatagtgcagaaggtgtttgtgataggcctccaccgttagggatgttcctaaaacatccgacttgtatcacaaatctaatattttagcatagatatacatagaatttaaagctaat

SEQ ID NO: 125255 - DNA, 526 bp, Zea Mays
cggttacaaatattatcttactattcttgatgactgctcacattttctttggacgtttcctctttgccttaaatctgaaacattcactaccttggctaactttttctcttatgtgaagacacaattcggctgcaccatccgaagcattcaatgtgacaatggtcgtgagttcaacaactcttccactcgcaccttctttctcactcatggtgttttgctccggatgtcatgcccctacacgtcctcccaaaacagtgaagccgagcgtatgattcgttccattaacaacataatccattcccttttattccaggcctccctcgcccgatcctattggatcgaaggtcttcacactgctacatacctccttaatcagctacccaccaaaacccttatggcaccccctatgtcgccctcttcggctctcaccctacctatgaccacctccgcgttttcggttgtgcgtgttaccccaacatgtccgccaccactcctcacaagcttgcctcccgctctagcctttgcg

SEQ ID NO: 125256 - DNA, 493 bp, Zea Mays
ggctacttcatcaccagcggcaagagatttaccttttggtggaaaagttattgttctgggaggggacttcagacagacattacctgtaattgaaggcggtagccgttcagaaatcgttaatgcagcaataataaattctgccctttggtctcatgtacacatcctacatcttactcgaaatatgaggcttttaggaccaaccttgacacaagaagaacaagaaaacctatcccgattcagtaaatggatgcttgatgtcggtgagggcaaaataaatgctacatcacaagcaggtgaggatgaaccaacatggatacaaatacccgatgaactactcttgctgccacaaggtgacaaaatcgcttgcatagttgataaaatttatgatgatctaaataaaaattatatgcagcttgagtatttgaaagatcgtgccatattgactcctactaatgacatagttgattccataaatgaacacattgtatctctt

SEQ ID NO: 125257 - DNA, 412 bp, Zea Mays
ccgatagcttttgaaatcttgctaagggtaaaacttcctgagatgctctatattccatgaattccctatttccgtgccatccatttgagtaagcctatatgatcctggacgagtgaactctgctactacaaatggcccttcccatagtggtgataattttgccgtccttcccccgttagaattcgacgaaggaccaagtctcccactataaaggattgttgtcgtataaccttgtcatgatagcgcctcagggtttgctggtatctagctgactgaattactgtattcaatcgctcttcctccaatacgtcaatgtcctctaatctggtagcctctgcttcagctatgctttcaaagaccaaccttggtgccccaaacctgagatcagcaggtagcgctgcctccgaaccat

SEQ ID NO: 125258 - DNA, 330 bp, Zea Mays
cacctctaggatgaaccgtgagaatgttgcggccgaccggtgatggtcctggaatcagagccaaggacgatgatgccctatggtgctccccatccggtgctctcaggtggtcgatgcctcgccggtgacaggttaggagacggaggagacccacaagaccgatggggaggaagaaggtgatgcttggaggagaggagcgaggccggcgacgggagacgacttatagtgtttggggtagggcagaactgacgaaagagatatggatggggggtgtgaccaagtggaaatgtggattcactcgatccaattcggttggaaaaaaagattgag

SEQ ID NO: 125259 - DNA, 560 bp, Zea Mays
ctctcatcattcaatctatatgtacacctaagacctttgctattttcaactttaaagtcgcattgggtcagacgagtcatcaacatgattccaatcaaagttcagaagttttagatccaagggaacgtaagagaatacgagaaagaactcgatttgcaactcaaacaaaagaacaaagggcattgcgtaatagggaatcatgtaataagatggcaaggaaaaactataaagaagacaacgagaaattaaactccaggacttaatcggcattgaggacccaaagtttaccccggagcttgtgtggagttcaacagatgctgaagcgcctcatgggtctctatgtagctccgagggcatggctatccctgagttaagtccaacacctttcgttcctaatccatcacagactgaggatgtcgagaaagacagtatgacagagtctcctagacgacaaagacataaacgtcatgtgtcatccgggccaaagacagaccctggtgtctcgtcaaaatcagaaatttcatttagccattggaacaaacttcgctactgcaactagg

SEQ ID NO: 125260 - DNA, 609 bp, Zea Mays
ataatgctcatttttgaagaatagaataataatagaagcaaaataaaatatactttgcatcatgcaaggttttctgtattgttgcattcatatttgaatctataatccagatttggaactgaagtaaggatttaaaacagaaatatgaaaaataagaaagaagactaaaaaatgaatgaagcctcacatgtacgtgattccatggctgcttgcccagtagcgccaaaatgtggacgtagcccaccctctttccttcgatttaattattcatatagccgcagatgacatcaccattacttcacacatgcatggtcccttgtgacacttacgcatgggacccaagaaccgaagagcgccccagcccactggcctcctctggcaggaccttcttctccacgtcgccaggcggctccgtgactgctccgtccctatccctccgctgatctgcgtgcaccctgcactcgcagtcgcagggtcagcctcctcagttctcaccctctccgtctcccgtgagccagcctgaagtcatagctccgcacccaaatcctcggcctcggtgaacacctgcgcggtgggctatggaatgcggcatcgatcctgggagccacc

SEQ ID NO: 125261 - DNA, 557 bp, Zea Mays
attttaaggttaacatcttcatcagtatcatcgtctccttgtagtattgatcctacatactgaaagatatcttttctaggcaccacttgatcttacaaactaacaactccttcatcatgtgtaatagtgtcgaagtcacatctcatatattcggttttagttctacttgctgacttattgtaaaacctttggactatagtctcccaccactactctaattttctatttagtcctactcgaatttcacagactagcacaaaacatacaccaagagttatcctgttgtatgtcccttgtgaccttatcaatcatcaagacaaaaggttatggctcaaagttgtaagttaatgcagttctattcaaaccggaaaggcatatgtctccctcacttgttcgaacactagtcacaactcacaacatcattgtacatgtccttaaggagtataatgtacttcattggaactttatatttgtccaaatatcaccatatagcatttcttggtattttgtcataagccttctctaattcaatgaaaatcatgtgtagacccttcttc

SEQ ID NO: 125262 - DNA, 803 bp, Zea Mays
gctgaacctgatcatcagagcactgctcggaatgtgacgacacggacagagagctgtcactgcccccggggctcttgtccgatgacttgcgcctccagagccaacccgcgcgatccataaccatgaaccgctcagaagatcaaaaccggtccttctgctttctccctccttgctgagagatcaacactcggcattggaatggggagacagctgtgcaccataggcagagatgctgattactagggtgaactcaaaaatcttgcagcataaattataactcgaggaaaacgacaactaattgctaaagatacagttttgactaatgtaacagaacccgtgaaaggtggagactactggaactagtagtactcgttgcatgatggtcgaaacgcaagtagcagctgatccttctctgtcaggctaatttgacagctaaaaggctaaaactaacgcgttcaacgaggtcacccaaacaaataccagcacgcgtgctctacacatctgctgcggaagaaaaggacatctcgcatagggtggttcagcttggctaagaaaaaacggaggggaaaaaattggtccccgtcaccgtcagcatgtgcggttcctttctttagcacagcttggcagcacttggacacccgcgagcggctctgctcgccgtcaacacggaagccgaccacggtagagtagaatctcaggaaaacccgaccaaacaaaatgcagtgggcaggactcccgaggtccaaacaatctatggcatctttagcgctgctgcgcaccaaagaagtagaaatgatttgcag

SEQ ID NO: 125263 - DNA, 642 bp, Zea Mays
gtccccaaattccttgagaaggtcatcaaggctggctagggacatttcctcggtgtcggacgagttcccctatcctggtaggaggtagggctggaggggcttcttccttctgctcagtctgacatccttggcttttggtcttcttgcggatttttcttgcgggggcgagcttcttcagcttcttgtcgtaatccatcttcagagtgcggtaggcctcacgggtgttggtttcctcgccttctgctatctcgaggctctcttgaagggacgccttttcccttgtaagttccctgacttgatgctccaggctttccacccgggagtttaggtgagtacagtgggaggcaaggtcatcatattggttatcgagggtgtggaggtatccaaccatgtagacgatggtggggtcatcctcggtagggtctctccctaacagggtctgaagtcttttcctctaggcgagggtattcttgttgctgggtggaaagtagcgaaggggggtttcaaagattactctgctgtagttctggcatagttgttggagggcttttcgggcaacattttggcaagtatctgggaagcggtatccggtgaaagtgacttggaaagaagggtggttcgggtagtttcggctttctccca

SEQ ID NO: 125264 - DNA, 460 bp, Zea Mays
atccattatacaataacaaacatggttaggagtcagggtgtgatggctggctggctgcatatgtgctttcttttccttcttgtaaatgttgttaaccggccactgccaattcttacagtctggtttgtcactttgtcttctctgtttttgaagttcttgttttagtaggctctatggttggacgtgtctcagaattttcatgtaattttctccttttaaccatttcttttttcctccatggtcctcaacgccagcagaatcatccctgccaaatcatatcattctttttctccagtgaatgaattaacacctctatgggttctctctccaacactagtgataagcaatcttcagcaggtatagcaatgcgtttctgcacaactgcagagttcgaagggccattttcaattgggtgcttggcattctcatcaaacatatgattttgcacagcattgactcc

SEQ ID NO: 125265 - DNA, 720 bp, Zea Mays
gtacacagaagacatggtggcacagctactcacaggccatgcatggcttttagctagctaggaagtagtgccacacaggtagccaggcgatcgagcagtgggtgagagagaccagtacacagtgaaactagcgtgcagttccattccagctcgagcccaaacactccaaacatcatctttagtttaaaaagagtccatagttaaaagctaaaggtgaaattattcctcaagacaccttcatcaaaagagagatgctgcagatgtggaactctggccatgcatctttgaggaaagcaatgctgcgttggtctctgtgcgcggaaatgaacactagaacgagtggtcatggagcggcaggcaggcgcctacactggcgaagagaaggcaccggccgaccggcgcgccttttccctttggatgcaaggaagaagtaagcttcacagcgaatctgggcatcttcgtccgaaatttctgtaaaagccttgcattggtatcttctgtttcctgcttttatcttgtcctctcttccctacaattcaactttgcacctcccaaattcgaacaaaagttgaagctgaaagtaagctctgtagctgaattcatcgcaatgcaactgatgatgcgcagagtgtttctcaggaagccgagagtttgcgttggctgggtccatatatatgcagtcttgttttgatcctgacgtttgcttgatgtgttctcttc

SEQ ID NO: 125266 - DNA, 620 bp, Zea Mays
ctgaggtagccatgcaagatgcagcatgacgggcactttcttagtattgctcattgttcagcggtgtagctgatggccttgacctgaagtactatcctcgtcattcgactggcagtgctggagttgtgattgtctcgccagtgggtgagggcaatcctaggctgaacatcatggtcaatctggtcgctgtgctcaacacagagctggacaacgcccttgacgagttaggcaaggttcaggtgaaggttgaggaattgcatgctaagtgcgctgcacgccactatcttgatggtggttctcttgcccctgtcaggattcagcacccttaccgttcaccgccccatggtcgcttcgactatggtaccccagactgcaggacccggatagatttggatccctagatcgacagagtcgaagtctgtaataatgcttagttcagtgtcttagcctaagtcagttttagttagagttagtttgcttatcttatgttggatgcttgttatgatggacatgtatcgaagttggatatttgtaatgattgtcaccaaggtgtgggtatcccctacaacttggtgtagttattaataaagtcagttatttagttgggtaatccatttatt

SEQ ID NO: 125267 - DNA, 575 bp, Zea Mays
aagtcctgaaaaaattcagaagggaaaccatcggggccaggagcactattgtgtttcagagaaaacaccacatctttgatctcctccatagaaaaaggacttgtaaggagttctctttcatcatcatcaagccgcttcatgtacaaataatccaacgaaatacttgaatcctgagaagggccaaagaggtttttataaaaggaggtcgcaagctggttaattccattttcaccttgagccataatatcaccatgtgaaagagttaagattttgagtttcctttttttatgcttggctagcaaatgaaagtattttgaattctcatcaccatccaacatgaacttatcccgggccttctgcttgaggctaatattttcctcatcaactctttttctgaggttcgattccaagtcaagtttctccaatctatctgcctctgataaacctgagatttcactggcttttcaaggatgtcaatttttgaaataaggtttttttcaacttcttttagtggcctacaacattaatattccaccatttgagcatttgtcttagtcgtttcattttcagcttcc

SEQ ID NO: 125268 - DNA, 390 bp, Zea Mays
cgttgggggcgtaaccctcttagcgacgcgccatatcggaacccgagtatggtgttaaatgagcaagggtcgggccgtcaccccttaagtgacacgctgtctcttgatctggagccggtgataagtgagcaaggatcgggtcatcgcatccttagtggcgcgctacatcggcgctcgggtgtagtggaaaatgagcaagggtctttgcatcttcctcggcgggtgtgaagggtaaggaagctagtcgagccaactagggttcgtgtaggtagttggaacgtaggttccttaacaggtaagttacgagaaatagtcgacgttgcggtgaggagacgggtaaatattttatgcgttcaagagaccaagtggaaaggacagaaggcgaaggaa

SEQ ID NO: 125269 - DNA, 354 bp, Zea Mays
gagaaatgataagttaagacacttgcacttaaaagcatagatgttaccatcctttggcattcctccatattgtaggctttgacttttcggcataggataattttttatttcctacaacatcaacaacttccctcgagatgatatgagtttaaggtataacaatttaaaataaccttgggtcaatcttggatatcggtagcttgagtcaacaaaaattgaattgactctcttaagcaccccaaagacttcatatcatctcctccttcctgcagagcttgttaagcatattttggtacccatcgtttgatgagtccatcacggttagtcaacaaagatctaggaacccaaaagttc

SEQ ID NO: 125270 - DNA, 324 bp, Zea Mays
aggaattgaaacaaaagagcagagggtatgagtggacctggagtaggatgaccacgacgagattgtaaggtgcggaattttggaccgaattggggagaaccggaattggagcttgctgttgagtaattaggggcacggcttggtggatcagtgcttgattaccctacggacctgtcggtgtgctcaatttatagtgtgcttgagcagtggtgttcaatttggacgaattgcgctggtggtcgagagggggactgagtcactggcgcggtgattcgttgccttcaccgtggcagactcaccggcgacgatctaggactataaagc

SEQ ID NO: 125271 - DNA, 1087 bp, Zea Mays
aaaagtaagatagcgaatgatgatgagacctgctctggtagccagtcacaatctcattgtaaatattcaagtattaataacaataatgaggcagtcggtcctcatgatcagcccaatttttttcagtcctactcctcatgtgtgtataatgtcgatttgcaaggcgatgggaaactaggatacgggttcaccttagtggacaaactagaagaagtcaatattggccctggggataagctacaacccacattcatcagtaagaggttatacctagtgttacaagagctaatgataagcctgctacaggaatattcggattgttttgcttgggattacatagagatgtcagggcttgataggagcattgttgaacatcggctcccattgaagaaggggtttcgaccttttcagcaatgagcaccgttgttgaaatatgaagtactacaagaggtcaagaaagaggtagggaagatgttggaggcagggttcatcaggccatgccgatactctgaatggatctccagtgtagtgcccgttcaaaagaaagatgggcactagcgggtatgtgtagattttagagacctcaacagggccacatcgaaggatgaataccccatgccggtcgtagaagtgttaatcaatgcagctactggccacaagaacttaagcttcatggacggaaatgctaggtacaaccaaattttcatggccctaaaagatgtacacaagaccacattcagggtgcctggctcggtaggattgttcgagtatttggtcatgactttcgggttaaaaatgctagagctacgtaccaacgcgcaatgaactacatcttccatgacttgatcgggaatataatggagatttacatcgatgatgtcgtgatcaaatctacatccactgaggggcatagagaacacttgcgtcaagtcctagaatgaaccaggaggttcgggataaagatgaacccgaagaagtgtaccttcgaggtgatgacagaccaattccttggattcttagtgcatgagcgagggatagagatcagccttaaaagttaggaggctgtcaaaacaatgacaccgccaac

SEQ ID NO: 125272 - DNA, 304 bp, Zea Mays
ctcaatgacccgtacccattcgtcagctttgaggggatccttagctttgacgaaaagtggaggacaggttttcgagaaatctaggtacgaagttttgtggggtccctgcgaataagccctcccgccttgttgctgaagttgatgtcccgccatttcacgtaggaagcgggtgttgtcagcggtcacggtgaccaaggcaacgatagcctcggccaacgtgggcggtaccgacggtggattgggtttatcttcttgaccatgggacgttcccatgccatcatgtgcacaagttcgagatggcatc

SEQ ID NO: 125273 - DNA, 568 bp, Zea Mays
gttgccattgcgagctcttggtctcacagaatacagatactaggctagccgggccaaaagatgctcctgatcttgctagactcatacaagtaatgtctgcttcttgttgctattattctaggttttttcaccattcctcctattctttaaatttataaatttatagtttgtaaaatgtgcaaaggtcctttaaactatgtaattacatcttgtgatgagatggtgaatctgaagctatgcctttaaccttgaacgaatgggcgcacaagagggtaatcgtatattgaggtttaaatgcaagtatataataataatgcatttcccaaatcattaattctgcaagtgatgagttttttctttctattcccaattttctctgtgatgtgcagtttggacatttgaatgcacatcagtaactgtggttgcattaatggtccaatggagagcaatgatgtgaataacaagctgtcatttttgccctcttgttcaaagcttgaaatggaattgtgcacttattcgagcattaatcttgtaatacagaaactatgcactcatttgagcattctgg

SEQ ID NO: 125274 - DNA, 658 bp, Zea Mays
taatgaaacgcgtattacacttatgccgtaactccggtgatggttggcgccggcgttacacttttcctgtcgtaagtctccatccactgcactggtctctggctgtgcatttttcatctcttttagagttctagtcatttgggagaactcccgcgcatgtctaaaaaaactaaaaagtcagttcatatcattcttatgtcgaacttgtacagaatttaagaatgagttgcgttaccagaatcttagaccatggatttttaatgctgtatctatctgcctttacttttttcggaggactaaatagtgactaactgttaactgtaatgcattatcgccacttgagctgcctgagttcagaagttgggacctagttgacgctgtttgggcttctttatttcctctgctcttaagcatactgaagtgtgttgtcatgtgtaattactacctacctttgttctactaaaaaatgtgttgtcctctgtgctagcttaaagcaggaatgatctttagatctttggtgtccaaataagcagttcagatatttttattaatagcttgcttaacacaattttgattatactaaaaaattcctataatagtttgaccggttacaaactgtgaacctgctggggttcagttttaagcaatttgatagtcc

SEQ ID NO: 125275 - DNA, 583 bp, Zea Mays
cttgcacccactggctacacagtagcttcgcccctgcgtgaacatcaccaatagcaacacgttctcgaaaagtggagatcaatttcaacatgcttcgtacgatatgttgaactggattggtggataaatagacggcgctgatgttgtcacaatagacaagaatactcctgtgaagggggcatcgaagttccaacaagagatggcgtaaccaactagcctcgacaactccattaccaagtgcaaatgcaccccgacgacatcgccaagacaaccttccgcactcatcgagggcactatgagttcctggtgatgctgttcgggttgatgaacacaccttctaccttccaggctctcatgaatgaggtgttgaagtcgtacatccgcaagttcatgctggtcttctttgacgcatcctcatctacaatcgttcatgggccgaccatctccaacacgttaagaaggtgttccagttactgtggacacacaagttggcgctcaagtgttctaactgtctcttcggcactcacacggtcgcctaccttggtcacgtcatctcgtcgaacggcgtggccatggaccccgc

SEQ ID NO: 125276 - DNA, 450 bp, Zea Mays
gcagtatgctatcgaccaggtgaatactgatttgaagaaaaagaactgcttcatgaggggtctaaatgaccggttgcagcgaaagatggccacatgtatagatctcacgtatggaaaggatgtcagtacagccttatctgttgaagcaaaatacgcaagttctgggaaaaacaagggattcggtggcgaaaggcctaatcagggccaggcgaagaggcaacggtttgtcatccggccttctagccaaaatcgcactttttctcgtccacctgcattccctttcaaacaaccaatcattattcgccccagcaatacccccacttcctcaaatcagccgggtgccccaggcactcgattccctgctttgcccagctcttcaactgggtgtttcaattgcggcaagtcgggacattttatcaaagactgcccatatcccaagcaaactcaatc

SEQ ID NO: 125277 - DNA, 740 bp, Zea Mays
tagcaacaaaaatacccccacctggaggaaaagacttcaggccctgtcagggagagatcctattgaggatgaccccaccatcgtctacatggccgggtacctccacactcttgataaccactacgatgaccttttctcccactgcacccacctaaactcccgggtggaaagcttagagcagcaggtcaaggaacttaagaaggagaaggcatccctccaagagtgtctcgatatagtggaaggcgaggaggccaacactcgtgaagcctaccgaaccctgaagatggattatgataagaagctaaagaagctcgccccccacgaagaaaatccaaaagaaaaccaagagccaaggatgccaggctgagcggaagaagaaagcccctccagcaccacctcccgccaggatagagaatttgtccgacgtcgaggatatgtccctagctagccttgatgaccgtctcaaggaatttagggacactttagaaaaagagttcggaagtacctcagggaacactcgcgtgtagtacgacttgtagtagctgtatgcttgtaatgaattggtgtaatgaataaaataacttggttgaaaaaaattggcatatgcataatagtgactctctccccctggcagatggcttcggataaaaccacgcctaccgcctccgggattggagcagggtttcccctaagagctgaaagagaagccgatagaaaagagagtgagacccacctccccg

SEQ ID NO: 125278 - DNA, 681 bp, Zea Mays
actacctagcggagctgatggcaaactcaatttataggattaatgaacggtggcggataatttggagaagacgcgcggcgaccggagaggggaaagagcactggcgcaaaggattcgtggcgttcactgtggcaagtttatcggagacgacccagctatctaaagcggcttagtgcgacgtggtaaatgggctgaggcatggcgcaaccgcggtgaagggcgcaaactccggtgacggccgcttggccacgtcgccggcgcaagtgggcacgacataggacggaacagtgcttcaagctcatccgcggtgaagatcttttcaccccgaggcattatctaggcaccagtgggcacaaatcgcatcgccggggttaatcgcggcgtaaggtcaccggcagcgatattctctgcacctgaagatcttttcctactctaccatgagaaatctaattcagagcctctgttcgaccaacttgcaggacccatatctcagatttctgtgtgagaacttgttaatctctctgtaacaaagttgtagccctataatccagctacaatcttgtcacagcaaccatagccaaatacttactagatcatctccaaaagaactctcaaagttaattccgagtcactgtcagaaaaaattcagaatctgagttgactgatagccagactttagcg

SEQ ID NO: 125279 - DNA, 478 bp, Zea Mays
cgttttcataatttttatcggaaaaaacggtaactttggaaacaggaacgatatagatccggcaagctgacagagcagggaggcagggaccggcgattgacgagctggaggagcagggaggcgaggaccgacgagctgacagagcaggcagtggtagcgccgagcgcgagtaggtcagcagggaggcagcgtcgcgcgaccgttggggagaagggaacttgagcaacaacgcagggaggaggagagggaggcacgagcttaggcaagatgcttactggatgacggtgaagcctagggatgccggaggcgacgagcggacggaggcaccacgagtccgtgacgactagctcaacgctcaacgaggctgtgggcgtgacaaaggaaggatgtctgttttaggttaggggaactaggttgggttgggctcgaagtctggaaaagcgtcaaaacacgacctttttatggtccagagcgtttt

SEQ ID NO: 125280 - DNA, 441 bp, Zea Mays
aagtctgaatttcagactgacagtgcaattgcagtgactttgggcatgaattcaagcttgattcaataggaatttggctattgcttctatggcaaaattgtagatggtttgtagccctccaacttttctgcagagctttgggtgagttgccatgaaaaatttggagaaaacctgccctaagtcttgactgtcaggtgcactgaatagaacttctgatggtacagtgtctgcactggatcagaccaccagcgcggctgtcctcaccgccgacgacctgtccgcgccgcgatttgcaccggggtcgtgatgatcggacggtgagcatctctgggcaaagatctttttgctccgggtaagatcgtcgtggtggaaggcactaactccggctgccacgcggccatccctcctcccggccgtgtccggtcatcggcgccgctcccc

SEQ ID NO: 125281 - DNA, 661 bp, Zea Mays
ccgccgtacccacttgcctctcggcgggtccagatagcctcgccggagttggcatcctgccgcgcgatggccacgtgccttgaagcttaccacgtcgcagtaagccgctttagatagctagttcatcgccggtaagcttgccagggtgaaagccacgcatcccttgcgctagtgatcttctttctctccggccgccagcgcgccatcccaaaattaggagccaccactctgggatactataaattgagcacaccgctagctcctttaggtaatcacgaagctagagcacccgctcctgcctccgattagccaccatagcactctaattcctcttttcccccaaatcggttttccgcacccgtgaacacctcgctgtggctagacatctacaggtagctcatgctcttctatgggatgttctagcctccctcatgttccctgttgctcacagaatcacctgattgaactagactgccttgaatcacccagaacccgttgagttatcttcggtttccatcgccaccgtggacagagcgattgtgagctagaaccttgcaattgagtgagaggttatggtcgttataggtggaattaggtgtcagtcacaccggagcgccggtcattgcgttatccggccggtacaggctcaccggagccgctg

SEQ ID NO: 125282 - DNA, 449 bp, Zea Mays
aacttcttcagtgcctctaaggcttcttgttcctctgtggtccactgaaacttgttcaccttcttgagtagtttgtaaaatggcatccctttctctcctagccttgatatgaacctgctcagggctgccatgcatccagtaagcctttgcacctttttctacgaccgtggcgcttccattctcatgatggcctcgatcttttttggatttgcttcaattccttggtggctgataatgaatccgagtagcttcccagctggtactccgaagacacacttttctgggttcagcttccaccggtagtgccttacgccgttgaggaccaactgcaaattttcaatgaagttttatgagttttctatcttgataaccacatcatcaatgtaggcttccacccgcttgccccagtgatcggctaaacatgtttggatggctctctggtaagtcgc

SEQ ID NO: 125283 - DNA, 674 bp, Zea Mays
ggacgacacaagttgtcacccttatgggaagggccattcataatagcagaagccactcggccaggatcatatcgtctaactcagatggacgacacagaaattgggaactcctggaatatagaacacctcaggaagttttacccctagctgaatttcaaaggctatcgggatgacaatatactctgtaaaacgggagatatgtcatcaataaagaaggtctcaaagatactcaatttactcatgcttgactagcactcttacttaactcggggtgaccactatgccctgccagcggagcaatcggcttaagtcggcaaagacttaagacggtgcaacatgctcacacttacttaactcggggtgaccactatgccctgctaacagagcaatcagcttaagtcggcaaagacttaagacggtgcaacatgctcacgcttacttaactcggggtgaccactatgccctgctgacggagcaatcggcttaagtcggcaatagcttaagtcggtgcgacatgctcacgctcacttaactcggggtgaccactatgccctgctaacggagcaatcggcttaagtcggcaacgacttgagacggtgcgacatgctcacgcttgcttaatccggggtgaccactatgccctgctaacggagcaatcggcttaagtcggcaac

SEQ ID NO: 125284 - DNA, 656 bp, Zea Mays
cccgcatccgagccagaggctcattcttttcccaccagcacactctctctagcgattcccagagcccgccggcgacctctcctctccggcgaccaccgacggccaccgtctccgtctgtgctccggcttcctcgggcacctctccttccctcctcggtgagcagccctgttctcctccctctcggttctgtgagcagaggctcccttttccaccccttgtgcatcacttcaaatcctatgaaatcttgtgaatcctgttggtggaatgtgttcaattgtccctattgtgtatccctgcaggttcttggctccttcgggagggttttcactcctcatatgaccatttctctgaaactctaatatctcgcccaccacgtgttcggtaaaatgcccaaaccagccaaaaatgctccaattgaacccaaatttttcaggcaccttcacaacacttccagtgacactcttgccaaatttcacgccaatccgagattccaggcttaaatttcaccaaatttcccgttttgagcgatcgtttccgagccgagtgcccaaatccctttttcttcgcctaaattcaaaccaagcacacacttcactcatattcacctatataaacctattcgtgaagtatcggctcaattccatatcgttttgtg

SEQ ID NO: 125285 - DNA, 923 bp, Zea Mays
agagattggagggggtttatatcatttctattcaattttgactaacaaggtatttaatctcctcaaatccactcctaaggaatcattgatccaaactagccacaattcaggctgctccttcactctgtgttgtttcttcacttcttgaaattgttggatatccttcaaaatttcctgggttttcaaattgacctaccttgctaagttatacacacacatccattgtgtctcaggaatatgtagtgcatctagttcaagatttgcgaggccatgctcatcagatgtgtgtatatgatcgtgcaaaacaaacactgttttacaatataaactgcaatgtttacaaaatagagtttgaaatagaatgtgtaatatggagccgctaaagatagcctcaggaaccagttagatctctttggccaggtgtcgttcttcctatgtaatgattcatgaaatatatattggcattgttagggcccatgaagaaataaaacatgaatgtgtgtgtatttctaagtagattcacgtgtgccagtctatcgtttaatctataccccttaattatatatcatctcaagtacaaatacatgatggttgttagagtcatcgatggaagtctttatgacggattcttttgaagccatgaaatgaccgttttggaatcttgccccatcccaaaatggagtacatgactagttgaccactgtgtggtttctctctctctctctctcctctctttctctcatcacttcacctcactgatgtcatttcatgaccgatcgacatctgtccttcattccatggcgttctttttgtgcgtgtctgaccaggtctgtaatggggtgtttgggttgaggaatcactccatgggatgacctcattcctcacattagtactgtcggggaccataattaggggtaccctca

SEQ ID NO: 125286 - DNA, 495 bp, Zea Mays
taatattgagagttgtggtggcactagagctggtggatgtgtatctgatgaagaggaagaggatgatgaagaaatcccccctttggttcgcaagaatcgatgtagcaaaaccagcaacgacgtcccaattcaggctctgtcagggctggttaatcttcagaatatgatgatgtctaccattgatcatgcactagaggagattatcccagaaggtcttttattggaacttcctgaaactgggggtgcttgcatccatgcagaggtctcggatgacattccctcagctggttatcttatctggcaagaaataacctggacagtttcccatgcttcttcgacctttaagggcgacctgatccataggaacacctcggtttctgatattacatgtaatggttatccagctcctaagggtacgattgaggataattcagcccccaaaggcactgctgagggtgactcagcctttcttgtctgtagcgttgatcgacgaca

SEQ ID NO: 125287 - DNA, 752 bp, Zea Mays
tttgcctagcatccccagaacaccgaggaagaaagccgaccgcgggtactgctgcgctagcaactctgcgggaggaggaaagtgaggcagggacttcgccaccgaatagatcacgacgccgagaccttgggtgagtagccacctcggactcacctccttttctccatcctatggattttgtgcggtccgtggaggagcagtagccctgagcgaagtttaggtgcggaccatgattggtgcgccgccagataacggcggtgtcgtgtactggtccgggctgtgtgcacgtcggtggatcaacgggagagagagagaacactggcgagggcacgacgtctgtgcatgggcggccggaggttgaagaagaatggcagatcattgatctcatctccaacggtcatgattagatggatggttgagagtgtgggaaccgtagatcttagatggacgacctagattgaaccttggcgtaccccttcgagtcattaaaccagggtcgtgaattccggatccgacggctagggttgagcgcacatgaataactagcgtgaagtctaatctggcgcgcagatgttgaatccgacggtccatgatccacgataccccttcgctggccctttttgcgcataagcccctagagatactggatatcaacctgtcgtccggggttgcagtgctctaagtctcaacttcttttacgcccgagtccctgtgttttctagaaattggcgcccaaatccagagactaatga

SEQ ID NO: 125288 - DNA, 1062 bp, Zea Mays
ttagtgtttcagatgtcatagaagatatatcaagtgatccagacgacgtgccacatgatttttagtttatgtatcgtgcatttaagacttatatactatgtggttaaaacttcagtaaacatgtatgatcatttatgtgtggtcatgactatgtattgtgtatttgtgtggttgaaacttgtaagtggatgtgaatgaacaatcgtgttttaagacatgtgttgtgtgttaaaatttaagagtgaatatgtatgagtgtatgactaattatatatggacaagattgtgttttgtgtacttttgtgaatgagacttgtatgtggatgtgaatgaacaactgtgtggttaggatttgtttattgtgagcttttccgattacagttaccgtttcccgatcaatttcgagctattttgctcggatttatccgttttcgatataccggaatttaccggccgttatctgttttcgactttcctgtttaccgattccgaccgaacaaaaaataatgcgggtgaaaacggtgagagattttttccgaccattaccgaccgttttcaccattatttgagcaccaattcttctgataacctccgagtgctgaggcaagatagctgcgggagaggttggggcttgcgccgagagataaacggaaaaaagaacactgccgccacccaaacctgtgactgggccgacgcaaacccgcggccatcgtcctggccaactcggcgagctacgacattggagtggtgcagctgagtgaatcaaggcgagggaggtcagggtgaagtctgccacgggtacccgccgcggagcttctacgtagcttggtcgatgtcgagcataggtggtgagtgaacctaaatcattctggtcgtgttcccctctgcgcttagcattgatggtcgtgttgggtggcacgtgcgtgtgttggtcgtcgctccggtagggcgttgctggcatgtagcaccactgcagggccactgcgctcctgctggccggctaacagaggaagaagatgggcgccagccattgatcatcgggcggatggtcctgattaaaag

SEQ ID NO: 125289 - DNA, 866 bp, Zea Mays
tctcttctctctctgtggctatgcgttggtgacgttgcgggatgtttccaggcagattgccctgcccctaatttgtcaatgacttgattcccatcatctcggccgacctgcaacagctattagttaggctaacaacaaggataataccactacaacaaataatactgacaaaactaatgggaccaaaatttctgaaacatggtagcggtagcgggagaaatagaaactatataatttacaaaaccagaacgaactgtatctgtatatctatctagaaattaggaaggcaccaagtttattcaagtttctacaggtaagaactaatggagtagcagttacattagcatatgatgcaagcacaatgacttggtaaataaataaactaaccaaacaaaaatcgaaacacaagcccgtcggcctagtagaggagtatctaaagcatggcactggtactatactgaaggactactccagtttataacgaagaaatgtgtggatgagagatggtggacggaagcaacaaatcaggacaaggaccctaggtgctccgggctggatcctgctcctgatgctgtggggaggcggaccctccgagcttgcgatggatgaaggccttggcacgctggggctcgatgttggcgtaggagagcctggcggcggcgatgatgagggcggcgccggtagtggcgcgctgcgaacaggtcgccgtgtactcgagccgaaccatgatgccctgcggcgagcaggcgggtgctctgccttccgtaattgggctcggtgaggcccaaaatctgttgggaaacatataaacgattggtgtatatatgcttgctgagattattccctcacactgcaacgacacgatc

SEQ ID NO: 125290 - DNA, 578 bp, Zea Mays
cttgaggaccggaccattcggttctacctaagaaactgtatagacaattggcagaatccgattacacttgtcgatctgcttcccctgcactggattccatgttccaggtaaccatcggcggcggcggcggcggcagagaaattttatatgcgtgcatggtcggccggctttatttatccttgttcttggatcaacaaccttttttctgcaaactgaaaagatcaagtgaccaaataatgcacacccacccccacatgccccaaccccatcacatcttcttgcctttgaaccggaagtagctggatccgtcctgcatacattctgctctggaatggagtgtgtaaaagcaggcagttgcagtgccatacgagcggggggaggacggggtggcaatgtgcactcgttgggggctgaaggatggggcgggaatttacctggaaggacgagtagtagtagtagaagcgaccctcacagtcacagccagtgctccactgcgctttgcaggcatctggaagagaccagcagagcagccagtgaagatgatggcctgtgactggactggacgcacgaaactgaaa

SEQ ID NO: 125291 - DNA, 360 bp, Zea Mays
gctttgctgagttgtgaagcttttcatggtgtcttgggatttggcttagtggtgtggtactctgggtaatcgctcgggctcggaggatagggtcatcaccaatgattcggcttgtttggatagaacgccgagtccctttgttgactgaatttgtaatcaggagcccaaggattagtatccatgttgcttcgtcttgttcgtgtgaggtcaattctgagctgttcccctttgtaccgtcagctcagtaccttgtttttattgtgctctctgctctctcaccactgtactaggcgtgtctttcatgttgacaacatactgggttcacaggaatttttggcacttttatgttttgtccctcgg

SEQ ID NO: 125292 - DNA, 462 bp, Zea Mays
gcgagtactgccgtcagatgaagacgatggcggacactctccgcaccctcggggcccccatgaccgatgagagcctcgtgctcaacctcctccgtggtctgagtcctcgcttcgatcgcgtggcgcccatcctcacccgcatgaagccgtttcccacctttgcggaggccaagaacgacctgcttctcgaggagcttcacctctccgccgctgcaaccaccgctcccgccacggccctctacagcgcaccacgagctgccccctccgactctagggggggtcctgctcaccgcactcaggccccgctgccctctggagctccacgacagtctgctggcttcgggggggctcgcagccacagtcgcggccgcggtcgcaagggcggacgaagtggcggtggcccgtcgggaggccgtggtggctcatcgggtggctctcagtggccatccttctacaacccgt

SEQ ID NO: 125293 - DNA, 443 bp, Zea Mays
ggggaagatcttgggagagtcgtgactgcctctccctcctgaggttggcctcggatgagtcgtgactggccctcccacccaacaatgacctcgggcgagtcgtggctatgtctcgcaatcggtgttggcctcgggcgagttgtgattgtgtctcctgcccgaggttggcctcgaacaagttgtaactacgtctcccgctcgtggatggcctcacgcgagtcgtgatggtgtctctcgcccgggaaggcctcgggcgagtcgtgactgtgtctcccgcccgaggttggccttgggtgagtcgtgactgcgtctctagcctgaggttggccttcggctagtcgtgactgcgtctcccacccagggatggcctcagacgagttgtgactgcgtctcccacatggggatggcctcgggtgagtcatgacggcatctcaccacccaag

SEQ ID NO: 125294 - DNA, 1323 bp, Zea Mays
tcttaaaaaatgcagcatgacatactttacaagtatcgctagaatatagagatgaataatcacaatcacacatgacacatccatctaagtgtcattctcctttccagtattacatacatgcgaactgtgcagatattgatcccttgtgacctaggataagtttcgcaaaatgcttatagttctatagaatttgccaagtggaacctgcatgacaagaatagcaacagcaaatccaagtccaaatcctaatccaatgaacatatatagagttatatcgacatgatcttgcgacattttttgtttcaggtcatttggctgaggtgaactggcacattgtctgcttaagggtgctccacagaggcctatgttaccttcaaatgaactgttctcaaatgttccaaattggcgtgattgtggaatcatccctgccaaattgttgttagacaaatctagggtctcaagaaatgtgagatttgttagttcttgtggtatctccccggaaaggtagttccatgacaggtccagtgattccagctggctcatcctgcctaattggagtggaatatttcctgtgaaggcgttgtgtgacatattcaataaatgtagtataacaaggtttccgaccaaatctggaatagtaccattgagtttattatttgataagtccattgcagttaaggctgtcaaaatcctatcaattgagacgtaattccccttaactgttattgcaacagtatcttggtaatattggttggatgcagaatgacccaggatctgtccagtgttattattcttctccctcatagatttaaacatcttgaaccattgtggtttcacatagccagagaaattgttcaaggcaatatcaattatttgtatccccaagaagtacccctggaaatttccacttgtgaaagggtcatctagtgtgccatagaattgattggaccttaatacaaggacacgaagattggaaaggttgccaagccaagatgggaaaacatctacaatgttattgtatccaacgtcaagaacctccaaatcagtgcattgagaaagagctttaggcagctgtccttgaatgttatttccatttatatctattgtccgcagatcacattggctactataatttttataagtcaactctccttcgaagcgattccccctcaaattcaatatatttaagttgccatcttctatcaggcaagatggaaccttccctctgaagtcgttatttgccaggtcaaggactttaagataagttaaattgcaaagtgtgggtggtatgtagcctgctatgttattgtcggatagcttgag

SEQ ID NO: 125295 - DNA, 364 bp, Zea Mays
cccgagcgaagcaaccaaagtactgacttcctcagcagaggatcgcactctaagacccaaattgctgtcagtcacgggcggatttgacacaaaaaagatgaaagctttgggaggaggtaggttccaagccgagtatgccactggagcaccaacattcgaaaccttacccctgaggatcgtttcaagtcggcttaccaagtcaacagaaggaattctcttattggtaacccgagttgagtcggccagcccttgatacagatatgctggataggccctgtctttcagtggctgaatgttcttgaaaacaaaatcagtgaccacagcttcggcagtcaaacctctctctttcagtaatctgacttcg

SEQ ID NO: 125296 - DNA, 313 bp, Zea Mays
tgacaaagtaaaaactttagatgtccatagtctcattgatgtgccattaactcaaaaacatgcattaaacaactattttgtctatcacatgcgacgggtttaacacggaagagaacacacacacattttagagcggtcagaggcacaattcaacaacggttccaacagaagcttaacccttgcaccacattgaaggattatggagaggctacactagtgcaaaacaaaattttcgaccccataaaaccagaaactactgcggttatagatcatagaattaccactagatgcgcagggcagaggaagacgtctt

SEQ ID NO: 125297 - DNA, 686 bp, Zea Mays
gaagagttcactattcaatctagcaatttcagcctaggcctccgccagtgaaccttccatggtttgaagtacgaagtcttttttctccagggtaccctcatggtctttaatcttcttctccaggccctcaattatatttttgttctttttgtcctcgaggtcttgttgcatcctcaggacttttctcagcagtaagctctgataaaataagcttcatcagaaaacaatcttcatatcaaagcaataaaaagttaagaattttaccttaaagttagcataaaataggctaccggcgatatgctgtcgccggtacctgttgaggtctgcctcaaccttcgggaagccaacactcttcgataaagtgccgacaaccttcgccccagtgtgatcctgaaggcatcctagctttcttcgttgactcccccgaagagtaacgcacctggtctatacccgcaagatatagcatactctttcagttcttctttttcagcctttgacaattcttgcccaagtatatcttggaaattgaagtcctcttcttccgaagtatcctcggctttctcctttccttttccagccactgtgctcgggatctcttcagcggctgcagcaacttcttccacggccgcatccagaagcatggtatcaattgtagagagtgtggcctctagatttacatcttcagt

SEQ ID NO: 125298 - DNA, 1195 bp, Zea Mays
gtttgacttagaataaaatagaaagagtaaaatgcatcaacggtcctcgaacttggcatactgtgtcaattgggtcccctgggtccccgtacactcttgaaactaggaaaacaggtgttataactttgccagcccattcaaaatcaggtttgctcaaaccgtttgccgacgtggagtgccacgttagagtcacttggatccccgaactttcattagtgcgctccaacgtggctcgctatgtcagcatccggtttgaacaaacccggttttgaatggtgcagacaagttatagcacctgtttttctggttctgagagttcggagacccaattgacacaatatatcaagttcgaggactgctgatgcattttaatcaaacggaaacatcaagcttttggggatagaagtagtaccgaagattgattgtggtgttatgcatgatcatggacatggagcatgtaaagtgaacctgttgtctggaactggattcagtttctctgtaaagtgataggagctgggactcagtatgtaggtggacagttacttgtatagtttccctcttttaaactgactatatatatttttggctgtaaacatgaattcctgtctgtttgtgataacatgcagctttttaaagacttggtttttttttgctctgcacaaaatagacttgtgttttcccctagttcttcccatgggcaaatgaaacctgtaagttcagttttattgatccataaaagtgaaatacctagctgtacttgaacaatcagtttatattggaagagaccatacttgtaagcaaatgaacctatgaacaacatagaaaggtgacacaaatgccggatcatctgctagcagcccatgcggggcttatttgcatagttattgaagctggatgggcaattgacctgctcaggcaggttcaacagttttcctctccaacaactagtcctcttagtagcaactaccgagtatatttgccttggtgatgtgatcagcgtggttgtatctaagtacctaaaccccaattgtatgctgatcgtttcagttggttcgtgcaaagtcagatggctcagtgataatttgcatctatctgatgacttgaatcatgctgaaccaggctttagttctgctagcagtctgtccagtttcaataactacgtttatttgttgatagcatttccattcatttttcg

SEQ ID NO: 125299 - DNA, 515 bp, Zea Mays
ggggaaatgagtaccaggggcactcgactgatttgtagaagcaggggcagtggtaggacgaatgaaaacaggctgcttgaacggataggagggtggatgaggcgaagaacgattctgattaaaaggtcggattaccaacctagttcgcttttcaggtccctgattagacctgtcacctccaaatccctttgattttccatggcttgtgttcttggcttctacagccaatgtcgtgctaacagctctgttgtaagtaagatccaggcaggtggccattttccgttggagcctgacgttaagtcccctcatgaagcaattctttttcttcaaatcagtatttacttaatcgatggcatattgggatagatgattgaacttgttgagatactgcattacagtatctcccccttgctttagtcgaatgaactcctcttgtttcatgtgaatcactccctctggaacatagtgttcacagaaggccagtttaaattcttcccaagtgatctgaagtccag

SEQ ID NO: 125300 - DNA, 622 bp, Zea Mays
aagtagtaggccccgatgtggtccctggtcttcccagacttgaccaacacgaagaagtggcggaagagagaagtgcagggagccacccctacgaacatctcgcagaggtggacgaagatggtcgcctagaggatggagtggggcgtgaggtgctgaagctgaagtccgaactcctccagcagcagcaggaaaaagggcgagatcggcagcgccaacctgcaagagatgtaggaggtgaacaaaatgaactccccggcggtgaaattgccgagggggacggcgccggcgcagattcttccggcgaggcctggcgcgctccacctaagcaggccgcgcaccagattgagcgcctcctcaggctggaagcggtcgggatggccaagcaaagtcatggcgtctgcggcggcgcgggtgtagagcagaagagcgcgaatgcaaaggggcgcagaggagcacgaaggcaaagaggcgcagttgattggaagagaacgcgaaagggtaactgctgcacgcgggggtgagtcctttttcaaggaaacctgagtccctgttcagggaaacccttccgcgcgcccctcaatcgccgcgggagatcacgcgtgacgggcacctaggatccagg

SEQ ID NO: 125301 - DNA, 293 bp, Zea Mays
gggtgagtggaggtctagttgatagaagtgaaacaccaatcaagctgaacaagaaaaggattcgactatatattgctccaagtgtagcttctacccttcaaagggatttcaatgattccaatgctgctgataattgagttgaagagattcatgtctgacacattcccacctaccttatttccatcctccaccgagcggcagaagttgaaatcaccaattagcatccaattatccaccgagaaatgtaaaagttgctaaaccagctgatgaaggccatccaattagcatccaat

SEQ ID NO: 125302 - DNA, 314 bp, Zea Mays
gttcgttttgggaccctgctgaggttcggacctgcccggaggctctggacttatatgtatagaggtccggtgtccttcggtggggggtccagacttactgggatgtgttgtcttttcttgccacgtgacgccctttggcatgtccatgcggtggggtcaggcggcgtcccccgcgtggctagaagacgtcgcatgggtgcggcgtcttcatgctgtaggagtgggtacccctgatttagggtaccgatagtggcccccgggcccgcctcagaggaggatgcgagcctgcaggtgggaccagagtctgattggca

SEQ ID NO: 125303 - DNA, 688 bp, Zea Mays
cgcgctgctcctcgcctgtgccactgaccggcctgccccactccccagtcacacgtccccgcgcacttgccttccgccctgcacacatgccgccccactggtgggtgggtcccactggtcaatcaccccagccgatgtccatgtgcctacagacgctgagtcgatggccccacacgtcataaccatgaggccgggtcgtcgtcgtcttctccccgttgctgcgcgcggaaccgaaaatcccggggtcgccgccgaccttcgcgcgcgccccatccttactcgtgcgggacctattagtcagcttcatctccccgtccctatttccactctgcttcgtgcgttggttgttgaacacaacggactccattgctcggtcatggcatgccgcgattgtcgcgccgccgcaacgtaattctggttgcgagaagaccgcaggggattccgcctgcaccgggctacaagtgcgactcctctggcctcttgcgcccccataggacttggagagggcgccgtcgctaaccaatttccgagtgagagaaagagtcgggccgccggagttgccccgcgtcctcatcttcactggggccttggaatcggaccgggaaaggatcgatcgaagtcgcctgagcgtctggaaactgtccgtggtctttccgggagcgattgagggccaacgacgtcggaagcg

SEQ ID NO: 125304 - DNA, 749 bp, Zea Mays
ccaccaaccaatctcagcacgataagaagcggcgtcgtggtgggactgacggcgttagagcccggaggagggaggaggggtggagaggagagaggcgagcgacgctggatgactggatgctggagcaggtggcgctggtgtagaagagggaggtgggcgacggtggaggagagggactgcaaattgacattgtaacatttcattccactggaagcatgtgctagttatgttgttggcccttatggaccatgtggcatgtgaggagttatgatgtgtgggtttagtgcaccttgttagtttagtacactacaccaaaaatgtaaacttcctacggtttactattttcctacggctttggatgaaaacggtaggaagttaataacttctgagagggtactgcgagcatgcccattcaaacatagcacctctaggctaacccttttacataaatcggtgatgaaagtgtaagaaaggtgttacgcgtgtgcagcatgcccattcaacatgctaaacgaggccacataagcagattttggatgaggggtgtttcaaacgcacacaaacacatgtatcgtaccaggaagagaagattcaaaccataaaatcttgtgttacataggaacaaaaaaaaaacaccatgtgaagctatatagctactaggatgcacagttcaaagtagaaaggttacaactgagtacacaaaaatataacataaatagagcacagatccgttatcaattatggaaaat

SEQ ID NO: 125305 - DNA, 508 bp, Zea Mays
tgagcatattcggttggtgtttacaaaactgagggagtatcagttcttccttaaaaggactaaatgtgattttggcaaaactgaactctcttatttgggccatattatttcacagaagggtgttgctgcagatccttctaaaactgaggtgatgagcaagtggcttactcctacatctgtcactgaggtgagaagttttttgggactcacggggtattatagaaggtttgtgaagaattatggagtgatagccaaacctttgactaagctgctgcagcacaaatcttttgtgtgggacacgacaactgatatggattttcaagcattgaagcaggctaaggtgaccacacctgttttagctttaccttagttcaaggaaccttttgaagtggaaactgatgcatgtgctactggaattggggcagttttgatgcaacatcataggcctattgcatatctcagtaaagccttaagttccaagaatcagttgctttccatttatgagaaa

SEQ ID NO: 125306 - DNA, 594 bp, Zea Mays
tccgaaggtagttttcactggaatgaagtgggccaccttggtaagacggtctattatcacccagatagagtcgttcccttttgggtccggggtagtccggttacaaaatccattcctatttcttcccacttccattcggccactggaaggggttgcagcagacctgcaggcttctgatgctcggccttagtttgttggcaagtgtcgcaccgggccacatactgtgctatctctttcttcattcctctccaccagtatctggttttgaggtctaggtacgtcttggtggttcttgggtggatggagtaggctgagttgtgagcttcgtcgagtaggacttctcgtgcctctccctttggtacacacagacagttcttgaatcaaaggactccttcctcatctgtcctaaagtttggaagtggttccttgcgagctttttccataagacatgctgtctcagtgtccaggcgttgagccttgcatatgaggtcttctagcattggcttgatttctaggctgccgttgtctccctgacatgcatttagctgagctgattctttcttccaatcttctaaaaagttggtccctttcttc

SEQ ID NO: 125307 - DNA, 718 bp, Zea Mays
cccggtgtcccccagcctacggagctgaagcctgtcttactccggaaaccattctggatcccccatggatccagacttttgacaggtttatccatgagtgaccaagaccaagggcggggggctccttcgtcaaatgcagatggaaacccaaggtcgggacctaatcttatggaagtaccaaaccaaattagggctccgcaacactccccagttgggaaggaccctccaaggtaacgggaatactctgacccaagggctactttctagctacgaccgaaggagcgcctcccccagtgctggaacatctctgtaagttctatctataaagcaggtctgaggggttgagtagtttcccttttgtaactaggtagcgcatacgtgtacgccaacctagcggggtctgtccccataaacccggcctgttggtccacacacatgcatgataagttataaaggaaaactaccctctcagatgcgcctctatgatagtatcgtcctactgctccacggtcttatcctgcagtcttctggatgttgttttatctaacccacccgagtagtcctcgttccatcagacataatgacattcgaattggacagccaggcttgcaggttaggacctccttgcgaaagcaggagggcccgacagcctgggggctggttctaaagaatgggaacccgttccatggagtggtccggagcctgtgtggccgcttag

SEQ ID NO: 125308 - DNA, 657 bp, Zea Mays
gaattgtagaagggacgattttcattaaaactcacatcacgtgaaatacgaatgcgacgagaagatgggttgtaacaccgatagcctttatgctcatgactatagccaaggaaaacacactcaatagattgagcagtcaatttggttcgtttgcggggtgctaacaaaacataacatgtgcatccaaaaacacgaagatgattatatcgtggagaagtcccaaaaagaacttcaccaggtgtttgtcagatagttttgatgacggttgttcattgatgagatagaccgccgtagaaacatcttcaacccaaaaatgcgaaggaacaaaggatgatatcaaaagaatgtgtgcagtctctatgacatgacgatgttcacgttcagcaacaccgttttgagcatgagcaccaggacaaggaagttaagcaagcgtaccctctgaggtaaaaaatgacgaaaattgtcagataaatattcaccaccagagtcagggcgaaaaattttaataggagcaaaaaactgggtgtgaaccatggatgcaaaagacttgtaaatggaaaacaacttagagcagcgtttcatgaagtaaacccaggcataacgagaacgatcatcgataaaaatgacataatatttataatcatcttttgaaacaaa

SEQ ID NO: 125309 - DNA, 294 bp, Zea Mays
cctcaacggagactccgctgcagctaaatccaacgccacaaaatagtctaaatcgtcctcaaaggattcatcatccatccacgaaaaagggctccccaattttccaccctctgaagaccacgacccaaagtctgattcccccgacacattaccactaagagacatcgcatttgcatccatcaaaatatcatcactcatagcatcatcagggtttgcttgcgcagacctaaacgctggaacctgcgtagcaaccaatcttcagtagcatacaaaactaacactatcagtctaccc

SEQ ID NO: 125310 - DNA, 583 bp, Zea Mays
gtaaagaccccgcacactccctcagctcgcacctgcctcacattcgcgctcccccgccctcgcactcacccagccacgacatcgcttcccctcactgttccttcgccattccgccgtcgccgctggacttctgccagcgctttgcccacagtgagctttgcctgagcttggtgcaccaggaacccatggtggtttcccctttccttaattcctcttcccggcccgcgctcaacctcttccctgcgcaggtcagagttcgccgccaccgtgatccttcgatgtccagccaaccggagcctctccgcgtcgtgccaagccaccccgagctccgtcccgaggagagacatccattcccgtgcttgatttttcctattcgcgtctgaccgtagccaatttggcttcgttggagttcggccgtgcctgctcaccgtgcctcgcgcggtgtctggccgactcaaatccgccccatgccccgttgttggcccatagcactcccctacccccactagaactagactgagccctatcgcacttgattgcctctccccgcggttgggatcccttgtcggagttacccccgtcc

SEQ ID NO: 125311 - DNA, 406 bp, Zea Mays
ggccgctcgattgcaatctaacggatgggagtccatctgctatgttaaaatcatgtccattcgatttgatcctgtggctggcgtttggtggtagcgtgggcacatgttagccattggatctggatccaatgatcggcgcgatgtaccggttcgtgtgagagtgatttaatctgggtcatccgcatgggatcggacggtggggatatcccgatacccctttgccacgacatttattctaatgagccccttctctttttcatattcaacccgcagtcctgcgctgtgggcactgagtcacgggaattcttgcgcagaggtccttgtcttaactgttatttgaggagcagtccagggaaatgggaaatcagagaaaatgagttataaaatgaatttcttatataaaaac

SEQ ID NO: 125312 - DNA, 589 bp, Zea Mays
caaactttagcacaagacacaaaacattgtgtctctccactctctgggtagctttgctgatagtccaccctctaggtcggacaacgcgtggaacagagttttaccctttttcaacgattgccaactcccaagagttctaccaactcgagcacatgggccaacctttccaaaaacatttctaaagcatttttctctcccttttcgccatacctaattcctcatgtagtcattgatgatactcttaccaacaatttgccgtcacttaccctgatgtaccggcatattagacatgggcttttcatgctactctacttgtcattcatcattatggcctccactgtttaattatagggtgaaacctcattctacggggaacttaggctatgcccagcgggatgcatatatgctcctgggtgtgcattatgagcaatggatgtaaactgtagctctcccaacggactgcacatgtggtctcgcattttgggagaggtgcctacacaatgcgcaaagctatgacttttctctcctcttagcatcgatgcgtctctcgacgtgcaagctgctggtactgtcaaatttacgatgcgcc

SEQ ID NO: 125313 - DNA, 575 bp, Zea Mays
gttggcgcctatagtggtatggataggctttgggcttcaaatatctgagcctagtgaagtatacaacttgtcccctaattgtgactaggctgcctgcctgtttccctgtcaagagcttccctgcacaaatctgtaaagagctaataaagaaaattgtttgttttaagataagcttagttcgctacatgatgctccttttctgtacaagtaacgtgggacatgttttgatactatgaatcttagtaaatcttcaaaaacttttacatgcatgctcgtttgtatctttaaggttttgtctacttgcaatactgagcattatacaacaggtaaaactggtcatagagttaaatatcattaacacgaatagtaaggtatgcacaaaccaacataatataagcttgctgtcctaatgtatttataatgttttgtctcggtgttaaagaaacttaatgtgatcacataaccagctctgagcctatacgaacctgtaagttcttgctgagcttatgctttcagttgtatgctgttgtgttgtatagctgattcaggcttctgctatcaaagtttgagtgcat

SEQ ID NO: 125314 - DNA, 1141 bp, Zea Mays
ctcgacaacaaatgggaagggcccttcatcgtcaagacaaaaacgtcccccaactcctacaggctcacttcaccatccggcgaagacctagagcactcatggaatgtggataacttacgaaaattcttcgtctagtcccaagcaaggcctttgtgcctttgtaattttcgcagacactatctcagtcgggcccgcactcttttcctcgtagggggtgaggtttttaatgaggcggagccatgtcataaattgtcacaaaaatccccaaaaaaatttcaagacggcattacaaccgcagatgtcaaaaaagaacgcagaaccgatcttcggtattcgatgccaaaacagtcaccgcaacagcaagcctcgacagccatcgcgtgcgacaaatccaggcaaaagtcgtctaagcgtgcagccagataggcacaacaagtgcgtaacaccaccaatacggtgctaagtcttctacaagacacatttttatccaagcaaaagtcgcctaagggtgcagccggataggcacaacaagtgtgtaacaccacccaaatggtgtgaagtcgtctacaagacgcacattgtcggagcaaaagccgcacaagggtgccgccggatcagcacaatacatgcgtaacaacacctaccgggtgcgaagtcgtctatggcacgcacacgtctatccacgccaaagtcgtctaagggtgcagcaaactcacaataagcacaacaaaaacacgaagtcgtcacaaaataacatcaatatatcaatataaagggcacaaagacgccaccaagtgcaattcagcgcacaacacacgttacaactacacggtgtacactatacacaggatattcacccatcacaaatgtccccattgcagttctttggcaaagagggagggcagcattttcgctcatcgtcgccaaagaacggcgatggcaatactcatcattacatcggctcttccttcaggataagatcagcttcccagaaattaaacagcatcaacttcaactcttccccttcaaaaaggtcccacagatccccttccccaatacacgacccagacgtcgacaccagtaatccgtgacgggcaccttgatctagtcgtggtccgatccgaagatgtgatctctccat

SEQ ID NO: 125315 - DNA, 323 bp, Zea Mays
attgtgtggatcgttagagtcggtctgacctcccttttgtggtgcccaagctcctccagcttcccccatccagtcaagtacctccacggtcaaccacgaccttcacaaccaggtgcaaataagtgatttagggtgttactagatggagtagcggtgcaaataagtgatttagggtgttactagagggagtagcgggagtttgctaattcttgctggctttttgacaagtatagagattctacaagctagttgttcactgttgatgtaaccgtgccattgtccatggtccatggaggtgagctcatcaatcttcatattttttg

SEQ ID NO: 125316 - DNA, 312 bp, Zea Mays
agcgattgctctgcgcacggcgtgccagcggtcgcccgagccccgacaaccgaggaccggccactctagccctcctccaccccaaccaatccctcggctagcctccccagaagtcagtgaagctccccgagcccttggaccaagcaccacctcaccggaggtgccggattgacgtcgccggacttcgcccgaacgccggcgcgcatagaccaagctacacggtgagccgctcttcgattccgtgcgcatacagcactagtgacctcccgtgaaactctccgtgcggtttaattgaactctacagccgtgagc

SEQ ID NO: 125317 - DNA, 647 bp, Zea Mays
agccacaatgccgaaatttggtgaggacacatcttccgctgccgaggcggaaccggctgctcccgttgctgaggaatcgactgtggtgccaaaggtgcctatagtcaagccagtcgaagccgaaaatgagacaaccagaaagctagaattagaaaaggcaacagatttgccagaaattccaagccaaccaatagaagcggaactgtcgaaggttggaaaagctcccgccacctctcccaagaggagaagaatggctagcgtgctagacgctgttgtggaaacgacaagagcgctgactcctgctcctgtgaagaaggttgccgaagctgctaaagcacatatagaaaccgaagctgggcccttagtgcccgctgagacgaagctcgccgcaaccgagcagagggccgaagaaaaatctccagatactgacgtagctctagagaaaagtgtggccaaagaagccaaatcccctgctcctgaagcaccgtccgaagatcttgattatatcattcgacatgcttcgggaaaaagattatccgaagaagaagtttttgaagccaaatactatgcccgggaactgaagtacccgaagggggccgtagtgtttaatggtacagacaaagatgatttcctgtactgcctcccag

SEQ ID NO: 125318 - DNA, 450 bp, Zea Mays
gcgaagccgcctcgcgtcatgggctggtacttctccgctacacgtgccggtaagaaccctattgtgatcttagttgttgtctacgcttcgcttggatcgatcggatttggagctttggggcagtagagcggggaccatacatcaccggcgatggtgccgccgtggtacctctgcatagtcgcccttgagtcgttaggtaggcagggccccgtggccgtagatctgaacacgagcagctgtgattggggcctggtggccagttcaggcgggtgaatgtggttcgcccgatctgcatcgatggtgtggggttgattggctggttgctctgatctcggccgttgatcaccaatccacttgcccgcgtcccataccgcttcagtgaaacctagatctcatcctgaccgcaaaatcataatcgtgtggtgcagattctaagttaccccttcggcc

SEQ ID NO: 125319 - DNA, 567 bp, Zea Mays
ccggttcttcggcggggaagtggtggcgaagtacgggcgggtgaagtgggtcacgggggtggggttaattggaccgacgggggcctatggcggccggtccgcggcgcggtggcgagtgtccgcggaggcgaagccgccggtgaggtttccggccataattgagtgggggaagtggcgtgtcatgaacgtgagagtgtggcggagctcttggcacaacttaattgaacggaagatcgccagagagggagaggggagctcaccggggcaaggtaggcagcacggcgacgctagctcgattggctcgagggaaagcagaggaggtggtcggagctggtgtggtgaagacggggctcggatgggtccttttataggcgctcggggagggagggggatgggggagacggtgaacaccggcgagctcgccatgatggcgggaatggcgctaacgccgattgggatggctcgggcaggctgaggggggtgagaggtcggctcaagcacagtggtggggttgtcgtggaggctggcgagcattaatggcgaggtgacgaggcgagagggtgctcg

SEQ ID NO: 125320 - DNA, 351 bp, Zea Mays
ccgcgggagagtcaattcggcagagcctttatgtcacccaacaagtagcctcccaactcacccccatccggtgtggaaaaatttgcaagtgagtgtgagaggtaaatgcttccgctgcttggccaaaggccactacgccattgattgcagggatccgatgaggtacctcggctgtggaggtgttggccacaaggcctggcagtgcccgaacaagcctgcctcgacaactgctgctactttctctccatcccctcatgtgccccctgcctcgacagttcgcatttcccacccctgtgccaggcaagcatggcaaggcccggcgatgcagctgagcgtccgcaagaaacatct

SEQ ID NO: 125321 - DNA, 421 bp, Zea Mays
gccacccattgccgccaccatggttgggggcgcctcgtcgcttggtggtcgtcgttagtgtgggtgatgtgcggcgaatcgtgcgccgtccgatccactttggatgggcgagattagatgtagggatcgtttttggcgagtaagttagaaccgttgagatcttgtatcgggcggatgtggttagtttgagtcttataaaatccagaccatgggatcttgatctcgcggctgatggcgcgtaccggttcagagtggtgctcgatttaatctgggcgtccatctctgatcgaacagtagatattcatccataccccttcgccatgtcggtttcaataaagagcccctgcactcttgttaaaataacccgcagtcctctctaggtgttcactgagtctaggaaaacttgcgagatagcccctgc

SEQ ID NO: 125322 - DNA, 361 bp, Zea Mays
agattatcagtatgatcatagagagggttcatgcgatcgtagggagattgaaaccagcaagtgggcataccattgggcaggagatgggtttgggtatagatgtgcccaaaaccagtcacctaatagtcgtgatcggcgcggtgcccatacgggccatcggccttgtaggcggtagtaggtgagtgctccgcagccgaaggaagaggtcctagtacttcggtgacgttgtggaaggtcggtggtcaggcacgattcggcggagccacgacattggagaaatcgccccgcggccgctcgacggagtattaggtgtcgtccacgacatcctcgatgaatgggcgccatgtctcgaacgcggcgg

SEQ ID NO: 125323 - DNA, 425 bp, Zea Mays
ccgcaagttgttaactttccgcaggaggatgtccaagaccaagaagttgtcgtgctagctctaccagccctccccccccagcggaccctttttggagggaaataacgatctgaacgaccaggccgaccaaaatttgaacttgattgcagatgaaaacatcattgtgggatgcataacgcatctggatcagccctctcaggacccggcctacgaagatttcatggctagaaagtgtttctcctcctgggctgagctttgcccccccaatgcaaacctcatctctgttccaaaattatgggcagctttctttatgggcctgcttatgaagccggattcttttgagtgggccagaaaatttctattgtcgggggccctttctgctttcatggagcccaacatggaaacggtgccctttaagattcccc

SEQ ID NO: 125324 - DNA, 543 bp, Zea Mays
tagaaatgagtgtgggctatgcggggagggagaacgagaatgacagactaaacttaccggggcaaccggtgttggcttaaatacgtctaaacgactgtctacataagttgaaatgttaaagagtgagttcgtatatagtcaacgaattaacttgtcaaactagtgaaaacagtttaaacaaatgtaaactccaaaccattcctttgagaaaagcttggtgatggcatgcacatatcgtcgagactatacataatgcgtaaaaggggaaaacaaatcaaaatcatgcattctaataaacttattacataaaccgtagactaccgagctagctccctgcagcgtgtacgtacctctgcttctctatctagaaaattaattagtctacgcgctacacgcaacaatcacctacgtctcactctcacctcgctgatcatctcgtcaccaacgccatggccatttgcggtcaccatcggcaaggccttcaccttgatcattaccaccacctttttcttccagcggcacgacctgttgtgccctcctctt

SEQ ID NO: 125325 - DNA, 722 bp, Zea Mays
cggggtgtgtacatgggtgttcgccagcgtccgtggaggccgtccgtgcccgcgactggaatctagttcctgtgtcgtagggtgaattgctcgtcggtaggtggagggagcgccgtaccacacatcggcgtgggcagctctaccttcatcggtgtctcgggtaaaactccctctaccagtttcaccttcatatcagcttcacttagggctaagttatgatgcgttgggagcactggggccacagatccggggttcaccggcgagagccccaccgtgaggctcgccgccaccactctgctttgaccggaggtggaaggtggttttcggaccgtaggatcataaataggcgatctggattgagcgggtaaggcagatgggtttcgtcggagcagagccgtagatcgcttgatgtgcggtagaggttgatcgcgggttcattagatctgggccttggatcgtggatccaacggccacccaacgtaccgattagtaaggacccggtgtaatctggaccatatgcactagatctgacggctagaaatcccctgtaccccatcgcggatgcaggtttgcttaagagtccctcagtttttggggaaagaacccgcagtccataaaagtgttggaatagttacagcagggccctgaaaaattataagttgaaccatgagattttccgaattaatagccacagtcaaaatgaggtcccacatttattaaaa

SEQ ID NO: 125326 - DNA, 632 bp, Zea Mays
aggacctagagcggacggtttccgttaattacgacaccaccgagttgtcttttaggtgagccctaaagcttctgcacgtcgccattccacggcagaccctcagataggctggcacctcgatctccttcgattactttggctgccctagtaacatggtaggcgcagggatccttcctcttgtcgtctctcccaccatcaacaatatcaaattcaagcatgtcatggttgatgataggcccggcatcaccatcttgttgatgtatgcctttaacaagatgtagatcccacagtccacagacgaagcccgcctgtttgtcgaaatctccccgaggatgatcctcccaattgactcaatcaaggtgccggtcgccttcggcactcgcgtgaacttccacgctgaatatgtggagttcaccgttgtcgagctccatcttccctacaacgcaaaccttgggcgccacatgctctacagggcatctagtcctcaagatgctggggcccaacaacgtcatcaccatcccctctaaccgactagaggcattggtggcagtggagaagctaccctaaagacccattagcgttcttatggatcatgattgcctcttggacatatattcaacatcacaatatag

SEQ ID NO: 125327 - DNA, 303 bp, Zea Mays
ggaggcgggagtggaggtggtacgatttgtacctcctggtggtgttggtatgcgtggttaggtggatgctgagcggggtcgtggttgtatggttgtgggaggtggtgttgatatgtgtgcgcgacaactcttgggttgtcagctggttacgcctgagacatcatgtccctggtggccttcatttccgggtagtccctcgttgagtgcgcgcagtcttcaccgtgaaacaggcagtaaaatctgcgcggctgctgcgcccgtcctcggccccgaccacgagtgccattgccgcggccctggggg

SEQ ID NO: 125328 - DNA, 441 bp, Zea Mays
gaaaactctgttcagtcttttcttgctctgacccccgaaggctgaggacaaagcatcatctttggcttttgtatatgccccaagtaactcgtcgctagtagcatcaatacatttcagccaatcgtcatttggttcgtcaaaccggcccctgaatctgaaggtatatctcaaccgaactaatcaaccttcgatggacccggcagcagtctcctttggcatctcctagttatccacaagtggccacactctataggctatgtgctcttggattatgtctcttgtgccaatgaaagcacaaacattgctgaaagccttttgacacgcttcggcatcaccttcaatcgtcaccctcgaccttcgaaggccgaagcgagaccagatggggcgctggataatttccttaatgtcctccctctcaatcagattattcttaacataaaa

SEQ ID NO: 125329 - DNA, 1418 bp, Zea Mays
ctccgcgcgctcatgcgtccacgaccacgcaccctgtcgcccgccaccccgctcgtcaccgccacctgatgcgcacagtccaacgcacggttctgctaaacaagtgcattatttttttgaattgtttgcatgcgttgattaattgcagttattttacatacatataaattttttttgtatgatcaaaattgtgtactgtgctattttcaataaccagaaagtgattattcaatttatttataatgttttagttcatttagaggtgcttaagctaaatttgtaatttctgagtgtatttattaaaccctcgaaaaatgttgtttgatattttttcatatgaaataatattatttaatttaaaatattatattaggagtgtatttaacatcggagagtaatttttattatgtaatacacatcgatgattgtaacaaacaaaacctcataaatgcatgtattgtagtgttaacaaacggaatggaaccgatgcgtcacctgtttgcatacctctcatgcgacatatgtgaggtcctgtttattggacagccttagacagagtccgtatttatgacaaggcatgtgctcatgcaaaattttggtagcataacacttctgttctccattgcatctccaaatatgtgctttgtcggtcactctggtcataaatttggtactttattgacatcattttttatttctttcattattatgtatttcattctatatttgtatttgggtagatgttgaaacaaaatgtcaaaaaatcaagtctctaacttggagtttgcttgggacaaggagtagctcgagaagtgaggactcagtgtttcaaggctttggttcttccatgcgtagacgtagagcactgacacaacatttgcctacagacgatcaacacgatataagttacttgttaaattaattctttttgtacatgatgactcgatcgtttaatcacattcttatttttaataggataatgaaaccgagcgaccgtcaatacaagacccatcgagaggaaaggtagctgtgggtgtggacgtgcaggacccacgagacggtggggacggtaggggagacgatggtggcgatagcggggttggtgcaaattcggtaggtggggattctggggctggtagagattcaacaggttggtctagatcatctcgagtaaggaggaaagtacattttattagcccacctctggagcgctaactacgcgaaaaagcgtgaaacacgagcgagcgtgtgatatttccatagttgcatcgatcactctttgtttttctcatataaagggtcatgcatgccttcactcatatattggttgacatctacttaaatggacaatgcgggactatcgtctatctctatacaccaccttggtttcctaaaataaattaggccagtcataaatg

SEQ ID NO: 125330 - DNA, 730 bp, Zea Mays
ctgctgtcaaatcaacgccggtgaggttgccacggcgtgggacactaattcgcgtgcgccagtgccttcttcctcatctccgaccgccgcgtgtctcgtccaaattcgcggccaccgcccgtcctctctataaattgagcccgtgactagctccgtggggtcgtcagctaactagccacagctaatcgaccccaatcatccactcgtgtgctcaaattcggagttttcccccaaatccgatttccgccaccgtgaaaccaagctcaccgtcgccagccatactccggttagtccctcccctctgctcccttgtttaagcattttcatgcgtctacgatgcttgccgagccattgaattgaactaagggctctctggtcgccgggaacacgaccatatagccgctatgcttacggccaccgtggccagagctccatagttgaccaatagcgcaattaagttaggggaaatggtcgggctgaccccaatttcatgtccgccgctcggagaacccagccatagccccaatcggccggtccaggacctcgccggagtctctccgtgcgcgtcgccgtcgtggaccatccactgcgaagaaacagaacatcaggggcatttctgcaagttgtcagtgactgattcaatagtaactgaacccaactttcattagccaaaaccgtgaggccttttctgtaaaaccgccagggcgcgcgggcgcgcgggcgctttccc

SEQ ID NO: 125331 - DNA, 496 bp, Zea Mays
cggattggggcgaattcggccttttgggtcgggaatttgcctggcgccacccgtatcgtggacagtagggttagaccgtgtggtgattggagcagtcattccccatgggttcgccatagtcttagcttcgtggggagcgaatttccttctgagttggggtagccggggctcgccgggattttcccggccatggtgtccgccgcgggctcgcgctcgccgccgggctgggtcatcggagcggaggaacgcgcaggtgccgtcggtcggttgatcgatggtggagattagaattaggcttaccccttcgcgagatcaaatgtgggccgtttgatgtgatcgtgtggttctagtggaaaaccgattcaataaaatcgtgccgttgattcctgatctagtggtaggtgcttcataccgattcacgcggaacctagatctaatcagagccctcaatttctgatcgggcggctcagttttgcccgtacccccttcgctggcg

SEQ ID NO: 125332 - DNA, 495 bp, Zea Mays
cggccttttgattataagatagatttcaatatctacattttaatatatggtatgtgggtcatatatccactttaattttaatttttttatggggagggcccacattaatttcagatttaatttttgtagggacggtccatcacaatagcttgccactaggccctcacgtgtcatacagctattgcactataccatcaaatatgattggtgtaccatcacaacgtactgacattgtactagtacaacacacttgagcagattcaaggactggcatatgaaggaataaaccgctggtaggaccaccattggtgtgtttgtacaacaacaatacttcaacgacgatgaagtgacatgtcttgattttgtggatatatttgagataaactagcgaaatgcgctaggcctctctcttatcagcacatgtgttctttaagtttttaccttctctcttgtccactactaaataatatatattcaatgccaactgaagttttc

SEQ ID NO: 125333 - DNA, 506 bp, Zea Mays
ggataacctttattgtttgttcctattttggtgtttccaatggcaggatccgatgacgagattgaggtagtcattcccacacaattttctgattgtgtcagccgcgaagacttcgatgttatttgcaagcgtatggagaaaaatatggaggaaacggtccacaagtctgtccatgatgcgcttattgcaatggatcttggcaaagtgctagatagggtggagagacggataaccgagcttgtcgattgggttgccatgttggagacacgtccactacatcagcaacctcctccaccaccacaaccccagcagcaaccaccacgacatcaacagcctccaccacaggctcaagatgatgccattttcgatgcacgtggcaattttgatgaggcagcgaccagagatgcccgtctacgacaccgtcttcgttggaacagggtaggtatgtgtgacaaccagcgaggtaataacaatcgtattcccgatgacccttttgctaagattaa

SEQ ID NO: 125334 - DNA, 387 bp, Zea Mays
tgatcttcctgtcttttgagaccctttcctcttctgttgttaagtcgctatctttcggcaatttcttgtcccttggtattggtatgctcatctccttgaaatctctcatactctcatcttttttatgcttacctttatatcccaaggtctatttaagatatttcattctacatgatcttgaccacccttgtttcttaatgacccatgagcggtcattttattttgcacatccttggagatctcgttaattccttgtcacttcctttggtaatgaattttttctccaactcttctgttggaaccctacctatcttacccttgattgttttccccacttcgccacttcgtgagtcatgtctcaactctatcctttgttatgcttttcgt

SEQ ID NO: 125335 - DNA, 435 bp, Zea Mays
cccggctcagctcatgctagacgtgaccggttcttctctgccttcctctcaagacggtgtttcttacacgctgtcgtggctgattgctccgcctccctcttccgtttcttctccgccttaatagcgacatcctccgggagagggggacgagaaactttgatactgcaaagcccttggcaaaggcactcattggtgagacccgaagaaagaggagagggaaaaggttaaagggaacttaccggatcgctcaaccgcgcttggttgaacggtagtgggccactctcgtccaaaatgtctaacgtaaccccgccgtgatagcaaggacgcgggttgtaagctcctccctcatcaagttcttggctgaatggcggccggagtcattatccctggtgtactgccacatggtcctctagcaggccgcgagtggctggaaac

SEQ ID NO: 125336 - DNA, 289 bp, Zea Mays
gttactccgagctggagtcggtttggagtcctcccaaacagacctttagtggggtgtcacattgcattacagtggcgagggcagtcaaagcttgctgagctatggagcagctcgcaattggggttagactgatggagtgcgcaatagcccccggttttgcggaaatggtaacagggtacatgcgcatctgttcttttggctgtgtgccgtatagagaaggatagtggtagataagatccaatctatcagggatagtgataaactagtaaagtgcgcgcgtcctaagcgc

SEQ ID NO: 125337 - DNA, 561 bp, Zea Mays
cttaccctttcccctccgcgcggtcagcccaatcccacaccccgcgccgcgctcactgttgcgtgggaccctcgcgtcagctctctctcgcgtgcgtgtacgcgtccatggagccactgcgtggtgggcctgaggcgttaatcaacgacctcgcccgtccatggcggaatcgccccatgaaactctcaccggccatccgttgactctagcgtggaggtacggccggaatcccggtaccctataagtactaacccccgcctcggttgcgtcgtctacccctagccgccacctcaagttacgcagaaaacctgcacctccattgtagaacagagccgccgcggctcggtgtagtggaaccgggcgctcactgctgccgcctcatctgcgctgtgtctagtggtttcgccggtgtgctgtgaaggtgctggtggcctcggcgtgcgggattagtggacggggaccccataattgctcaccagaggaaacaacaccaccgtggacagcacatcgccgtggttgtgcccctgtgctccattccctcggtaagaaatccgtccctcg

SEQ ID NO: 125338 - DNA, 321 bp, Zea Mays
gaggtggcaatcctttaggtactgcaaaaacagactagaacttgtacaacaaggtctgaagatcagctggcaatgcagatagaatagaatgatccttgtctggcaattcagcaatatgacacagttcgacaactgaatactgtcccttgggcgaatgcaatccaaataactgctttggtgaacctttataagtaatggtcagccatttgtctgcccaatgcacccacataggactaaactgttcaagccagtccatgccaacaatcaagtcgtaagtctgaagcggcaatatacgcaacgtcgactaaaactcacagccac

SEQ ID NO: 125339 - DNA, 381 bp, Zea Mays
cactgctgttcacccacctgaaaaatctgttttttggacagcaacataaccggattcaaacaacgatatctcctgaattataactccgaatcgagcgcataagtacttgttggaaagataacataaagccctacatgattctcatactgattaacactaactactcccgaaaaatccccagaaactgctaatactgctgctgttcacccccctgaaaaatctgtttttttggacagccacatacccggattcaaacggtgataactttcaatttataactccaaattgagcgcataaatactcgttggaaaggtaaggtaaagttctacatgatcctcatactgatttcccttaattcctcacgaaaaaaacacagaaact

SEQ ID NO: 125340 - DNA, 298 bp, Zea Mays
gccgaccggttggaaatctgaatggttttatgttaaaattgatgaagaaaaggagaagctagttcaaagcccgctgaagctagtcttcgggctgactagacctcaatgcaacatgacaccgggggatccctgccaagatgttgtgtatgagtttagaattgtgtctaaacacattgggtctagggacttagtccaggaatatctagctaacagagtgttcccaacgctgaagaagtggggtatgccgaagcttgaagaagagaagaaagagggtgaactcgttcggctgccttatcag

SEQ ID NO: 125341 - DNA, 280 bp, Zea Mays
agctttgcttagcacgacgccctgcacgaaaatcacaaaggaacaagattaatcactcatagttttttcttcgaagctacatggtaaacaaaagaattttaccttaatgcttatataagccaagcttttagaaagctttcgtttctttagcttgctcagcgtcgccccaatttcagggaacctgatgcttcgggcaacatgcttaacaattttggcttctccggcatcgggcaagcagaataagacatattttcctccaccaaatagcatagcccccgag

SEQ ID NO: 125342 - DNA, 455 bp, Zea Mays
gtggatgggtccccgggaatgtgttggcatgcgtcgacgaggagcagctcactgtaaggtcaaggcattgtaatgagattatccctattgaacgagcatccaagcatgtgcaaaatgaattttatgatatacactgtgaaactaaaaagtaaaatgcaagtgtatgaaaacaaaaagtataatcaacaagaacaaagaacctaaactcatacagcctgtacactacaacatccagcgcttacatagttccgatctgatagttgagcaatcactacccactatgaggaggagctctgaacgagccatgtgagcatttgctcgaataggtggtgagcaagaggcgaaacacaccagattggcgagcgcaaggtggatgaggtgtagctgtagtattcaaaattcaagaaaaataattaacacgaataaagaacaagtgcagtaatcttgtatttaat

SEQ ID NO: 125343 - DNA, 491 bp, Zea Mays
atctaagtcgttcgatcgtgcgccagaggccgggattagatagcaatttccacgaatgggtacgttaaatccaccgtgggatcctaatcggatggctctgattctatgaggctcgatctaaatttgtcccttcgattcctcatcaacgacccagatttagcaccctaagaagtatgccctgatctaattgtggtcgtcgcacagggaatcgatgccccgcattgtttcttcccccaccggccaactacaggggcgccgccaggcccctacggtagagacctcaccggcggcacccaaatcgccacccgagcacgttaattaccatgaatcccggcgcatcgcacagataatggaaaggggaacttggtaggggcttgcttaccgaaaataaatggcacgagcacgcaggtccacacgagggtgcggtgtcgcggcgtcgtgctcactccgacgagcaattcgccaccccaggttggtcttttcgacggatt

SEQ ID NO: 125344 - DNA, 298 bp, Zea Mays
gctccaagtccgctaaactgcggttctctgctcttttcctcggtcgttgctgcttgcagttgtaattttggcgcggattggagtttggaggctcgcaccatggtgggaagttcccttttttgtgatttgtttgaaattctcgacgtataaggttttcatgtgtggttatttgatctgaagttctgaacaatccatccccttttctcctgggattgggttctctcccactttcagtcctcttcctgtgttgggattcctctggttctgtgactgcgagatcccacatgtaagtgcgggg

SEQ ID NO: 125345 - DNA, 699 bp, Zea Mays
gcttgccaaggcattaaagactatttgcattgttcatatttgttttccatagtagtttgcattccaccaatagaaacttcaatatacgtctacctgtccacagggaaattgtctttgaggacttcactgagaatggtcaacatgttttccaaagggcgtgggatgaccttcttcccaacaatcgcatcttgatatattgcttgtatgatatgtttcctgctgttaaatagctctgctgatttgattattatccaacaaaattctgaatggaccttgttatttggccaggaagcatgatattaatccagaatatcgaaccgccacgagaaatcatattaagtttcctaaggaccctactgctctcaagaaacccctcaattgtgtcaatggaatgaacacaaagacattgaagatacgacgtcttgaggagcttccttctgcgccattgtctaatgttaaaagattttcttactcagtgaaaagttctactttaagcaatttgaggaataaaagaaggaaagtgattgtgcctgaagaaaaacctgtggttatgacaaaactccctgagattgacagtgacactgagatgaggcaagtctatatctctttgtttagtgctatttgtttaccttttcttccgaccactttgttcttcatatgcatttcttctgctatgaaataaagttttgatggtgtagg

SEQ ID NO: 125346 - DNA, 419 bp, Zea Mays
cgctgtgaatcggtatgacaagcccgaccatcgccggtgagtttgccacggttgtggccacgaatcaccgtgccagtgactcagtccctctctccggccaccgctcaagcatgctataaattgagcgcaccggcggctccgcaaggtaaatacgcatccagtgcactaacacctgcatccaattgttcaccagagccacccaatttcccatttcccccaaatcagccaaaccaccgccgcgtgaacgcctcaccgtggttagctcatctcaggtccactcataccctctgctctttcatttcagtgtacttgtgtgtccctggtgctccccgaccccgccaattaggttaggaccccttagatcgccaagaacatgttgtgctgtccgttgtgcccgctgtcaccgtggacagagcgag

SEQ ID NO: 125347 - DNA, 455 bp, Zea Mays
ggaaattatccagcgccccatctggtcatgcttcggcctccgaaggccgaaggtgactattgaaagtgatgccaaagcgtgtcagaaggcttttagcaatgtctgtgctttcattggcacaagggacataattcaagagcacatagcctacagagtgtggccacttgtggatagctaggagatgccgaaggagactactgctgaatccagcgaaggtggattagttcgattgaaatataccttcagatacagagagaagttcgacgaaccaaatgatgactggttgaaatgcattgaagctactagcgacgagttgcttgggacatataccagggtcgaagatgatgccttgtcctcagccttcgggggtcagggcaagaaaagattgaacagggtttttgatgcaattggcttcatatatcctgattactgctaccccttgagaaggcaaggaa

SEQ ID NO: 125348 - DNA, 688 bp, Zea Mays
gtacttctgatcctcctcggtgccctcacggcagagttgccccagccacagcccatgtcgcggctttgttccgaccacccttctcagatgggtcgcgacgttctccggcagttttcactacagcggccaagtacttatatcagctcatgagacggacgcttctgccccggatgggttatagggaggctgctactcatatccagctctggctccttggtgcactgatctcacatttagagtttgatgttgttgacttcctcatttgtgagatcgaggacactgtattggatggtcttcgtgccggcgacagctgccatatgctcactatctctgctacatctttgcgcagctaatctagccaccgcagttctaggtcactcttgaggcctcacgccttcactttggttcctaccgtccagcccctaaggaccccgtgccagcaccagatccagtgacagacactcaggcagaggatacagcattccatcagttcgagactcaaggcaccgcagttcctgacgatgatgatgatgatgacgatgatgattttgggattccgcctccgcctcctatgcctccatgctctcatgatcatgtggctgggagttccagtgctgctcctgctagccctcctgctgttgaccctgctctggctacaatccttcagactcttacgcagcagcaggct

SEQ ID NO: 125349 - DNA, 477 bp, Zea Mays
gtgcaactctctccaacggagccggcgcttgttccagccagacactgagcaccaccaagatctactcggttcggtttcaatgagatccagccatggccggttgcatggcgaggagggaagccggcgacctggctggctggctggccggcggcgattggtgaggcgtccttgtacgtcggtcgattagatgggggtgctagctagcaagaattaatcaatcgccctttctactttgctggaggagggatggggaggggtcaaaatgggtttagggccgtcacgggaagcctgggggggtgccgctcgcctttccgcttatttattcccgcaaggttccctttcatttcatagcttccgtcgccgggcattcacccaacccaaaaccatcggccggtcgtcgtgcccatgttgcctgctcattccctcgccagcacgccagaggggcccagccctcgccgtcgtcgtcgcatacggttg

SEQ ID NO: 125350 - DNA, 569 bp, Zea Mays
ctgccatctgcaaagtaaaggcaaaagagggacaagaacatttgtccaatgagtatgtgttgagagtaagagatgaagtaagcatgctgaatgtcagaacaaacaccttagtacaaaagaggtaccatcgatgagcggtgcacgcatagaaaatttcaaaaccaaaaaaatggaaggggcaatagtatgatacataaatgtatctacaatatgcacatttgtacacaaatgagatccgtaataggtgagatgcgctacgacgatgctgctagcgcagcatgtaagacctcgtggtaaacaacatttcgagtacaggagccacaggaaccatcatcattttcgatcacaattctaagcccctccctagatgtcgcacacgaaacagcaacatagagctggccatgtgtaaatactggtttctttaggtaaaggccaacagtggaaagcgtctgtccttggcttttatttattgtcatggcatagcagaggcgtagtgggaattgggtcctctgcaaagtgaaaggccattttacatttgttgtgttcagcgcaatacgtggaatgaatac

SEQ ID NO: 125351 - DNA, 340 bp, Zea Mays
ttgtaacctctaatatctttgttccttcgaccactatctcttcaattttatcggccttcggctcagctaatttgaccaaggatgccttcggctttacagctggctcttcaatcctctgtgtaagcgcatgttctttggcttcaatagccgaagaggtctcaccgccaaattcgggcactatggccggttcaatatatcgcggccggtgagtaagaaccttcacctttttcctcttcagcgcgggctcgcttggagcaactgaagcagcatccttcccggaagttgcactctttctcttttgcccccgtggcgggtagcggtaatcagggtacatgaaccc

SEQ ID NO: 125352 - DNA, 721 bp, Zea Mays
cttcttccctttacgacgttacttacacttacacatctgaggatatatacacagtccatggccattgcacgttttacgcatacgaattctcgaaccatcagtaagcatacctacggatccaagacacagcagcagcagctgctgctgctgtgtgttcagaggctccagcacaggtcctcggtcggtcgatcaggtatgcgtgcatccttccattccatcatcccatagtagctacgtacattgtcaaagagtctctgtcccctccatgctccagcatctccacgtattcgcagccgagtgcgcgcatctccctgccaccaccgcgcgcgccttgtgctgctcgaccagcgtgcaagcaaccaccgtcgtggcaatggcatcaactgctggacgccgttccattttaccatccgatataccataccatatatcagcagctacctctacgcatgctcctacacaggctacaacacgacgtcgcgccgcttcttggggttcggctcggcggtccctttcctcatcatcgccacgaactcgctgtagtcgatcctcccgtcctgcgcaacgattccaacaacaacagccgatcagccgacggccgagagctcaccatcatcatcaccatgcatgcaacgacgaccgatcgacttacgttgtcggcgtcgacctccgagatgatgtccttgatgtccctgccgtccaggagccccttctccttgag

SEQ ID NO: 125353 - DNA, 512 bp, Zea Mays
ctacgatccaaatcagatgatcgcgcacacgcccgccccaatcagtaccaacttccaatctcggtcgcccatcgtgaaatcaacggcagacaggtcctcccctaaccccacagcgttaccaggcggcggcggcggacgacagaacccagagccatggcggaagctcaccggcgcgcacgatacatcacccaaggaccccaactctgaaattgattggtgctacgcgacgaggaggacgaggcgagcttagtagcttaggttgttacctgtgctgtagcgcggacactgccgcccacgggattaggcggatacacggcggcagactccctgtctggcgagaaattgctgcccaaccatagctttctactccaaatttctcgccgtggaacgctcctcaagatagcgcgctatccccaagcccgatcctggattccggacgacgtcgagatggaagatccgtgttggtgacgaagtgctccacccgatgaacattccacagtacttcgaacaga

SEQ ID NO: 125354 - DNA, 377 bp, Zea Mays
cggaagccaagaagatggcccgtttcttgaaagggttaagacccaaactcaagaccatcctcaccagccaagacttcctcggtttctcgcacctttcgaagaaggccatccaggtggaaagagcacgagaagagggaaaaggtcacctgaagaggaaatttcaagtcctccgagctcaacaataggacagacaccagagggttcgatcttttgggttcccttccaaggggtcaaacttcagcaagccagcaggatccgctccgtcacgtctcaaccagcctggtcaaagttccttccacacccaatctgttgcaagcagtcaacctccaaccaatgcttgttggcactttggagaccatagtcacttcaagaataat

SEQ ID NO: 125355 - DNA, 491 bp, Zea Mays
caaaatcttcactagttctttttggactcaactcttcaagttgatgggtactcaactcaatctgagtacaacttatcacccacagacggatgggcaaagtgaaagagtaaatcagtgcgtggaaatgtatttgcgatgtgctgttcacactcaacctcacaggtggaaagcttggttatcacttgcggagttttggtacaacacatcatatcattcagttttgggctattatcctttcaaggttctttatggatatgatccaccatttgctgttgcaccgatggttccagttgggactgatgaggatgtatcagctctattagctgatagagcaaggtttactgagttgttgaagggaaagttggctgaggctcgtaaccgcatgaaattgtatgctgacaagctttggactgaacgacagtttcaagttggggaaatggttctactgaagctacaaccgtatgctcagcattctgtggtaaacagatcat

SEQ ID NO: 125356 - DNA, 403 bp, Zea Mays
ggaagccggatagggcgttagtgagcgcggtcgaccgagcggtgcagagggatttgtcgctggagatcgctcggcgccgtcgaaccgcactctgccgtggccagcaccgctcgggcatcaatgtttggtgaggatgctttcccctatttcgcttttagccgcgcaatgtttaggtgcgttcggtgtggaattcggtcaccggtaggctgggcggtgtcatccggcgggattcaggggcggagctctgcctcgccgtcgtgcgcagactgccggtggtgggaggaagacaaccggtgaccgtcgatgcgtagtgggcgggcctcggcgcggcatcccagtggtaagtccttcctccccatgcgcgcgaaccacctctctgcccgactccgtacttcgatggccg

SEQ ID NO: 125357 - DNA, 302 bp, Zea Mays
cattttgtaacttacggggtgcatggaaaatttgaagagatgagcttcgtccaaaattttcttcctgagttctagattcttgggaacaacctgtcgatcttcgaaccataaaacacccttgctgtcctgacgaaagcatttatacttatccaccctttgattgagcatttccttaatgactttaacacccttgtcaccaagttgtgccatgattatctgctcttgtaaggttggctcaactgagatataatccaaagtacctggggaaaccacttccatattttgcttgcgcaacttgtcgc

SEQ ID NO: 125358 - DNA, 370 bp, Zea Mays
catccccatacgacggtgcctaccacttcgcgaaaattcacccacactatgttttcccaccacccttcgccgcctatacccagtactcacactagcaagatccctggcaccctccacacgcggtgaagtctccgctgcagccacatccaacgcaacaaaataatccaaaccttcatccgaggactcctccgtccaaggaaacaaactcccagattcaccatcagactcaaaacactcagacacagagccaaacaaactatcatcggcaggcactatggttgaggccaccacaaaatcagtatagtcagcagcggttgcttgcgcaggcccaaacgtcggaagctgcacagtaaccgaggttcagtatcac

SEQ ID NO: 125359 - DNA, 351 bp, Zea Mays
ctctttgtcccatctttcttctccatgaacagaactggagcggcccaaggtgtggtacttggtctaatgtaacctttctctaacagctcgtcgatctgcttcttacgttcaaccaattctggcccggacactctataagctctcttattaatgggggcagtgctagggtcaagctctatagcaaactccaccttccgctcgggtggcatgcctggtagttactcaggaaacacatttggaaattctaacacaactcgggtggcctcaagctggttggcctccttaccatccatggacatttgatgacaggccccttcctctagatcaagcatgatctgttcagttactatc

SEQ ID NO: 125360 - DNA, 381 bp, Zea Mays
tacatattaagcaatatatcccataaactatggtacaaacattttataacttgaaaatggatcatgtttacaatgcagttttgcccttttgctttagtaattatattaatatttttttaatccctgaatacttgtttgcattgtattcttggctctcatcatgtttttaagcataaacctgaaggcatataaaaggaactagtgtatcttgatttgtactgcctatgacttgtcaaccaaatggaaaatgaagttaaattctcttgaaatgatgctgatatagaatttttaaaatgattatttagtatatacaccaccaattatcccaaaataagtccatttaggttggtcctaagtcctaactcacattttttaagcttt

SEQ ID NO: 125361 - DNA, 632 bp, Zea Mays
aaaaaaggttgtttggcacaacttcacttattggtgaaagcagagcaaaagccgtctcataagccctaccaaaggagcccttagtcctgtatgtccaataccggttgagaatttggtaccgcagacggttcccaaccgataccaatagccatttctccagtggcgttcaatgggaagaatgttgtgagccactgcatggtgttcaattcagactggaaatcaaataaaccgtaatttaccatgcattagcctacttttctatattactaggtacggttatacttggtttctggtgtaccgaaaagaaaagtgtatgcaaggaggtaaattgaaatacagcactaaccacactcttctgggtttctggtagtgctactaaaaatacatcagtgtcgcgaaaacaaattggatttgactgttctaacgtgctgtttggttaggactccgtgagtgtaaatgtcaataaaatggttacagttgaagtatataaatggattgactaacttcttttatcagcttaatcttttagattaacctggatgttaggtgttgaagtgtgtaattggatcaactcaagtttttgggttgaactggatagtacgttcactctaatagtggattaaacttaccat

SEQ ID NO: 125362 - DNA, 1666 bp, Zea Mays
gaatagatagcatgttgatatgagtaagggtgatatatctgttttccaacatggagtacaattacttggagccccaaggattacatatctagataaagattatgataagatggtttggtatgtgcttaacaactgtgtagaggttgatccatatatggagtatgtattcccattattcctcttgcttgctcttgttattttagtattcattgcatgctaaatgttgattttaatatattttacagtctatacagaaaggagttacagaatgagggaggatttcctgatgttgaaaaacaagtagaaaaacaattttcttcctggtttaaaaattatgtgagaacttgttttatatttcattttaatcctttattacttgaagttattctcattgtatacaaattttatatatacagattggaacactttggcatgagcgaggagaagatctctgttctgatctattagctttgtcatgtgaacctgatctgcgaataagagtttattcagcatgtattgttgatggtgttcgataccacactgtcgaccgtgagaaatataggaggacacaaaatagtggtgtaatggcacaaggcacacataatggtgaagatattgaattttatggttccttaagagaaataattcagttgcaatataatgcagacaagggtggacaccggtgagtggttatttttcgatgtgattggtttgacacagaaagcaagaagggaagaataaaagatgatggattattgaaaagcatcaaccgttctagttgttggtacaaaaatgatcctttcattcttgcgccacaggctactatggtttttatttgcaagacaccaaatatggaggtagctggagtgtagttcaaaaatttgcgcatagacacctttggaatgttgatgaaaattgtagtgatgaaataccaaatggtgtgtcgctttcttaccaagacgatgaatgtgttgcttctaatattcagcatactgaagtggatataaacaatgatattgttggggtacaaaatgttgatattatagatgcaagtgtagttgaagatctacatagacaaagggatgaagaagattattttgaggacgaagaagatgaaacaggatggcaatatgccagtgataatgacgagagcaatatcccaaatgttgttgatgataatagcgatgacgactagatgggtgatcttgaatgagttagcaacagacataactgtggacactctgagttctgtttttagttgtagtgtgttggactgaggactgaagtttatgcaagttgtgtgtgtctcttttctgtaaaaactgaaggttatgcagtgttcgtaatggtgcggttgtatattagactgaaaatcttatttacgcactttcttgtgtctgttttctataaagacagattcactgatttttctgtaaaatgaaaactgaaaacagattcactgaaaactgaactaaaaacagattcactgtaaattgcaaaactgaaaattgaaaacagattcactaatttttctgtaaaatggaaactaaaaacagattcactataaactaaaaacagattcactgtaaactgcaaaactgaaaattgaaaacagattcactaaaactgaaaacagaattttctgtaaagacagattcaaaatgag

SEQ ID NO: 125363 - DNA, 436 bp, Zea Mays
aaaggaagggcggtcagcattggggaggcagaagatggcggctggagggaatcacctgagggagggggcggcgtggaaggatctagggtgagggagaagaggctggggcggtggatgaagaaaaccagctatttttctctcccaattcttgtaacaaataaatatggaggctgtttgtttccacgtttttagccattcatctattcacaacggaaatggataacatcgtttgctgttcggtacgaccagaatgttagaactaatcttgttatttaggtgttaatgtttaagtaagtgtgttaggtactgaccgagctgccaattggtgtgggatgctggtagagcagtgatgcgtgtgtgtgcgttttgtgcggaaacaactgtatatggaggagagtaaattgaatttttcctttatttcatttcttttcaagag

SEQ ID NO: 125364 - DNA, 366 bp, Zea Mays
cactgctgctgggcacagattcaaagacacctgccaagtcgtcgcccgcaaggcattgagggccctgtgtcagatctatgaagaagtggccgacaccccgctcagattctttccgccctttcagagagatcgtccagtctggatggccaggatgcgtgcattggaagggcagcagctgcttgaggacgacccctcagtcgtgtacctcactgcctacctgctcaccctggatgcatagtatgatttcttggctcggcaccaccgtcggatgattgcccgagcagaagatgcagagaagcgcaaccgtcagctccatgtggatctcaccacagctcaagcccgtgtagcagccttggaaagtcgtga

SEQ ID NO: 125365 - DNA, 562 bp, Zea Mays
ctgatctctgcattccatgcttctgctgtgggtggtcattccggatttccagtcacatatgcaaggatgaaacaaatttttgcttggaaggggatgaaaagttcagtgcatacatttgttgctcattgtataatttgtcaacaagccaaagcagaccgcactcgtttacccggcctccttcaaccattgcccgttccatcttcgctttggcaaattatttctatggatttcatcgaagccttacctcgctctcaatcttacacttgcatcctggttattgtggacaccttcaccaaatatgccaacttcttgccgctcaagcatctgtatacagctttgtccgtggcacgtctttttcacgatcaagtgtacaagcatcatgggttgccccagtccattgtatcggatcgcgacaaggtgttcctcagtaatttgtggaaggaactgtttcgctgggctgatgtgcagttacagatgagttccgcatatcatccgcaatctgatgggcagacagagcgtgtcaatcagtgcctcgaaacattccttcgttgctttgtccatg

SEQ ID NO: 125366 - DNA, 503 bp, Zea Mays
gcgaaacaacatctagcgttcatgtgataggggattactagttgtgctggatctcaagttgtagttgtgggaaggagggtgctaaggtctagaacctcgaggtagaggttgggggcgcaccagggaacagtagatgggaatagaagacgggaagtaggagataaatctttcttattcatcctgaaccaatccagccatatatataggttgtttacaaagcgtccctaacaaattcaagccctattaactaggataaactcaactaacaaaccctattaaccaagaattgataatagatccgactttatctaaggcctaataggcccattaactaagttgttactattccggtgcctcctaacatattggcgcccatacatgacatctctccccgcttggagaaacaacttgtcctcaagctggaaggaaggataaagccaccagaattcctccaagtcttcccaagaggcagtatccgcagagaggcccttccactggatgag

SEQ ID NO: 125367 - DNA, 727 bp, Zea Mays
tttcagtgatatccgtccgtattcgatccgattacatccctaaccaccatgatcccagagctcccctaaaacgtacatgttacttccccggagcgctattgttctctagctagctcgccaccacccctgcgctcgaccacctccgcgcgcgccaagacctactgcgtgaccaccaaattctcgcgcacctccccgacccttctctgggagcactatcaccgccggtaagtcacgctgttgttttctccaccgccttccccccgttccggcgatagtggaccacatgttagaatacgagaaagactaggggttatttgcaggggctacgactcacgtgaatagttctccaaggatatactttaaatgaatcagttgacaacaagctacgggccctgacacaaagttgttttccttttcccttttgatttttgttttaataatttgccaaaaaacttctaaaagtcacaactagctattccctaacccaaaaatagtgaaaccaattttgtagtgctctttgtggctagatctacgggataaaaataggaaattgtgtttttggaatacttttatatgcatagtttacatttaaactagaaattgcatatttcttggaaatagaaagaaaaataggagaacacctggaaaatgcttagaaacttttgtgtagaacccttagttgctttgtcacttgtgttatggagtaaataggaatagtgaaataaat

SEQ ID NO: 125368 - DNA, 1004 bp, Zea Mays
ttgaaatacagtcataaattcctcaaaatgaagccagaagttctcaaacctaaatatcttaggcctggggaccttagacttgaaagaaatcagacaaggaacatgatccgagaaatccctaggtagcgtctttgcgtgggtgtcagggtaaaaaaccgaccattcttgcgagatgaaaaaccagtcaagtctctgtaggaggggctccctttgcctgttcgaccaggtaaaggaaagcccatggagggggatttccagcaggtcgagcgcactaatggcctcattaaatttcaacatcagattaatatccccccccccccgcaacgtttctgtttttaggcctacgaatgaggttgaagtccccaacaatcagccatagcttttccgagggcatgttgatattagagaaccagttaagaaatttgattttcccatgcggagtacagggcgcgtaaatattagtgacaatccaggattcattggacgaattagcaaagaattcaaccgaaagggcataatcattctgaaaaatcacagtgcccaccaacttagagctattccaaacagtaatgaagccccctgaatttcccaccgagggaacaaaagcgaacgtatccaaagaattgggacagaattttctaaggtcggccctgtcaaaaaattccttcttagtctcctgcaagcaaacaatatcacatctggagtccctaatcgcgcaacgagtaccattccctttaacgaccgagttgatccctcgaacattaaaacttaaaacggaccaatcagaaaaagtagcagagttgtaactattcatcgtgggaatgatctggtttgtcaacgaaaagaaacccaaacccatcagcagggtgggtgaaatagtgtttgttagaaccaaacatagcgcagccagaaatcacaaagtttgttgccacaacaactagccaaaagcgccagggccgaaacagccaaaaagcctggcgaagggaagtcctgcaaaatcccca

SEQ ID NO: 125369 - DNA, 502 bp, Zea Mays
aacaaagatgaagatggtttgtagggctacaactttgctgcagagcattggttgtgttaccatggaaaattgggaggaaattggactcaaagttgatctgtgaggagctctgaatcgcagttccgatggtacagtgtcccgatcaggtcgccagctctgtccctcgccgccgacgagccacgcgtggattcgtgctttcgccgccgtgattcgtgcttggatcggttgtatagcgcttggggttgagtaaatatcatcgtcgtggatatactccggccactaaactactccgaccaccgtaccaagctagtcacagatgcttcggatgtgttcgccggagacaaccacctcacggccttgcgccacgtgcctgggcacatttaccgcatcgctgtgactcgcttaagccatccgatcatcaccggggagcccgccacggtattctccacaaatccactgcgccagtatcctcccattcctccgaccgccatgcgtcttcgtc

SEQ ID NO: 125370 - DNA, 546 bp, Zea Mays
agagagtcgggtagaaactcttgattttatttcacttatccccttaaaagacccctcaagagaccctcatttcattgggttgtacatgcccgtagaagttagaatctacgctagatgttgcatgtgtagcacacatgtgtttgctttgataaggcacacaactagtcccatccgtagattccgttcgaataatatctagaatatcatatatacacacaatagtatatagctcgtgctaacactacgatgagggggggagagggattgatggcggcgacatcgacacaggtaggagaggggatgacaggaatgcgggtgagggagaggccggggacgatggagtcacgagtgagggagagagatgagggatgatctaaataatattgtctatttaatttgagtgagtaagggagaggccgttggttttgatgatgtgttaaatccgagtgtagtttgtttgatgaatttagtgtaggttttgggcgtgagagttatttggttgggtgagttttgtaaagtttagacggatggataatttaatataat

SEQ ID NO: 125371 - DNA, 415 bp, Zea Mays
cgagagacacgtcgagctcggtgagagaggcagtggaagaagaggaggaaaaggggaaatccgactcgtcgaagacgatgtgatgggagatgaggactctgtgggaggagagatcaagacaccggtaccccttatggtcgggggagtagctgaggaagacacaatgagtggctcggggcgctaatttatgaggggcagtggaagcgagaatagggtagcaagcacacccgaagacacgaagatgatcataggaggggtggatgccaaaaagagcgaagtaaggagtggggtgggcaaccgccttggttggcaaacagatgagaaggtaggtggcaatggtgagggcctcagcccagtagtgaggaggaagggaagcctgaaagagcagggagcgcatgacatcgttcgttgtgcg

SEQ ID NO: 125372 - DNA, 449 bp, Zea Mays
ggcataccttctgtgttttgatgaagacggcgacgtaggcgcaaatctctggtggccgcttcatcataattaccttcttcatcaaacaccgcatcatcgggaagacgtggacgaggaggtggtggtggaggtgcttgttgttgcgtctccaacacagcaagtctgtcgatgatctgagacaatcgtcgatccagcctctcgtaagtcttgccaaggttcatgtcaatgaaggcatcatgcactgacttgtggaccatctcctccatttgctccttcaggagcttgttgtttgcctcaagatcttggcggctaacacattcatcgaagtcagtagggattcttgcttcttcgtcgtcgcctgccatcgaaacacaaaaacaggaaacaaacggtgatggttatccctaataatttcactacacgctcctctcaggtggaacacaggaaca

SEQ ID NO: 125373 - DNA, 472 bp, Zea Mays
ggtgccataggtgaaggcgctcaccacgtcggcgtccgtggcatcgggaagttcgtttctcttctgggagaatctccggatgtagtctcggaggctttccccgctcttctggatgcatctcttgaggtcccacgaactccccgggcgcttgtaggtgccttggaaatttccaacgaaggcttttttgaggtcaacccagtcgtggattgttccttccggcagatgctcaagccaagctcttgcccccttttgcgaggtggacggggaggaattggatgacgaggcaatcgtccttgatcctcgccatgcagcatgcaaggcagtagtcttccaaccatacgctaggatttgatgacccgtcgtatttggagatgttcgccggcgccctcacctttgccgagaactgagccttgcggatagcacgtctgaaggcgcttggccctggcccaggcgggctggggctacgctcgcg

SEQ ID NO: 125374 - DNA, 408 bp, Zea Mays
ggcggagaatatgattgctaaaactgccgagtgaccgatcccttgaaaaccctagaatacattgcatccgattcgatttctttttaaagaagaagatccaaaccccttatctgatattccgaattcccaatccaagccggagttggtatcctcaattgcttcgctgcttctcggtgcgcgtcgagcggatcgatcaagcgatggatcaccgggacctgcagggcgtggcgctgttgcccgacggcgtgctagcggacgtgctctgccgcgtccggacccggggcctcgccgcgtgcaggtgcgtctgcaaggcgtggctcgtcgtgtcgtcgacgaccgccacctgctgcgggcggatctcctccctttgtcgatctcctccctttgtcggtagatgggctctcttca

SEQ ID NO: 125375 - DNA, 374 bp, Zea Mays
gacagcgttcaaacgcgatcaaacacaggcgtggggtgcaacaaggagacccgctatcccccttccttttcattttagcaatggacccattacatcgaatgattgagaaagctgctgacaagggactgcttggacaggttctgcctagaggggctaagcttcgatgctccctctacgcggatgatgcgggagtgttcattaaagctgacaaatcggacttggaggtgctgaaagagattctcaatgcgttcgagggatgttcagggctaaagatcaactatgacaaaacagaaattttcccaattcggtacccaacatcatcatggccggcacttaaggaggtgtttctaggcaaatactctaaccttcccgag

SEQ ID NO: 125376 - DNA, 388 bp, Zea Mays
actcggcctggggcagcagccgagcgctagggttgagaccatggcggcgatgctcgagtaggagagggcgctcgacgcaggggagatggccgacggctccatggatgcctggcggagaagaggacgcgtggggaaggggatctggcgccaggaacaggaagcacgggtgcgcgcgagcagtgaggaagagagaggagcgccagtgcagagaaggggctagcatcgccgagctagtggaaggtcggggcaccacggaggcgggctggaagacgagcaaaggggaggcgcggtccagcagagaagataaaaccagagagcagacatgtacgatgagggagaaggctccattggcttctattgggataaggaagacaaaagaaaataaaac

SEQ ID NO: 125377 - DNA, 639 bp, Zea Mays
gactctagaagagcaacaattgtatgctatttggctaaactattgttcccaatatctgggttcacatgcctcctactgcttgtctacgttttattctttaagaagaagacttcaagaagagcacatctaccgcaactttcttttggtgagcattttgtgaaagttacttacaatgatctagcccaagcaacaggcggtttctcagaatccaacttgattggaagaggaagctatggatcggtttacagtgggaaattgatggaaattaagattgaagtggctgtcaaggtttttgaccttgagatgcaaggagcggagacaagcttcttggcagagtgtgaagcgctaagaagtattcatcatcgaaatcttgtttccatcgtaactgcatgctcaagtatagatatgacaggcaattctttcaaggctttaatttatgagctcatgcctaatgggaacctggataaatggatacatcccaaaggtgacgagacagttccaaagcgtctaagcttaactcaaagaattgcagttgtcgtcaatgtagctgatgcattggattacttacaccatgactgtggaaggcccactgtccattgtgacttgaagccgagcaacatccttctcgatgacgatatg

SEQ ID NO: 125378 - DNA, 464 bp, Zea Mays
ggttaattcggtcggtggtaaagtgcaagcagataagatatgctcaaatgtaagggtggaaataaggggaatagggttccccagcgacctaatagtaatagacacccctggggtagatgtcattctagggatgaattggttaatgaagtattaagcgaatgttagctgtgacaagaggactgtaacattgaagtccccgcccggagaggaggtagtggctgagctaagaatgcctaaaacagcgaaaggtgattgtgaccagatttcaattgatggcaaggaggccaacccgctcgaggctatcagggatgtgtcgaactttccagatgtgtttctcgaggaattaacgagcatgccacccgagagaaaagtcgaatttgccatagagcttatccctggcaccgcccccatttctaaaagagcctatcgagtgtctgggccagaattggtggaactcaagaaac

SEQ ID NO: 125379 - DNA, 475 bp, Zea Mays
gacgaacggtggctcaggcgagcgggagcggacaaccggcagcggtaggcacgacgagcaggcgtagacgcgtggctcaggtgcgtggcttggacacgcaggagctgacgggcggcggcaaagggagactagtggcgcgatgggcggcgacggcatggagaactggatgcgatgggagagagaaagggagaaaggagaagagaagccgaggcatggttttcttaaatccaataagaacgtcagctaggggagggcttgtaacaccccatgtgttacttagggcttctactcagcacctcactaaaaccccatttttcatgtgggttacttgagcaaagacaccaaacttgagagccaagatcctaatttagtaataatcatcttgggagacctatctaaaccataccatgcaattcaaagagggaaggtgaccaaaatctaaggcataccacccttgtgcatatgtaacacaaac

SEQ ID NO: 125380 - DNA, 701 bp, Zea Mays
agagaaaatggttggaattaatcaaagactacgatttagaagtgcattaccatccgggcaaggccaatgcggtagcagatgccttaagtcggaaggcccagtgcaactgtgtaactatggactccaagatcgccactctgtgtgacgaattatgcaagttgaacgtggaagttgtttccttagagaccctgaattatatctctatggagcccactttgcatgagcagataatcatggcccagattggtgacaaaggtgttcaagtcatcaaagaaatgctcgaacagaaggtggataagtacaaatgcttccgttaggaccgcaagggaattctatggtttggagaccgattggttgttcctaagaattccgaactcaggaagaaagtattggacgaagctcatctttccaaattttccatgcaccccagcagtaacaagatgtatcatgatcttagatctttgtattggtggaccaggatgaagagggaaattgctaagtatatatctaaatgcgacactttccaaagagtcaaggccagtcatttgaaggtagcaggtaccttacagccccttcccataccatcttggaaatgggaggatatttgcatggattttattgtggggttgcccaatacctcccggcaccacgattctatttgggtaattgtggatagattaaccaagacagctcatttcttg

SEQ ID NO: 125381 - DNA, 505 bp, Zea Mays
ccgccgcaaaaaattgtacgtcatgtacggcgggagctgggagctgacctcccgcaggaacgtcaagtccttacgccatgaggtcctatcggtaactccaggggtcccgaaggctgcccccccaccaacgatggaggagcaccaccatctccttcggggcacccgactgccctgacaacatggcgggggccgacgtactgccgctcatcaccgctcctgtcatcgccaacatgcgactacaccatgtgctgattgatggcggagcaggcctcaacgtcatcagccatgctgggtttaagcagttgcaaatcccgggatcctgtctgggaccctcacgcccgttcttcggagtgggcccatagccggtgtatcccctggggagcatcgcactcccggttacattcgaaactgaggagaacttccgcacggagaacgtcgtctttgacgtggcggaagtcaacctccccttcaacgccatcattggcaggccggccctgtaccgatt

SEQ ID NO: 125382 - DNA, 888 bp, Zea Mays
ggttagggtagtgggtcgacagagggagtgtctgtgacggcgtcccacggtggcgacatagtgttccggggttctggctgcggtagagttccatcgggcgggtcgatgagcatcgcaacatgtaagagaactcaaaacactctcaagcccgaccacaattacctccgagagctctggccacggtgacgcggatgaccgatttgggggaaaacggaaattcacgagctatggtggatgatcgggagaggggagtggtgcgctgatttcataacgagatagtggagcaggtagggccttcgatttatagtgatccgctacagtggttccgaattttggaggagagtgagactcgtttccccggcggaatgattaccgagacccactgtggagctcatgcactcaccggtcgacggtcacgactcaggggaaaaccacgacaccacgatgaatcaggcgactacatgtctttcatagggaacacgacgaacaccagcgatgatatttcaactgaccgcgtgggcaagtgggcacggcggtgatccagctcagggatgttcacctcacccaggatcttttcatccaccaagttatccactccagacaatgcacgaatcttaccgatgacgtggatcacagcgcggagatcaccggcgacgggtgcactgcacctgcgatcttctttagacaactgtaccttggcaatcttattcagttcatctgatagagcaacatcagggcactttttctttgattttcgtgtgatgagttgctaatccgactgcatcaaagttattgtcctacatacgtgcgttaacttcattaaaaggttcttgattggatacttactagattaggcacaatttggtcccaaagttagtcggacatcac

SEQ ID NO: 125383 - DNA, 345 bp, Zea Mays
cgcaagcgcaacgccgtataaagattgagcaatgctcagcagcatcggccggcactaaccacatatccaataatgcagcaggcgcgcgatctcgatatgattctcctctacttttgcatgcatgcacgcacatttgctcaagtacgcacatacgttgtagtaggtgcacgcgcttggtgtcgtcgcccatccatgcatgcactgcacacgcaccaatgtctcccctcttctttaatttatacgtatacatactattaactatatctctagctttgagctaaacaaaattcagtttacaacgaattttgtaggattaagatctgccctatttggaaagcaaaaaac

SEQ ID NO: 125384 - DNA, 472 bp, Zea Mays
gtttctggagggaatatgccaagtagaaattcccccgatgccaaggctactcactgctattgccggaagcggatcacatcagacgagagtgtcatctctgtagcttttcaaacatcagttttgccttgtagtgtataaataaatttattttttgtaacgtcgtacgtcgtgtaatattatttctcttggcgtataaatgaattttttcctacatgtgatatttccaagagttttactctaaaattgttaatcgtagaaacatttttctacatcttttcactctccaatggagaatcgttcttgtttattgggggggggggggtgctgggcttgcttgaagtgagctaatatttgtagttgctatatgttaagatcacctattatactaactacttcgctggagcagatctacctctaacctgaatcgtttgattacaaattgtaatgaagttattttggtcattgataaatt

SEQ ID NO: 125385 - DNA, 523 bp, Zea Mays
ctctctcccttcgcaaattgaccaaagaacagatttcgcctttcatcgataggtttgctgaccgcctgctaagctggaaagcagaccttatgacaagggacgggagaaaagttatggtgcagcatgtgcttacaggcatatttggcaatggccattgatattcctccttgggctttacatgctattaacaagatcagaaggggatttctatggagaggtcgcaaagatgccaagggtggacattgcttgatagcctggggaagggtatgtcggcctctagatttaggacagacaagtggctcttgggtcagagagtgagtggtctggctcataggttgtttgcaattttaccaaaaagaattgtaaacaatagatctgtgctagaggctttaaccaacagaaaatggatctctgacatcaaaggggccctttcagttggagccatagtggactacttgcagctatgggattttctatcagaagtggtgctacaacctgaagtagaggataaacatattttcag

SEQ ID NO: 125386 - DNA, 467 bp, Zea Mays
tcttgaggtacatgttccttatcttgaatagggggtcacaccatttttttgaagaagatggttgatcttgtgttggtaccgattgacacatagtcaagcaggcccaaacgctagggaaagagggtattcaggtgctcaacaaaacagtaggcagggaaatgtagcgtcttgttaagcatgtcccatcaatgtacagtgcgggggtatttataggtaaccaagtgggtgggtgtgcccttctaagtacaattatgcaaccagttacctgctacaagcccagaatattccccccaacggggtcattacaacgtggttaagtacagcgtgatcaaatacacagtaaactttaccccagagaggggcttacaaatgggaccaaatgacagccgggcgcggcatgggccccgccattgggcggtgcgatcctcgcccgtgcgttgcacccttcgccctgaggtgctgggtct

SEQ ID NO: 125387 - DNA, 622 bp, Zea Mays
gaatatgatttggaaactcttaggtttggagtggagggtccatgacaaagagctaatgctagtgctagccaaaaaaaaaaagcaacaagtacgaattggctaccaggtgcacggcattatttgagtggacgaccagcatgagctagcgctaacgagaagcaacagtacggagctctgcacctggtagtaaagcagtaaccgtacagcagcaacaggtgagggtgcggaaaaagacgtgggtggcggcgcccacccacgccatccagccggccaccatctctctctaggtcccggcgggggcaactggtgtcatgtgtggcccagggtgggggcgggcgtgggagcggcgcacccgacatgcgatatggttcgcttcggccgataccacagccatcccattcgagaaggatacataccatcgttcattttttttagataatgggaaaagatgtcccgacctacatccgaaacggatgacggtcacacaaatccacaaaacaaataaatccattgccacaggcggcacaaacccaagcgcagttgggagagcaaaacataaaggctacaacttagatagtaatcctattaccaaattgccacccctgatgagcgaagatttgca

SEQ ID NO: 125388 - DNA, 1385 bp, Zea Mays
agaaattgaatcttctcttgattcccttgcggaccgtacacacatgtaagccaccaaggagggctggtgcttgaatgaaagttcacagagacgctatgaccgtccaccctgctactagcacaaataccaatgctatttttccaagccaccaagatgccaccactagcaccaacagatggtaggaaaacaaaattgtcaaaagcaggaccaagcatccgcaatacaaggaaccgagaaatatccaccattttagtctcttgaagacaaaccacatcaactcgagcagaatccaccaaagtacgaacagcatcctgtctagcagacccattaagacctcgcacgttccaaataagaaattttgaaggatccataagagatgaaaagagaaacgactaccagggagggaccctacaaatcagcagattggtccgccctgcagcagctccaaaggcctagaccagccgaataacgctgccatgggccgtgacctgtacctcagaaagccctttgctgaaaactctggcatactcatcaaggtcttctggcctaatagtcacagcctcatcagccttcacaataccaagttccttcaaaatacgtttcttgccctgtgtggccggtggaggagtaggcagcctctccacacctgcaccagcgacccttctactgcgtcggggtatcacctcagtgactgaagccttgccctgtcgcggccttctgactggcgccctcagaatcccaccagctggtctggtcagcttatcgatgaactcatttgcacccgaaggggggggaggaggggacggggacgcgccaagcaactgactgggttggctatccttcttcctcctctgtcgaaagtaagtaatgatggggcctctccgagataggcgactcgacgttcgcgcatccaccaaggctgacatctgccctcccatattgacagtggcccgagacggagatcccaggggtgacccctgaattgcctgctccttctcacaaccacccaaagagcaacaatctgccggagccctcaagggtgaagagggggaagatggaactggcaggggggagtgaactgggcaaccaccggacagccccgacgccccagcctccaccatgcagtcctgctcatgactcctgccgaaaccgtccacattatcttcagacgcctcaatcaaagcctcaatatttaattccttgacagcagggacaagctcctcaaaattagaagaaccagataaagatgtctcctttgaaacctcctgttccagcacttcttgtgaaatagccacgtggcggggacagattggcagcggacctagtctctcatgcacggggcgccgaacggccaacgcttcggcagggcctccctgccctgccgg

SEQ ID NO: 125389 - DNA, 435 bp, Zea Mays
tttcaaaccaaacattctaacttatgtctcagtttataaaaaatggattatcagtttattaaaaaaccaagaagttaatctctcctagctaaaagttaaaaacaagtggattgatttcaaacatggacgtagcaagttgtttctgcttgtttgctactttatcctaaactttctagaaatctattgtttcatggacaaggagagtatgaacgaataggtttcgtagatgatgatgtctaaattaattagctagcctgaaatgacctaatccataggttgggactgcgaagatctgcacaatatcgaaccctttcgcgtgtccccaaatgcctccggtgcatggcaggtgatcgtcgattcgtcggagtgacatcacactgcgcaaaatcgggcaaaacatctctgtcgaccgtggccttctatatccacccaccc

SEQ ID NO: 125390 - DNA, 486 bp, Zea Mays
ctccccacacttcactcactcaccaccacataagttcaccgtcgatcagcctcacccatgcccgcgccaccgcctgccatcgtcgccatggctcgaccattgcggccagcctggtcatgtccacccccgcctaagccaaggccaccatcgtgctccctacacctcaccgcatcttgcccaccaactccctgcccttccactgtaccacagaggcacaccaccacgcaccagtgagctctcctccaccggtgatcgtgggtaggccatcctacgccttacccatccaattgaagctcgtagcaagctccaccaaggtcctattaatctcccctacccctcaatcgaagcgctatcgcccttagccggctgaattgctcgtcgttagcgatctagtccctccgcttgcgctcatggctagaacaactctggccacctccacgcacacctcgaccactgacatgatagctaggacctctcggacctcac

SEQ ID NO: 125391 - DNA, 438 bp, Zea Mays
ttttcttctttctgtaccgtgcaaaggaatggaacaacttagaatttgcatctccttccttgagccaagaaattcttgatctaaggcgggcaatggtacgcttggtagaggccaaagccagagcgagcttcttcaatttacttaacaaccacctttccaacacagacagaatacgaccatcctgcgcaatctcaagttgatggatcaaatctctagcaagatgcagttgagtctcaatgtgccccaccttcttgctgctccatccttgaagggctttggctgtccctttaagttttaaatcaaaagtggagaaagggcagtggccaacaggaaccgaattccaggcgttgtgcaccacttcgtggaacccttcaattttcgtccagaaggattcaaaatggaagcgccttttaacacctttgcaaactttgagaccca

SEQ ID NO: 125392 - DNA, 441 bp, Zea Mays
ccgtcgtacacatatccaaaacaaataacttaaatggagataaaaagctcgaggactcatataagtcatacagggcacaaaagtgtactgtcctaaaagtttactgaagttctaatattctgaaaactcaagaagcaaaactccacctacaggaaagatatttgattcacttctatatggcctgaagatggaaaggagttagaggaggagaacgtgtgtaccggcgaggagtagccaccgtgatagcatggacgccggtcaggcggtgaagaagccactgtcagatctgcaaaatcgaagtagttacctactaaaagctatactggaccagaactaaaattacaacccagcaatgcaccaatgtgcatcatcagacctgtagtgatgcaaataacagggaaaattcactacaaacaaatccttggctactgctcctaatca

SEQ ID NO: 125393 - DNA, 824 bp, Zea Mays
tctcggagtaataattctaaggcacagggaacaacgcataggacggcgggtttaaaatctagaaagtccgaggactctttaacaaaagtgacccgcgaaggggtatcacgaatccacaaccgtcagatctaactcaacgcgccagattagatcacactgaggtaatagactccagcccttagatctaaatcccacggttctcactatctcaaccctgcatctaatcatgaccgctaggcatgaaatcaacggctccagattcatcttctacccagcggacacaacccggcggcgcagaccgacccacggcggacgcccaccggcaaagtaccatccagcgcccgagacgaatttagcgacgggggtatgctggtgtgctaatctcggtcgttcgctgcaagatcaatgacggacaacgcttctcctacctcgcgcacctaaacagacggtagcttcgcctgatccacggcgaacaccaccggtgaccgctcaccgatgaattgaagccccaaacacacatttcgtatatagcacaaggatccgcgaaccaaagtgaatacatgcgagaggtttgtaccagaaatcgtagggcgaaattcactggctctgggaaggtgaggatgcgcgacggccctgctcgacggtgatccaattctccacgacgacgcccgatttctccaccggtgagaatcaaggaggtgccaaactccgacaccaattgttccccaccgccaatcgggacccggagtcgctatggaaggcacccgagatcggcggcggcggacctcgcagtcttggatggcgcaggcggcagcgatttgggt

SEQ ID NO: 125394 - DNA, 468 bp, Zea Mays
gggctcccccgctctgcgccggcgatgcgccgccgtattgggcgggctctgtcgtggacctgcttggggaaagaagagaaggccctgtccgtctatttcctgatgaacggcttggatcgggccaacgattcaatcaccgggtgatcgattctgaaccgtaggatacgatcctatggatccgattggatctcacctatttaaatcatcaccgttgatccttgtgttgactgtcgagattagaatcgcgtaccccttcgatttatgaaagcgatcgggccgttgatcatgaatcgtgcgggtcagggtggatcaggacagttttaaatccgcaccgttgatcgctaatcaaacggctatagtatcgtaccgcttcactttagataggatctaatctgggccctcggttttggatcgagcggccagtagtattccataccccttcgcccatagcactttgcataagaaccc

SEQ ID NO: 125395 - DNA, 972 bp, Zea Mays
gagaaacgcaacagaataccgtattgcgcgctgagatcccgattcaccgcaacaacctcgtcgatccggccggaaccaaactgctgcttcccctacgcatataagtgaatgtctgtaaccccattgtcatgcacggtcgatagaatccgcgggaatgcgagaacctgagagcgcgtaacgaagaagagagagaagagattgggggatcactgcttggtgttccttctgcgcgcgcagacggatctgtgggcttcatcgggtccccgggaatgtactcatagcttcgggaggaaggattggacctgggtgtgccctgagatgctcatcgtcgtgagactgtcgccgccggtagctccacgccgtgggcagctccactgccccgccatgtacggtaagaccagtgatctcaagttcaccatagcctctttttcgggtagagacttctgggataaagtatcgcgctccaggaggctggtctggtggggctcatcggtcgccgccgtgggagttttggcgccgccgcctgtgctgactgggggaggaagaaggtcttgtgaccgttgatctgctaggccaccaacggggtggatttaatcaggtgtatgctagttgccgtgtgatccaggccgttgaatccctggcgagcagttcggattagaccaaggcatgataaagcttgggccatttgatctttatccaacggtagagatcgcgtaccggttcgtgatcggttatgggcccttagatcgtgatcggacggatgtgaatggggcttagtgtttaaaaatctggacggtcgatctttgatcctacggttagcgtgtcctaccgcttgataagtgatggcgatctaatctggaccctcggattaaaatccaacggctgagatatgagaaaaccccttcggctgacaactttgctaaacagtccccgtgcttttacgaaatagaacccgccgtccatgcgggtgtg

SEQ ID NO: 125396 - DNA, 601 bp, Zea Mays
ttcagttggtggaagaagccaaactgatagattttgccctagtgcaagagttcaaataagggggatagagttctccgcagatctaatagttatgggtaactaggatacaactatagatgtcatcctagggatgaattggctaaccaagtaccaagctagtcttagccgtgacaagagaacagtgaagttagtgtccctattaggataagaagtgttagtagagttggtcttgtctagaccaagggaaggaagctgtcaccaagtcaccgcccatattgaggagattaaaccatcagaggctatcaatgtagtatcagaattcccagaggtgtttcccgaggagttaccagatatgccacctgaaaaggaaggttgaattcgccatagagcttataccaggcaccgctcctatttccaagagagcctatcgagtgtccggaccagaattggtggaactcaagaagcagattgatgagttgtcaaagaaaggctacatcagaccgagtacctcgccttgggcagccccaatgctatttgtggagaagaaggacggaacagaggatgtgcattgactatagatccttgaatgaagttactatca

SEQ ID NO: 125397 - DNA, 486 bp, Zea Mays
tagctcgttgccgggaaatgattaaattatttcgatcatcggacagtctaccgctcagccagtgtaagcggtatggcggttcgccttttcccctgcaacactatataaacaaacgggttggtgaggagttaccacagcattcattgttatcgcgtcattgtgctgttaaaaattttaaccatagccgaagcttccagcgttgcatttttaagcaagcgcttcatcatctaagataagcttcgtcttaaagaacctaaacacacaaatggccagggtaagatccacttctagggtgtctcgtgaaggagaggagaccaaaattgccgaaacagcaccaatatcagaagtgatgaagcgatcgggtctggttgtgttagaggaagttactgtcgaagatgcctctaatgccgaagctgaacatattgtagctggaggcgaaagtgacaatgaaagtgaagataacagtattttgagcctaacaaagcc

SEQ ID NO: 125398 - DNA, 363 bp, Zea Mays
gctgaatatgaggccctcttattcggcttggaacttttaaattgtatgggagtaaaacatgtgaaggcattgggtgattctcagctggttgtccaacaagtgttagaagaatatcaatgctttgatggtactctgaatagttaccttgaaaaatgttggagcataatccattcttttgacgaattcagtattcggcatatttctagaggtgagaatcatagagctaacaatttggcacaagatgcatcaggttatcggataaagcgagggagatttcacaacaccgaaaatctgataaccggtgtagggccaattccccaggtcatggaccgtccgcgtcagggcaccggaccgtccggggat

SEQ ID NO: 125399 - DNA, 541 bp, Zea Mays
tttagggttactgtgtaaattttgtagagttatgttttgtgagaaagtttggtgaaccaaggttggcctgtttgacactgtgggttgggagaaaattttgctccaaatcgagctatcagtcaagggagggttcagtcggattcagtagtttcagtgttttgggtcatgaactatgaataggtcttcgcccactgccgtgttccagtggtttctggcctagttgcagataagggaaggcgtatgctggggaggtagcaaagggtaggtttgacgttcatgtgcctgggtctggaggcttgatattatccactatcggtgacctctctgcctatttctttgctgtcgtctgtgccattgttcaattgtggatatgaacttgcgtggtacctatgcatggacgccgcgtgaccatgctcaagccactgctgacagcgcaccaccttattccttctgtgtctagcctcaccggaaccggtgcccgccagtctccttatctctatgtcccgcgatctctgagtttggcaaaattcgtcgtgtccat

SEQ ID NO: 125400 - DNA, 350 bp, Zea Mays
caaaatggctagtaaacagcacaggaatgtgtgtaaatgactgaactgcacaagaatgggtgtaaacgacaaagagttttccaaaaccttgtgcttagtaagcatgagccaatcagtgattgaggccttggcatggcgaaacctaatagctgggtcctaggtatggttgagcttgagatcctcgacaacctcatgcaacccctccccaagaacagatcctaggccgcacatgcccctcaaagtcggcggtgagcgtctctcgtgcctcgaccgaaagcgcttgctccaccgccatgagctccatccgccatgcacctctgatactgtcgccaacaccatcacgatcttca

SEQ ID NO: 125401 - DNA, 686 bp, Zea Mays
ctttggaaggtcgccgaccgactacgtgttcgtgctagtgccgccaggggcgtcgaggtacggtgccgagatagaagtgggttatggatgacgacgacaacaacagtcggtaccttagaaccatcaacgacgagctcgttgagttagggcagcttcccaatgacgtcgacaacatgggagatgctgctgctgccttgtttggtgtcgatagcactcgtaatgtcgggtcggtaagtgatgttgctggctctaatgaacttgattcattgacttcttctagcactggtaagcgtcgatctactgtttgggatgacttcactaaagtcacagaaaacatcttatgctaaaacatctcttgccatataagtctgtgttttctgtgttcattaatacacactatggctatcctctactgaatgaacaacattggtatgtagctgaaaaggttttggagttccttgagttgttttatgaatcaactgttgtttgtctggtgtttattaccccaccagtcctttggtaatccatcacatacttgaatttgctagccacctgcatgaacatgaacatgatactaatctaagtgatgttgttgttccaatgaaagctaagttcatgaagtactggaagtctataccaatgttatattcctttgcatttgttctagaccctagagctaaaatgag

SEQ ID NO: 125402 - DNA, 311 bp, Zea Mays
aagcgctctgaccgtccgatctgatgtgggcgggggaggttagatcagtacatgaggcattcctttggccattgattgatggatccacaggtgagattaaaaccagggtagctgtgggctcgggctgttctgggccattgagattggatcagacgactgaaactcattcataccctttcgcctgggtggtttttcagaagagcccctgaagttaattaaaatcaaccctccgtccacctcgtgttagggctgagtctggtatattttgtgaattaaacctcgagcttcttagtaaatgccgcgcagtccag

SEQ ID NO: 125403 - DNA, 1199 bp, Zea Mays
atcgtatcataatttcagtgtgctaaacaaaaatcgcagtatatttttttaggatagtaaacaaggtataatttcgttggcatttccacaaatgttagtttattgtgaattgtttggaacatgtattattgaccattttatcagttcaccacgtattgtttttaatccacttgagtgtcttttgagttcaacagaacggtcatgatattaagcattaacagccacatgaattaagccgataactcaataatttaggtgtttaaccaaaaaaacacattccataatcaaatcttatggtattatttcatccttcacctcatattattgtctgcgtagagcatgactgaaaataagacccttcatggttacattcttctaattaggccaaagccaaaacttaaattttggaccaatatcattatatgactaatttattgaattccagagccatatgagcatttcctcattgttcccctttccttctctcttcccctgtcttaatttaattattgcaagggctacctgaatagcaaccgtcaaagaatgacgaggtaggacacaccagcaacagctctcatcttgtgtgatttattggagatctgtggaggcaacaacagactcacatacctacccaaccccaacagcacagactccaaagagtaacaataatggacttaactacaaccaacaacatgacaggcaaaaacatgcgtatattgcctgaaggttgcaatatatttctcaaaaatattgattgtaattatgttacaatgcccgaattagtgtcaacaataggtcatccacaaatatcacacagcagagcatgcaactactatgaatcaagggaattcttagtatgacaaataaaagtagcagcagcttatatagctatctgtttacattaattaattggcaaattcaaataccaagtggaatttttgtataggtttatttaaggtttcaatgcatatctataggcaaacattatgcagcatgaacaaaactgtaaccacagcaattcatctaaagctgaagcatgcaacatggtaaaagaccattccctgaaacaaagtggtagtacttgtctgaattctccaacatatatacacagagagaactaccttggaaattaactggtgaatccagtttcagcagacaacagaaacatttcatttacagctgcctgcaatgaattcttg

SEQ ID NO: 125404 - DNA, 492 bp, Zea Mays
cgcatctgttggcgtcaaccccgcttggactataaagacttccgggatctcgtcatcgagggcgtgtcgaggtttctagccacctccgtccaagaaaccatgagagaagagagagagagcttcggtgatcaccgcgggcgtgcctcgtctcagtcaccggtcccacccgggaaacctaccctggaggagggtctgtggtagtacaaggtgtgtgggagcgtgtgtgggcgtctgcgcgactgggcctcgaggaattcctcaccggcgtgcgtccgctccgccgagccgtgaacctgcgcggacgtcgagcagcccaaggtaagaaggcacccctagaacccacctcggtattttatatatgtagcatcgtcgaatcaagtcggttagacttcaggcgggtgcgggggcgattgtgtggtcggccacggtgccgccatggggccgcagagcgtcgaaattaggcacgttggggttgctcgcgagcggcgttgg

SEQ ID NO: 125405 - DNA, 337 bp, Zea Mays
cgcgaagactatccgtgcagaagtcgcctaagggtgcagccggactagcacaacaagtgcgaaaaatcaaagtctaccgcgaagaccatccgtgcagaagtcgcctaagggtgcagccggactagcacaacaagtgtgaaaaaccgaagtataccgcggagactatccgggcagaggtcgcctatgggtgcagccgggctagcgcaataagtgcgaagaatcgactatccgcgcaacagtccgcgcaaagaccgactacacgcgcaccagtccagcataacaattacacctgaccaagtacgtaacgccttcgcgagcatagccgaatgtgcgaggg

SEQ ID NO: 125406 - DNA, 278 bp, Zea Mays
gcttctttgaccatgctacgctcggtgacgtatttgttctaccttcctttgacattcctatggcaaatgattcggaaaataaaaactcctagcagctaacaatcacgaatcaaacaaaacaaccgtatcgaaatatatacatgcatgtgggatgacaggatgtcgttgaccggcagctgtttattatttaatttgtcttctcgacctttgctggcatagcaacgagttgtgatttgttttggagccataaatatactacgtacgtacgtacatgctca

SEQ ID NO: 125407 - DNA, 468 bp, Zea Mays
gcagctataatcacttacaataaagcaatggatcctaatcttgaagtgagttgcctgatgctttcttgcatggagcccgagctgcaaatgcagtttgagacaaaccatgatgtgcatgatatgatcgtggtgctcaaggatatgttccaaacttaggctaggactgaaaggttcagtgtgtctaaagccttttaggaatgcaagctagcagaaggagcagtggttgggccacatgtaatgaagatggttggttactgtcagagtttggagaagctaggcttcccaataggccaagagttggccattgacttcattttggcatctcttctgcctagctatggaaaattcattacgaactaccatatacatagggcggagaagggccttaatgacctgtgtggcatactaaaaacatcagagggtgacataaagaaaagtgttggaagtagcggccatgtgatggcggtc

SEQ ID NO: 125408 - DNA, 868 bp, Zea Mays
cgctcctcggccacctctgtggcgtgatccgtcgtcgctgcgcaaagccatcgccgccagggtcgctctgccacgtcgccgaccgggtgccagattcacgccgtgtttgttgtgtgccggggaattcttccgccgcggagtaacctcaccgtcgttccgtgattccagggctgatccggggccagtgcggggttccgggcgttcgcgtgggtgtaacacgagagttcatgtgacagttgggtccagtactggcaccgggcgtcgacgatttctcaccggagcactcaactccgtcgtaaatccgcctggtccgcggacagctttgcgcccaccgttttctctggtaaaattcctcaccctaactctgccttgatctcctctacgtgttgcacacgctgggttgttgtttggagcactacggcgtgaggggtggcttgccggcaatggcgccgccgcccctggttactggcgccaccgtggcacggctggtgttggggggaaacaccctggtcgtccgatcctcattgaacgggatagattagatcgacgataacctttcggctctttaaatctagtccgtagaaatgtgatcggagggctacggttgttttaaattcggtccgttgatggtagatccaagcgcctagaatgcatcatggttcgtcatagccggcttttaatctgggccgtccggtttctatcctgcagccagggatccaccatacccgttcgccgtaggcattttacacaagagtccctgagaaatataagaatcaaccccgcagtccttgcgctaggagctctgtgtcttaggaaaatttatgtagaggcccctatgttttctgtaaatggtgaactcagtccagag

SEQ ID NO: 125409 - DNA, 460 bp, Zea Mays
ggatggtacaatacctcttcggttattttaatccaggtcgtgcgatcaggttcgagtggtctagattagtgggtcgcgtggtcatatctcagacgttgattccaaatccgacggtatcaaatctagcacaggttcacgcttcggtttgatataatcctggtcgtgtaactctaatccatcggctcacgatcgccaataccccttcggccatgactccttgcaaaagagaccctcgggatagtacatatgaacccgtattcataccgaagccctcgaatttaactcttaaaattgcaaactagtccctacaaattgcaaaatgatccctagagccattgttttaatatataatgaaccctaaaacttgctttatatataactaacatgctttaactccaatttgacccgttcaaattgtgttatattcataataacatttactacactgtgacgaacatta

SEQ ID NO: 125410 - DNA, 569 bp, Zea Mays
gttatagtctttgagctatagggaatggcgggttgatactaataaagttcagggtctcttctataaatcgaccgaggcaaagaggtatcgtgtattcctaccagttggatttaaatataagggcgcatattagatcctcgtcttcccaaagcggtatgagttttacaccgtcagatttaatgccaacatcctggattttaaacgaccaagattgatcctcatccctccatgccagattgatggctcataccaccccgaccaaactattatttttcccttttaatccttgccacatatcattggatcaatgatcccggcatcacctcctaccccgcgatgtcggcacggcagtgacgtgctagcccctcggcagcgctaatactggactactcgaacctttgacctaacgtgccaagcttcgatccggaagtagctacatgtagcggagagaaaagcaaagtgatgatgggtactcttatccaagatgatagcgtgtaggggcccggccttggtggcgtgcagctcccgaagtccggtgaggggctatccgcagttcgagtttcctcttg

SEQ ID NO: 125411 - DNA, 406 bp, Zea Mays
gaagtacaaaaatctaggacctcacatgagtactccctattgtctaaattttattttccagtacaaccagttagtgcaccccgtgtccgtaaacatggcgcaaggacagatggggcaaggcaaacatgtatcactccaaagtacaaatagaccaatggaactatttgtattaataatattaattatataagtggtaattctattggtctattgacaatatatcttgaaaggatcatgatgcccaagaggggtgaattgggcttttctaaaaatcaacactaattaaaacctaagcaagagcccaacctcaccccaacaactagcactaagaatataatactagaaatgcaacaaagctaagacaatacttcaaatacttgctaaacaaatacacaatgtaaagtgc

SEQ ID NO: 125412 - DNA, 393 bp, Zea Mays
gcggcggttcgccttcttcgcactcgaagaccagcgcgccagctgtatgacttgtgggaccgggcccccgtgtcatagggtggataccccggtgtgcatcgggggagacttctcgcgacgtttcgaggcaggagcgggggagtctgcctttaaagaggggttcatcccttgagtagcagccatgccttgcttctctcccactcgcgacatcctctcgcatccgagctctctgcgcccctttgccttcaaggtctctgctttgcgttgccgtagtttgccatggccttgtaagttcatcccgagcgtgcccagactgagtgagtgctcgacatggtatatcgcctgcttggatgggatgcgccggtgttcggcgaaaggatttgtgccgatgcc

SEQ ID NO: 125413 - DNA, 430 bp, Zea Mays
gttgggacaagagtctaccttatgctgagttctcatataataatagttactaggccagtctaaagatgtcaccattcgagactctagatggcagggaatgcaggactcctctatattggatcagactagaggaagatagttctttggacctgaacttattcaagaagcagaagaacaagtccgtataattcgggagaatttaagggtagctcagaccagataaaggagctacgctaacaatagaagaagaccactggagtttgaggaaggtgattatgtgtacctcaagatgtcaccacttcgtggaatgaggagattcaaagttgagggcaaattgtcccctcgctttattggaccctttttgagtttttaggcaagttggagagatggcctatcaactcgagctacctgataatctatctgatgtgta

SEQ ID NO: 125414 - DNA, 327 bp, Zea Mays
cttaagttgagacacatgaaatacattgtgcacatcagatagactatcaggtagctcgagttggtatgccatctccccaactcgcctaaagatcaagaatggtccaataaaacgaggggacaatttgcccttaactttgaatctcctcattccatgaagtggtgacaccttgaggtacacataatctccttcctcaaattccagcggtcttcttctattatcatcatagctcttttgtctggtttaagctaccctcaaattctcccgaattatacggacttgttcttctgtctcctgaataagttcaggttcaaagatctgttttcc

SEQ ID NO: 125415 - DNA, 565 bp, Zea Mays
ctaattagtatatttatctcatcctattataacaaccatgatctaatccaaaataatcagatcttaactagtttaatctagtcacaccaaccaaatctagattctatctaatatattatgatctaatctagagaaagttacttaatgctggtacaaaaaaataagaccatactcctaattcacccaagcttaaatcggtaacttagatcaactcggccatacccaacaacttgacctacatgataggttacataacctatcccacccgtctagaagcaaatgaccaaaccagattctgactaacctcattaaactcatagccatctactaaaccagctgctctacctatgtgttacatacagatgtatcttaaccaagacaccaatacgaagaagatcaacctcatcaaggaaaggataagagtcaccgtcaaggaaggtaatcgtcaaggataaaagtcaaaccagatctctagatgcatcaagatccaccatctgggatagaagtttttcttgccttaccttctcttatcctaagcttttctaaatcttacttattagctaaa

SEQ ID NO: 125416 - DNA, 560 bp, Zea Mays
tgaagaagcgactagcagccatcaataatgtgaacaagaataagaaaaagcagcaagaagtggcagcaaaaactcaccagcattagcaggcctcatatcatccacctgcctatgaagaaaaataggagtccattgtgacaaagaggatattttcaggtaccggagctccatgtgcttttagttgagtggtcaccaggacagaagttagcaaacagaacacccattggcaaataaaagataacacgagatgcaagtacctgcaaatttgacaagaagtacggaaaacccaaagctagaaccgcaaggataccctagaggcaatgcattaatagaagccacaatacgagcagggacgagcgtcgaaggatccagatcacccaggctaagcgcgacacccattgggatttcaacaccagaaacactcattgggatttcaacactagaagcacccattgggatttcagcaccagaaacacccattgggatttcagcaccagaaccactaacctccaaagtggttgggtcggctagaccaatgggcataactgagcttgttgtcc

SEQ ID NO: 125417 - DNA, 354 bp, Zea Mays
cctcgtaattacctgccttgtctacaatactttgtttcttaccatatgtttctaactcagatggtcaatacctagaagggtggtggaattgatctacctcccaatcaacacactcggaggatatttagacaaccacaacaacaacaagctgggatggatcctccaaatcctccaccagccggagctgatcccgtagttgcagctcagatgaggataatgcagtagatggcagacaccatggcagatatgcacgcacagatgcggcatgaacgccaagagatgcgccaagagcgagaggagatgccccaggagcgacgggcgcaacagcaacaagcaccactaccaccacctcca

SEQ ID NO: 125418 - DNA, 433 bp, Zea Mays
ggctaaaccaaagttttcccatgactcaggccactgacgcatggatggcgggttgattcagggataatacaaggtctcttttataaatttctcgaccgaaggggtatcctcagtcttcagccattagattagagatcgagcgcccagatcttatctgcctaactcaaaccagtatgcgatctatgccatgggatttaaatcccacggatcggattctatgcgcgcatatcacctcgcgaccaccagatctagcattgacggacacgatccaattgaacgaaggggtgcactaggttctaatcgtagccgcccatggagatcggacggcagtagcccgtcttccccacccgagtccacgcgcggtggcgctactcccccgaacgcggcagaggatggccggtgatggccatcacggttcctccatggctttccc

SEQ ID NO: 125419 - DNA, 332 bp, Zea Mays
gccgtacactctgcaaatagccatcgcgtcttggtaattcataacatggtatcgcctactgccagtgaaactcgcaggcacgatcactttaccgccaacagcgtccgcactaattagccctctgtcaacggcatcagctatcccctgcactgattcagatcgcaggtctttttgatggtcggctatgaactgtaacctggagccctcgatagttgaatacgcgtcgacaatgacctgagcacttaacctaccataacacgtgtatgggtttgactcgtgtaatctgtaatgtaaatgtcttcttacaaattcaagcattgttacatattttc

SEQ ID NO: 125420 - DNA, 408 bp, Zea Mays
ttataactaaactggaaggagagctagctgagaagatctaaaaaaagggtgccttgcagatttttgaagagctttgtataatctaattagcgaacacttgcagagtgtttggtttgataaataaagtagtcatcaacttcttactccccaatttaatgtttggtttgtggattagaatgggttgatctatcgttagtttattcctactaagctaataattagtagtaatatgatgattgagtttattccaccaaatttgtagaattgactcttaatataaacgcacttccatgtcctgatctcggatatgcatcccatatttaagataaatagctctgtggcatcacctatgagtatgacaaactgcgcatgaatacgatctgttagcaaccgaatccgcttttaaat

SEQ ID NO: 125421 - DNA, 349 bp, Zea Mays
tggaagggccacacacaaagagactcacatggaagagaagacatggaggaccacgaagaccaaagccgaggagtgcaccaccgtgactgtgggggacagatatccccgggttcactagaaggcaaagaaggcctcgcgagaggctttgggtcagttacctcgcaaggccatcccttcgtgggtcgggacagaactactggcggagtgggccgacacaagaaagaagtagacccaggcccaggcaacccgttagactcgtgcgctattcgtagcatccacccgactttcccgtgtgcgacgcccttgaatatcggggcggattagggataaatcgcaagattgtaggaag

SEQ ID NO: 125422 - DNA, 297 bp, Zea Mays
gggtatccatatgatgctcctcctaccaccaacagttctccttctaccactaaagctctaacactgacactcctcctccttaaccttttgcttatccgtactcgtatgggtatccatatgatgctcctcttaccaccaccaactctccttctaccactaaagctccctggactaacactcctccttaaccttttgcttatctgtactcggtatgggtatctatatgctcctcctccttatggattatatggtgctactcctccatatggtgcctctcatccgttctctcccccattt

SEQ ID NO: 125423 - DNA, 702 bp, Zea Mays
gtttaaagaagaaacttgctgaaatgaatgaaaatttcgaagttgcgaaggcaaaacaagaaataagtgaaatggaaacagcaagggtgcggaaaaatattgaagaacttcgggattccagagaaaagtgctacaaagtatccatggattgtgcgaagaaactaaaagatagctttgcaaaggtgggtgcatactcatcagagcaaaaatttatccgaggcaatcccgaaggagttattcaatggatcggcgaagaggtcaaagcttttgaagaaatactcagcgaccgtggggatttttgtgccttcgcgggtgcccgaggggttgtagtagttttggagaaaaccggctgtgaacatgttaaggctgcatcccagtcagatgccatcttctctgtagacgatacgaaggaaccttcaaccgaagctactttgatgagcgggaagttctattccgatgtttggatgaagggctgccgtgagatggccgatgaagctataaaaaagagtgaaaaagaatctcacgatgcccgagtggaggcaaaggaagctgaagaagctgttgaacaagcaatgattataggcatccttttaaaaacttttttgtattgttgtttgtttatagcatcgaaattcattattatgctctttattacaaccgacctttcgccaccaccggagccatatgtcacacccggttttg

SEQ ID NO: 125424 - DNA, 539 bp, Zea Mays
aaagagatccgtttatgagtgccgagttgagacaagtagccaatggctttgcttatagggtcaagaaatattctgggtatgacatcaatggataccgttttcgcacaacaaactacgaccaaagtcggcccaatcagaaaacaacgtgttctggagtctttactcccggccttgacgatgtcgattattttggacgaatcgaagaaatatatgaactcaatttttatggttccaaacctcttactccaatgatattcaaatgtcattggtttgaccctcaagtgatgagacgaatacattctaatcttgggatagtcgaaattcgacaagattccaccttaccaggagacaatatctatatcgtggcccaacaggccacacaagtgtattatctcccatatgcgtgccaaacgaaagaacatcttaagggttgggatgttgtgtataaggtatcgtcgcactggagattacctgttcctaacgatgaagattataacttagacccggacacatatgatggagagttcttccaagaagat

SEQ ID NO: 125425 - DNA, 565 bp, Zea Mays
ctatacttagaaacgtatcatctgtatttttggagctgtgtctccttccttccctgcgtgccatgagccgcatgtaacctgccatgtattcatcctctataaatatgagaggacctgcaccatagagagtaggtagcgccattcatcttaacatggtaacagagccataattttctaccaatatcgaccagctcttcttcctcctcctccaccatccctatccaccatgccgttaccattcgccttagcaagacaaactacatgctctcgcgcgcgcaactcctcccgtatctgaggagtgccaaactcatcagatttatcgatgggtctattccccagcctccccagttcgttgcgtcttccgctgcaggcgccgacctcgtccctaatccggcgtacgaccggtggtatgatcaggaccagcaactccttagcggtcttctctcctccatgaccgaggagatacttcttgatgtggtgactgcctccaccgcaaaagaagcctgggacatcttgaagcgcatgttctcttcggccatgcgcgcccgagtcgttcaggttcgca

SEQ ID NO: 125426 - DNA, 351 bp, Zea Mays
aaacccgccctgaaagcctttcctaccaaggtccttgatgctgcgtgtattccacattaccctgcgtggatttcttccagtagatgtctccccatagctgaatggatgcatttcatgaggactcctgttgcacctcttctatacaacagaccccctatgatggcatagtgagctgactgccttgcaatgcgccttgtggcagccttgtcatctggctcctctttattctttatgtatctaataattggctccctccagtcatttggatttgtctttgcctgatccactgctttgcattcctcagcgggccctgtcatgatgctcggctatcgtacctcttgaacaaagacg

SEQ ID NO: 125427 - DNA, 464 bp, Zea Mays
tggatggccacatccccagcgctgctgccattgacgacaccaagcttcgatgtcgcgtgcgctcctttaccaggcctaccgcagggaacatcttctatcccggatctctcggtacgtaacgcccactaactcctcgctcgacatccatctgaacatggagtgatggagaagatgtaagatgatcatgtgtgtgtcgctgcaaaggagactcggtacgtcggtggggagatcatggttggtcgcagccccagcaatgagcatcaacaagacctcgccgagactcccagctacctcggtatgtgacgccaaccacctcctcgctcgacacctgaataatgagatgattatgtgcgtcagtgcagagacttgtgtagatggccgcagccccaggtttgctgccaacaacgacgacgagtttctaagtctcctctttgccgagagtcaccgcgtgcgctttgcctaca

SEQ ID NO: 125428 - DNA, 815 bp, Zea Mays
cgccaacttattaaatctgttatcatttcatccacaacgcccttttgaatacaatctcgaatataacggtagcgagtgtcaatgtgtttgctcttgtcgtggtaaactgggtttttgctcaactctttggctgacttgttgtcaatcaacagactgaatttctttacttcctccttcattatatcagcaagcaaggtactcaaccacactccctaacaaacacccagagctgctgcaatatattcagcttcacaggatgacaaggcaactactttttgcttttgagaggaccatgtcactgggtttgaccccaagaaaaataaaatacctgaggtactcttcctgtgtactaaatcaccagagcaatcactgtctatgtatcctagcagagatagttcacaatttccccctttcttgagttttatcccatagttcagtgttcctgctatatacctcacaattcttttaattgctgtctagtgctctttgttaggaccttccatgaacctgctcacaagtccaacaacaaaggataagtcaggtcttgtgttcactaggtatctcagactaccaatcacactcctgtatctagtaacatccttttcagtccctttcttagcagcagtgagttttattctttgttccataggagtatcagtggggttgcaaccagtcatgtgacacagctcaagaatctttgctgcatatgaactttgacaaattaatatctcaccctccttctgtgtaacttccatgcccaagtagtaactcagcaaaccaaggtcactcatgttgaaagtgtgcatcatctgcct

SEQ ID NO: 125429 - DNA, 405 bp, Zea Mays
ataaaacatagcaaaagcctccaaaaactaaggatcatacttctaatgaggtagtaaacaccctagaagacttaaccccaccatagtgaccaaaagaaagggagtaaatcaaaaccctaagttcacacttaagagcatagggacacttaaaacaaaattgataagaaaactaaccaaatcagttaaccacatgtggaccttaacaaaagttgtagctaactaagtgcttaacaaaagttgttaaaggctaaacaccaaaaaggggtggcaaaggtccaaaccatgccacacatgtaggagaaggtatgagaaaccagaattttcctaagtccaaaatcaaccctatctcaaggacaatacatgttcattaagctacaaaccccaaaaccattagcttcaattatg

SEQ ID NO: 125430 - DNA, 726 bp, Zea Mays
tgaagataacgcactatctgcggccttcgggagccaaaaaaagaagaggctaaatagagtttttgatgctattggatttatgtaccctgactaccgctacccgcccatgggggcagaagagaaagagtggaacttttggaaaggatgttgcttcagccgcttcaagcgagcccgcgccgaagaggaaaaaggtgaaggttcttactcaccgactgcgctacattgaaccggccacagtgcctgaatttggcggtgaaacctcttcggctactgaagccaaaggacctgctcttacgcagagaattgaagatccggctgcaatgccgaaggctgacaaaattgaagaaccgagaaccgaagagacaaaaacatcagaagttctaagcccttcggcaggagttgaggcaccgaagacacaaaaagatctagaagcaacccccaagacaaaaaggatggctagtgtattagatgtggtggagacgataaaaacttcaagctctactccaggaaaaattgccaatgcttcgaaaatacaggttgaaaccgagacaaagctgaccgaagccgaagctatactgagccaggccgacgccgaagctgggcctttagtgcccgccaaggagaaatcctcggaaactggagaaaaggcagcggaagaagagggtatagaacatattttgcctgaaaaagttgccgctcctactcccgaagcgtcttccgaggacc

SEQ ID NO: 125431 - DNA, 318 bp, Zea Mays
gctgattacctctaaaacaccgatgtcacatccatcactcggccgctatcactaaatcggtaaggtagctccaaaggattcgaccgttacttctaaagcgccagtatcatcagcaaccgtccggtcgttatctctaaaacaccgacatgacccaccataacttggccgtcattattaaagcaacgacaggatttcggatgactcgactgcaaccgccaaagcgccatcattacaaataaggcaatcagaaatgtgattcgatgatcacaaatactcctcgcgcattgataagattggcgaacaacgagaaagcaacat

SEQ ID NO: 125432 - DNA, 524 bp, Zea Mays
cttgagtacaccttcaatctggagctctcaaggacctgagcatcaagtgaaatttcagcgggagagttcctgtccgcctccaacgacccaacaaaagattgagttgaggtcagccgggggaccaagtcgatcccgacattgaaactgttgcggggcgaaacggtcttggtcagcctctgcaacccaacaaccctctgtcgaggagagcccggcccaagcgatttcagcgacccagccaaccttgtccacatgggccccccatgcccatccatctgcaactgttgcacaactgcaacatcaacagcacaacccacaggaccaacgttcgagcagtctatcccaggacctgtgtccacgtctgctgccgcgagttccatatgaacagccaacttatccctggcaggaatggccacattgctcccaatgtgcgcctcggctcctgtgcctatcgctagcaatgaaggagaatagtccgcccatcgcattgaagaggccacctcctcgactcccgccacaatattaac

SEQ ID NO: 125433 - DNA, 354 bp, Zea Mays
taaggtggatcccttgttggtggcatagacagtgggtcaccaagatgatgatgaggagaaggtggtggagtcctaaatagcaatgcttgtggcgaagacggtgggtcagaaagaggatgaggtaaagcatgtgaagtttgaggaggcgatgatggatgcacaataggaactgtagtttgaggaggcagagacggttgggcgggggacgacgacgacggtggtggatcatccaattcgacctcccttcgagaccaaaggatgaaattgttgatggcttgtccaggtgtctcaataccttcggatccaagtgccgagtgttcagcgtggcggtacttggcacacattgtcctaccg

SEQ ID NO: 125434 - DNA, 690 bp, Zea Mays
ggcgactctcatgcttggaccaggatgctggcccttctgctcctgtttgtgaagaagtaccagcggaggtccttacagaggctgatctcaatggtggtgtatctgttgaagctaaccccaaagggtgtgaccgtgcaccagctgaccccaatgggtgtaaccgtgtagaagctgaacccaatgggtgtaaccgtgcagaagctaatcccaatgggtgtgaccgtgcagaagctgaacccaatgggtgtaaccgtgcagaagctgatcccaatgggtgtgaccgtgcaccggctattgtccatattttttatgaggacgaagaagaggaagaagaagttccgctaattcgtaaaaatagccggtgttacagaggtagtaggggggatagtgatattctttctccagctctgtctgctcttgtcagccttcaagaattgtccataactgattttgatcaggcccttgaggatgtcgttcttgaagatatgttgtcagagccgactgcaggcgacatgatggatgtttgctctgaaattccagacgtgggattataggtatcccgagcagtgtctcacatatcgtcgactttggaaggcagtcttcggtgtcaagaagttggtcaggattgcccgactcccatggaggtgactaaggatccttcagccttagaggtggctgttacagaaaacc

SEQ ID NO: 125435 - DNA, 468 bp, Zea Mays
cactatgcctactttactagccggtatggtactaaccatatctgtaaagaaaacaacacaacagtaccggtgtcctgggctgaatgtttggtgcggcccatactccagctatgtttggagcagcccatactccagcgacggacgccagctgtctcccttcattcttcggtaacctccgccttccgcgacgtcgcgcccaaccgctcgcacagctccactcccgcggcttccctctccacgatctccacttctccaccttgaatgcgctggagttcccctcccgcactttgccgacgccagagacatccgcaaccgcaagcgccccttcctccttccttcatcaggagccggaggacctcgccgtccaccacctcccctactcccttcctccatcagcgtggcgtcggcgacctgtctcggtcgagcatcagccgagaaggagcaggaaccggaggacctcgccatcca

SEQ ID NO: 125436 - DNA, 785 bp, Zea Mays
ccacatcgtaccgcaggagtgggcggggatgaagaagcgggcgtgggcgcgcagaagagtatgaggatggggacgggccaccaaacgcagatctaacctgacccaagtgcgtacagcggtggagatcacgggcgaggatggttaagacacggcggcggagatccggggcgagcatgggcgggggcgtgcggatgaggatgaggatggggatgggccaccaaatgcagatctgacctgacccaagtgcggacggcggcggagatcacgggcttgggtggtgaagacgcggcggcgaagatcgcgggagagcgtgggcgggggcatgacgcgcgtggttgacgggggcgggggcacggtgtagttgtggacgccctcgttaggctcatatagaatagtagagaataggtatatgctcatgcattgctacaaaatcgatatgataaaatagagcaaaaaaatatgcatgtgtttcctcaatgtagattactacattattcagaaaaccaatttgataagggcatggtaccatgcacggaaaacagaatatgtacacacataatgtgagtacaatgtttggttgaatatatacaaaatgcacatcaaaatctggtagccttccatgactacatgtgggaagactaactgcaataaagcacataagaatccaaaaaatgtgtcaagtacaaaaataaccaaaacatcaaaggagaaaggcgtcactattttagaaataaaacaaagtcaagtagctagtaccaccaacagaattcgttccacaacctccc

SEQ ID NO: 125437 - DNA, 361 bp, Zea Mays
gctggaagttgagcggcatgaacacgaaaattggcatctgatggcgacttttgaacacgagagagtgcatacgtatacgcattaataagagccagccaataccgaatctattcgttcgacgatcgttcgtgttgtgggggtgtgcatagtgtgttgtgctcttctcgatctctccgtaatagtcatagctttcttaggctaactccagtggatattggcagcgagtacacatccaccgtgacgcgggagccgtttgtgcaatgaaaaatgcagtgcctaacagcttatggatgtaagtgacctgaagttcggtttaagtctggccacggccaggcacgacacaaaaataattaagatctca

SEQ ID NO: 125438 - DNA, 552 bp, Zea Mays
ccgaacaagaagcgacgccagtccccctccctcgcatgctgtcccgtgcccacctggtccttagtgacattggggcagcaatgttgcgggagtgggaggcgctagaggttgagcaccagcgccttagtgactagcgcacccaactggaggagcggaccaagacggcgtcccgacaattcatctctgagcggtcccaactcgagtgggactgcaaggagtacaagagggacctccagagggtgtgtgccagggagctagaggcgtcccgaaggaagaagaaggtgactaggagggaggaggtcgtgacccagtgggaggccctcacaacagaataccaggccaagctgagcgccctggactagactctggaagcccaatgggcctagcaggtcaaggctgtggagaggctacaaaagtgtcagcaagagctcgagggcaaggctagcgacgccgccctcgccgaggagaacctcaaggcgaaggagcaggccttggacaggcgggagatggacctcgccaggcgagagacggatctcaccttctgggaagaaa

SEQ ID NO: 125439 - DNA, 698 bp, Zea Mays
ccggatgataaagtcgcagcagaacgccttgcaagacagtcagcccactacaccctcataggggacgcgctgtacagaaggggtgcaacaggagtcctcatgaagtgcattccctcagttaccgggaggcaatttctagatgaaattcacgccggacagtgcgtgatacacgcagcatccagaactctagttgggaaagtcttcaggtctggtttctattggccgacgacaaaaagtgatacatccgagttagtctagagatgtgaagcttgccaattcttatcaaagcaacaacatttaccagcacagtaactgcaaaccatacccgtaacatggccatttgcgtgctggggactggacatgattggacccttcaagaaagctcagggaggctacactcacgtgttggtcgccattgacaaattcaccaaatggatagaatacaaacccattgcttctctaacttcagccaaggcagtggaattcatacaagatataatattcaggtttgggataccgaatagcatcataaccgacctgggatctaatttcactagctctgaattctgtgatttctgtgaacaacggagcatccagatcaaatatgcctccgtagcgcatccaagagccaatggccaggtagaaagggctaatggaatgatactggaagcactcaggaagaaagtcttcgacaagaa

SEQ ID NO: 125440 - DNA, 491 bp, Zea Mays
cgggagccgaaaaaagaagaggctaaatagagtttttgatgctattggatttatgtaccctgactaccgctacctgccacgggggaagaagagaaagagtggaacttctgggaagaatgttgcttcagccgcctcaagcgagcccgcaccgaagaagaaaaaggtgaaggttcttactcactgcccgcgctacattgaaccggccacaatgcctgactttggcggtgagacctcttcgactactgaagccaaaggacctgcccttacgcaggggattgaagagccggctgctatgccgaaggctgacaaaattgaagaaccaatacccgaagagacaaaaacatcagaaattctaagcccttcggtaggagtggaggcgccgaagatacaaaaagatctggcagcaaccccaaagagaaaaaggatggctagtgtgttagatgtgctggagacgataaaaacttcaagccctactccaggaaaaattgcca

SEQ ID NO: 125441 - DNA, 438 bp, Zea Mays
aaaggtgataataacaaagagcataggaaaggatggagttaaggcaagactcacgaaatggcgagatgaagaaaacaatcacgggtaaggtgggtaaggttccaacagaatggtttagcaaaagaaattattaccaagggaagttatagggaattaatgagatcaccaaggatgtgcaaaataaaatgaccgctcatggatcattaagaaaccagggtgatcaagggcatgttaactgaaatgtcttaaacagacattggggcatgaagataagcatacacgaaaatataagagtatgcaagactcaaatgatacgagcgtactaggaccaaggtaatagaaattgtcgaaagatagtgtcttaacaacagaataagaaaggatctcagaagacaagaaggtcatagacacataaactgaactgtttaaataggtagc

SEQ ID NO: 125442 - DNA, 1273 bp, Zea Mays
acctgatccttttcaaaaagagcatcccagtcattttccatcaaaagcttcttggtatctgcatagctcagtgcaatacggtagttcagatcaccaagccatatcaccttactgaaaccaacagtgcacaaattagtaggaaaaacatgttgaaaaggaacatatattcacaatgttagatatgacacatcattcttactcatggtcaactattctctccgggatttttcttccagctcttctacagatcctagaaaacattgtgagcctcattatctctagaacatccgagttcctcctgaattcgtctccttctttttgacctgaagccaaatggctgcatacgaaacaaaagcttgtctggtgcagtgtcatgcttattgatatacatccctgcagtagaagtgcattcaagactagatagaataattacaaccaggataaatttgataggattctgtcctgaccttgtttccaagacagcccagaatcccgcgccctatgcaagccttccttagatgcccaatatgctgcactagctctttcttcacccacacagtaacaaaaatgccaaccatttgtttgcacgctatgagattatattttagttgatccctagtggcaggaccagaagtaattccatcgaccacagagccatcagagtcccttgatttctctttatctttccctttctcttcatcctctccagaggaatcagtctcatctgcatatgctttttgacatccaaagcaagcatccctgtaggacgttctggtcatttctaccgggcaattgcaggccttaagttgttttctacgcactggcatgaaagatttgctaatggcttttaacaaggaattctggaagattgtggcaccacttgctgtttttgataggtcggagaatgaggtgccgatgcttgatgaagctcgagaggaagaagaatcaacagagggagatggttcatgctgaaagacgttggcatcaatgtcagctggtcgatttagtgattggtttataagaacaagccatctagcagctggttcattgtcttctattacaagcacattaccagcattgagagggacaatttcctgaaaactgttcaaatgttaaacaaacaagagcaattacacaaaggcttgcatcaaacttaaaagttccattaaaatatccttgatatacttcattgtgcttcaaatagataccaatatgtcaacacaacagcatcgtatgattccacactaccatggaggaatcaagtaaaacttca

SEQ ID NO: 125443 - DNA, 383 bp, Zea Mays
aaacgcgttgtttactgcagcttcttccccacgccgtgcgcggctgctgccactggcaatacttacagcgggcgttggaggatggagatggagccaaaatgttggtcttcggatcggagctgcagggtcagtgtcgtcgtcctgtgcgtcgctcgcgcgcgtgtaactttcgccgcgaaagctgatcgaaaaggacatcaaactcaccgcgccatcatcaaactcaaaccctacagctccccccttttgtcttgtttgttgctacagatcccctcgcgcgcgtgtcttgtttctgaaacgcatggatcgatgcatagacatggacatccatgtagagagatcgcatcgttgaggcgcctctgcctagggaactcgagctcttt

SEQ ID NO: 125444 - DNA, 716 bp, Zea Mays
gggatggcatcgggaccgcggatggtggtggtggtatgacctcgtcgtcgttgaagaagggtggacaccctgttcttgctgctctggttggaggacgaccgaaacctggcggtgccggtgttggtggtctccaacgcggtgcagtaggttccacctccggtgtcggtgagtaaaggtttggagccgcgaccgtggcgagcatctcctccatgggtactgcatcaggttgcgcttgagagttgtagtactggtaggcggcggtgagagtagcctccagaacgcctgcgtcgcgcagagcacatggtccgaatccgtgaaacggacagtaaccgtgcgggtaagtccctcccatttgaaacactgatgcaggtacttgtgtggacgttgctgtcgccggcggtggagggggaaccaccactggtggtgctcgacgacgacgagatgaactgcgattatgactgcggcgatttggaatccagacaccggtgacaccggtgttaaccagattcaccattaccctgtgaatggcaaagccaatccgattgtcgtcgaggattccttcacggtatgcgcggaggaactccctgatgacggcacggcggatcgcctgaacgacgcgtcgaagagtaatcggtggcattgtacttacagttttcttcgcgttcttctgttcttgtattctgcgatgtttttcctttcttcgcgttcttctgttc

SEQ ID NO: 125445 - DNA, 1081 bp, Zea Mays
tggcaatcatgacttttaaggccagataacttgcactccttaacatccacacatctagatagatttgatgcaaaaccatcgggtgtcctaagattttgaataacagagcaaagaatctccttttgatctctagacatggtaaagggtgcatcatgcattactttgtttcctttgttatccaattgtggatgtagttcaggtcgaattccgagctcctccaagtcaagccttgcttttagattgtcctttgttttaccacttacatttagtaatgtcccaacaaaattatcgcatacatttttctctatatgcatcacatcaagattgtgtcgtaacagattgtgttcccagtatggaagtttaagaatatagacctcttctttatccaatccttaggtttcttctctttcttaccttgttgtttttccctttggacccgtttcctctttttgccttgtttcttaccgtttcctttctttttggctttagctttgtgccctgatgattgttcttcctccgaatgatcctttcctttgccatacaaaaaagttttaccatccatcatcctcaaaactgcacttccactcattgttacgggcgctagttctttctcctccataccattgaagtggttccttctacgacgatagggatgggactgaggcaaccaccgacgatgacccatatatgaacacttgtgtcccttcttcaaataaattgacctcgtcaaatcagcacaagatggacatgcatattttccctttgtgctccaaccatataagttacctaatgcagggaaatcatttaaagtccacatcaaaactgctctgagagagaacttcttccttgaagaggcatcaacagtttcaacaccctcccacaactatagtaattcattaataagtggttgtagaaatatatcaatatcatttcctgggctatctggtcctggaatgatcatagacagtataaaagatgtttgcttcatgcagatccagggaggtagattgtacggaataagcagtactggccatgtactgtgactaatattcatgtttctgtaagggtttactccatcact

SEQ ID NO: 125446 - DNA, 441 bp, Zea Mays
tctgggaaaaatcatctgattcctaagctttcgacaaagcaaatggagataactgcttgacaagagcgaaagaaataccaatatccgcgtgggactagtcttcaacaacagataatactgctctcatacgaaggagtcatcatgactagggagaatgcaacatgcctccataagatctttatatttttatcacaaattatcaccacttacaatctcgtggtcaatacttatggctcttctggtgccaaggaccaaggatatattaatgcccaatttagcttcaagctctgtgggatttcatagctattttctactcttcttacttctagtagataagagatagattacagtaagcatgtcaaatggtggaatccaatgtagttctactacaaaacaccagttatatgtccattcaggactgatcgttaccatttgacttat

SEQ ID NO: 125447 - DNA, 404 bp, Zea Mays
ccggagaggtgaaagccaaagtgaccgaccggagcggagaagtaccaacacggggtcctgacaaaatcgatggcacaactggagcgtgaagcggaggaggtggagcagactgaaccggaggaactgagacaccagactgctgtagcataagagccatgaatgccctgctctcagcccgatcctggagtagctgctgctgaagcgcatcctgcctgtcctgcatgtttcgaaacatcgagagcatcctcttggataaccgggcctgctcggctgccaggtgagcctgctgctgagtgataaactggagaatcgaagcaagagcagggtccatagccggaggggcagcaggggcagcactagaactcccagcctcatgatcatgagagcgcggaggcataggaggc

SEQ ID NO: 125448 - DNA, 349 bp, Zea Mays
tgattgctccgttagcagggcatagtggtcaccccgagttaagtaagcgcgagcatgttgcaccgtcttaagtcgttgccaacttaagccgattgctccgttagcagggcatagtggtcaccccgagttaagtaagaatgcaggtcgaccatgaacaatttgagtattcttgaggccttttattgatgatatatttcccagtttacagagtacattgtcgtctcgatagcttttgaaatacagctaggggtaaaacttcctgaggtgttctatgttccatgagttcccaatttccgtgccgtccatctgagtgagacgatatgatcccggcagagtgacttctactact

SEQ ID NO: 125449 - DNA, 468 bp, Zea Mays
gtgtagcttcttgcacgtcgtaactggcgcgccggttacatgacatgtgggcccgcttcctttgcgctggtccaccggatgtggacggagccgaaggggcgcacagctacggtgtcgatggacgcttgtcgcgtggcagtccaccctttcgaccaccggtttctacgaagatgggggagtgcttgtaaccgcgggacggttacatgccttgcgtgcggcggttcgccttcttcgtgcttcggatcagctcgtatgacgtgtgggtcctagcccccgtgtcgtggggggagaaccctggaggatgtcagtgggcgcgctagcccgtggcgctaaggggtgcaagcgaggaggtctgcctataaaagggggatcgatcccctaggcagtggccatgccttcgtcctcccctcatgccttgcgcccttccgccttttgagcccccggatggggtgccccagcgtcgccttg

SEQ ID NO: 125450 - DNA, 3244 bp, Zea Mays
ctccgcctcggtccatcgcaactgcaatcttctgctccgtcctgtaggctgtagctgcagcctgcagggagcgagccataaaggagactacgtagcggccgcggagcgcggggacgacggagggagacagacgggcgcggcagggaccagggagccagcagggctaggcgacgctccttccagttctcctatccatgatttcattctgtgagttgagggtgctctgctcctttccgtcccgtcaatttctgggttccatttcggtcgcttcttgcggagatcaaatgataccgcgcagattcgttcttctctagtttgggaaactcattttccggaattttcatttttccaaagaaaattagtttattttccttggaaagataggacttcggagtttgttacttccctcctctctttccccatgattcttcatgctctgcgaggtcaactgacgtgtataagaggagcactacttcttgcgttctcacatgtagctttagatttttgttgcttcatcgctatgtgctttcaatagtatatagcatattataaacttatatatatatatatatatataatttctcgtatataacccgtgtatctcggcttcatatgacttttcaagtactatgactgtgttggtatctattgcagcttcatatatacgtaagattgctttgcttgcttagtaattatcacgcaccattcaccaatctatgcttatgatagtgcgtcaagtatgcgtaggggtggcacgatccaaatgtttcttatgacttttaataaattttattagtttaaaaataaataggaatagagcccgactcttctaatctgatttgatccataagttttatatactctaaaatttagagcccattaccaccctaagtatatgtatgtatgactattcctgctcaatgtaatccaagtatttttctccacacctatttttatgcttccaaaggctccacgctccaaggatgatagcactattgaaccctcaaaacccatagctgccactcttctctgaacccctcctctagggattgaaggcaaggtcgagtctcataaaaagcacacctatttctaagcttccaaagctccacgctccaaggatgacagcactatggaatccttttattttgcctttgggaatttttaaagaagctttcctccaccagtcaacaaagtagacatctcttctcttaggtaccacagcagtaaggccaatttgggataaggtagcatgccataaccgccttgcaaagacatagttagttaagatatgctgcacagtttcttcttatcacaaaggacacaattcttgggaaagtcaagccctcttttttgaagtctgtctgctgtccaacatttaaaaaaaatgtaatcccagtagtttggttgtgcgccttgtccggccctgtgtcactcgcctctctgacagagggaagggctggtgttagtgggacgtcaggcttgtaatgttaaaaccctactgtcctcttaatggaatactggcttctgttatattttttttaacatactagcttcggcctgctcgcgaaaaaaagactataactgctcaacttatgaactatgaaccacaggtaatgcctaattcactaggctgcctattaaggtgaatgcgagcttagtctatccttgatcgaaattggctcacacctactgactactgtatatggttttaagcaattccatggtcaagctaatgtgtttgttacaacttttaagctttaaccacttatggcataaaggctttttgcctagcatgactgtttgccctgttgatcatgttttttacactttgtcgtactcatatctgtggttttttgctcatatttgaactctttcctttttagttgacagccagaattcaagccattgcgttcaaaaaatatatctgtgattttttgttcatgtggttcaattgcaggagacattcacatgcttccatgtgattgaccttgtccctaatgttctgatcaagattgccatggttgaaaggctatagtttcttatggtccatgtccacgattcaagaataaaatattgtttggcccatccattgtgataatggtctggttgcaagaccagctggaaatgcacaagttccactggtacagtagagcccctactccatcagagttctggataccacttgctgcttggttcactgttggcctagtcggtctttggacattttttcatttcttttcagtgtggcggcgaaagatcagtttaagctggatgaaaataattgccagatcgaagaggaagaattttgaaagaaaccatgaggttcctactgctgaacatgtttggaacacagaatcattgattcgtgcaaaaggaatgatgtgctgtgtatgcttggaatctatctcacctgctcagccccttgggcagatgatgacatcagaaaatatggttcaccgctgcaatgtttgcggtgcagctgcgcacataatatgctcttcaaattctcagaaagactgcaaatgcatctcaatgtttgggttcaaacatgtggtccatcaatggactgtactctggacagacatagctgaccaatccgaagaaggccagtactgtagttactgtgaggagttatgcagtgagtcttttctgggaggtcctcccatatactgctgcatgtggtgccaacgattggtgcatgctgattgccagtctgccatggctactgaaaccggtgaaatttgcgaccttggtcccttcaagcgccttattctgtcgccactttttgtccgggccattagcaaacctggtagcatcttgagttctataactcatggagcaaatgagtttgcaaccactgtgcgggggcgtttaaaccgaactaaaaaggagaagcatcagaacagattttcatctgacagcaacgatgattcatcaagtgataccacgttgaactcaaaccagagggctggagaattaaaaacaattggcgacagtgctcaaaggagtcctgagaatgagcatgatagcagtgagagtgatggtagagaactcatatcggagtccagaaggctcggtaatgatgagaccggtgaagttaaacttaagtacgcattgtctgaattgcctgctgattccagaccccttctaatttttatcaacaagaaaagtggggctcagcgcggagatcttctcaagcacaagctacattttcttttgaatccggtgcaggtcatgatacttc

SEQ ID NO: 125451 - DNA, 1298 bp, Zea Mays
ttcgacttcgccattatctgtacgagttcggcatcgtggtcgccccggctgggattcctcctccacgtaggtctcctcttcacgtcacacaacgccggaggtctgtcgcgcagccaccgccgaaggcctgtctcgcagcagccgccgcctgagacctgtcgcgcagcagccgccgccggggcctgggcgctgccagggggacgaggactccataggtgatccgtgggggatgggtcctgggctctgtcaggggacgaggactccataggcgatctgcggggacgacaagaattgttccgctttgcacgtgctgccagtctgcctgtgctaccagatttcaacctcgacatcgacgcacatcaccaatttgctgcgcctggtaaggattactctaaccatgtagatctatttatatgaaacagatactacaattagcaatatggtgcactggttgaggagatatgagaataatggtgcttgttgttctatgcagttgttgtattatgggtactccgtagatagaaaagacagataatttgatagtggtaagtgtggcataacaataatatgattattatttaccaagtatttcacttctattaccttgctgcaacattgatttattttgggcactaaaataattttgctttcgtcagatggacaaatcttggatcaatgcaacactatttagcaagccacacctagaaggagttagtgagttcatgaagcttgtaatagagcgatttaatgcgaatgaagagatactttgtccatgccgcaagtgtttgaatcggcttagtggacatagaggacaggtggaggaccacttatatcttcatgggatagctagtacatacactaggtggatatatcatggagaagccatggatgacataattaatgaaaatggtgattacgaggatgaacatgtgagtttcaatgatgatgctggtatgaatcaagatgaagaagatcctgatgataggattaatggtatggtagaggagttatacacagccgaagatcaaggtaaaaggaaatctatgtttggagatatactagaggagatgaaacaagaactttatcctggtgcaacttatacaagattttcgtttgtggtgaagttgcttcatattaagtcgttttatcgtatcagcaatgttggcttcactgcaatactgaagttgttgaaatcgggatttcctaattgctcccttcctgcatcttttggagaagcaaagaaacttattcgtgcactaggacttgggtatgtttcaatccatgtgtgcgtgaataac

SEQ ID NO: 125452 - DNA, 568 bp, Zea Mays
gcttcctaaaagtaatgaggcgattactgttcaacattattgaccgatatgtcttctaaatatcagcttcaatttttcacaaaagttgtgactaagaggattacagaggttgcgcaaaaatgtaatcagtccctcgcatactgtatttcatccaggaagaaatatcatggagggtgtggtggtcctacatgagcttcacaccaagaacagagatggggtcattttcaaaattgactttgagaaagcttacgataaggtgaagtggagctttgtccagcaaacccttcatatgaaaggcttctcaagtatgtggtgtagttggattgacacatttatgaaaggggggcatgttgtggttaaagttaataatcaaatgggtctgtttttccagactcaaagaggggtgagacagggtgatccattgtcacccatactttttaatttggtagtagatatgcttgctactctgattaatagagcaaaggaaaatgggcaagtagaggttttgataccgcatttggtagatggagggcttcccattatgcaatacgcagatgatacaatcttg

SEQ ID NO: 125453 - DNA, 377 bp, Zea Mays
attccttcgagcggtcttggtgaggtaggcggcagcactcgagcggacgaagtggtcggcgaggtgtgcgataacatagccctcgagctaacgaggctgtggcgtagcctcccaaagtcgacaaagcagcgatgtggcgaggaggccgatgacctagcccccaagctggtgaagcagcgagtcgatgaggcagaagatggcacaacccccgagctagtgaagcagtaagtcggtggcgcaggcgacgactcagcccccgagctggtgaagtagtgagtcagcgaggcgagtgatgacccagccctagagctggtgacgtagcgagtcagcgaggcaggggatgacatagctcctgagctggtgaaccagcgagtcga

SEQ ID NO: 125454 - DNA, 326 bp, Zea Mays
cgtggggcctcacgttgccatggccggagacctccacactacagaatccggtacgatactctttatgctcttagtgatccattggtattcgcgctagaccggtcggaatcgaggttaggtgatggggggaaccgtgtgggtgtgctgcggcaatggcgccgtcgcgccagagggcggaccgccgccgtggccgtgtctaggggaggggatcatttggggccattgatctattaacgtgtggatgcgatgagatcggtgtaccgttctgatgcgagagatctgggccgttcaacgcagatcgagcagaccgagatgggggttgtggt

SEQ ID NO: 125455 - DNA, 707 bp, Zea Mays
caactcttctgacctttgtggggttgtttcggaaagcccatgatgagaacctcaagcaaattgaggctgagaagaagaaagcccagaaagaagctgaaaaggaggcaactcaggacaaaactcctgtaaagtcaaaaaatgggaatgcagataaatcaccaagatcaccatcaaccttcaaatgatatacggcaaaagttcacatgatcatcatttcttcctcaaagaatgtctgccttttctggcctcggcacaatttcacaagcatcaatagtaatgcaaatccataataccatgtggacaactcatgcagtcatgcttacaagacaaggtaacaaatgatctatttcatatatgtgtaatgttctgttgtaacaggcgaaatatgtatacttgccagtaccactcttaacatatattcactgccctttttccagatgcttttggttcaacatccatgcatgtatctcatgacactgtacaaagctcaccccacacaaacttaggttcttctgtacaaaatccacactagatctttctttttccccccttctgtttatactagcaccaggagtagctcattgtttgtaaactagaaataggagtgtaggcagtgatcagtagtaggtcagaagcaatagaaaaggattagtgctaccacaggcaggttctaaccaggtaaaggtgagtatatagccatgtgccca

SEQ ID NO: 125456 - DNA, 817 bp, Zea Mays
gaaaaatttcaagagatcaagggaaactgtcagtcgctactttaagttagtactctgtgctatcggtgaacttcgtgatgaccttattaggcctccatctcttgaaacttcagccaaaatccttggaagtcctcgatggtatccttactttgaggtctggtctaggcacaataaatggtttttgagttgcacataatcgtattcttacttctcatcaagttaaaattataatgtagaactgtattggtgcaattgatggtacacacatacgagctagtgtccccaagtctcgtgaggctgcttttcgaggtagaaagagtttcacaacccaaaatgtgatggccgcggtagactttgaccttcgcttcacatatgtgctagctgtttgggagggttcggcacatgatgccatcattctagtcgatgccttacaaaggcagaatggtcttgtcgtccctaaaggtaatattctgtaacgattccacttaaaatgtgcaccaccataagatagatcattccctaacgatgttatcatgccatcatggtattgtaggaaaatattacctggttgattgtggttatggtgcaaaaccggggttcttaccaccttttcgcggtgtccgataccacttaaaagagtgggggtaatgataacatgccagaaaatgagaaggaattatttaatttaaggcattcacaactacgggtcactgttgagcgtgcctttggatccctgaagaaccgttttaagtttcttgatgatgctcgacctttctttcctttcaaaacacaagtagatgttgtccttgcatgttgc

SEQ ID NO: 125457 - DNA, 437 bp, Zea Mays
tctcaatattgttccccatggggaacaatcagttctgacttctgagtttcctcttcatgcctgtagtggattgcagatgaggattcgtgtctctgctcctagggctgtctctgagattttgtggccatggtgcaaaacataataattgcccctgattttgtggccctggtacaaaacataataactgcccctataatttactatatagtgtatatgacgttccttcaattcctgctacgcaaacctactacgacatgtgacgttcttcgatggccgatcaatcaggagcgcagaaattctctcgcgacacttgacctcgccaaaccccgtccatccacttacactactatgtctacgactacaggcgacgaatgcgagagggatcggctggtactatcgccgacggcgggcgcgtcctacactgatacacgtgaagt

SEQ ID NO: 125458 - DNA, 407 bp, Zea Mays
ctgtcctactctcatctatgtgtagtgcccttcggattaggttttgggacactaagtcatggtgactacgctcgacggtgaagtgccgccgtgagtccagttctgccgttgtgtttgagggcgaaaggttgaagatggtgtcggggccgtaggatagagatcctgtggttggcgggcgtaccgagctaaaggggtgcggggtccgttgatctccgatcgggcgggctagattgtatatcggttcgcactgtaatgagaaccattgatgtcagatccgagggatagaggtgcctagcggcttatggttcgttgttaaccattgatcttcaatcgggcggatcccgttgggtacggagtcgagcgggcggctgatctaatcctcaccatcagaacctgatcggacggcc

SEQ ID NO: 125459 - DNA, 479 bp, Zea Mays
gtctgctcctcacgctccgatgcccgctgaggagggaacatcccctcagtccctagttgcagacattgcgtccgcacctcgtggttgcgtgctggagcgatcggatgcaattagcagggaggagttcaggttgcagcgctgtgccttgtttgtggtaatcaccggttcacggcctcgggtggctacagaggttttcgcggctgaggtggcagctgggtttggattgctagaagactccttctcagtgcaccgttcttcccctgaagattttgttttgatcctcaactccgaacaagcagcggttgaggtgtacaacaatggttcggtgttcaattctccctccggttcgttcaagttcatccggtggtctgggctagctcacgcggaggtggtttcgttcccatctttggtcatggttgagttcgtaggaattcccgtgcatgcttgggagctagctacggcgcaaaatctgttgcgtg

SEQ ID NO: 125460 - DNA, 403 bp, Zea Mays
agtgggctattcgcaacggattaaagtcgacttttgcctgtttacagcggattaaagccgactgtttggactgcggcatctgtatagctgtctttacatgagataaaacgtgaggctgacgtcgtcgctggagtaatttgctatcacttactgctaggtcacgactgcacgtgtgctgctgactgacctttctctgtttacaccaagcaacatggttgcaggtttccaacccccatgtgtagtgactaccacttactgctactgagatccgattattccgagtcccttccaatgcacaaggaaagaagaaagagcgactgagaggcctttgtctgcaagaccaacatgcacaccaacgaaaacgtggacggaatatgcgcccacgcggatccgtgctgccctg

SEQ ID NO: 125461 - DNA, 372 bp, Zea Mays
tgcaacttttgattgagggcgggcttgggggttgccctcctgttcgaggcaggctcgaacgaggtggaaactgtcgttccgtgaagtggggacctcgggcgagacgaggatttcctcgggcgctgctctcgttcgagggcaggctcgggcgaggcggagtttcaagctaccacggagttgggtctcggacgaatcgtggcttatacattcttgacctcggggaacgtgtcccatggtaacttaggggttaagtgtgcttaggtgtgtaatccaggtatctctaattatgataactgacaaaaagatttttggttcgtgtgtttaagttggttgtaagtttaccgtccgcttctcactctcctcttctctctc

SEQ ID NO: 125462 - DNA, 527 bp, Zea Mays
tttcacgctatgtccctgaagaagtggatacggatgagaagcgccaagagtgtttcttggaaggaatgattggacctctgaattatcaacttcagagccatacattttccaatttccagacactgctgaacaaggcaattggccttgaaagcaaaagaaaggaattatctgaccacaaaataaaatttcaaggtcaatctagcaggaacacccgcccgaacaacgctcaaggttcgcagttctgctctggaagtcagggtggaaacaattatcaagtgcaacgctctggacagcaaagccagagaaataatcagagtcagaaccaacaaaggagcaactctcagaccaaccagaggtctggtgggagttcacagaaccgtcaaggtggcgccagtaacacgcaggccagaagcaacaacgcaccagtccaacccaatggctgtttcaagtgcggtgagctaggccactatgccaacaactgcccaaggcgcaaccagcagacaccccagaaaagcaataaccagaga

SEQ ID NO: 125463 - DNA, 496 bp, Zea Mays
ggacgacaaatcactggtggccatgggttttacaacaccttgtcttttgtgacttccaaggggaagctctagccttgcttctatgccacatataagatcaacactcaaatatgcctggtggcttttgaatttgagctcccaactggtgcatgcatccatgaagtcttccacgttggtctacctaagaatttcttggctgatcctccttaatgcaatgagagtcccattgcattactattgctccaccttggcgcaacctctgtccatgaatgagcactgaaaacacgtttggctcacagtgtttgcccactattggtcaagtgtaaggaccaacccgactccgtgttgtcggaagacttggagctcttccggaggaagtacccctcttatctcgatgatgagctgtcgctcgaggaaagtggtgattctatgtggggccacacgtacaactggcaaaagaaagagcaggagaatcataaagaataaggaaggcaca

SEQ ID NO: 125464 - DNA, 326 bp, Zea Mays
gcgctaggcaatcgagaattgaatgttgtgggcactggattgggaacacgtcggcgatgccccgccgtggtgtgctctgcgccgccggtgggtcagccgatggggagaagaagctgggtgggccgttggatcggcaatggatgggcgaggggtcgcggaccggtgatccatccgtgaacggtcgagattaaaacgtcgacaccgtttcgagttgatcgcttccacaccattgatcttcacgtctagggtcgggatcgagtccatgttactttgaatcgccaccctcggttccggatctatgggttcatataagcatactacggtga

SEQ ID NO: 125465 - DNA, 277 bp, Zea Mays
atcaaatggcaaacgacgagagccccttatttgtgacaatggaactaacatgttcaagattccgtagcaaagcacggggcactatttattattgggcagttgaactggaatgctgaaccaaccattttttccttgttatggtaactgttaatcttccatctctgtccgaatttcctctctgttgctaccggtcctttctacatgactacatgtactattaattaatatgaccctcttctgtattaggagcttcagactattggagaaagtagacaag

SEQ ID NO: 125466 - DNA, 376 bp, Zea Mays
ccgagacaaagaattatactggtccaagcttacacatagtccaatgtagttctgatcgttgtattgcttgaggactatgttacagctagtgcatgcgttaggaggggggtcttctcttttatagctcaagggtaaggccatatagagagacttgtttcctacaaacatgagcggtaaggatgtgatctgctgcccagttgacacgtagtgcccctgacgtccttgtagggtcgtgcttagccgtactccggtatagcgtatcgcttcgcctgtccggtgtatgggtccctttaggctgtagcgagtctaatgctgatgtcctcgtcgtggtgtatgataggactggacgaaatactcgtggcttgtcggctcgatt

SEQ ID NO: 125467 - DNA, 511 bp, Zea Mays
gctgaaaccatatctattgcaactgtccccgagcctaaaaataccttgactgctcaaaaatctgatggtgcttgcccaaagcgccttcgcccggccagtcatccaactgctcctgccgaggggaagaagaagaaaaagaggaggcttcggcgagtgtcatgtttgaatcaggatgctgacccttctgctcctgctgctaaggaagtgtcagtggaactttttactggagctgaacccaatgggtgtgaccctgctaacgctgaccccaatgggtgtgaccttgacgatgctgatcccaatgggtgcaatccggccagagctgaccccaatgggtgtgttgttcgtattgttgacgaggatgaggaagaagaggaggaaatccccttaattcggaaaaacagtcggcgctacctggtcagtggggggagtagtgatattccttctccagccttgtctgcactcgttggtctgcaagagttgtccatagcaaattttgatcaggctctcgagg

SEQ ID NO: 125468 - DNA, 825 bp, Zea Mays
ggggaataaaatctcgagagcccacggtgcaaatcctaaattccaggacccatttgtattttctgttgaactaaagtggactgcgggttatttccaattaaagtcagggtctcttttgcaagtctggctcagtgaaggggtatgcttacatctggaccattggatcagaaacacgtggcccagattagatcagagaagttgcatgtaatgaagccaatccagaccgttggcgcatggatccacggtcaatgctttacgcgaccatgatctaatcccatacgcccgatctggaatcaacggttgtcattggatttgaccaaatcgcctccagcaccaaatctccaccgtcgttttgccgatcaactatcttcgttcgtcacccaagcccgcgttcgtcaacattgcggcggtctcccgccggtgtatgaccacccgccgagccagaactcctatcatacaactacacggtcctacacggagtagacacgaaagtgaaccttatggatagattcatatcgacgattgcgccacatagggcactgtccaacgatccctgcggctgggcaacacggaagatgtttcggcgaggagtctgtcatgttctgcgttgtaactgcgcttgatgtcgtcaccaacaccatccagaccatcccagtgaaccatgacgttgtccatcgggtcccgacgaacggcgggagcacgggccggccatggcagatgtttggccagtccccccccccctcgcgcaagagctggtgcttactttctgcatggcgacgatagtgatggattcgactttggacgccataaataggggcacagggt

SEQ ID NO: 125469 - DNA, 445 bp, Zea Mays
cccgacccgacggagctcgtcatcgcgtaggagttcatcagcacactgcttctcttcctagctccgaggccacgtcgaatccttgcttccgcggggggaatctccgccaccgctggtggttgatcggattgagccctctgggtgattcctcgaccatgtgtgtggcgccgccgttccgttgttccaccgtactccgtcgtcgggatactacgcgacttaattgccggtaataatacctcatcaacattcgcaaggttatatatatcgaattacgcctgtcaattttggtaatcaagcctcagtgagcgatgtgcggtttgtgccgatggcgctccgccgtggggatgcctggcgccgccgtcttgtgggctgggggtggtgtaacgcgcggccgttggatcctcctgtaggttcaccgtcgttcatctgccacgaatcgactagt

SEQ ID NO: 125470 - DNA, 619 bp, Zea Mays
taagattacaaggagcagcggcaggcatcctcttcatcccctctaaaggagatcagctcaaatatgcaccacaactgctatttcctgcctccaacaatgttgtagaatacaaagctttgatacacggacttaatattgtcgtgtcacttggaatcagaagattgatggtatacggagattctattgtcatcatcagccaagtaaataaagattggaactactccacgaaatcaacgagcaattactatgctgtggtcaggaaagttgaggataaatttgaagagatggagttccaccatatagagagagactgtaacatggcacctgctgctttatccaagctaggatcaggccgagcgcaggctccatagggtgtcttcatccaagaggtacaacaaccaagtgtcacatcagggccaggggaagaatgcaagggaattgagcaagtagaaccagatacgaacgactggagggcaccaatcatgaagtacatccaacatgaagaagagccaaatgatagagccacgatcgatcccatcgcgaggcagttaactcaatattcagtcataggtgatgcattgtacaaaagaggtgttgtgggtgttttcatgaagtgcat

SEQ ID NO: 125471 - DNA, 626 bp, Zea Mays
gttcttgtctatcaaatctcaactaccatcaattgaagacggaatcgccatccactacgcaatcaacggtctccacgtaggtcatttgtacaatcactatacctgagatcctgcattaaccctgcaataactctaccagctattcgagaagtatgcaagatctgaaggcctccactacagcaaaatcgaggcacaatgcaagccaaaggagcactcactgcccgcacacccaaaacatggtcatgagcgcagtagcctcctcctcgacaccaagtccacaacatccaacaacagcaatagccagaagacacccctcacaattatgaccacatctaccaatcagcaagaggcggtagagtcccaagggacaagggatgctgacgtggcacaacgtgtgacgcaggccctattgcatcgttcatgaaagtaccggtcattcaactagagactcctacacatacaaggaggtaaaagaaaggatggatgcagaaaaggcacaaagggatcacccaatgtagccagcgaaggccatagctcacacctatcaaccacaatttcaacacccccatcaagaagcatacaaccactaccaacaatactcgccaacctatcagcctctaccagca

SEQ ID NO: 125472 - DNA, 886 bp, Zea Mays
tagagatccaaacgagaatgctaataggtgctaaaagtaaaaggtactagaaatgaagtcataaaacctaaacccgacccgtaatcacatcaataatgattatttaaatagatgagctcagctaaccaaagaaaaagaataaaagttaactgctttgacaataaatttatagactccgctccgcatggacaaactgtagcgtgtagaactggaatggactgatgcaatgaaattaaataaaaaaagagcctcaataggatgagcgaaagagacgacacaagagagaaatccaccagaggtgcatagttaaacaggagaaaccaccacccacacggaggatcccaagtggtctagtcgaacagcatagcagaccaccagccataggccatagcagcaggtggcagaaaacacagagcaccaatgtgtgcacacctctgaccgcacagatggggattgcggtggtcggacgtccattccgctcctgaagatggatggagacggacggtcggtcggtaccttccctccttccgcccctgaattcggacagggcgacagacaacagctccgccggccgcgtgtacgggtgacggccctgcggacagcagggactagcggggatgggtgcggagatgggcagacgagcgccgcgacgacgctcagatcccgaacaagcaaacacatgttcgcgcgaagacgacaaagacgaagacatacggctctgcgtcgattccaatgggaactgtgacgacaggctcccacgacggacggtgcgcgccgtggacggcacgcgaactcctctaaccggcggcgcggagattccccttcgtctgacggacgggtgcgcggacgacgaattcccgtgtgcggactccatgacaccagcttg

SEQ ID NO: 125473 - DNA, 314 bp, Zea Mays
cttgcacatggaaagatcgtgccaaatccaacgagaaagggggctttggcggcgtactgtacgtgcaggtgtgaactgcgaagcaaacgagagataaagaggccgcatgggtcatgtgtatggcaatggaaagaatatgcaattaaataaataaagacagactgatgatatagcatggcatcatgcttaggcgatggaagtttgaccatctgccacgatgacggggacgagataaagtctatatctatactactaattaagaaagcaaggggtaggctgcctcattactggttctgcctgtgtgtttgcttcat

SEQ ID NO: 125474 - DNA, 368 bp, Zea Mays
ccggccggcacggacgagtggcgacggacgacaacccagcccggagttgcgtcagccggaagggaagctgccaatgatttgcgagcggtgcgtacgtgtggaggaagcctcggcggaataatgccgggcgagcaggacaaccacccccccaccccgatacgttatctgcaagcgatcgcaaacccaccaccaccaccaggacaacagaacacacacagacaagcgaatccccatcttcgttgtcagtgccagaaaaccagaccgagagatgattgttttgttgctgcaatttgatgagattggaacatttaactactcggtcctcaaatatttgagaacgtaagtagtatatgagactgaaatttaac

SEQ ID NO: 125475 - DNA, 300 bp, Zea Mays
ggacaagcacctctccttagcagagtttgcttataacaacagttatcaatccagcctaaagatggcacccttcgaagctctctatgggagaagatgcagaacaccactcaattggtctcagcctggagaaagagaagttttccgacctgacttagtgactgaagccgaaaggaaggtcaaactaatcaggagaaatctagaagctgctcaggccaggcaaaagagttaccatgataagagaaggaaacctctccagttcaaggtgggagatttcgtttatctaaaggtatcacccaccaa

SEQ ID NO: 125476 - DNA, 454 bp, Zea Mays
cacctctattgctcccatttcaaattcctatcaaatccagtgaatggagtgaatcccagtgcatggttgtgtgccctagttctccattgaatcccttgcaggttcttagctccttcgggagggtttccccaccaccaatagccatttcattcaaaacctaaatccccgcacatcacatgttcgatgaaatgcaccaaccactcaaaattggtccgattgaacccaaacttttcaggcaccttcacaacacctccagtaacacattcgcgcaattttacaccaatccgatataccaggcttcaatttcacacaattccccgtttcgagcgatcaattccgagccgagtgcccaaattccattttctttgcctcaaaacaaaccaagtgcacacttcactcatatttacccatataaacctattcgtgaagtatcggctcaattccccatcatttc

SEQ ID NO: 125477 - DNA, 634 bp, Zea Mays
ataatacaccatcaataaaaagacttcgttctcaaaggcactcgaactgtttattgtcaatctgcatgcttactcgactcagggtgaccactataccctactaacggagcaatcgacttaagttggcaatgacttaaggcggtgtgacatgctcacgcttacttaactcagggtgaccactatgccctactaacagagcaatcggcttaagtcggcgatgacttaagacggtgtgacatgctcacgcttacttaattcagggtgatcactatgccctactaacggagcaatcggcgatgacttaaggcggtgtgacatgctcacgcttacttaacttagggtgaccactatgccctactaacggagcaatcggcttaagttggcgatgacttaagacggtgtgacatgctcacgcttacttaattcagggtcaccactatgccctactaacggagcaatcggcttaagtcggcgatgacttaagacggtgtgacatgctcacgcttacttaatttagggtgaccactataccctactaacgaagcaatcaccttaagtcggcgatgacttatgacggtgtgacatgctcacgcttacttaattcatggtgaccactataccctactaacagggc

SEQ ID NO: 125478 - DNA, 465 bp, Zea Mays
gaagtagcaaagggaagtaacagaaagtcagaaacagagtaagttcaagaaattcaatccagcaagataaaccacactgttgttatgatgcaccaacatgggtgcaagaaatttgccattgcaaatgaagtgaagacgagacagtttttggaattcggagttttgtttttcactaaaatatataatcaaaacaaagtatagtgcatccaactgggtttcctacaaagctttcctagaaaagtggcacaagagttaaaactgcagagggtggaaaactgacacatcaagcatatcgttgctaattaatttaccaagatgcgcttcggtttgaaaactcggctaaattgtagacaggaaccaagtctgcagtgctttttcggtggagaccatacaactacagaaacaggcttggagacagactttttactttactgtactagaatataggagagcttgtaccataag

SEQ ID NO: 125479 - DNA, 334 bp, Zea Mays
gtgatggaggaggctagagactgaaggcgagaagatgagacatactatagaagggtggagccatggagggccggaggcgagatgtgcatgtggattgcgcgagcggccagctgaaagggttgacgagcatgtacatgcagacaaccaaacacatattcttttaacatggcgagagaaaacaagcaactaaacatatactatttgcacgtattcgacatggatactgggagcttggctgcttggaaggattgagggtaggtcgaaaagacaaccaatcatgtctaaagaaaattggagtaaggaggaagaagtggacagagtcaatataactatt

SEQ ID NO: 125480 - DNA, 3146 bp, Zea Mays
aattattcttggcaccttcatttacatgtaataggtattgatcaaaaaagccaaatagtcaagtagctacagaaaatgtgcaggtggtacacgttatcaaatgcagattctttctatggctggcagccttgaacagacgttggactgctgatcgtctggctaggcggggattggaacatccagaacagtctttttgtgatcaggaggaagaaacaattgagcacattcttcttagttgtgttttttctagggaagttcggtatatgctgcttagtgctttcaatggtagactgcagcaagttgcaccagggcttcaagataaggtattccaaaactggtggaaactggtggaggtacaagtgccacccatacaaaggattcaacaccctggtttctcttgtgcttggatgttgtggaaacatcggaatacatgtgtctttgataaggctccaccaagcattgccaggctgtgtggtctttggccataattgttatgtaatgtggtataggtcgtctattgttttgtatcttagatgagttcctttaggtttctttgtttttggcatccataaggagtccttgttttttggtctattccatacccttactcttcttcttaatataatgaaacgcgactctcctgtgttttcgagaaaaaaaatcaaatacagcgcatggagggagaaagaagtctgctccttaaattagtttgtttagaaaaaaactacagctgggtgaaacgggaaattgcatccacctagctaccttatttaatttaatgcactaagggaaaaagctagcttgtttaacttaacataccgaataataaactggatgaatacatctaagaggcaaagaaggaatttcaacatgacagtcaaaagcaattcaatacttacttcctttaaaattggaacagataaatagcacatgaattgaccatctggatgcctctcacatcgttcaaagttttcagattcaacctcagaatatgatagtagtgtgatctcatttgtcgtaggcacaactccctcctgaagatactgccttccaagtaaagcatttataaaagttgactttcctgagttaaattcaccctgagataaaattacaggaggatttgttcagaatgagtggtaaaatgattacttggcgaaaaaaaatagttgctaagtgtggaatatgtataatataatgaagaacaagtattccttgtcctagggtgccttcagttgatgcagctcacttcttcaaatgatggggaagcactttcagagatgttcccaagcagatacagaaggggctgaattctttcatcattttaatggcctgggaagtatggaaacataggaatgctttttctacaaacatgcaggagagctgcataccattatattaagaagaagcggaaacataggaatgtctgtgtgttttgagggagttttggcaagcattcaggaactcctgaaaatagtggattgtgattgtagtttatgttgcatggcaggtgcttgtttgccccagaaccttaagttttggttggtagactgatccccttggttatgatatcctttttgtcagtgacgtgtgtttttgtaagcatccaagtgcaatgttatcaaaccgtctatgttagactcctgtttagggtttggcttgtgccctcttgtatttacctgactacccctgtgtaatgggcttggcccatctaacgatctatataacactcacccaaccctggattagggttagggtttcctctcattccaacttggtaacagagccagttttccttttcctcccaccacacagccgtcgctagccctctgccaggtccgcctgccagccaccacctcctccccctctgaccctcgcgtggttccggccacctgacgtcgggcgcaggagcgtcctccctccgctcgagccaagaaggttgtcagccgtcgccaggatccgcgacgccgaccaccgatcagcctccctcgcgcatctatcctagatgccatggcactgatcagcctgattaatcacgtctaatcggaattaatcatgactaaccgtagtgcatagttgatcgtcgtagcactgatcggataagggaattctcttgcttacgggctcataccaaactgagtatgttaggaaaataaacacgacccagtgtgtatgcttatactacatgtgcttctacgcatgtggttagcttaggagagttttttgtttgtttatgcaaataaagggccatctagcacgtggacatgtatgcggttgaaccagaagaggacatccataagcatattttcttagtaaaaggggtggactatagaagaactcacataaaagaaatttttttccaatagtgttttcaagtcatccaactaatcacgattagtcggactaatcattaaactgaacccgactagacccaccaaggcgattagaccgaccagaattctagtcgtccgatttggtgtgggacgactagattggacttggacatgtgtttttagatagcttttgagatttatggttgatgcagttgtgggctctaggctgccattgctgctgcatctgtgggctcatggattgctaatgtggccttttagggttgccaaaccaggcagccagctacaggcagaccagaacacatcgcatagagtcattcgtgctgccgcacatttgcagtgtcacccgcaagttctaggcggtcggtcgtgctaccgcaatgtcgttgccgcacacaagatccagttctaggcaatcgcccaattgcagtgccgcccgcaaattctagacgaccgtccgtgctgccgcaaacccgcaatgccgccgcccacaagatccagttccagacgaccacccgtgctgcactattgtcgccccaggcgatgccccccgtattcaaggttcatcatctaggcctacctcttgtgtatctgccgatatcaaacaccgaaaagatgagtttgtcttgctgctctgctttacttgcattaggctcgattagtcggtctggtcgatgactaatcgcaactagtcgactggtcggtagttatacgactaggttcgactagatgacttgaaaacaataatttccacccatacaaaatgtgaatatgtaaggaggtagatggcaaaatgaa

SEQ ID NO: 125481 - DNA, 513 bp, Zea Mays
ctttgacgacatccccacccgtcgaaggcctatgggtttgaaggctaacctcggcaaacccggccgaaagcggacgactcgtcataagtcagaattgctaaaaggaattggcccatcaagaaccaagccctttgaagggctcgaatgtctgagacacgctccctccctagcgtaggccaaataggcctcgacagtagaccctatcacgactagagtccacgtctcacctatggtgccaataagcctagaagatgatccgaaggaatgccgacggagaccctgaagtgaaggtctttgacatggaaggtcgaggagttacgcctaagtagcatgcccatggtgggccttctaccaatcgtgatagacccactcgtcggttccaagcacactgttatcctagctgagggtacaataatgtgtataattataacttgggccgcattgttctctatttacgtcgttgtacagtatatttcgagaatgtgacgggtattttagggccctgctcttggt

SEQ ID NO: 125482 - DNA, 353 bp, Zea Mays
atgtcttgttaccaccatatgagcggattaaattgactgctcagtctgttaagtgtgtttttcttgaatacaatcctaaacacaaagactgttgttatgatccatctactcgccgtatttatattcctagagatgtgagttttaatgaaaatcactccttttacaacaagttcactcactcctcatattgtcccacagagtccacctcattcatgtgtcttccttctattcctgattttacatctacaccataatgaaatctacacctgatgtcctcattcctataacaccgccttccaccttcatgttatctccaccttactattccaaaccacctgtcatctagacctaca

SEQ ID NO: 125483 - DNA, 390 bp, Zea Mays
ggaacttagcacaaagatagtgagttcaaaattgcagatagttcatcattgctaatagacaatgttctcaaccagcaacttagcataaagaaagtgagttcaaagttgcagatagttcatcattgctaatagacaatgttctcagccagcaacatagcacaatacataacgacaactatcccttatgtgaggccctattctgccacatttgttgagcccaattgtccctggtagcagaccaggcagcattgtccatgacaaggtcatggggagcttcctcatgaacttgatttgcagcccatgtttcttcttgtggaatatgttcatcattcccatgacgaagaatccagttgtggaggatacaacaggctagaactagctttacttgtg

SEQ ID NO: 125484 - DNA, 543 bp, Zea Mays
aagaggttgaagtagcaatttttcttttccctccttgctttcgagcaggaaaacaatagtcaggataaacaaacccaatcacatcaaaaactctatttagtctattttttcctcgagcaccgaaggcaacggtcatggcctcgtcctctgccttcgtgtaggcccccagcatctcattactagttgtctcaacaacatctagccaatcgtcatttggttcgtcaaactggtttctataccggaaggtgtatctaagataaaccaaaccaccttgactggagccagcagcagtttccttcggcatctctcactcattcacaagaggccataccttgtaagcaatgtgttcctgtaccaaatccctggtatccatgtaagtacacacagtgttgaaagccattagatacgcttgcacctcatttccaattgcaattgacggccttctaatgccgaagcgtgaccatattggacgctgaataatgcccctcacatcctccctctcgctcagatcattctttacatagaaccattgcttcatccaag

SEQ ID NO: 125485 - DNA, 966 bp, Zea Mays
acccacccgtcagggtttccctcttcctcgcggcgtgctgttgcaacagaatccgcgcgcaatccgcggcactagctccacccacctcgcggcccccttataacatcagggcaaaacctctccgctcccctctcaaccacacgcgacctcgagccgttccctgaagccctccaatttcgccgtgccttactcctatttgaccactagtgccgccaagacaaattgagaggggagtgtagctcatcgccattcatctcgagccgcaatcgtttaacatccttgtcgggaccggagggcggtcaccagtgtgagccaagcgtgtgcaatcgaccgacgcggtggccccttctcatcggagtgtggcgggtgcgaagatccgcacttcgccgcgacctgccccaacccggcgtccaattgcggtaagtttcctacctgtacgttctgcatcaacccgtactctgtttaaaccgagccacaatagaataggagcgtcgtctggccgaatcgcccaagtccggcgatcctccgccatgaatggtggcggcgccgccgcttcctcgatcgggctttggtaaaggaatcctgaccgcccgatctaaaatgaacgctagcgattaagacccagagtaccgcttcacgcgtgagaccgaacccgttcgattgtgatcgatcggtctcgggtggagcacgattatttagaatatggaccgtagatctttgatctaatagtcagcgatgcgtacatgtttgcatagtgagcggatctgatcctacgcgtcgagctctaatcggacggccgagacggctccataccccttcgaccgagccaaaactgcaaaatagcccctcggtttcattaaaatcaacccgccgtccattagtcactatgcgctgtgtctcgagtttcttgtcccgagacccctgcgcttcacagaaaatgaggcctagtccagagctgttttaatt

SEQ ID NO: 125486 - DNA, 439 bp, Zea Mays
aacggagcgggtatgggaaagtgggtcgatgggagcgtgctctcagacgtgttctacagcgacgaggtaaggttcttgatgccctatcgcgataatattcaatcggttgggccgacaagctatgctaacattcatgtatgctagcacatggcatagaggggaaggaacgaacctgagaatggttggtcacggctgggtgcctgacggcagcgtaaatgaccacgatgggggaaaactggaatttgtgagctctagtgggtaactggaagtgaggaagggtgcgctaggcgcataaccagaaggcggatcagggagagcctttaatttatagtagctacgtgagtgcttcgtgaatttgggatgagaagatctcacggccggaagggaggtgagtcatcggagggcaactgtcgtggcgctcggtgaggtaaggccccag

SEQ ID NO: 125487 - DNA, 630 bp, Zea Mays
tgctgatgcacctaggctgttttgcagacagaggtggtaaaaaggaaggtggttgcaggaagcagaacaatcaaaaaggtggttaacgacactttcaatcgctatctcggctagtctccgatggatagacgtattacattttaagttcatctttctagtgatcgtttgtgtgtggttatctagttgttgatgtatttttgatgtcttcctgtgctgtaatagccttcttcaggcgtagttggtgtggtttcgctaaaacatcgtctgtgtccttttatggcccttagatatctcgtcttcttaggctggctccaacaacaaacagctatattgcccagctatttcatggtttacctgctccctgtattttacctggtcaacgatggacctcctgtttgcaacagaacaggcaaactggctgtgaccattggtacaatctgtttttgcgccaaagaaacaaagtatgctattggtccaaaataaatggctgctgtgccaaagacaagccaatttgcctgttctctctcctcgcatgcaatttgcctgggctagatagctggtccattggatgcgctacagtaccagttgcaagctaaattagctttggctggccgaatgcctggcctattg

SEQ ID NO: 125488 - DNA, 368 bp, Zea Mays
gaggatgatcggcgagaggtcggcgctgcgtatgcggcgtgagtacctcaaggcggtgctgaggcaagaggtcggcttcttcgacacggaggtgagcaccggcgaggtgatgcagagcatctccagcgatgtcgcccaaatccaggacgtcatgggagacaaggtaacataacagaggacgctgctgcagtgcttgctttgcttggcactgaacagtgaacatagctagttactggacagggcatcatgctagcttggctgatcaatctgtcgccgcgtacgatctgacagatggcaggattcgtgcaccatgtcttcaccttcatcttcggctacgcggtgggcttcagcaagtcgtggaagatcgc

SEQ ID NO: 125489 - DNA, 561 bp, Zea Mays
ggctaaggtgccaaggctgctggtgttggagcaggaacattgatggccatggcaggagtagtaactgcagacactggaggcactagtggctgagcactgatagctccgacgacctgagtagagaagtcgagagtgactggctgaagcagagagatagatggaccaaaagactggagctagggtcatgactggatagctggcaccactaaggcctgaagagctggagatggagcagactgcactggaggaacgagaacaccgatatgctgaagaatgtgagtcatgaaggactgatgctccaccatgtcagccaaaagttgatgctagagggtgtcctggcggtcctgaatggtatggaacatagagagcatccactcaaacatctgttgttgaatcgttgcatgacgggcctgctcggctgtcaggtgagcctgctgctaggtaagagatcgaagaatagcggctagagtaggatcaatagctcgaggtgcagccggaggagcagcaatggagccatatgcctcgtgatcatgggaacgaggcggcatagggggcggtggc

SEQ ID NO: 125490 - DNA, 569 bp, Zea Mays
gttgttatgtatttgcggattgcttgagtaagggcgccacaagttctagtatatccaaaagagagaagaaacgtcaagatccttgcaggaatgcagaaaccaagggatttggttcaggaaaatgatgaacgcaatagggaagggagtttgtccgcattccgaagcaagctggcccatgaacagtgaagaaaatttcacgcgatatgctgctgcatcatgcatgcttcgtgacgccgtccaagcaagtgaaactaactttggatattttctcatcgtgggtagacgtagacttgacttatcaggagagaactgacaaacgagatcacaattggatgcccgtgaccaaacccacccacaaattccggaaccagaaaatgagagaacattgttcatctgcaggaacaaaggctattgaggaaacaacaagtaaaagaataagacaaaacaggcactatgtactattgtgaatttatacacgaaacatgtttttggaccaaaggtgatccagtaatcgatctacaaattttggaaatgcaatagactccgggctgaagaaaagaaatacacct

SEQ ID NO: 125491 - DNA, 370 bp, Zea Mays
gtaaggtttataccgatttttttgcaaattaacattttcctcgtaaaaatttaacttttgggcacttggacgacttattgttgtttttggatactttgctcggcgccataggcctatggtgccgcgataatatggctcagcgtcgtgacttatggtgttgagctatcagatgtgctagactcccatgttgcactggcgccaacatggccttgcttagcgccacacatcacgacgccaagctaggcaaaaatggcatgcatgcctttcctcttccccacgctatctcctttcgttgccgcggtgtctcttcgtcgcgccaccgtttctccgccgcaccgccatttctcctagccaccatgcccctgttcct

SEQ ID NO: 125492 - DNA, 475 bp, Zea Mays
aaaacccgagcccgaagctcgaaatccgaaaaacccgaacccaaacccgtatagcccaatacccgatacccgaaacgtttatgcgggcagtaaaacttaaaacccgatattattttgggcttaattgggtagcaacatccggtacccgaaatacccaaatacccgaactatacaaatatcaccacatgcgtctatagtaccagtactaatgttgtttttctttgcccagttgacatactagctcttgctcttccgtccagtgtgccagcacgccgtggtgcagacgtgcagtactgccgtagcacctggccggactgcaacagctagcagtccatcacccaaccgaccaaccatcagtcatgcttccggttctagagtttgctatttcctcaactaatcaagatcagtttcacggtgaaatatttcctagtttgctcattttctactctcactgcatgcttatgactcaaaagcc

SEQ ID NO: 125493 - DNA, 769 bp, Zea Mays
gcgctgcccctcgcggtgacttcggtgtggtcgaatgccgaagaccgtcgatgcggtctttttcgacattggcttatttttttgcgggggatttttgcttgtatattacatggcgctgcttcgttaaaaacctcacccccctgggaggaaaagaatgcgggccggaataataatgtttggtgaattacaagggcgtgatggccctgaggattcaaacaaaaaatttgcgaagattatctatattccaggaatgttccaggtcttcgccagattgtgttgttaatctgtacgcgctgggagacgacttcttcttgacgataaatggtccttcccactttggttccagcttaccccgtgactctatccgggttgtccggacaagtacaaggtccccttcgttgatttctcttgggacgactgcgtggtcgcgctaggccttcgtttgggcttgatatttgtcgagggcctgcagggcgaagacacggtctccgtcaatgaggtctttggaagttggctcgtcgacgtcgggtactgctgaagcacttgtctgcggggacccatgtttgatttcctgcggggtcatggcctccgatccgtatagcaggcaaaagggagtgaatccggtcgcccgacactcggtcgtgttcagtgcccagactgcttcaagtagcaggtcggcccatttgcccttcttgtcgtcgaggagcattttcttgatcgccatgaaaatcttgacgttggtgcgctccacgacgccgttggattgtgg

SEQ ID NO: 125494 - DNA, 502 bp, Zea Mays
gacaaggaccgcgtgggtcccgctgggcggtgggtgcgcagtgggtccggtccgacggcagggtcgtcgcgtgcacggtatagaagtgtggtgtcccgttacgttacgggaaagctggggacacgttagtgatgttcaaacggccgcccgtctggcatggcaggtgaagcccagctccagtctgttaggcacggttaaaaaactgaatcgagttagtagattcgtcggcttgtttacttgaacaggtctagcatgctacaggcttaaacggactggattgacccgtaagcgcaaacaaaagtaggcttaatgagtcgaaaaacatggtttagtaaaaaagccattaaatgggttgtgtcggaccaccacgtcgtgcttgattccctgttctgtttaggccaagccagactcgtatcggaccaaaaaacatgcttcagatcaggctttcgggtttcggccttgttagttgttggagagggaattctccggccgggtggcggaa

SEQ ID NO: 125495 - DNA, 772 bp, Zea Mays
cgtcgattaccgctcgccgtgattcgtgcgccgtggacaccagataagcatcacccagtaagattctttaccgccgtgagctgggctccactccggtgacccctcccgtgccttcccctctgctttgcggcggagcgataggctcgccggtgaactgtcgcttcccggcctcgcgccgcgtggttttgctttccaccgcaacaccgtgactcgctacggccatctaatcgtcgccggtgagcttgccacggcagtagccacgtattcaccgcgccgccttcgtctttacctccggccgccaacacggctcggcctaattaagcaccaccgcctgcgggctctataaattgagcgtacccccagctctgccatgcatccaagcacctactacacccacctgcatcccgaaacccccaccagagaacgcgaatttgggacttcccccaaaccggttgaagaacaccgtgaaaccggcttcaccgtggccagcccttttccggtcagtccccgtcccctgctttctcgtttgagcactctcacatcgttgtgatgcctcccaaacccttattttgcacggagtagcctctggtcgccgggaacgcgtcggtcctgccgcgctgctcacggccaccatggccagagctccttagtcaatcatgggccaaattaagttgggggaaacattcatggggacccggatttggtctcggccgaagcttagcgcctgtcttagcctcaatcggctggtgcagtggctcgccggagctcagcc

SEQ ID NO: 125496 - DNA, 394 bp, Zea Mays
cagggagcagtggaggacgcgtgcagatggagttctgagtgcagaggcagagggacgcacgcgcaatactgaatccgagcacaggggcgagcaccggccatggagaaagaagctgcgcgcggcaccggggcgagcagatgaaacacggtgcggttggaagcagcaagggcagaggagcaggccgacaggggccgagtagaggggagctccagccaggggcgcgcagccggcgagggaaaagcaagggcgcggcaagggagctccgtgatgcacagggagctggagaacgaacagagatgtgccatggctggagcacggcaggaaggagacttcggctgggagcttggcgcgcggcgaagcagacagcagagggagctcgcggccatggaggaat

SEQ ID NO: 125497 - DNA, 547 bp, Zea Mays
aacaagtacatgatgatgcatcggcctgcatcaccatggtcgatgcccctatactttggacctatgagaccgctacatgtctcatagcagttgacttttctgattatcaattcataagtaaagataggaaaggcttcacccctataatgctagagccgatggaaattcggctaaatcccaagtaaagtttaaatgatgagtacactcataagaaacatgtcctaggtcacggacagtctggtccctgaggccggatggtctggtttttcataggatggttcgacccttaaggccgggcaagtgtcgcagcatggacccagtgtcgtggatggtccggcctccaaaatcggacggcccgcagccgcacagagatcgtgtagttcctctaatggaggcataatagaggaattcagagatcttgacaagttaggacaggggtttacatcggccgatcctttggaggaaatcgaaataggagatggtaaaactccaaggccgacttttgtgaacaagaccctggagaccgatcctagagatgaaatgatcg

SEQ ID NO: 125498 - DNA, 602 bp, Zea Mays
caaatttggacggggaagtgcgcacggtgagaagggggaggagtcaccggagtttgctaacgtggtgttcactggtttacgttctacggcggtcactgctgagtcttcatggcttgcgacgagtggtgagatgacttaaggcatgtcactaccgatctagacagcggcacaacggcgacggtcgcacagccacgtcgccggtgcaagttggtacaacaacagggtgaaacagtgccccaagttcatctcctgtgcgatatttttcaccctgtgtagttatctgcactccaccaggcacgaatcgcaatagcggcgaggatcacggcgtgggatcaccagcggcagtacactaaaccattgtgaactcccatcagggcgcgtgatagagcaagtttgagagcgtttaactccaaaatcgttcagcgctaggtcaagcttggtataacaaagttgtttactaatgttagagcttcaactttgccacagtgaccctgaccttatctccattgaattaaccatgaactgcttccaaagttaaccaaatgtcactgaacttaggttttcagagctaaggttgtctgacaggccagcttcaagtctcc

SEQ ID NO: 125499 - DNA, 525 bp, Zea Mays
gctacgcgatgctacggattccacgaatccaacagaggacttaccagagcgggagacgacccaccgacgagtgtccacgacggacagcggcccgcggcagaggcacgatctcggcgacgaattcagcgcaccacagtcgatctccgcccgcggcaccccaacgacaaccaacccgaggctcgagccgtgcgtaccgggtggttttggggcgacaccagtgacggcggtgaagctgtggatctacgtcggcggtggctcgttttctagcttcctccctcacggtgctctcgtcgctcctcacagttatgacgaccgtcctactaggatgatgagggggtcgcggggccgagtaatttatagctagaatcaagtccgtgatgggggtttggctggaatcgcgcggagcccacggcggcggatttgccgcggttctgctgggatccgaaggggacgctgaagctgacaaggtggggtccatgcgtcggtgtcagagccgtccggttgtgtggaggagcgagatttgcg

SEQ ID NO: 125500 - DNA, 773 bp, Zea Mays
atgaactcgtgggcaggaccactgctaccaccctgtacggtatgggctccatcgttagctttgttgatctccccgcaacgttttggtccgttcttcgatgagctttggtcaccggatgtcgggcggtgtcgcctcggtgcgctccaaggagcggattccggccacgccgccactcaacttggtctggcagcgagtgggaagaagacgatgttctgaccgttgatgcgtgatggatgacccagattagtttaagcgtaccgctttaggcgattggatctgtgctgtcgatcggatgatgggtggccacgaagtgattctaaagttttaaatccgggccgtgcattgcggatcgggtggcgcggatccgagcaagcctaactcttcacgcgatataatctgagtcgtccagatctaatccaatggccgaaatcagcccataccccttcgccgtgaccattttctaaaagagcccttggaacctttataaatcaacccgcggcccttccacctttaagattcataacaagcgggtcctgtaatctttcacttcagaccctgttttctttactaattatacccgagttcattttaattcataatgaatgaataaaaccctggaaactgatttttggaataaaaataattcctagaactttgaaaatccataacttgctcattttaagtccgtttcaacccattccagttgcgttagcttcataataatattaacttcacagtaatattatcattggtaccatatcacttacttttat

SEQ ID NO: 125501 - DNA, 315 bp, Zea Mays
cgcctaagggtgcagccggactaagcacaacaagtgcgcaaaaatccgaagtctatcgcgaagactatccgcgcagaagtcgcctaagggtgcagccggactaagcacaagcgcgcaataatccgaagcctatcgcaaagacttcgcgcaagagccgcctaagggcgcagccgacccaatacaacaaaagcagaaacgacaccaagaccaattacaatcatgctggcacagcataaccaatcacaccagacaaagtacacagccctcgcaggcacaggcacgcgagggcacacaactccattttacaagccctta

SEQ ID NO: 125502 - DNA, 588 bp, Zea Mays
tcatggtagatacaaaagtgtgtcccctgtccaccatctaatattcttcaccctcttgtcacttctcaacacctctccattggccaccttgacagagacaggagaacagggttcagtggctagttttaacttgtccaccataacttggctgatgaaactggtagaactgctagaatttaccaacatcaattgattctgaatcaaggctctaaacctaatacactctgaactattagctccactgatggcatgaagagacaatctgtgattctcctcttcttgtacctcctccttttctatctgccctagctgctcctcagacaataccatctccaaatctttagtggtcaatacattgagttgagggattactctttttggacatttagcctggtgccctggctcaaacttctcaccacaagtatagcagagtccatttatcctcatgtattctttcacttgtctctccttactccatgccccttgatccactaccttctcttcagtcctaactcctgtcactcccctacctccttggtctatcttactattcctaccactattctttaccacaatctcctgctgcac

SEQ ID NO: 125503 - DNA, 869 bp, Zea Mays
ctacatcacttaggcatgctaggaaaaatatggttgccctctggtttccattttcaatcccttttcttcattttcctaagtttgagcataaacaagttttagtgaataaatcttccttaaccttgtgtactggggtgtatattaattttaaacagtgtaactactaggttagtgtctccactattttctcaaccctggtctaacaacatttctatcttttcctttattattaagtttcgggcagttttcttatttaaatcaaaactctataaaacattacaggaactatggggtttactatttttgcgtgatagtttatgtttcacaaagtctagcaaaattggtttgactaaatttggatgattattcttcaagttatgtatttatcaagttctctacaatatttaaaagaaaagtaaattcgaaatgggaaaagaaaacagatttgcgctgaagtccctgggttttcttcccccttttctctcacaaatcagccctcggtctactattcacatgagtcacttaccttacacaaaaccccctagacttaacctatatctaacccgcgatccttggctggctggaacagtaaccggggcaaagatcacggcggcgaggcttaccggcggcagtagagctctggtgggttggtcagtgacgtcggggagatcacgacgatcacgtcggtgtgtgggtcggcgtcggaggtggtcggagctgctctggccacgagcgcaggcggtggaggtcggcggtggcacctgctccggccaaaccacggcggtagggttcaatcaaagtgcacgaggagctccactgggtgatgtagaggctatgcgcgcaaggaatcgagaaatggttcagtggtt

SEQ ID NO: 125504 - DNA, 648 bp, Zea Mays
aaagcgaagaactacgcgctagcgccacaacgtcgacgatcaccatcaggggctcgtggtgtgtcgtcgacaccaaggaggacgacgtcgcgagccaaggcatcaacggaggctgcgtatcagactcggatcacggcaccagaagcgaactcgaagcaacagcagcacccatacccgatccctccggcagttcctgataacaagctgcgaccggtcgaggcttctacttcatcgtctcagaagcgtggccgcgacgtcgacgctgcgtggtcgtcggcactgcagctccggatggatgaggagcttccagtcctccaaggcctcctcaagaaagtgaagcccttgccccgttccacgttccttgccgccgacgagaagaagaactatgcaccatcacctgcaggacggtcatccacatcaggggctcctgttgtgtcacgtggccacgacgtcgacgctgcgtcgtcgtcggcactgcagcttcggatggatgaggagcttccagtcctccaaggcctcctcaagaaagtgaagcccttgccccgttccacgtctcctgccgccgacgagaagaagaactatgcaccatcacctgcaggacggtcatccacatcaggggctcctgttgtgtcgcgtggccacgacgtc

SEQ ID NO: 125505 - DNA, 315 bp, Zea Mays
gcttgtgtgtgttcacgaaactacataaccacaagagcataatggatagacccatgaacaaaacaacaccaaagagaaaataatttaccttgaactaatgaagagcaaagccttaatcaaactccttcagatctactcaaacaatgcggggaagtgcaactttaagaaaataggtaaaacaatgaggttcaaacatttgaataagtagcgcacacctattgtaatgtctttagcactttggttcagtctctaactcagtgtttgcagaaggtgcatatttggacttgttttgagcagaaacagaaaacctcaaag

SEQ ID NO: 125506 - DNA, 279 bp, Zea Mays
gctatgttgtgctggtgtgattatagtccgtcttagcgcggatggtttgatgctgtcgtgtctgcttttgttgtactagttcggctgcgcccgtaggcggcttctgcgcggagtcttttgcgatagacttcggggttcttcgcacttgttgtgctagtccggctgcacccttaggcgacttctgcgcggatagtcttcacgatagacatcggattttttcgcacttgttgtgcttagtccggctgcacccttaggcgacttctgcgcggatagtcttcg

SEQ ID NO: 125507 - DNA, 492 bp, Zea Mays
atttatttagctattttgtacataacctctaaacattgtcgcccaaggatggcgtggtaggtcccctggaatccaactacctcaaaggtcagggtctcgatcctgaagatggtcggcgttccgaagctgatcgggggatcgattcgcccgagcagggtcgccctccttcctggtacgaccccatgaaatgccctcctatcggtcgtgggcctcctcggtcgaggcccatggcgtcgagcatggcagagtagaggatattgagctcgcttccatcatccatgaacaccttcatcagtcgtaccgatccgacaataagactgacgatgagcaagtatcacttgggtcatgagatttgatctgggtggtcagagtggtcataggtaatggcatggttgaatcagtctaggaaggtcgggggcgcttgcacagcctagagtacctcacgtcgttctgtcttccgatcccttattgacgtgtagtagtcggacccat

SEQ ID NO: 125508 - DNA, 317 bp, Zea Mays
gtgtcttatatgtcatatatttctcatgctgctccttgaatgaaggtgtcaaagaagtctagttttgtagtaggtggatgatgcagctgtgacttgtgaggctggaatggcatgccgtaggcgtgtgtgatgccggtgaggatgccgatgtcgtggtatctagctgattgtgattgcgatgtgtgtttgccgtaggcgtgtgtgatgccggtgaggatgctgatggcagatttgtttagaagtggctgagaacaacctacctatcttctgtagtactagatactattagtcccttaaaggcttctttttagtttgct

SEQ ID NO: 125509 - DNA, 326 bp, Zea Mays
tacatattagattttgttggatttgtggtttttgtctagctgattttattctcgaactggaaattgtagattgtacgatgctaccagcggctgcgtccagcgggtaagagtaagattgcgaaccgagcctcgagtccatagggctagccggctagccctgcccgggtaggggaaccgatcgagccgataacagctgagcagcactacaggcttgcagcagagggacagacggacagcagccagccccctcaatttccacgacgcttcatgagtggagggagacacgagggccagcttatgctgctggcatgcagcttctgcggctt

SEQ ID NO: 125510 - DNA, 344 bp, Zea Mays
atatattcttcaaatgcatcacattcagcaaaggaaataggtaaatctgttctagcaatcaaacgacacaattcagtacgtgccctagcatcagagtactcccaacgcattagtgaaccatcaggattatatttaagaacagattgaattctaccagatcgttccttttctttcttagcagcacaagtatcaacatggcgtagcaaatgtccagtgccaccagaggatttagcagaaaatgtagccttacagtggatgcatatggcagagacccttaccctcttatcattcaccaaatctttgacctcttcgaagtcattccaagctttagacctcttcttccc

SEQ ID NO: 125511 - DNA, 452 bp, Zea Mays
tatgcattcggttttgcctgacagaagtggtattagagctatgctgaccctaggtcgttagactagttagaaatggaaagcctagtttgttcaaaacatgctaatttcattcttataaaactattttatcagcctcacttctttaaaattcaaatgagttgacatttctcttgtagatggttcgtactctccaaaccacccgagttaacaccaactacgcccctccgccacgtcaagcttctgtctacccagtgatagtggatgaagttccggtggatctacctcgcattcgagtggagcacagagtcataacggaagacatctcggaggaacttctgccgacgtccaccccgttggcatagtcactggccttcgcagctaggtcatcaacctcagcaccgcctgcaccagtcgttcaagctcctggacccggagacgatgacccagacgac

SEQ ID NO: 125512 - DNA, 663 bp, Zea Mays
gtcgcggcggggacgtggcaaacccgtgagaatagctatcgcttgacgccgcagttaatcgccagctaaggccggcgatggttatcaccatggccgcggcagtgactcaccgcggctataaattcaccacatcctcgctcccttcgctcaaatcaaccgagctccgaccttcgtctctaaattgcgaagccatagccaccattcccatctccgattagcccccctagccggtgaatcgccgttttcccccaaatcagtttaccgccgccgtaaaagcaccctcgcagtggctagccacttcgaggtcagatcatgctctctgcagttctgtttcagtacctgtgtgcattcgtgatgctcatcaacccacccaatcgaactagaccatccccaatccgcggcaacgtgtgctcccatgatcggtgtccgccgtgatcgtggacaagcgactcccagtagggttcatgttagtttagtgattgttcctaggtcgccttaggtcagtgaagcctccccgttagttattcgaagcagtcatcgccggccatggccggtacggaccacgttagggatgatctgcgtgcgcgccgtggtcaggggcattcgcggggaagagatagaagatggagggcatttctgcaatttgtcagtggcacagaggaa

SEQ ID NO: 125513 - DNA, 440 bp, Zea Mays
gaatttttctctctgtacacattacttgatcaactagatcttgcaaggtacggtatgggaacatctcgacaaatctagaaatctcttcattgattctgcctaaaaatcttgccatggttgactcgggatcttctctgattccagttcgcactaatagcaactccatctccttaaaatattcatcaacggatttctttccttgcttcaataattgcaatcgattttcgaagatctcgttgatagctggaaggaacaaattgcctcttcatcactcgcttcatctattcccatgtattaatatgtcttagtcccaatctaagttaatgttcttgcaattgattccagcaagtaagagcataaccagaaaactcgacaaaggccaagttcactcggttttgatctgaaaaattgtgagctctaaaaatttgatcacattgctc

SEQ ID NO: 125514 - DNA, 455 bp, Zea Mays
tgcgggttgttttctaataagtccagggactcttttgcaatacctcatggcgaaaggatatgttctaatctggaccgttagatcaacgatgggtggcgtagattagacatgactttaatcgaaacggtacacaactagcaccgtccgatcagatctatatggtcccgattgaatcaacagggaagtaagcgaggttagatctctaccgctcatctctgaacgcacgacaccgattacactagcctaaatgggcagtgtgctgcgatctacagcgcccactccaagatcaacggccaaaatgtcgtcgtcctcgaccagacgacaatgcagcggcacacacccaaggcgacggaggatcaccggccaacacgcccccacggtgaatccccgtccgattcacgcgtctgactcggtttccatgaactctcgactactacgaatcacatggctagccc

SEQ ID NO: 125515 - DNA, 492 bp, Zea Mays
gcactccttctggaatgtagtgctcccgaaatgccaatttaaattcgtcccatgtgacttgatgtccggtaggctgaatggccacataatttccccactaggtgctggcaaggcctcttaactgctgagccgcaaacaatggcttctgggtctccgtgcatcgaatgagtccaaacttctgctcaatgacccgcacccattcgtctgcttcgagaggatcctcaaccttgacgaatagtgggggacgggtttctaagaaatccaagtatgaagtttcacggggtccttgcggataagccctcccgccttgttgttgaagttgctgtcccaccatttcacgtaggaagcgggtgttgtcagcggttgcggtgatcaaggcggcgatagcctcggccagcgtgggcggtaccggcggtggattgggtgtatcatcttgaccacgggatgttcccgcgccgtcatgtgcacgagttcgagatggcatctgaagca

SEQ ID NO: 125516 - DNA, 305 bp, Zea Mays
gaaagatctactgagcgctagtactaccgtattatccttgtccattcgttcactacacaccgtacattttaccgtgcctgctgaattccaggccttttgccgtaccgtagtgcgtactgtactgcatactgtagagtacagcagttcgcctatttttgacgcatgcaacattaccgtaaatggctgggtggtgcagtgggcgcacacgtacatacacacgaaggagcaacaaggacggcacggcactgcgcggaaattggtggcggcccacgtacgcgtctttccgtttctagcagagctgctgc

SEQ ID NO: 125517 - DNA, 1465 bp, Zea Mays
cacataacctctgccgctaaaagcatgccagaatacacatcaaaggaaaaatgtccattttcctagtaacccaagaagattgcaagttgcaagcacatatctataaccatatatgacgatttgctgacttgttaaaaaaatatacgacaattcactgaaaagatggccgtagtcacacatatataacagagtagtgtttttcacactcagaattgtgccttccacagactcatgaatagagtacaaaacaccaggatttgtaggggagacacaacctagatataccagtattgactaataaaaactcacgacagtttggttgaatttaacaggtatataatgctatctgtttcgctatttcttatctattgtttaccttctgtttccaactttgtatgcatggccaacatctgccacatttgacaattcatagaatcgccaatcttttaaaatgatctacacagttactgttgcacaatgcgagacagacaagcgatccatctatctagtacattccttcggatatcacttcactgttcagccttatgaacagattactgcgaagctcaagccgctggttaaaaaaagaggctccggatagtcattcatcaatggattctaacactatctgaatgacaacgtcatcaagaaggtcctccaccatcagatcctccatgtccaacgcggtgcactccgcgtcatataccaggttcatccagccgtcctttctcataaggtcatgtgccacaatgtcctccaccgtctggccttccttccaatgcaggctcaggtagcagctcaccttcgcccacacctcctcaaggacatggtaccccatgggaatgggtctggttcgcaggtcgaagcgtgagtgccatgggccgatgacgagtgaggagtcatagatgtccagcaggacctcgttgatgagatcaaacaggagcatgcgcctgacgatgctgtgaggttcatcgcttgccatgctgacctcctgacacgagcattctgcctcgtcaaagaccacagggctcactggctgattggacgcgtaccagtcgacatcgccgcagctgaaccctgatttcttgaggatgtccttgacatactggaaatcagcctcgttcttgtcactgacatagatgtgcaagggttctgcagcaccttgttcagaaaattcgtgtatgaagcggaagtccgaatccaaagcatcgttaggctgccctgacttgactaaccactcttcagcttcaagatcagcatccttggcaccagacagtttcgtcgccttaactaaccactcttcatcctcatggtcaataccattcatgacacgggagcgcttcagtggtgtgaccagccattcttcatcattgaaattggcagcatatgctcctgcggacagtggtggcttgactaaccagtcctcgtcctcaagctgcaagttttcgaactgtggctctgaatc

SEQ ID NO: 125518 - DNA, 375 bp, Zea Mays
ctatatccctactactctataagacacaaaagtgggcgtccacacctttaccgtgccaccgcctagtgcccccgcgcgttgtcagcccgcatccgccgcgcacgtccgagacaacaccgtgattccctcccccagccgccaccatcacctcccctgatatgtgccctatcctccgatgtagagctccgccaccagcccggccagcctcgcttcctccctctgcctctccctcccaactctctccgctgaagggcgcagctccgccggccccgacgcggctctgtcggccaccgcgccgtccctccagtctacaatcttctccacggatccgcgaccaccacttcccgtcttccatttatgcctcccctgtcgtca

SEQ ID NO: 125519 - DNA, 380 bp, Zea Mays
ctgggaatgatccaacaaggagccttaagtcaactaaagcttgagtcagtccttttacaaaggataatggatgctcaaaaggataatgagggtatgaaacacatccatgagaaaatagaggccggaaaagccaaatgtttcaggaaggatgatcaaggcattgtatggttcaacaaccgcatagttgtgccgaagaatgaagagctccgccagcaaattttagatgaagcacatcttagtcgctatcctattcatcccggaagcactaagatgtatcaagatctgaaacaacattattggtggacgaagatgaaaattgaaatcgcacgctatgtggcagggtgtgacacatgcaaacgtgtcaaggccatacatatgaa

SEQ ID NO: 125520 - DNA, 1660 bp, Zea Mays
ccctttgaatcttcctgtacctctattaatgtacaaacaaatgggtgtttcatcactcttgtgactgcaggaaaatgaacaaactggatgtggttggtactatacccgaggagccgaggaacctcagacacttgacaactctgtatgaactctcccaacttcgtttctcgctcctcgagctaggccatgtttgttggatgttaaaaagtttgtgcgtcctatcttttaaggcttttagcggattatggttatctacttatctgctacagtggctatcgttttacatatgctttgcaattaaatgaaaaggatgtccttaaatatttccccatatgctttgcaatgcaagtaactgaaagaaaaggtcccaatgtttcatgcatcatcataacccatttgaaatttgcttatttttttaccaagctaatttattttattactacttgaccatacctgtccgtatgttgtttcaggaatttacaacagaattacttaacagggccttcgccatcgttccttcttccttggagaattgactgctttgcaacagatgtgagatagatttaaaacttaaattactccatgatctggataacatcgaaacctaaacctaattcttctcccttcatcaacacacaaggtcgctttctggcaatgcattatcaggaagtattcctaaggagctggggaaccttgtcaatctcataatcctgtaagaaatggactttgtagtgtcatgacctatctgataagaaatatagatttacaaaaaacgtgtcctcaatttaactcacgtgcatgtacatatcacaactattcaggtgtgtaatcaccactgaattaaatgcatgacaatttaacttgcctcaaaccacttcaagctcttcctattagagaggaaacaaatttacgtcttcgtttattctaccagttatcatcatgcttctatggtaaggatattccacccacaaatttaatgcttctaacctggtcttactatttatgtgatttttggagtttaggcacgaacaatttaactggctcccttccttctgaattaggtaacctggttaatggcaatgatcctattgtcgacagttgacactcgagcttaacattcccaaaaaagcttcttttattcaggtctgaataatctatccaaatcaactgcaaagtttcaagggcgaataaatattcttaggtctttgaaaattccaagtaatctgaacttattgacctgctacgaagaaacattcaatcaaatgagtgatatgcctaagtatacattatttgcaaatgctacaatatataacattaaaagctaaaaggctataattgtacagtttaatataaggctgttaagattagtattgtagtacaatgtgaggggatcatttggtacccatctgtaatatctgaattcttaattgtatgtccttttcctagaaggcatttcagatttactccttgaagcgatcggcatatgctgttgtgctgagagcattctgtgctcagtcagaccttctctcaaggttacgtcctcatatggtgatttcatatgtgaagtattactaaacaaattataattagtaggaactatggtgatttcatactctatgttgtttgagaaaaaaattctacaaactgtactttgttagtt

SEQ ID NO: 125521 - DNA, 1245 bp, Zea Mays
gcaggttctattttgtaataacctagggtctcttacgcaattttacagggccgaaggggtatggttctttctgagccgctggatttcaatccgatggtacatattagattaggcgcttaatgaaccggtacgcgcctgatttaatctctaccgctcgttttcaatccaaaggcccgagttctattactatgtgatctaatctccaccgcatagactctatccaacggttaaaatgcatcccgccaaggatctaatcacagccctccatggagatctaacggtccagtgatcgtcatctacattgccatcacccgaccgaatgccccgccgcggcgttcaccagacacggcaaggccattaccggcagcacccaaagctcaagtcccaccggtaaacttcactccgacaaccgcgaaacgaagagtagtggattgcgagactggtacaggagttctcaccacggttggtagcgcggacagccctggccacgggaacctacggtcagcggccggacgattcccgacggtgtgaaattaccgcaactccgagagcccctccagatgcggatgccacgaacggtttccacacgcgccggcgacttcgctcgatcctttcctggtccgattccaaggccccaatgatgatgaggacgcggggcatcactggcggctggccttctctgctacgcggctgcacagcggcagcgacgaggtcgaccagagaagaaccactgccacatcgaaacccagcaccgaattcgcaccccccaagaccaccagtaagcccaaatcgcacaaggacttcactcggagctcggtcgatggtggacgcgcacgacggcgaggatgtcccgcgagtgcacggtagacccgcagaacctcccccgcgaactcggtctgtggagttttttttgtgatgaggatagctaggggaaaggcagggcacggtatttattcgttggcgctccgaaatcgcggagtccggtggcaaatccccggccgaaattgcgcaacagaacagagtctgttggggtgttccgtgatggtaggtagatggagcaccaggcgctgaccctaccttctgctgcgctcgttggagatgccctggcaccgtgcgcagtggcgcggcgcccctccttggctgcacgggtcggtggtgtggtcatggcggtgaaggtttcgcaacggccatggcgagctcccaagcagctaccgcagcgaggaaagcggcttcaggcgcaaccac

SEQ ID NO: 125522 - DNA, 547 bp, Zea Mays
ctcaatcgtcatggaggcaatcgcgacactagggaacacaagcggcttagtagtgtggcgacccgcctgagggtggagctcaacgcagacacggaaaatagggttcatgacccgatcaaagaccacgaatgtgccctagagaagctggtcgtcgtgaagggggacacacacatggtagggaggcacggaaaccacgatagaagcaggggttggcatggcggggaagggggtcggggcgacatcggtggcgatactaggcaagggaaaggggcacgggcatccccagcgccacgggaggagggaccactttttggagtgggaggagctatatgcggtggcaccggttggcatgcaacggagcaagggaaggagagcgtgggcgttgttggcgcgacgaggaaggaggctgttatgttggccgaggaaggggctactacggcgccgagcgcacaaggaggcacagacgaggcgttgcaggggaggcaggccatgggggagggggtgtcgaccatgggcagtgccggtggtcgggtggtgtggctgtggc

SEQ ID NO: 125523 - DNA, 561 bp, Zea Mays
ggcaagggcgcctcgggcgagtactggcaggcttctgagtatccaaggttgtatcagcctctgggaggggagccactaccgatgtctcagcaggagcagcatcggaagagtcctcagccagcaaatcaagcatagcacttatctctgcatcgctaggattcaggggcacctcaaagtggacttgtcgttcatcatcaggaatctccccgagcgaggcaaccaaggcgctaacttcttcagcagagggtcgcactctaagacccaaactgccatcagtaacaggtggattcgacacaaaaagggtgaaggctttgggaggaggcaggttccaggccgagtatgccactggggcaccaacatttgacaccttgcctctaaggatcatctcaagtcggctcaccaagtctgcagagggaattcttctgttggtaacccgggttgagtccgctaggcctcgatacaaataagccgggtgcgccctgtcttttagcggctgaatattcttgaagacaaaatcagcaacaacagcttcagcagtcagacccctctccttcagcaacc

SEQ ID NO: 125524 - DNA, 405 bp, Zea Mays
gcctgttggctgtattcgtacgcttgtattggtccggctgcgtacgtgggcgactttgtgcagagtgtctttgtaatgagagacttcgattaatgttattccggctgcgcccttaatcagctattgcgctgagtgtcttttgaataaaagactagcgcacttgtgctattccggctgcacccttagacgacttttgctcggagtgtcttgtaaataaaagacttcgattaacgctcttgttgagctattccggctgcacccttaggcgacttttgcatgaagtgtcttgtaaagaaaagacttcgattaacgctcttgttgagctattccggctgcacccttaggcgacttatgcgcggagtgtcttttgaataaaagactgattaacacacttgttgtgctatt

SEQ ID NO: 125525 - DNA, 467 bp, Zea Mays
cgggccccaataacactgtacctgcaaggccactactatccaagcgatcacaatgaggccaaacgactaaagcacagaagcagggattcgcattagtcgagggtcagctgtaccaaaaggggatcagccaacccatgctgaagtgcataactgaaaccgaaggcataaaaatcctccacgaagtccacagcggaacttgcggctccaactcatgacccagggccctcgctgccaaggtgattcgtcagggattttactggcccgcaataatttgcactgcaaatcgagtcacaaggtcatgcgaagcatgccaaaagttctcccctcgctcaggcagcccttcgcaattcaccaagctcatcgcccatacatggccacttcaacgctaggggctggacatcgttggaccactgcctacagctcaagggaacctcaagttcaccttcatcgttgtcgaacatttcaca

SEQ ID NO: 125526 - DNA, 804 bp, Zea Mays
gccgcatccaacccctcctctacacgccgctcacctctagccgcctccaacccctctggccgccgcccgcccctcctctgcacgccctcacagcaagctctggtgagtcctgctccccctctcctgcccacacagcaacctgcgccacccctctgcacgccctcacaacaaactgtgccaccctcacaacaagctctagggagatggaagatgcatctgcagatcgaccataatgggagtcaggaagccagcagccatacgatccagctaaacatcctaagagaaaggcaaaatcgaaggatccagcatggaactattgttattggccggatttgaacaaaaaagatgtggtgaagtgcatcctttgtggcaaaattgttcatgcgggtgttagaaggttgaagcagcaccttgttggtgttcatggtgatgttgataagtgcccgaagacaacatcggcaatcagcaaagagatgagtgattatttaaagaagaatgctagacagaagccgattgagttggatgatgataaagagggtgataaagacgatgaagttgaggtatttggagaaggggaaagtagagcatcccattcagttgttcagcccagttccggaacaacccaaaagtgaaggctgttagctgaagcaagccaaaacaattaacgcgcgttgaagtcttctaagtcaattgcatccatgcttcgcaaagcacatgaagatgtggttcctgagaggcattgcaagggcaacactcaaattacattgcaacgaaagagcaaggaggcgaaggaaagaacagata

SEQ ID NO: 125527 - DNA, 380 bp, Zea Mays
gtatagtgatcaccctgagtcatgtaagcgtgagcatgtcgcaccgacttaaggcgttttcgacttaagtcgattgctccgttagtagggtatagtggtcacccttagtcatgtaagcgtgagcatattgcaccgacttaaggcgtttctgacttaagtcgattgctccgttagtagggtatagtgatcaccctgagtcatgtaagcgtgagcatgtcgcaccgacttaaggcgtttccaacttaagtcgattgctacgtttgtggggtatagtgatcaccctgaatcatgtaagcgtgagcatgtcgcaccgacttaaggcgtttccgacttaagtcgattgctccgttagtagggtatagtcatcaccctgagtcatg

SEQ ID NO: 125528 - DNA, 352 bp, Zea Mays
gtgaggtttttaatgaggcggagccatgtaatatgaccgcaaaaatcccccgcaaaaactaagacacaatatgtcgaaaaagaccgcatcgacggtcttcggcattcgaccacaccgaagtcaccgcgaggggcagcgctgactaccctcgcgtgcgacactccgcgcaaaagtcgcctaagggtacagccggaatagcacaacaagtgcgcaaaattgaagtctttcccaaaagactctccgcacaaaaaccgcctaagggtgcagccggactagcacaataagtgcgcaaaatcgaagtcttttccaaaaagactctccgtgcaaaagtcgcctaagggtgcagccggac

SEQ ID NO: 125529 - DNA, 517 bp, Zea Mays
cagagggtctcgttgctttggcgcttgatggacatgaggtcccaagtctgcgccggtttgtcataaagggattgaaagttcacgacaaaccgatgactgaagttgtccccatcgttgaagcagtggcaaggaagatgttggagccattgcagtgcatcttgcctgaggacgatggacaagtacgttgtcatgacatcctccattactccagcggcctgggcagcgattgtgtagatagccaaccagccgcccgaatcctgcttgggcttggacttatcgacgtttgagactttgaaattaggcaaccattaaattgctcggagtagggggaaagggtcgagacaccgcatgtcccccagtcttcctgatgatcttctagggcatggtcgcgatgacggtccctgagaagtgagtgacgtcgtgtgtcatgttgcctctcccgggttgaccggcctagagtcgagatgttcatagaggctgctgccgactcagctctagtggcacaactacgtgccgg

SEQ ID NO: 125530 - DNA, 404 bp, Zea Mays
ctggtatgtatatatatagttagttctggcattgttattctcgacggatccatgttagttgctagcatctagtagcgcgtacagctggtagctcatctgacaatactggacaaccttagcttgctacacacaccacaacacctctcacagcacctgtcatagcacacatgtcacagtacatagatcggacatgcttgtcacagcacgacaccatgggctggtcggtgccaattaccatataacgcacaacaggtcgtggctttcacctccttacgatgaaccaagtgcgccggttgaaatggaggctgacgccaattaccacagcaccgacccctaccacgtagactacaaatcagcacaggagagcgagatctcagcgtaatctacaaacttttttgcctggg

SEQ ID NO: 125531 - DNA, 438 bp, Zea Mays
ctgccattgtactttgggtaggtgcctgctctgaagttttgcggccagggggaggcctcaagagggcttcgctcatcaaggtaatttaacccttggaaggcacatggtgcgaggactagcatgtgggggtgaggaaggtttatgtagtgtgtagggtcctgctgctagtattggcggtcctcgccctgcattttctgtgatttgtttttctaactctctggctttctgcttttcatctaagatcatctacctgcctttggcttgcatgttgatgcgttggtgcttgttcgcaagtatttctctgtaggtgattgttttttatgaggagttcttgcaattttagctggtcttcggctgagatgcctaggaccccgtcatccttgataatatcatcagcctcaggggggtaaatcctggtggatggttccaagggaggcc

SEQ ID NO: 125532 - DNA, 443 bp, Zea Mays
tgccgctcgacctcgcggcgggacctcacaagagacaaagagaacgaccacggcagggccctaggggcttggggaagggctcagacgcgatcagggcaatctggcgaacacgaccatgggcacaatgctagcgcggaagcactcgagggcgcaaaacgcggcgggatggtcccatggcagtgtgaatctactttggcgagcaatcacgcgatgaccagggcaataaacagggaaataggggcgcggggagattgctcacctcgagaggaaacactggagtcccagggcaacgacggaggcgcagggacgcctcgggcgacgatggcggagctccggtggcacaggaagaactccagtgagcgcggaccgggcggaccagagggattgggggcgaaccgaggggcgttccaggtggcgagtgatagggcggagcttaccagagc

SEQ ID NO: 125533 - DNA, 1008 bp, Zea Mays
cctcttacgctcgtcaaactgccgtcttcccctcctctttctcaattgaccatgtaaaagtaattctaaggcgccatcaagtagtgacaagcacccactggctgtctgttatgctagatatatcacatgtgctcggtggtgcggtaggattaccaggccgctgtacattgtatacactagtgtccatgctagctatcaagatcaatagctgtgatgttgcgaagccagttgttctgcgtacaatagatgcaaaagcaaatgctgatttacctatcgttgctgagaaatctccccccatctgttctctccctcttgctctcttgtgtctacggaacacactttgtgatgctatataaagggcagaccctgtgctggaggctcccactttgtgatgctgtatatatggtttatatgatttcaaacgtgaagtttgtcgctcaacttcgattctcaagtgttcaattgttcatgggtttataaattccatactcctgtgacactgcaaaacaaatatgaacattgtggtttgaaccacactctactaattagagggctacagcagttaccactggtacggaaacatcataattatcagcttatggttgactatcgaaccaggcttcaaaaagcatttcattcctacgctccccacaaacttgtgcacagattacatcctcacgctgcagtaactactatactgttctcatgctgaccagtgacaaagttatcaacttgtgtaccccaatcagttgaatggcaatgtgttccaggtttcagaaagttctactacaaactgaagtttatgatacaccgtcatgtacatatgaaaaatatattgatgcactgataaaagggcaggatattgtgaagtataatatatgccaccacaagcgcggcctgcactgggcttctccttacactcctggatagccggctaactgctgagcgttggttgacttggtttgtgtattactttgtgtaaccttgctgcaatacacggtttgagac

SEQ ID NO: 125534 - DNA, 273 bp, Zea Mays
cagcagtgctcccgccgaggaggatgacgacgagcgtgggcacggtcatcacgaaggcagtgagcaaagcgctagccccccagttccatcgcttgccgtcgtcggcagtgagcactctgttcattttggccactgagcaggggaagcttcttcctcgggtctccttctaaatgcagcctgttcgtgcatgtgtcccgattctcttgtagtactgctgctgcgacttcctgatctggaggagcttcagtctcgcggcttgacagatgtgccgcc

SEQ ID NO: 125535 - DNA, 523 bp, Zea Mays
ctgagatcgtcgtcatcgcccggaccagctatcttggatcgagagcgggtcatgcggcaagggatttgtttgtccctgagaacggtcaatcgctgcatgtgcgaccggataagataagcaagggaaagaaaaatgatagtaatgacataggagaagtctgcatgatcaataatcggaattggtccgcgctggacgtttgatcgtgcccacagaattggtcctcgcgtaatacctgcttttggttatttaatatttggttaagggataaatgactaaatattatatggataaaaaggcctttaacatctaacataatgtgttaattcgggtgttttttctgcattaatattatttctcgcagtaaatacttagcagaaaattattaaagtgtatgtgaaggttactgcgcatatttaaattgctctaaatatttatattatgttgagcttcggactcacgacgaacgattaaattatatagtgggtactcagacacgtctatcaaactacgttattaatcggtt

SEQ ID NO: 125536 - DNA, 486 bp, Zea Mays
cgtggtttattgcagccaacccaccggtttcatcgactccactcgtctgagtattggtatgtaagctcaatctccctttgtatggcctcaagcgggcgccacagacctagtacagttggttcgcctcttatttggtctccctcggcttcattgaggccaagtcgaacatgtccatgttcatccttcagcgtggtgaaaacaccgtttacctgcctctacatcgtactcatagtgtctagtgcagttattttctagcacattatcatcgtcatgcaacgcgagttcacgataaaagacttgggccatctccaccacttgcttagggtcatcatggagcgttgctcatagggcatcttctttcaccagtgttagtatgcatcgacactctagacgagctggcatgttcgattgcaagccttgctccacgtttgttgacactcaagcaaaggtctctgacgatgaggcaccctggttggcaacgtgacg

SEQ ID NO: 125537 - DNA, 396 bp, Zea Mays
attcttacaagcccaatggcagattcaggactgcaattttgtttctgatatctctttcctaccattcccttgttacgaatggtagtgggcatggattggctacagacctttagccctatgagggtggactaggatcacaaatggttggctattccatatcaaggcagaacagtggtgttgcaaggtcatgcagtgaggggatctgtccgtgccatggtggaactgatgccgaatgtcccttcagaggaaactgctccatcttctccaatattgccccagatacagtcccttcttcagaaatttcaatcttttttgtagatccttgtggtttacctccaacaagagagtgtgatcatgagattccattggttgaggaagcccaacctttcagcatca

SEQ ID NO: 125538 - DNA, 625 bp, Zea Mays
cataaatctgcatgtactaattctagacacctttcagctctgaaatttgaagcttgaggaaaaggttttctgtgttgttttccaaggacacaaccatcacacaccttttctagtctcttcactgttggcattccctctaccaaacttctaccacttaaatcatgtaaagccctgaaatttaggtgaccaaatctggcatgccattaccagcctacttcttcagagttagtcagcagacagattggtgatgtcaggccaaatctagcaatgtataaccagttaccagccctttcagcaacgattaatagtttccattcttgatcataaacacacagtttcccattttttccttcatatttaaagccttttcttctaactgaccgagactaacaatattgcacttcatctcaggaatataatacatatcagtcaagactttatgacctctactctgatcttgcataaccaccgagcccataccttgaattttgactcgagagccatcacctagccgaactgttccttgaacatttgaaccaatctgtgtcagcgttgatcttgaacctgtcatatgattgcttgcacctgtgtctagcacccacatatcatcagacatcgagatggg

SEQ ID NO: 125539 - DNA, 490 bp, Zea Mays
gttgggccttcagcgcctatcaagacgaaagtcgtcgcgcttgaagataaagctgatccataggcttcagacgttggcatggcagaaggaccagacacgggagaaagggaaaagtctcctgcccccgaagctgctgttgaggatgctgattatatttatcgtcatgctttggtgaaaagttgtctgaagaagaagttggggaagccagacattatgcgaaaaaattgaaatatcaaaagggagctttagtgtttaacggctcagacgatgacgacttcttatactgtctctcggacaacaaatagatatctgtttgccgggagatagctaagagtatgggattcccgaagctagaagatggcctttcgattttgtcgaaggatgatcttgctgacagcctaacatacaatagtataaaggtataagagttaactttgaatttgagaatgaagtattttatttgtcttgctcaattctttcctcctctttg

SEQ ID NO: 125540 - DNA, 547 bp, Zea Mays
aaacaacggcagctaggcggtcggacgacatacttgccgtgaaattcatgtgaacggaaaggcaacagcaagcaaagcttccaccaattagcctcgcgcttcgtgtcgtgaggatacatccaaccaaccgctgcaagcatgtactagtagctagctagcacaaacaaaacgcccactcctccaccacatcgccgggtcgggggccgatcagccagccagccaacggaaaaatagtaggacgatatagtggaaatagacataatgtttcctgcaaaatcaagttaggcagagaacccgatacaattgtcttatatatatagagagagagaggctgaagttgtgttattatttttatagatcaacattatcttttgcacacaaagtcttgcgtgcttttcacggatcatgtctcatgagctggtaaatcagcgaggcgcgcctgcaggggtcacaagaaccgaactgggctggggaagatccgatccggctgcaagttgttcatcagtagtatagtacaattctatcttgggggcacactatactacat

SEQ ID NO: 125541 - DNA, 429 bp, Zea Mays
ccggccgacgggagatccgccgccgcgtcgcctccaaaaatcgcccttccgtggacgggtggagacggagcgaggtggagcgagaactttccggtgtctggcgcgggcggctccttccgcgcgaagaaggcgagggggcggctacagtgaaccgctgcatctggcgtgagagagaagagtgtcgcgaggaaggggagaggggagcgctcaccgctgcgcgaggtagggggagactgtagcccctaaacgatgaacagtattagcgtaggggaggtgaagaggcaagcgttgcagtcaatcttaccttattttatgtatgagaaattttatagagctcctcggtactccaactcgcagccaacggatattttcgccactgccgtgcaggtaaagaggacacgtcacaggtctggattatctccatttacc

SEQ ID NO: 125542 - DNA, 383 bp, Zea Mays
ggcatccgtgtcttggcagctcgcttctgtcggagttgtgggcttggtttttgaggtatcggcgttgttctcgaatgtggtcagcacgtttgctctaccaattgtccctctttttggtgtgatggcctttcatgacaagatgaatggagtcaaggtcatagctatgctgatatcgatatggggttttggctcgtatctctgtcaaaactatctcgatgctaagaaagctggaagtgcatagggggattcctagtgtctacaattttcttgtgatagattgctctttatcggtttagtttgtttcttgcgagatgataagtgtttattacttatgttaatttaagtatgtttgtgaaagtgctttcagctgtgtttgttaggtg

SEQ ID NO: 125543 - DNA, 1025 bp, Zea Mays
accaaacacaacatacatgtagcaaagcttttggtttggtcacgtaggtaggagaggacgagagaagcacgcgcagcgcactacggtgacggagccgagctggatctggctgtagatttgtctggtgctcttgccggtgccaggcctggacgattcctcatcgtttgctagtacatatactttggcgccacggctgtactgtataaaaaagaatcagtcgtctccttttcacatgtgagcttcctgtcctgtcctgcatgccaaggccccaagggtggcacattgccgtccgattgcacgcctcgcatcactttcaccatgtctagcacgcgggaatgaatggctctcctcttttcctatggatttttggcagacacaaataatttggctgcgttgttttttcctgcttccttctcattcacaccggaatcgggaaaaaaacttgagtacaaattgttttccccctcatctttcggcaaagttcaatcatggctcatggctcatgtggctgcggcgtgctcgaaaggctaaaggtgaaccgtgatgggagatctttctgcttgcccatcatttcctttcggatgctgctctgctgcatcggtacaagtttgcgttcgccagctttcaaatacagccgagtgtaactgggcattgttgtgtagcgaatggtggccactctggagatctaggacacgttcggatggttgccagttgccacatttttaccatacctagtatgtttgattactgttcgtgttttaaacaaatcaagactaacagtaattgatgggggggattggtctttgtcctgtggacactagtcttatctgcaatgcaatgggctattggccaccacagagctgagagcatgtggtcaggaagttaggaatttttgttgttgttgcaggaggttaggcattcttggcatatgaatcacaacactaccatgtgtcacaaggtctatatataccattagtccattgcttctatcttacatatatatatatactatccagttgcctgtg

SEQ ID NO: 125544 - DNA, 338 bp, Zea Mays
aaaacaagctaccggcgatatgttgccgccggtatctgctgaggtcggcctcaagcttcggacaaccaacactcttcgctagagtgctgacaaccttcgctccagtccggtcccggaggcatcctaagctctcttcgtcaacgccaccgaagagcaatgctcctggttgatagccgcatgatattgcgtaatccctcagctcttccttctcagctttggacagcttttgaccaagtatgttttgaaaactaaaatccttttcctccgaagtatcctcggtaatctccttctctttcccgggcactggggccagggtctcttcggtagctgtagtagtt

SEQ ID NO: 125545 - DNA, 613 bp, Zea Mays
attacgcatgcctgattctaaggagagattatctgatgcatatatattttcatttttatcttctatgatttttttggtgggatttacaagttcgttttgtttgagattcatgatgaaagggaaggcatcatttagctggcaatcatcttattcagttattatagcctagttactgtgaatgatatgccgttacgtcgccaatgtctgaatggatcgtcccttgagctgtgtgccatgtttgttgtactctgatcttgtctgattgtccatgtctatctgatcatctgtatgggccggtgagggggccggctggctggcgtttccatgaggtgcgaccaagctcaaagccccggtctgtagttccgcatgcatgttccttgctcactggggctccgccgctccgccccttcctcgcctacattgtttcgttcccctgtgctgcttgctgtcaccattgttttctgctcttcacggctgtcagtctccggcggtggcgagcatcggtgtttctggtcctcacgtttcgctgtttgtcaatttttttccatcgaatttcctggatgcattattctactgtttattgaagagaggcaatcgatcccgttacattgga

SEQ ID NO: 125546 - DNA, 337 bp, Zea Mays
atagttcgatctggaacccgaagacatttcttcagttgagacacgtggaacacattatgtacagcatacaaggtttcgggtagttgaagtcggtatgccattggcccgcattgttcaaggacaaggaaaggaccaatgtatcgaggtgtaagctttccttttatcccgaaacgtgttacactcttcattggggagaccttcagatagacataatctcccaccaaaaaatataagggcattcgccatttgtctgcataacttttctgacgagcttgagctttcttcaaatgatgaattattcgttgaactttctcttcggtttcttttaccacatctg

SEQ ID NO: 125547 - DNA, 546 bp, Zea Mays
atcctgatccaagcatgacactcggcgaagaagtctctttttctttttcttcccctcagcaggagaagttggttgagtggctcggcgaggacgcttcgagcgaacactatcggacctttgagtatccaaagctttgtcagcctctgggatgggtgctacagccagtgtttcagcaggggctgcatcagaggaatcttcagccaacatatccagcatggcacttatctctgcatcacttggattcaaaggtacctcgaaatgaacctgcctctcgtcgtcaggaatttcaccaagtgaggcaaccaaagcactaacctcttcgggagagggtcgcactctaaggcccaaactgctatcaccagcaggaggatttgacacaaaactggtaaaaaccttggaaggaggcagattccaggctgaatatgcaacaggagcatcgatgttcgacaccttgcctctgagtatcatctcgagtcggctgaccaaatccacagcaggaattcttctgttggtaacccgggtcgaatcagcaaggcctcgatacag

SEQ ID NO: 125548 - DNA, 433 bp, Zea Mays
acagcctagctttcatgaagcatcgaaaaaccaccacctcatctttctcaggaagaggaacaacgttttcacctccgattctcacaatagatacatcatgaaaatacctacccttcatggccccaacatgccctttcctcacggtcgattttccgaagaccacatagctttggctccacggccgatcttcgacatcgtcattaccactatcaacatcaaaatcctcgctgtctccagaatcttcagatagcccatccaaaatcccattagttattttttcacgttggtcttttccatagcttcataaaacccaatgaatgcggcgtcttcactcctcttaccttcggccatctcaacttaaatcaaagaaactatcgaagctaaaaagcaaatgcagttgcaatggttcagaaaaatagcagcgcaagtcggt

SEQ ID NO: 125549 - DNA, 764 bp, Zea Mays
gaatcatcaaggactaaatagtcttcttccccttttcagtcagcatcatatttggtcttcgtcatcatattaagccgaagctcttccggctatagcttcgatgactatccttatcgccttcgggttacatcttcacattgtatgtctttgccataagagaagacctttatgccgaagctgaagcccccctgtaataatccatatattgtagacacaagattattcacatttttgaggaccttcggaataggaaggcccccaacaaggcccccactcggattttgggctaggtccgcccccggtgccttcagatgcttgtaccccttttctggtggattgtcgaatacaactgagccaatatccatctgagccacggatgactcttcaagctttggtgcataaaactatgggaagagtacaaacaccatattaacgtcggtcgatggcgtcctcttggcctcctcgtcggcttccttagtagctcttggttgcttggggtgccatccctcctccgaggatgttgttccactctcctagggtatcacaccttgaccgctaggtctaggcatgccttcctgagcacctcaagatacttggctttagcttcttctaggttccgcaatcgctacacccttcgcttctgggtgtgactaaggccatctggacaccaccgtggccggtgatacccatcctcttcataatcaagactcctgtcgtgttgcggttcagtcctttcgccttggtgtttcatcgggcctaggcag

SEQ ID NO: 125550 - DNA, 417 bp, Zea Mays
cgatttcgcaccatcgaatttggatgcagctatacatcaacatcaatgtcttcaaactacactcttttatgaaggggtaatacgcactaagcacaatccttaccagcttcaataattcattttaattcaatggtgaaacatccacaccagatgattgtataagaagatcaaacacctcacctcaaagcaccacaaaacaagtggttctattgaaacaaaactcctaatcttcctaaaccttgttcttgccatcatgaaaagataatcatgtaatctcacattctttgcaccccacaaaagggagaaagtctacagaactaatggagcaataaagccaacaagaagccaataacattctgcgcggcacagttcatcgaagaaatgccaaaactccacaaagagcattgacagcacaac

SEQ ID NO: 125551 - DNA, 490 bp, Zea Mays
cacgactcttacatattaaaccataccacgtatacgttgttttcaagtgatttgttcacactcgacaaagtcagatgatgtcgagatgaaacgacactaatgttctagcattagagtaccaaacatgcaatacaaactaaactcgatccagagcgtctcctcctcctcctctctctctctcggttgtttagccacacatcactagatgcagcgcaagacggtaatgcttatcttagccaactaacgatgtgccccctcatccactcatgctacatgcaagccgccgaagccgatcgtcgtgtctccctccactcacgctgcatgcaagcatcgaagcccacttacccaacaactgctatcagccactatgcactaaggaacgctatgcctaatgacgtgtgaacccagccacatcctgggaccacgcgtcataaggccatacgacccgtctcttctccatggcgtgtgagcaaactggctcgcgtcacgc

SEQ ID NO: 125552 - DNA, 698 bp, Zea Mays
aacaccattccggcaacgggtattcttgttcgatgggcatgcatgaatttacaaaacacatttaacgaaggttctgcctccattccctggaactgaccagcaacaatattcttgtttcgcggcatggatttagtaacattttgattaacaaaggttctgcctatatcttctctttacaatgcttttttttcaggcatacttaagacggtcggcaacggtaaagtcgttgtttatgcacatcccaatagtttgtcggccgagggaaaagcgtgctagagttttcagtactacaatcggattcgagtttggccaaggtaagtgtgtgattcttttagacatatgccgctaagtatactgcacgtaatctcacacttgtgttatttcggctacaaagcaatctgcccggtggcttagcaaatgtgattgccaaggtcgacctttatttttgggcatctatttggcatatatttgcatgtgcatcttgacccaaaaatagctacataaaataacctgtgcggatgcaaatcctgaggaaattttaaaaaaaaaagaattagaatccgcggttgacctgataagatcgatcatccgcatgcaggaccatgcctgcatctgcattatttattatgctccaccgttgccataacgtcagatgaatgacatgtcaatcggaaagcacaattccatctccgtccaag

SEQ ID NO: 125553 - DNA, 661 bp, Zea Mays
aaagaactagaaatacgtttaggaatgccttggtttcaatcttctcttcctcagcaatctccttgaatttagccaagcgagaagtgctgtttttaatgtatctagcagcagcacgaacacgcttcactgaaatatctactagtctgaggccatcttgtacaataagattgacaatgtgtgcagcacatctcatatgaagaaacttgccatcagttatgcttgtatttgcaatattcatcctcctcctcaagtaactgacaccactgtcattagaactagcattgtcaactgtgacacacataaccttttctaatccccattcagtcaagcacctttgtaggttcttcccaatgtcatctcctttatgcccctttaccttaaagaagctaatgaccttcttatgaagttgccaatccttgtcaataaaatgtgaagttactttcatgtagctgtcttgttgttgagaagtccaacaatccgtggttaggcaaactctctcacaatttgacttaaagaatagtttcagcttcgctttctcttcaaaataagtcctaactatgtcccttgtgcatgtccttcgagatggtggagttgaaagtcgcctagagggggggtggataggcgaaacctgaaaattaaaactttatcccccaactagatc

SEQ ID NO: 125554 - DNA, 666 bp, Zea Mays
ggggaaggctgtaacaccccaggtgttacttagggttttcactcaagactacactattgaacccatcatcacatgtggtttagtttgagcaaaagacaccaaacttggggatcaagatcctaagtaggtgtaacccatcttagaagtcatgccttggccttatcatgcactaaagagaagagaatgactcaaaccctaattcaaatcccttgtaggaaaagggagccctagaggggattatggcaaaaagtctatgtaaatcacattgtcatgacttggactaattataaaagttgtaatacacttaataccctacaaaacatagtaagagtgtgacaccaaaaaggattcagaagaaccccaaaaaggtcaccaaagagaagagcataaaagaaaaatcaggatttgctcaagttcaaaaccgaccctcttccaaagatcaaacatgttcactttaatcccaacctcaaaaccttatggcccaattgacaaaatggcgcccaaagacccctagaacaccctagaaaagtttgaacccaaccctaagccttttgacacgacttggcatggcttttgtctcggtgtggacagctctgacagagccgacttctcacccccatatctctctactccgaccgtatccttgcttggaactcacatcaaaaa

SEQ ID NO: 125555 - DNA, 455 bp, Zea Mays
cgatattattatgaagctaacacgattggaacggaaagaatcagaccactaacacaaaagatattgagtaactaaatttctgtggattcaaagcgatgtggcgcgatcctattggctgaattaaggctacacgaagggtcacatatttttcagccacagatgatccaacgttgagccatgacgtgggggtcaggtggttgcatgcattggtgggacctactagtggttttttcctttcttctacacgcatcctccctagaatctaacaacaccacgcacatggggctcggccagggagaacagcagcctaccagccggcctgctgctgcggcttgcctgcggggagggaggggagcgagataaacgaggggaggagggggtagacgatctcacctcaccagaccatcacaagtcacgacgacgcacggcgaggagaaacgtggacaggtcagtga

SEQ ID NO: 125556 - DNA, 397 bp, Zea Mays
gacggttttcgtcgaatgcattcttagtgttctctctgactagctgtgtgatgtttatattaacatcaagagtgccgctgaactatgggaggcgctcgaacacaatttctctacctcagaagctggacgcgagctatatgtgatacaacatgctgagaagaagaattataagcccaatcagactactcaattcaagaagaataagaagatgaacatggaagatgttatgtgcttcgtttgcggtgagaatggacaattcgccaagaagtgcaagaaccgcaagggcaagaaaaatcagcccgggtaggagtctgtcaacatgactattggcgatcttagcagacctaggtacattaatttaccgtatatatttactatatgtcaaactaatgattgg

SEQ ID NO: 125557 - DNA, 799 bp, Zea Mays
gttacaagtagttgttcgctctatgcgatgttggttctaagagactatgtattggatgtttgctacctggctaagtcatcgaatatcgttgcccttcgccccccccccccttgggttgggccgaccctcaccttttatagactaaggaggaggcaagatgcaattagcttctcctggaaggagacgatgcgtcgtggagtaggatagaagaaatctctccagtaaaaatcccctccatgcgtccttatccatccttggactgtccttcgatcaccagccttcaggtttgtcgaggaagtgtgttgacgaaggaaggctggacgtcatcattgtcttctctatatgtgccttttacgccagtatccgccgcttgacctcttgtcttccttcgtcactttgtggctttcgcaggtcgtcggggggactcaggcctagattcatagttaatgagtggactcaagtctaaggcttatatgccataagtggagagaggctcggtcgcctgttgtgtcttgactcggtgttatacacatctagtacgacgggttgagcattagaggctggagcagtttaatggtcgcatgggatctactcaagcaatcccctatacgatccacctggtgccctaagctggctctgcctcgcctgacccctagctcagtgtgagggggtcttctggtggcgcacctacctaggcggggctccctccatccactttgattcgtggtccctggtggcatgaggattcgacccccgacagtagccctcgagcccctgagggaagtgtgcttccccttgg

SEQ ID NO: 125558 - DNA, 643 bp, Zea Mays
ccacattgtagagcgacagagttctctgataacataaagaacacatacggcaaaaactaccacaaacacaggcatgaactaccataaatattggtgttttttatactaacttggtaaaagtaacacatgtgagaactatatggatttctggtttggtgtacataggagctaaactttggcagttttgaacaagttagaccatcataattctgctaatgattcattttctctacttgttcttcgccttctcatctaagaactgcttcaacatcagaatttgagtgtcccttgctgcatgaaacaaaaatggaaataaacaaatattgtgacacctaaaccaacttagttggtatcaaataaatatagaagacaagggggaaaactgttggaataaaggaccactgaatctcataaatcatgatgcatgctgacagtgtgtgagtgtgatatgcaatggctaggagggaagatgctgaagttgttgctcagttcagttcagctcgtgtgtacctgagaagtgagaaaagggcaaatctcctgtgaacacctgacccatggtgaagaatgtctgaaacaagcatgaaagaacttacccgtagtggcttgcttcatgatgtttagtggccatgataccacataaggc

SEQ ID NO: 125559 - DNA, 495 bp, Zea Mays
aggggttggggcgcaagcgcagcgaggggggcgccaaggaagacgcgtcggaggagtcggtgtcggagtcggcgggcgaggaggagaagacgtaggggccgatctggaggaagttgctggcgaaggaggacaggccgggcccgccctcgagccagaccaggagcggcgtggcggccggcggggtcagcgggtgggtggcctcgtagaaggcgtagtacatggaagcgttggccgcggggatcgggaggtagccggacttggtcggtagcgcttctgtggggaatatggtggtgtccgagcctgcagcagagaccgcggcggtggtggcgacgaggacgacgatgaggagaagaggagctgccattgcgtctagcttgcttgcccgaacgctttgcaccatcagtccatcagatatgtaacgtaggtcgtgacaaaatctttggcaaagacgaaaggatgacaaaagacaaatgggatattggatcacgtgacttt

SEQ ID NO: 125560 - DNA, 433 bp, Zea Mays
aagagagttcggtcattcgcatgatacatataaaagggaatgaattgaagttcaaagttgaccaaaccaaaatcatagcaagaggagattaataaatgtagtagaggagagccgacagtggagctgtggaggtacgggtgttctggttagttaaacctgctgcataagaagtacctttcgaatctctccctgcacgttggtgagcacgttgaccacgctgagcttagcgagaaccttggccagctggtcgaccatccagcgcgtagagccgtccctgtagaggttatgatcgacggagagcacgccgcggtggagctgcgggttgttgtagacttgtagctgtgacgtgcgtgtgaggaaaaagggaggagccgaggaggtgggagctaggggtaaaaacggattagatatacccgtcgggtacctaccggat

SEQ ID NO: 125561 - DNA, 695 bp, Zea Mays
caaaaaacacaattgggaggccttgtgccgaaagtcaaaaaacaccttcccgaagctcattgagatgttagttttggaccgttctagtcatggccagtgggtttggttgctcaatgactgtaacagtttgaaatttaaaattgacccatataaaaggaacaatgcccttggacgttggcatgacatttgttatttccgctccttgcttgcatcagtttactctgcctatgaagcttgctccgagtgtttcattgtctttgaaccagccttagccagtacaaagcaagggtttctttgctagaaatgtccagagagcaatctgcctggacagtctatggtgccagttttggatgtctcggaaccaaagattgaagacttgtccatggcagcagaggccactccttcccaagccgaagctggtgctgtagatccatctgaggatagcgatgatattgatattgaagaggataagactatcatccgtcctacgaagccgagtcacgtggacttcggaaagtagaagattataggaggacatattgaggtactcactaggtttgattatatttacaaagttgaatgggtccaactagggggcgatgatttagtgtcgaagccgaaagaagatgaagttgttatttttgtcagtgtttatgacccgactgtgcaccacggggttccccacgtgatgcttt

SEQ ID NO: 125562 - DNA, 544 bp, Zea Mays
tggcacgtcttcggtgttacttaatggagttcctggtaagccctttcattgcaggagaggtgttaggcagggtgaccctctttcgcctctgttgtttgtcctggcagctgaccttcttcagagcatcatcaataaagctaggctgtggaatcttcttaagctccctttaccggatattggtgaccaggatttcccgattgttcagtatgcagacgacactcttttgattttagaagcatgccctaaacaacttttcttcctcaaggcaatcctcaactcttttgcttctgctactggcctgaaggttaactataataaatcaaatatgttccctataaatgtgtcccctgaaaaaatggtgatcctgtcccgtaccttcaattgccagattggcgagatgtcattcacctatcttggcttgcctctgggccttgcgagacccagaaaggaacactatctccctcttattcaaaggattcagaagaggctgtcctgctcctcgaactttttgtctcaggctgggcgcttggaattggtaaattca

SEQ ID NO: 125563 - DNA, 278 bp, Zea Mays
gggtaggacactgttggggcctgctctgttgaatgtcctcataatgcctttatttcgcgtgaacaaatgtgtttcaggtacatagctgatggcggacgaagctggccttcggctgaagtgctaccaagaaaaacccctggaagtgctgcctataaaagctgaagtagtgtgaagagaagcttcgtctaacacatacaaacggcaagggtgtaactcgaagccacaagcctcggcatgaagaggctttcaggtgtaaagtgacgaagtagacgaagtct

SEQ ID NO: 125564 - DNA, 754 bp, Zea Mays
gtcgcaccgccttaagtcattgctgacttaagccgattgctccgttagtagggcatagtggtcaccctgagttaagtaagcgtgagcatgtcacaccgtcttaagtcattgccgacttaagccgattgcttcgttagtagggcatagtggtcaccccgagttaagtaagcgtgagcatgtcgcaccgccttaagtcattgtcgacttaagccgattgctccgttagtagggcatagtggtcaccccgagttaagtaagcgtgagcatgttgcaccaccttaagtcattgcggacttaagctgattgctccgttagtagggcatagtggtcaccccgagttaagtaagtatgccaatggacagcgaacaatttgagtgcctttgaagcctttttattgatgatatatttctcaatttacagaatacatcgtcatcccaatagcttctgggatgtagctaggggtaaaacttcctgaggtgttctatgttccatgagttcccaatttctgtgccatccatctgagtgagacgatatgatcccggccgagtgacttctgctactatgaatggcccttcctatagtggtgacaatttgtgttgtccctcccccgttagaattcggtggaggacgagatctcccactgcgaaggatcgatgtcgtatggccttatcatgatagcgcctcagagtttgctgataccgtgctgattgaatcaccgtattcaatcgctcttcttcgagtacatcaacatcct

SEQ ID NO: 125565 - DNA, 664 bp, Zea Mays
acctggacctgcacacagctttagctagggatcttcagtagcgcacccatcgggcccattagctggtatccttcatcctttgacttacgtaatattgacctgtagggcctgggctggggggccgatccgcgtgtctggaccccctgggtcatgacttctctttcgttggagccggacctcgggtttttggaccaataggattcatagtaccggatactaggatagccgccacggggtggtggggcatgttggcttagggtaccaaaccaagctaagcggctacatggttccccatgggcgattatccgttctctcggattggcccccaggctatatggcctggccattcaatccggatgcactataccagctttggggggattccgcgtgggtgggttagataaaaataatggttgcaagattagacatgataagaccaccgtaaagtaaatctgggggtggggtgaaatttctctttatagctccatgagcgtaaaccaacagaccgggttagtaaggacgagccttaccaggctggctacatatgtacgctacctagctataaagaaaactgcagcccccagttttccttttatgggaagaacttacagaggtgttctatgttccatgggttgggcagggactctccttcggttgtggcgag

SEQ ID NO: 125566 - DNA, 345 bp, Zea Mays
gttttggcacttgagcatggagtagatacggaggaaaaaatcaggaaaatggcaaatgaaattatggatatggccgtggatatgtcgcttgacttttgtgttgacaaagttctcgcggaggaagatggcgaatacttggaaggagcagctgatggcatttctattgacatggtggctgaatctcccactgtttgtcccatgaaggttgtgattgctggctcactagatggtgtgctggtggacaaattgcctgctgcgttttctgtggttggaggggtatctgatgatggtgtgtgcggtggtggatctccttttgaggccttgttgatggctgatactggggcc

SEQ ID NO: 125567 - DNA, 673 bp, Zea Mays
ctcggcgcggtcggaggaggtagcgccaagttagccagttactgacacttttcatcatcttctctctgtttttttttctcctctgcgattttgtgggctgtgtgtaacactcactgatacggcttcgaagtggactgaggtcttgtgaagtatcaattccgttgcagctggtcaatgtaacgtagtacttatcgtgcattcaattttcatcgctaaagataaacatgcgtgtttactggcacaaccccacacaacctgccaaagctctgttgaaacgaggggagcctagagagtttggctgctcgggttcacgtggggacgacgaatatctcatctgtgatctgacgagcgagcgccgtccaaacacaaaagtaataacgaactaaaaaggagcaagaaggggggatgcaaaagccgtcactatcggtcggtctgccaaaccctgctggctgggcatcattcgtgcgtatcgcttgaggtccaggattcgtccgggctcggccggcggggcggccgcatgggcgagggaggagaccgcatgccgagggcggcaatgccttctccccgccgttggaaaagcggcacgacacgtgcgagacgccgtgcgcgtttcttgttaccgcgactagtggtggaaatagccgtgtgcagtttcgaattagctcaatttgtg

SEQ ID NO: 125568 - DNA, 571 bp, Zea Mays
aatgatagagaatttcttctcatttagcacacaagtttcgtgcctcatgccctcacctcttgcatgcacaaccaaccatataaccatcacgagcactttcttctcttcaccattggcgtcatatattaaaccccaacctcccatccacacccagattcttatgtaccatgtgtctctataggtagcgaggcaaaaacagttgaggaggagaagccgatgaagcgtggatgaacaaccggaggagaggagacactcctgatttcgagtttagttttgtattggttgttaggaaagaatttgagatattaaggtcgcatagatctgtttttctccccaatgtcttgcctaacaaccagataaaataagccttatcttttacatgtgcaaccaaccatgtaaccaccacaagcgctttctccttgctattgccgtcgaatattaactctcaacttcgcatgacatcgacctttcccatcggcaagcatctcgaactgctgctgcgactctccaccaccataccgtcgctgatgcttagctgagggagaggaagaggagacgcttcatatcccaa

SEQ ID NO: 125569 - DNA, 705 bp, Zea Mays
gggtgacgtggatcgacgaccgtgtgcgtattgcgttcgcaggtgtttctttgttgcatgcactgcactgtgagctctacaggacgcccaccctatcttttatataggcagcaccgcagcagccagtaggccgccggaatccctgaacaggccggagaaacttcggaaagtgcagagcagcgtcgcgtcccgccgttgtggccatgcaagcgcgtgttttcctgcctgcatttccagttttctacggcagatacttcttagttctgaccaattcatagagcaattgaaagcgcttgaatttcagtaggcgacgacgtgttcgtattttttttaatggttgactgatttccgcagaaggatgagaggagcatgttcatacaggtctaagttctaacgtaaattaaccgcgtttacctgtcttactgtctagttgagtttgtcactcataaacgacatgcttgattgtggagctagcctagcaggcgatgctaaccttgcatgcatgttgagatcttgaggatagttagtcttgctagctcgaagcatctccaggaattatgtgtaataattctattgattttttttgtaaaaagccaagaaaaaaagtgtcctccaagccttcaacagtttgctaaaagattttcttagccaaaagtcacttcttagttctttttattaaatatacaagtggttctagtttgctaa

SEQ ID NO: 125570 - DNA, 556 bp, Zea Mays
ctgtaatgaacttgtgtaatgaataaagtaacttgttaaaaaaattggcatgtgcatggtagtaactcttttcccctggcagatggcttcggataaaaccacgcctaccacctctgggattggagcagggtttcccctaggagcagaaggagaagctggaggagaagggagtgagacccacctccccgcacctccggaactaccactagatttggcccaagttctagccaatcaaacatgactcattgaagtcctcactagaagtctggagaaccagcgcccaggtggtggaagaccacaggacaggatgggagaatttctgagacccaagcctcccacgttcgctggatccagcaatcccctcgatgccgacgactggctgcgcacgatcaagaggaaactggaagccatcggatgccccgaaaattagcgtgttcaattggctgctcatcaactttctgggatggccctagcatggtgggataccttcagcgcggccgtcagggacgctacctgggcagaatttgatactgctttccgtgagcaccatataccc

SEQ ID NO: 125571 - DNA, 426 bp, Zea Mays
ctcttcgccggcgccaagatcggctggaacaagcgcaccggcctcaaccgccgcctcgtttccaggaagaacgcgctcgaccaggcccccggcctgtactctctggagatgacggagagcaacggggttggccatctcctgtggaactccaccgtggcctactggtccagcggccaatggaacggcaactacttcggcttggcgccggagatgatcggcgccgtcatgcccaacttcaggttcgtcaacaccgacgaggagatctacttcacctacacgctgcacgacgacgcggcgatcgtgcacagcgcgctggatgtctctggccgaggcctggtggggttttggctggacagcaagcaggactggctcatcaactacaggcagcctgtggctcagtgcgacgtctacgcgacatgtggccct

SEQ ID NO: 125572 - DNA, 872 bp, Zea Mays
ttctgctggggggctcactacccagcccgacatcgccatgtggtagccaagcagcactaatgtgcccagaactggcccctgattccatttttaccaagccttgccctgcgtcctgatcaagtgaccatgaacagttctgcagggtaggtactttgtttatacccttaaaaatcttggttctgacctctgtaagattaggtgtcctctgaacttatatgttagttagagctcgaaattatttttaactgaaggcaggtgtcgacgggctgatgataggcccggctgttatttattgttttgtttgcgacaatcataaagcgcagcggcagattcttcacatgtctttgtggtcaccgtccactgctgcgtgtctcaggggatcactgggcgttccgcgctcaaacctgaaatgaaaagactaggcttatttaattgggagggccaccgcagaaaatgggctctgtcggaggtctccagatcggcaaaaaccgcctcggccactctcactcctgtctgcttcactcctgtctgcttcaccgtagaattgcccctgctgaccttgtagataatccttgtaccaaaaaaaaagcccttagtaggctgtgccaatgtcatcatttgcccttttaacctcggctaatgaatcggcagtaggtgagtgaggactccgttcagctcaccgggactggtattttttgggagacaaaacaaatagccgagatccgtttttggagctcgtttcgtttcagaggtggcattttctgcgtcacttttattatttgtgtatataggacagcctccgagcactgctggtgcagccagcctcgtccatcttcctcatcagaattttaaagacgagcgtctgctagcag

SEQ ID NO: 125573 - DNA, 1206 bp, Zea Mays
ccgtgactcaaatttatccaaatttccctatttaatcatacatcatttacaacggaatgccctaaaatggcttatcttgggtggtaatccaaatcgtaactcataaaaagttttgtccaagaagacttattaaaaaatatgattagacacaagctgtgtagatccgttcatcccacaatattctaggagttctatgctcatcgagcatcgtccaagacatctcaacaatgttctaattcttccattcaataatgccatttcattgagttacatacatcgaggaaatttgatgttcaagacttaaggaagcacaaaaggtcataaaatgagtattcctgtttttttgtcgttgtcgctgcaaatatctttcatgacatttttcataaactcattatacaacctaagaatcaaatcttgagtgtgagaaaaagtcttgttatttgcctccatgaaaacacccaagagtagcgagaaaagtcatcgacaataattaaaacataccactttcctccaatagagaaaacccgagctggaccaactatgtcgttcgtttgcttggtcatcaccttgatgaccgagcggtgtgaaacgacaaccatctttctatcaagacagggatgaaaaacaagatctttctcatattttaatttggacaatccttaaatgcgaccaagtgagcttaattgaaccaaaagataaaaaccaaatgacctaacatcctatgccacttgagaggaagatcctatcataagacatcgagaaggaccagaagaatggaaaaaatagctagaattgaaaaattagctagacaaactcacccaaatgagaaaatttgataaacaagatctctcttgtcatccaaaaaccttcataaagtgcacctcgaaacggtcctgaaggagttacgaaatagaaaacaaattaaaatgcaaattataaataaatgcaacactcttaagaataacgctctctttcatccaaatatcccacgagctacagaattattctaaaagtgttgtactcctttccaatcacaaaggcagaattagggaaccctctagtttttttcatcatgtggcgcgaataggcagaatctatgagcccaacctccactgattgacatacgctagccgatcgagatggcatggccaaaccagacgagaacgactaggcatactactggtgatgccatcccctaagtcgtta

SEQ ID NO: 125574 - DNA, 941 bp, Zea Mays
gcagaattatttagcattcactaacaatgttatatttaaagcccacacaagattatcaaccaattcaacaagtgaacaccctattgcaccattcaataattaagttacaatattagaaaactgttaattggacaccatttttattcaaacttccaaatgcagtactgttcttgatggtgttcaattcaggttgtgtgtaaggtactaaaaatgctataagtgcaaagaagagctggaaattgttgtatgttaactaaaatagtactatgtttgtttattagctgcaagttttatgtattaacttcaagtactggaaaattgttgcccagtctgccattttggaattgtccctgaacatgcgactccaaatttagaggtggcagactgggtgcgcgatcgggagctgatgaccagagtggttaaacttcatctgactcatgcacaagatcgcatgaagaggcaagtagataaacatcgttcagagaggacatttgctgttggggattgggtttatcttaaacttcaaccttacattcagtcatccgttgcaactcgatccaacaacaaattgtatttcaagttttttgggccctatcagattgtggagcgtattggtgcagtggcttatcgtcttcagcttcctccagccagtgccattcatcctgtaattcatgtttcgcagctgaagcgttctaatggccgtaatgtgtctctttcttcacagttgcctcaggaggaggtgcctgtgcagattccattacagattttgcagcggcgtatgattgagcgaggaggagatttcatcgcccaagttcaagtgttgtggtcaggcatgtccaaggagctagcgacatgggaggacgaagcagccttgaagatgcgttttccagatgcaccagcatgggggcatgctggttctcaagtccgggggaatgttggcg

SEQ ID NO: 125575 - DNA, 417 bp, Zea Mays
atgccattggcttcgtttaccctgactaccgctacccgctgcggggacaagggaaaaagagaaaaactgctacttcggccaccccagacaaacctgtgccgaagggaaaaaagttgaaggtcctaacccaccggccgcattacatcgaaccggccgcgatacctgaatttggcgaagggacttcctcggctgtcaaaacaaaagaaactattcttcccgtgcagaggactgaagagccggctataatgccgaaggtgcctacagtcaaggtagttgaaacgaaggttgataaggctgaaaagccagaaactgaaaaaataacgaagatgccagaggttttgagccctctagtaaaggcaacagtatcgaaggtacaaatgggttctgtcataactcctaagaggaggagaatggtaa

SEQ ID NO: 125576 - DNA, 407 bp, Zea Mays
atcacatgaggcagccaagttcctacgatacaaataatgcgtcgtattgccacgacgcagccaatgtgcatcgaatgccataactcagtcgattaattacgtagcctgatcggtgcgttcgagtgcccagtatacaatttaatcgctcgatgtgagtccaaaagctcaaagttactcaaatatttagagcgatttgagtatgcacaatatagccttcacatacattttaataattttctgctaattatttaccacgagaatagaagcagaaaatagaactccacaactaatgcatgaacataacacatcaggtataaaaagtattttacaatattcgagtatgtatttttctactaattgtttacgacaagaaacaattaattaaggtagaaattatgacaaaaaac

SEQ ID NO: 125577 - DNA, 486 bp, Zea Mays
ctttgcctgtgacgctttggggcgcaagcggggaaatctgcctttaaaaaggggttcatcactcgagtagcagccatgccttgcttctctcccactcgtggtgccctttcgccttcgagctctctgcgcccttttgccttcagggttcctgctttgtgtcgccatagtttaccatggccttgtaagttcatctcgagcatgcctagactgagtgggtgctcgacatggtgtgccccctacttggatgggatgcgccggcgttcgacggaaggatttgcgtcggccccatcctccgcgacgaacttgccgccagagagtttgtgccttttgtcctccctagcgggttggtgctgcatgtcttgtctttcctctgctggcggtgcgcggccttgtgggagcgacgctcctccaccggtgcttggcttcaaggatgttcatcagcctcgcggtggtggagagcgagctgagccgcggctccgcctccca

SEQ ID NO: 125578 - DNA, 330 bp, Zea Mays
gccgagccgtgtcatcttgatgggcccggcccaactcgattgcaagaaatttaaggctttaagaccactcagcggttgatctcccacctgtagccaaagggatgaaagaaagccgttttagtcccacatcggcggcgaaacagaggccatggagcatgccagtgagataaaacagtgagctggtgcaccggagtaagcatgatccttcaggcagttaaagggatatgatgagtggtaaaagctcggttttttattccgagaggggtgcctgccccaaataagcctgttacgacaacatggcgctcacaatttgtaccatctgatcccgaa

SEQ ID NO: 125579 - DNA, 414 bp, Zea Mays
gaaatgcgtcaggaatgattggaaatgcgtcaagaaatgaggcaagaacggttggaaaggcaacaacaaccaccactacctccaccaccaccactagctccacctagggataagcaccgggagtttatgagtcacaaacgatcaacattctctaactccgtggacccactgcaagctgatgactggttaaagtctatggacaagatgctcaatatagcttagtgctttgacagagaaaaggtgctatatgcatcgggtcgcctgaccggacccactacggattggtgggatgcatactgcgctgctcatgctgctgtcaacacaattacctgggcagaattctccactcaattcaggaattaccatattcctgctggactcatgaagattaaaaggaaggagtttctatccccg

SEQ ID NO: 125580 - DNA, 391 bp, Zea Mays
ctccattgcactttgcacatctttataaccttattcctcgtgacacgagtcagtgtatccagaatcttgatggggtactcagcataggtcagatcatcttgaacactaaggtcatccattggtaactgctcttcaggtaccctgagacacttcttcagttgtgacacatgaaagacatcatgaacatccgcaagacgatcaagaagggtccaataaagcgaggggataactttcctttgactttaaatcttctcataccccagagtggtgacactttcaaatagacataatcaccctccttaaacactagttgtcttctccaggtatcagcatagcttttctgccttgactgcgcagtcctcaaattttcccttatttgctagacttgttc

SEQ ID NO: 125581 - DNA, 281 bp, Zea Mays
acaggtgtcacattttgccacatagcatgcaatttcaatcttcatttttgtccaccaataatgttgctttaaatcatgatacatcttagtgcttccgggatgaatggaatagtgactaagatgagcttcatccaaaatttgctggcggacctcatcattcttgggcacaactatgcggttattaaaccatactataccttgatcatcctttctgaaacagtttgctttaccagcctttattttctcatgaatgtgtttcataccctcatcacttctttgtg

SEQ ID NO: 125582 - DNA, 851 bp, Zea Mays
atggcgcctgcaataacactgtctgcaaaaaacaggatataactgcgcgatattgagttaaccaatccatacccaaaataacatcaaatgactcctgggaaatcaccacgagattagccgaaaatatcttatcagcaaggacgatggaacaactcgggcagactgaacaactacttatggagcccttagcagaactaaccacaatttggtgacccatcctctgcaccgaaagaccagcacacgacacaaaattctctgaaacgaacgaaaaactagcgccagagtcaaaaagagcatgggcatcaaacaaatcaactgagactgtacctgtcaccacgtctccctgatctctgccatccacagagggtagcacatatgctccagaaacacccgcagaagaggaagctccaagagtgaaattaacagaagaacccaaaggagtcgcaggatgaggcagacgaggagctccaaactgaggtggtataggagcgatcggtgcaggagtaggcatggccaacaactgagggaaacctggcataggcaagaactgaggagtcccaggcatataaaactgatgctgaggggcggtagagaaaattttttctcagcagttgccatcatgttgacagtgccctgcgaagaggaagaagtcactagctcccattaaagtttcccattgggattcctcctacacaccacatccctgtgatcctggctgcagatacagcacctgccactccactgacactcggcacgacgatgcgcttcaccacaacggaaacacaccaaccccaaccaatgcttaggaatagctcgatacctctgagtactccctcctaaagtacccaatt

SEQ ID NO: 125583 - DNA, 323 bp, Zea Mays
caaaagatggcactggttgttggttttaatagtgaaatgtcatcctaaccatttaactagctatgtccaacatattatgtatttatttctctaaatattgccagctgctctacaatacaaattacatggttgcctcactatccgtttccaacaaactttttgggggtaaaatcaaactgaaattcggcgatggctcgtccccttgcaatcagtcttctacctttcagtttctcctccttagtgtggcttcgcatcaatctatgcagagaattaaagcaaatgatgtctcctctgatcttgagaatttttttggatgacctgac

SEQ ID NO: 125584 - DNA, 442 bp, Zea Mays
gcgtggcctaaacgactccctcttccgtgtggaccccaatggtcaggtggggctcccttcttccttggaccataacgacgggcgccggctctcgcgcatgctgaacggattggtgaagaccacggctctagcgacaccacgccccctcccagccatataaatctccctcccatctatttctcccacacttctcctttcctgtgcccgtgtcctccctgcagtcgcatcacgccatcggtgttggaccaccacgcccttgcggcctccgtccgccttggcattggtcaactcacccctaacccagtagacccccagccacattctgtcgggttcgccgtgcctgctctactgcgggatcaccgtgggcctcgccaagggacgtcggcgtgccacaccagagcgcgtcaagggcggaccgcggctctcctcacctcacgtcgtt

SEQ ID NO: 125585 - DNA, 506 bp, Zea Mays
ctcgccggtgggtccgccaccgcgggcaggatgccgcagccgcgttccagcgtgaacaggatcgttcggggagaaatggccctggccgtcgatccgatgatgagcgctcacgattgaatctcgaataccccatcgtgatcgaaaatcgtaaccattgttcttggatctattgaccgagatcagatcgcgggatcctttaatctcgagcgttgattttagatccgacggctgtgatgggatcagtcgcgtaccgattcggccgaggtcgtgggccgtccgattcaatctggcaggggaaattcgatctgctatcataaaatctctatcatcgatctctgatccaacgaccaagacttcaatctaatctgcaccgtagactatcaatccaacggtccataaaagcccataccccttcagacgtctacttttgcaaaagagaccctatgctctatattaatcaacccgtcgtgcacctatacggtaagataattacctagcagtccctg

SEQ ID NO: 125586 - DNA, 322 bp, Zea Mays
catggagctgcgtctcctccttgatgttagacgtaatcatctctttctatctataggagctgcgtctcctcgatctgttccggatttctctccggctgcttgattgtatcgatgacatatctatatatacaggaggcaggcgagctattgccttgcgccgcctttcatctaacatggtaccagggccaaaggttcttcatgtccactgctgcctctgaaattttctcctcctccccttccaccgtatcctcctctatggcgcatctgccttcctccactaccatggccgccatatcccttcatcaagcggtcacaatacgcc

SEQ ID NO: 125587 - DNA, 729 bp, Zea Mays
cattaatgatctgattaaatttttccgtcttctattattggctgtcatgtgaaagaacttagtgttagcatcgcccaaccgcatccaagtgagcctggagtgttgtcttgctcgtgccctctctgcggaggccatatcaagaatcttggttttaagagacctcctgaagtccatttcttcaaaggatagctgtctaatctcttgcgctttttccaggagagtgaggatgatctgaatgatggccatctgcactttgaagttgccaacagtgttgcgcctccaggccaaaagagccttggctgtgcgagacatctttacatgaagtcgaaggatggcatcatcagagttcacagcagagttccaagcttgattgacaacctctttgaacccctcaatctgaggccaaaaagattcgaatctgaacccatggtatggggaacccaaagagtggctttgcattataagagggcagtggtccgacgtcatggtgcacatggagcgaagatcagccgaggggaatagatcgtgccactctgttgtcgctaagaatctgtcaatcttagtcatggttgggttaatttgttcatttgaccaggtgaatgctctatcggtgagctctagctcaaggaggtgtaggtaatcaatcgtgttattaaattgtctcatgactcttctgttgattgatcctttgtttttctcccttgctctcctgatcatgttgaagtcacc

SEQ ID NO: 125588 - DNA, 578 bp, Zea Mays
cgcgaaccccggagcccatggcgtgacctcgtcagccggtacgccccaacgcagctgaccacaattacctcgccgtactctctgggaacccgtgttgtggaccggtcaactcaaccgtgatttccgctaaggccgcgaccataccgccattgtcgcgtgcccgagatcccggccgcacaccaaccacccgtcctcacctggccatataaccctggcatctcgacccccttttctccattcactgaggtgccaaacccaatcgccaaggagtgtgctgaggagagtgagaaaagcggggaggcagaggcagggaatcacggggtctcgtctccgttgccgtcgggcgctcgggtactagtcagggaccagcgcagggtggttgcgaattcgttcgtggcgctggccagtggaaacaacgggcggtgcgaacttaatcgctcgccggagttcagatcgggggctgcgtcgccgtgtatcgtgtacagggacattgccaccgagaatcgaggtaaatttgcctcccaatcaatccgccatactctcgtaagtatttttgcgttagtcaatacggacttagg

SEQ ID NO: 125589 - DNA, 751 bp, Zea Mays
gcaccagatcggttcctcacggcggctataatcagagaaggtattatagtagattagggtttagggttggtacacagatcacaagaacaaacaccagttatgatacacagatcacaagaacaagcaccggaataagaacttaccagagccagagcaccagatcggtccctcacgggcggctaaaatcacagaacacaaggtagtagagtagattagggtttagggttcaaacatagatcacaaacatagatcacaagaacagatcacaagaactaacaccagattaagcacttaccaaagccggagcaccagatcggtccctcacgggtacaatcacagagcaagaaggcagtagagtagattagggttcgggattcgagcacatatcacaagaacaagcactagattaagaagtctcgacctcgtcggagatgtcggctagaggaagaagaagacgaacactgaaagcttaccgtaaccaaagtcgtgaccaaaccaccaggcaccagccaagtagctacccggtgaggggaagccagggggacggtgaggaggagcggtggagcaccctaccgaagtcggatcgtgaggtggagcggcggagtcgaacggtgaggcggcggcggagtcgaatcgcccccaaatcgccaggagacggagagaacgagggcgagaccgcgagagacaacgtgcgaggcgagagagtgtgagtgtctgacgaggcggggcccagtggagagggggcgacggg

SEQ ID NO: 125590 - DNA, 271 bp, Zea Mays
gttactgaatacgttgaacagttcgataccctcatccaccaaattcttgcacatgatcctcaatttagtgtttctgccatagtaaatagattcattgatggtcttgcaccagaaattcgtgccatagttctgattcatcgtcccctcgatttggatactgccgtgtctctcgctttgttacaggaagaattggtgcaaccactggtgtctccatcttcaagccggctgaatgattcttcaacacacaaatctgtttatcggccgttggaac

SEQ ID NO: 125591 - DNA, 453 bp, Zea Mays
ctggcacagtggttggaaaagggaaggagaaagtcgaggatacttcggcagaggaggacttccatttccaagatatacttgggcaaaaattgtcaaaggctgaaaaagaagaactgaaagagtatgctatatcttgcgggtacagaccaggtgcgttactcttcgggggaatcaatgaagaaagcataggatgccttcgggaccacactggggctaaggttgttggcacgctatcgaagagcgttggcttcctgaaggttgaggcagaccttagcaggtaccggcggcagcatatcgtcggtagtctattttatgctaactttaaggtaaaattcttaacttttcattgttttgatatgaagattgttttctgatgaagcttattttatcagagcttactgctgagcaaagtcctgaggatgcaacaagacctcgaggacaaaaagaacgaag

SEQ ID NO: 125592 - DNA, 577 bp, Zea Mays
ggggtcttcggatgaagacttagactattttgcagcattggatgtggctgcagcggagacttctctgcgtgtgacgggtgaggatattccttgtgcgagtgctgggcgtaggcgtcgaagggcggtggcgaagcggagagtgagtgagttgtcacaaagtgatagacgtcatggtgaggtggagggtggtcgtcttcgagtggacgggactaccaaacgggaattgttgtcttcgccggctggggcgagtgtaggtgagggagagctgtgaaatctttttgagggtgaggaattgaggataatgttgttcaactacagggagatgggtatcatcccgaaggttgagccgttgtaatgtgtgatgccctcgctgtgtgtgtaactatgatttgtatgatgaggttgcgtgccttcgttgatccggccgcgcccgtaggcggcttgtgtccgggtgcttttggggaaatcttcgattttgcgcatttgttgagttagaccggctgcacccgtaggcgtattttgcgcggagtcttttggagaagacctcgattttgcgcacttgtgctattccggctgc

SEQ ID NO: 125593 - DNA, 356 bp, Zea Mays
tgcgaatagaaaacttgcaaggtatatcagatgctgttagcagaggttgcataaatggtgatgaaatggggaaaacaattgtacttccagcttcacatatcggtggaagacgatatatgattcaaaattatcatgatagcatagccatatgtagagtccatgggccaccagattttttcgtaacattcacatgtaatgcaaagtggcctgaaattgttgaaagtctttatcactctggccaaaaaacttcagatgcacccgatattgcagtaagaatattccacatgaagttggaggagttgttacaagacataaaatctggtaatatatttggtccatgcaaagcaggtgcggat

SEQ ID NO: 125594 - DNA, 275 bp, Zea Mays
gtcggttacaagttgcttctcatggaaggtgttactgcatcatggtagaacaaagcattttacctctggtagaaatgtgttcgtcggtatttgcctcggtcgtttggtctctctggttgggcactttaagttggttgtgcatgggcgacggaggactcatgtgtcatcattactcatcttgagctgcgctgacccctagccttcatagcatgagctttagcattacttgtcatgttgtaggccctataggtcgtcagggggctcagacataggat

SEQ ID NO: 125595 - DNA, 533 bp, Zea Mays
tacctcgtccttgattctgcttcaaaatattagtcacctcgactaattctatgttgtgctcctatatgccccttgccaaaagtattttattcaagtatgatctatacttctctcaatctattagatctgatctcactcttgtgcttgcgacatctttgtagatgcccactgaccataactttcttgtctttttgggattctttcctcttttgtcattaaattgccaccatctggcgaactctagtcctttggtattgacatgcttgtacccctttaatgcccttgtttcaaatacttgcctctaaatttctactacctacttagacatttcagtttatatgttcctgaccttcctgtcttttgagagcctttcctcttctattgttacgtcgctatcttttagtaattcatactcccttggtcttggtatgctcgcaccttcggaatcttgcatactcttactttttatataaatgctaatctttgtaccccaatgtctgtttaagacatttcagtttacatgctcttgacca

SEQ ID NO: 125596 - DNA, 454 bp, Zea Mays
cggcccactcctgtcttcggaaccggccaattcgatcccgcgcagcccatctggcgcgctcgcttaccagccactgtcgtgtggggccatctggtcggcgtcatccgcatcttcctcgccgcgacgcaacgcaacaaccagggagtaccgaacccagccgtaagtgcggtaaaacgccatgattctcggggcggatttgtagctgatagttacgatgtggacttcggcctcgtttccccctttccctggcatataaagctcctgtgtggctgcgagttctccacccgtgccgccgccgggcaagtaatatcatcggcgtcgtccgcggttcaaggttcgtggtgccctgccttagcaattggggtcgcgtgggcctgcccgtgggtgctagcgacctccccagccccgaagccgagccgggaactgcgcaatttcttgtcggtcgccgtccgtg

SEQ ID NO: 125597 - DNA, 553 bp, Zea Mays
acacggacccaagcactctgaagcaggtgagacaatattgctcaacataacgggcaacaagggtgctcaaatgtcatatcaagtgtgtcctatctgagagccagacaaaggtatttatagggtaaccatggggctatggcctaaagtatgttcgtactcttggttaccttctacatcctcggaatatactatacgacaaggtcattatggaacagtgccaacctagacttaattacaccaaacgatgtacccataggtgagaccgacatgcgggcatgtcgtacatactaagagcatagtaggccttcgctttctgcatgtaatcttctggtcccaagtcccgaaggccttcatcttggggtcctcagtgtcgccccatcaacccatacttttatttggcaccaaggataaatgaccacctttcatagcgcttgggtcctcacctcggtctttgtggactacaccaagggaagagaaccaccaaaagagaagtccttggggtctttggctcttgggaccgaagcccccattgtggatctagccatcgctgccc

SEQ ID NO: 125598 - DNA, 436 bp, Zea Mays
cgcctctcttggaatatatgttcggatgccctacaatcggtaggttccggcctcacaaatcctaattcccatcgccctattatataacctctgttgaactggaaagaatctcacttgtttaaaggccggtgtgctttagagtaataggattactaagctaggctgatttggcgcctagcttcaattcaataaactgtttctgtgtgaatgaacgaacagctactgaactatagtctttcaccacgaactgggccccacttcgttcagctagattaggctctatctgaaaaaaataataataaaccaggcagttaaatcgcctccattctccccactaatctaatccaagaggaatggtagctagcactagcctattacacaaacgccgccgttgttctttgttctccgtcagtccttgcatctctctctctctctc

SEQ ID NO: 125599 - DNA, 465 bp, Zea Mays
cggagaagacaagtgttttctccccggaattccgcgccagctcctcctcccctgtgcattttggcagcgcagatcacgctgctcccgtccatgatccatccaccctcttctccctttctcatcaggccttgactgttctcgactcccctaatcaccagctcggtctattctcctcttcctcgccgcgctccgtcctgtctccgacacacacacgccatctgctgccgcgtaaacaccgggaaataccaggccttcctttcctgctataagcaagtttcaactccccaagttcgctgcttttggtcaatcttatctgcgctcccaggtctcagcgtcgccggtccccttttacttcgatccctctatccgatcactgcaattctaagcttcaattacctcctttctgggaaaattcactctctgataaagcaagccgttgagcggctcacgcaccacaccaccagt

SEQ ID NO: 125600 - DNA, 459 bp, Zea Mays
ccatggtcaggtgcgcgagcatgggtgatgcgtccacgatcgtcagatccgatagggtcggtccagattgaaatcacgaatacctcttcgtgttagttagctccgactgctggatttttttatcaacggttgtgatagcttaccacttcgggatgacccccatctaatctaatcccttgattctagatcaggcggttgatgtgaacccatacccctttcagtcaccatcttttgcatgagagcccttatgctatttataaaacaacccaccgtccagtctaagtagtaaagtcattgcggttgagtccatttttacgaaaccgaccctcaggtctttgtattaatgcccgctgtccagagactaatgtgtttcataaattcattctgaaaaatcatttctactataaaaacaattcataaatgcttagaaaatccataactttctcgttttaacttcgt

SEQ ID NO: 125601 - DNA, 382 bp, Zea Mays
ggagaatggcgtagaactcctcgacctcaacgttggtaggggatgtagagggagaaggggacaacactctggcagcatcgcaccacttggtgtaacagagaggtcatagttcatgtggacgttggaacacaatcagacagttgatgtactaaaggcgacatggacatgttctcctgcgagattcccttcgcgctctatcatataggaagaatagaaagtcgaagtctcgaatatgtaaccaagccaaatattgtccctaccttttgcacggtggaagctgcgactatgcggcccatggcgctctaattgcacgaaagcacgctagctgggccatcatcaaggaacacgatgcacctttttgcttggtgccactacagctgtg

SEQ ID NO: 125602 - DNA, 417 bp, Zea Mays
agtgctattggtgcattaatgtaccttgctaacaatacccgaccgaatattgcttttgcagtaaatttgttagcaaggcatagctctgctccaacaaaacgacactgggatggcattaagaatattttccggtaccttaatggcacaaaggatctaggactcttttacaaaagaagtaatgatcctagtttaattgggtatactgatgctggctatttatctgattcccacaatggccgagcgcaaacaggattcgtatttttacaaggtggaactgctatctcgtggaaatcatctaagcagactttggtgaccacgtccaccaaccattctgaaataattgcattatttgaagcatcacgtgaatgtgtatggcttcgtagaatggtgaatcatatactcacaacttgtggtatt

SEQ ID NO: 125603 - DNA, 344 bp, Zea Mays
tggcgccgtgttacaccagggagatggagctattgctttcttcagcggggcaatcgcacctcaacatcagaagttgccggcatatgaacgggaactgattgggttggtgaaagcagtccggcactggaggccttatatctaggggcgccagtttctagtctgcaccgatcactacagtcttaaatatctattagatcaacgattgaccataattccccaacatacatgggtgagcaagttattcggatatgattttatggtggagtacaagcctggcaaactcaatggcgcagctgatgctctctctcacgtcgtgccgagtcaggcatggcgctcaacaccat

SEQ ID NO: 125604 - DNA, 329 bp, Zea Mays
ccttactcgtgatgttttattccagagtcattttagctatccttgtgtggcattttgtgcctgaatcacatagcaatcaatgttatcaagtcatcttactaatcacgattagtcggactgatcaatgtcacggtgatcagttatgtactacaataaatcacaattagtcaggctgatcggtgccatagcgactagggttaattagacgatttgataacattgatagcaatcactgcaagcttccatgtcaatccaaacttgctgtaaaatcctgcagttgacatgaggatgtttttctgcgttggagttatgctagttgaattttgtac

SEQ ID NO: 125605 - DNA, 561 bp, Zea Mays
aagagcatgaacggacctgtagcacgccggccacggcgagcttacttcgcgcggtgttttggactgatttgggggaaatcccaaattggggttctctggtgaacgatttgggacacgagtgggtgcgctgagtgcttgaataccttgtggagctgagggtacgctcaatttataggattcatgagtggtggcccgtgaatttgagatgtcgtggtggcggtcggagagaaggggggacactggcgcaagcaattggtggctttcatcgtggcgagctcactggcgatcaccggatatgtgtaacccgagctattgcgacgtggtaagacaccaaggcacgtggcgcacgattgttgagcagctaacaccgatgaggatgatcccgaccagctacggttcaagtgggtacggcgggcgcaaaggtgagcgagtccgagctaatccaagcgccaagatttttacccttcactgttatccatctacgctgggcacaaatcaccgcggcgggcgcaaatccaagcacacggtcgccagcggtgaggcatctgaacctggcgttct

SEQ ID NO: 125606 - DNA, 424 bp, Zea Mays
cccgcctcaaatctgcgggcaaccatgggcggaggtttacgatacacgatcaccagttaggagtatcccatctgctttgccatatgtcgaacaacgtgtagcagctatcggagcgggtgttagataccggagggccaggtgaggtatcaccgacgatggcgccgtcgaggactgtgccgtcgtccggcgtcaggtgaggggcgatggcgtggtgatcatttgatccgattggagggccaggaattagaggggaacttaccggttcacactttgaatcatgtccattgatctgagatcatgcgaatgtgataaggtaccagttcgggatctttcgatagtcgttgatagcccatgcccataccccttcggctagggaaaagtgcaaaagagcccctgtcttttcgtttattcgacccgcagttca

SEQ ID NO: 125607 - DNA, 671 bp, Zea Mays
gtcctatactaaatgtgttttccaatcactaactaggttcatagggtgtgtgaaagtgcatctagcctttatgggttttaaaggtatcaaagacagaaccaagaaagagcttgcggttgtgcagacttcgatagaaatgatcaaaagtgataaatctagaaggaattagattttgggtcattccggcgtttggatatgttatggatgaccatagaaccataatggaactcaatgtagtaggatgtctgctcggatttggagtttgaggttccaagggccaattagagcaaaaggtcgatgaaaagaggcaaaatgagttgcaggattggatggagcaaaagacaagggaacacattatgtttttcatgtttgtaaaatcatgtttatcttgacaggaggttgcatatataattacaacagaagttacaatttatgcatacctcaaaactcttcctgctccccactgttagagtggacgcattaagggcccatggaactccaattctcttaatcagatccttcctagaaatgtcaatttagttaatctgtaagttgcagtaataagaaatggacaaaacctttacaatttcctgctaacaatacgactgataatgtatgcaaatgacgaggaagatatttttgtgaatcaaatgaggctagttgtggcaggc

SEQ ID NO: 125608 - DNA, 330 bp, Zea Mays
gaatttaataaaggtgagtgtagcttcattctgcaagttttgatacaatgttgacacatgataagctagcatacacctgtttttatgacatcttcatggttagtactattataaagatttggaacatgtttcaacaactatcccacttaaaaaaagttacctatgtgatatatagaaaccgtagcaacgtacgtgaatgtacgtgcacctaactagtatgactatataagtctaagtggtgtagcacacaccttagaatcatctggactaacgggcaaatgctcgtgttatagataacatgagcgtggtgtaggccatcttgtaccttcc

SEQ ID NO: 125609 - DNA, 386 bp, Zea Mays
ccaaacacctcatagcataaaatactctagcattcctttaaaccatgatattatctagaaactacaaaaatacttcactcctgagcaggcccaggtcgatgtgtatagtgcccaaattcggtggcacaccaagcatgtcgggtgagtgcaaaattgtatgtcgggtatctaggaacagggtacccaaaagtaggcccacaacctctttccggcccacttgacgactaggtcctctgctgaacgaccttgtgaggcggagcggtcgaccaagtcccctcgagcgaccctgcgaggcggagcgtccgaccaagtcccaaccgagcgaccctgcgaggcagagcagccgaccaagtccccgtcgagcaaccctacgaggtggatcggac

SEQ ID NO: 125610 - DNA, 704 bp, Zea Mays
gggacagcctggttggtaaatcggtggtgtgctctcatgatggcaacagccatgcctcagagcccaggcatgtcattgaagcactatccgagcaactagggatcagaggaaacaagatgaaggttttgaagcatcacccggagcagtacctcatcatctttgaggagcagcaagatcagagaagggtgctacaccaaagtcgcctccatcaccgtggctgggttttctgctttgctgagtggaatgaacaacgctacagctctgtggcgcgctgggactttcatgttcggctacggctggagggtgtcccagtgcacgcctggaacaaggacgttgctgcccagatcattggaagccactgtgccatccatgtgttggacgagaagaccatgccttgcaagcgaactcgcacttttgatctatgggcatggagtgaagatcctagcaagatcccccgcgaggtgagactaaccatcactgatcctgatagggagatggaggatccaaggggcatcaagcacggcctttcttacagagtgcttattcacttggaggtggtggatgatctctctttcttccttggtgggggagctgaacctggccggatgcgtcgctgcatgtttgagtggcactatggtgttcctgaccatctgggagctcgcagggagcgtggtcgtgctgtcgcgcgtgaccccctgcaccgg

SEQ ID NO: 125611 - DNA, 272 bp, Zea Mays
tcaacaatgtataggtcaacctgcagagtgcagacatcctttcctttcgtactcagaaaaagaatctgggtctaattacttggtgtttgtccactaattatgtgggctccaattctagtactacgacaaaaatctcctactcccaatagaaaagtttggaccttacagtctattccctcgtgcatccagcttgcatccgacatgcagttctcatattacaccaaaagacaacttatgccaaaagggcatctccatggccttttttagcagtg

SEQ ID NO: 125612 - DNA, 514 bp, Zea Mays
tatagggagaacgggcggtggccgcgaatttggacgagacgcgcgacagtcggaggtggagaagaatactggcgcgcgtgaattggtgtcccatgccatggcaacctcaccggcgttgattagacagcagtggggagttatggcgacgcggtggaaaggttgagccacgcggcgcacggccgggaggcggcggtcaccggcgagcctatcgggttacaccgcgacaagctagtacggtggtcggatttgttttaccggccggacttatccacggcggtgatatttccgggaccccgagcgctatccacacaccccgaacacaacttggactggcggcaacacgaatcatagcgcagggaggtcgtcggcggcgagtacgcggcgctggcaatctgatccatttcagaacactgtaccatggcgagacctcattagagcacctgacagatcatgtttaggtcacgttttctctcaaatttccatggcaacctatccgaggctctgcagcaaattt

SEQ ID NO: 125613 - DNA, 362 bp, Zea Mays
ggcagccaaaaagccagaattggaaaaggcaacaaagctgttggaaattctgagcccatcagcagaagcggaactgccgaaggttacaaaggctcctaccaccactcccaaaaggagaagaatggccagcgtgctagacgccgttgcggagacaacaagagcattgactcctgctcctatgaagaaggttgtcgaagccgttacagctcatacgaagaccgaagctgggccctcagtgcctgctaaaacgaagcttgccacaactgagcagaaggccgaagaaaaatctctagatactagcgtagctctagagaaaaatgtggccaaagaagccaaatcctctgctcctgaagccccctccg

SEQ ID NO: 125614 - DNA, 438 bp, Zea Mays
ttgcttccttccatttgacccaatctgagcgcttctggcactctgccatggactttggttcaggatcctcagcaatcacaacagcgatcatagagacgaaatcagtgtcgacaattgtagtctttcgattatataactctcccgtctcaacatagtttatggcaatttcttcaactgaatcatccggttctttgtgatttcccaagttatttgaaaccggttgttccaaagtccttgtgcttttatttgtgcgacatttgcactaggacgttcaccttcaaggtgtgttactgctggaacatctgaaaggaagcgtgttgcattctcttcagtaacttgctggtgcaggcgtccccgcttagctgatactgaatcatccggttttctcccccttttcctaggatggggagtacgagtagagtccataccctgcagagg

SEQ ID NO: 125615 - DNA, 322 bp, Zea Mays
gtattgtagtggtggtggcgtaagatgcttgagtgaggtgtgcgggtataagccgtaatatggttatactcgcgacgaggaaagatgcctgtatggtgtaacacgatgcttaggtcgctattatataaacgtgtgaaggatgctcgtgatgggtgtgtgattgaggagtgatgtagtggcgaagcgagaattaagtttaatatgtttaaacgggtagttgatagcatccatcggtgccgtcatgatttttgttgtatagcggattgatactttgttttgtcaatcattgcattctatgtccgttggataaataaacgtcttg

SEQ ID NO: 125616 - DNA, 332 bp, Zea Mays
atcaacctttggcaacattttttcgggatattacactctatcccccttaaaaagaattcgtcctcgaattcgtccactccaaacaaaacattcatggtaccccatataacaccaccattccaaaacatgggtccattattggtcttaattaacacaagaacttcgaccttagactaaatgtctaaggaaactacaccacctgacatcaaacatgaaccaacatgtaatgaagctcaaaccaagtcatagatgcaatcaacactacgatttcacaacatcgaatttggatgcagccatacatccgcatcaatgtcttaaaatgacactctttg

SEQ ID NO: 125617 - DNA, 436 bp, Zea Mays
aggtgccactaggggttatgaagctggtctttggtttatcctccttcatccaaatctggtgatagcctaagtagcaatccagtaagctcataagttccgaagtagcggctacatatactagggaatcaatctgtggcaacgggaactcatccttcaggcatgctttgttgaggtctgtgaaatctatacacatcttccacttgctatttgatttcttgaccatgactatgttggcaagccattctggatatgcaacttctcttatgtcgttagcactgagtagccttttgacttcggtctttgcaccttcgaccttgtattcagacattttatgaagcttttgctttcttggtctactgcatggaccaacattcagagcatgctctatgatacttctatcaaccctacataagtcatttgttgaccaggcaaagac

SEQ ID NO: 125618 - DNA, 327 bp, Zea Mays
catagttgtgcccaaaaatgatgaagactgctagcaaattttggatgaagctcatcttagtcgctattccattcatcccggaagcactaagatgtatcaagatttaaagcaacattattggtggacaaagatgaagcttgaaattgcacggtatgtggcgaaatgtgacacttgtagacatgtcaaagccatacacatgaacactgctggtccactgcaatctttgcccatcccgacttggaaatggaaggacattagcatggacttcattgtgggattacccaggtaggcaaaaggatttgattctatctgggttatcattgatcg

SEQ ID NO: 125619 - DNA, 475 bp, Zea Mays
acagcgggtaagaaaattgggtaggaatccactgcgccacaagggaaaagacagggctgagtctgaccgcacatgtgctctttgagggctagtttgggagctacaacaccggaggggattggagtggttaaaatcaccttcttattcataatttgggaaatcgatcgcttggagcccagacaacttcatgaagaggggagagaggaaaagaggaggcagtgggcctaattggatctcttggtggcaacagagacagtggccctgtatctcccgcttgagcgctcctctattgatgtcagtctcctctctctcacttctggctatccgcacctgccgccctctaccgtcagccaccctcaacatgtctgttcgcccgctttgagtcccgcaggtccatccgccccacacatgtatgtcgcttcaagtctgtccacacctgaatgtgctgtcctccccataggtcacaaggaacaaa

SEQ ID NO: 125620 - DNA, 532 bp, Zea Mays
agtttggtttggagaaggcactggatgggaggagatttatgaaccaaagattggaggaattagcgcgaaattaccgtgtggtgaggaaaaaattcgcgccaaaacacccagccacaccaaatcaccttcgcttgtcgatgagtcgcagccgcatcgtacaacggcgattttaccgacgataaagcatgggagcacgagccgtcaccgtcgccttgcgagacgacaggagcgatctctcccttcatttaatcccttccacgtcagattattttgctgagatggcagtatacagacggcaaagttaatgccgctgtacatgccctaagtatgtgtggttgagtgtcacgaagcaaggagggggacttgatagcctagatattgtttcttcgaagtgcttcatgatcatgttacctagagggtaaccccttgccctagccatggatagggtaggtccgtggagtattagctctagtgtaattagctctagtggaattagctctagtgtaattccctgcaggtccgtggagtacta

SEQ ID NO: 125621 - DNA, 359 bp, Zea Mays
gtcaatcgcagctcgatggctcgtgcagggcacgacagaacatgacgatttatacaggttcgggccacctagaggcgtaataccatacgtccaatgagtttttggtgatggtattgctctgagtttgaggattacatgtgattgctgaaggtgggagatgaaggttctcttatgatctagcggggtctatctcttttctagggataccctcagccttatatatccagctaaggagatatccctatacacttacgcgaaatctatgcactacctgctacgattgagccgagtcttccaggattaatttgccctcttccgcaatgctcgagcccatctgcatgcgagatccgagtcttgcg

SEQ ID NO: 125622 - DNA, 302 bp, Zea Mays
ggaaaaacgaaattagggcgctacggtggacgatcggaggcgagggctagtgttctggcttcgtaactacctagcggagctaacggtgcactcaatttatagcctctgagagcgatgggctccgaattttgaaggggaaagctggcggccaaagagaggggtgagtcaccaccgaacgctaccgtggctttcaccgaggcaatgttccaagcaatgagcaggctatcaacaacgacctactgtgacgtggtaacacgtctaagtacgtggcacggctacgaagggcggcgaactccagcgag

SEQ ID NO: 125623 - DNA, 915 bp, Zea Mays
ctcggaactagagggggagttggttgtcttcgaagcattttttactgctagtctttgccttcctatgcaccaatttgttgtcaaagttctacaacttttcgaagtccagcttcaccagctgacactgaatgccatggtggcactagcgaagtttatgtgggtggaggcacatacggtggtgagccttcgccaagatatattgccttcattggaagaagaaggttattggtagcatggttgcacaatttagtacatgcacgttcacactgaggactgagaagacttcgggtgaagttgtggagctcgtggtgtgcgctaagaataagtggggtaactggtgggattttttgttttatgtgatgttggaggatgccgaggggtctagggttacctccatccatcccgttctcgcactgctacatcaccttctcgcagtttaaactaaagaaaggggatacgaacgaagatgcccttcggcgcgcgtctaagacgagcaacaatcgtgacttggtggaagagttcattgcttgcggatgtgggtgaggtggagttgtgctcgatgccctttttgaataatcagatggtgctgagtcccgccttcgccatcgaactgcgtggtgaagattgttggaaaatattcaacaaggacaaagatgacgaggagataggacattcgaggttcgaatgtcaagttgaatcgtgtgtttgagctgaacatcctttgctatgatctatatcttgagggttctactgacgttggggatgccgaggagcagaaaaaaggtgggttgaagcatggtggggttgatgtaggttgttctaagagtaaatctactttggtgttggtaagaaaaaggaggaaagttgaggcgaaggcaaaggaaccagcgagggcggctggggtgacggacgctt

SEQ ID NO: 125624 - DNA, 426 bp, Zea Mays
cgccgattgttgttgagtgtttggcgcccgaaaagggtgttaacagttctattctaacggtctgttttcctttttgcccagttgagtgctttaactatgagtggcagtacaaggaaaacttgaaaaatagcaactctcaacttggctacgccgaaaatggtgtgactggtctgatcatctgggaagaacctcaaataatcccttgcaactaccatatcattagacaaatgtaggaaaatgtccaacaggccttgggcgagttggatagactcggtcaatttggatttgccgatactttgtaatgctactagttctttgggaagtggagtgtgcctatgatctgccctgctcttctagcattaatatttgtgggaatttatcaatctgaattcaggtaaacatatctggtttggcacttaggctgtc

SEQ ID NO: 125625 - DNA, 381 bp, Zea Mays
ctggtaggtcgtcgttacacaaaggcacggagcattgcttctgatgcaattcttaagcctttcttaccgatagaaacgtccgcgcgcgcaccgctggtccatgaggtcttttttccttatgtggccgcttcgctttcattctgttgtggtatcaagagatcagatggtggagaaccatactgtgaagtgcctctgcctcctaaacgtgtctggactctgaactgactacaactccttgtgacgacggacggaataattagtacttgaattgcacggcaataaacatgcttcgagcctgaattccggcagcaacacgggaggatctctttccctgcgtctcaatgccgcatcagtgcgtagcagatgagctcacactaaaat

SEQ ID NO: 125626 - DNA, 288 bp, Zea Mays
gacatactcgtctcccatttactacttcttcttctcgagctgagcaggcttttgacctggttcactgtgatctttggacctcccctgtactcagtctttctggttataaatactacttggtgattttggatgatttttcccattttctctggactttgccacttcggttgaagtctgacacattccccacactcacacatttcttcgcctgggtatccactcagtttcgtcgcccggtctgtgctctgcagtgtgacaatggttgcgagttcgacaacaacgcctccc

SEQ ID NO: 125627 - DNA, 339 bp, Zea Mays
aaattctggaaagaataagggatttggtggagagcagcctaatcagggccaggcaaagaaaccacggtttgtgattcgaccctcaaaccagaatcaccctttttctcgtccaccttcatttcccttcaaacagcccattattatccgccccaacaatgcccccactaccccaaaacagccgggtgccccaggcactcgatttcctgccttgcctagttcttcaactgggtgctttaattgcggcaagtcgggacacttcatcaaggactgcccatatcctaggcaaaatcaatctaatgcttcgcaaggatctgggaaatcaagtcagcccaaaggaaa

SEQ ID NO: 125628 - DNA, 379 bp, Zea Mays
gcgagtacgctggcagaactgcggtaggtgcggctacgagatgctgggatggggcgggctgcgagatgcggggatgggggaggacgatggtggaggcgtggatcccgcggcgccatggatggggcacagctgcgagatacgggcatggggcgtggctgcgagatgctgggatgggacgggctgcgaaatgcggggatgtggggagggttagggcagaggcatggatctcgcggcaccatggatgaccccgctggtgacggctgtgagagatgcgaggaagggtcgagcgctactgcaagacgtggggacagggcggggggagccgtggtgaagctagtggacgccctccttagcctcttaaggattagtagagatttca

SEQ ID NO: 125629 - DNA, 516 bp, Zea Mays
gccgaagcccatgcccagccacgccgatcgttccctcggcgttacgactgcagctcgaccgtttcctctccccttctcagtggcagtttctaccatcaatgcttgcagccgtttcttcgatggagtaatgtggttcttcaattcagcaatgaagcgcataaatctggctgaacccctctcctcccctctctaaaatgcagcagcctctcccttctcccaccatcacgtccgccttcaatatccgtttctgacgactgctctgcttcctgcgaccagcgcccctcgccctcctccttcggctataaaaactacacccaatagagtcctcctccctcaactgctcgccctcttctcgtgcactcgcccctctgtctgctcctcaatgtacaacctctcaccggaattcctcgcactcgatctccatgccgctgtcgccatgactgaaattgggcgcctctccgagcctcaccgtcatcgaaacctcgctactcgtggttgcgccatcgcaccagcggc

SEQ ID NO: 125630 - DNA, 701 bp, Zea Mays
aagaattgtttgtggagttaaaactcatccaagatttaattaaggaatctatgggccctcttgacattttgaagcatgtgaaacatttagggtgttttcccaatattgttattgcataccaaattttgttaatagttcctataactgttgcatccgcggaaaggagtttttataaactcaagttggtcaaaacctatttgccttctacaatgacacaagaaagactcaatggattggcgaccatagcaattgaaagcgatctgttggaccagattaagtacgaagatctaatcgaagattttaccttaagaaatactagaaggattttgctttttagcagaacataaaggtattgaactgtatttgattatgtaaactgaattgtattttgattatgtaattttttaatttaggggcctcatttatggttttccctaggggcctaaaaaatttgatgacgatgctgctagcatgcacaagtgcaacatcaaatggttcatgccgccaatcaaaatctgggccatgatactaaaccatcacctccccatagctcgcatataaaacctttgtaaatttagaaatacagaaattgagatacttgagttatttacactttaaaaggcatgaaacatcaattgccaagccaatatgaacatttattacatccctagcaaactctagatcatatgtgtcaagagcct

SEQ ID NO: 125631 - DNA, 465 bp, Zea Mays
gtgatctcgcaaaacttacaaggcccagtcgatacaactataatgaagcgtggaaacaccatcagatataatggtgtgtggaagtgccaaagatagatgtctgtttctcacttctaatgactagggaaaacctagagaaagtgttagggcctatttgttttggcttttttctgagattctaattgtgggaagaatctagctgtgtggagaatctaagtattgtgaggttatgtgcaagggaagatgaaggggtccatagggttttaggatctacgaagtgagagattactcctatcgcaacaactcgaccgattttgtgttcacgttgactttggacgagtttcagccaagagattctcatatatgcaggctcaaagctaggcatttggcagctcatagcatcttcttgcggctagaatcagcaaaaaagttgaaacaaatagacccttaatgaagcggtctaac

SEQ ID NO: 125632 - DNA, 478 bp, Zea Mays
tgtggctcggattagatcgttacctcattgaaccggtatgcaatattaggcatcggatcaataatcgacgatcgaggatcccccatgcgcgtaggacatactagtccttagatcaaggatcaacggtcatgaacgaagcgtttcatatgttccgatcctggcccttcattccgatccgacgcccccaggccatcttccccaacacgcactgagcagaggcggcgcggggcggcttcacggcgctgaggaggggcggcgaggaatctggacgaccccgcgacaccgcacagagccccagctccaaattgaggccacgcagttcgtatcccgtgaatccagggtggcggccgtggcttacttcattctctctctctcgatctctctgcaatccgtcgaacacacggcgaaccctctccagcttctctctctctgcattagccatggcacggttctagctctccgttctaggggatgagga

SEQ ID NO: 125633 - DNA, 357 bp, Zea Mays
cttgaattagcctgcctacagtggctttgcttagaatttaatggttttgttgcaagtgacttcattttgaacttaaattcacactaggattagggctgagttacttgtgtgaagcattgtctaaatggtcagtaaagttcgtaaaagtgctgttagcatctagtatatattcataaattgcacggttaggaccacttcaactattattatgctactttatgttggcttctgatttcgatgtaattcagctctttagatgcacctcttttacatagctacattatatgtgaattagtactttgttttattgattcactaatgggatctaagttttttctgggctaatcaagacaattt

SEQ ID NO: 125634 - DNA, 775 bp, Zea Mays
gtctttttttctttactctcctccatttcctgtatcattgacacaccacccttaagatcttattcttactgtagatcatggtcagtaaagggtttttaaaacacacaaaaaaagaattaacacggcgagagaaaaaaaaaagctagcttaaactttcaagtacaccagtacttccctccctgtcagaactgcacagcaacataacagtagcaatgccgccggtcgcctggtcctcgtcctacaagctacagggtcttgtcctgccttctgcatggcaggggcaggccaatcttttgtcagaaagctagcttaaacctgcagataaacggataagcatcattaccactttccagcacgcataatgagcttgtaattaaacaacaaataagaggctaatgctgctgtcgacaatgttttggtagggaccaaagagggcaaagcttttgatcccttttttaagtgaagatttggcgatgcattgttcctgatcacacaattgtactgggagtacatacacgtacacacttgtatctttctacagaaagtcaatagccggatacttacagttggcactctgcataaataatgcctttattgtgtgtcttcttttctctgggccggccatctcttttatattccttttttttaaaaaaaacttatttttattctctcccttttgtttgctggtgcctcactgcctctgcagaacatagcgcccacaaccaacatactgctccctctgtcttataaataatgagtatctttttaaagtttt

SEQ ID NO: 125635 - DNA, 1197 bp, Zea Mays
tgtccagcggcgcgcccgtctcggcacgggtgacggggctcagcgcgctcgagaccatctcgctcgccgggaacggcatcgtgggcgccgtcgccgcgtcgtcgctcccggcgctgcgccacgtcaacgtgtcggggaaccagctcggcggcggcctcgacggctgggacttcgcgtcgctgcccggcctcgaggtgctggacgcctacgacaacaacttctcggctccgctcccgctcggcgtcgccgcgctcccgaggctccgctacctggacctcggcggcaactacttcacgggcgagatcccggcggcgtacggcgcgatgcccgcggtggagtacctgtcccttaacggcaacaacctgcaaggccgcatcccaccggagctcggcaacctcaccaccctccgggagctctacctcggttactacaacgtgttcgacggcggcatccccccggcgcttggccggttgcgcagcctcaccgtgctggacgtctccaactgcggcctcacggggcgcgtccccgcggagcttggcgcgctcgcctccatcgagacgctcttcctccacaccaaccaactctccgcgcccatcccgccggagctcggcaacctcacgtcgctcaccgcgctggacctctccaacaatgcgctcaccggcgaggtccctcgctcgctggcgtccctcacctcgctcaagttgctcaacctgttcctgaaccggctccacggaccggtgcccgacttcatcgccgcgctgccgcgtctggagacggtgcagctgttcatgaacaacctcaccggccgcgtccccgcagggctcggcgccaacgccgcgctccggctcgtcgacctgtcctcgaaccgcctcaccggcgtcatcccggaggcgctgtgcgcgtccggcgatctccacacggtcatcctcatgaacaatttcctcttcgggcccatccccggctcgttcggctcgtgcacgagcctcacccgcgtccggctcggccagaactacctcaacggcagcatccccgccggcctgctgtacctgccgcggctgagcctgctggagctccacaacaacctgctctcaggcgccgtgccgtcgaacccgagcccgagcgcgtccagttcgcagctggcgcagctcaacctgtccaacaacctgctggcggggccgctgccgagcacgctggcca

SEQ ID NO: 125636 - DNA, 338 bp, Zea Mays
aggtcatggcggtcacgtcggtgtgcgggtcggcgtcagaggtggtcggagctgtcctggccacgagcgcaggcggcgaaggtcgtcggcggctcctcctccggccaaaccactgcggtagggttcaattaaaatgcacgaggagctccacagggtgatgtagaggccatgggcgcaaggaactgagaaatggtgcagaaggttacccagtccacgtgctccggcggggtcacgaactccggcgagcgcaattacactgttccggtggggctggtcctcggctcaagctcaggcaagcttcacggccttctggggaagctatccgaggccttggatcg

SEQ ID NO: 125637 - DNA, 669 bp, Zea Mays
agcttcacatttttatgacttttttaggcactcatctaaaaattctcgatatccatgaggaactatatagctcgcattatctacaacatttatatacataattttttgcaaaggagaccatcaagaatgttgaaatatcaattgaatttaatttatcttctcttgacggtaaaatagaactgaaccacaagtccacaacttgggttttatccaaccacaactgtgttttcattagcggtctgtaaagataaaagacaagagagaattatttatttggcactaagacaaaccagacatccttttagggcaccgttttttggaaaaattcttaccaggtaatgcgttaaaattttctttagtaaatgacactctggtggatttgggctggtaacagcgtcaagtgactggcaaaataacaggaatgctcttgttgtgccaaataggaaagaaaattttctcaggttgtcaaatagtgaaaataatgaatatcacaagtatacttgtgaactaaaatatgagattttggtaatctaaggctgcaaataaataataaatagattttaaggtaagagtaggtacacattagttttatggacaagcttcacaaatgtcctatcagcacacttaaaaaaacaaataaagaggaacacaccagttcatagacacgag

SEQ ID NO: 125638 - DNA, 550 bp, Zea Mays
atggtctcggacgtgagcttatcggcctcactcgattgctttgcgacgtggtcgagcggccgatgtcatcgtgggacaccggcgatctcaatcacgccacgccataggtcgtcttaccacgtcatcatgagtcgtggagagtaactagtgattgtcataggactttgccccagtgcgtgtcacggtgaactcgccttagtaccaatataacgccaccgccgtgatctgaatttcgttcaaattcggagcaaccgtggctggcttctataaattgagtgtttcccttgctccgcccccttgtcacgaacccaatgcaaccccatccacgtcctgccatccaccatagcccgaggaattgggatttttccccaaaccggtcatcaacgccgccgcgaggcatctcgtcgtggtcaaagccctctaaggtagctacagtcgggcttaagagtgttttgagttctcttacatgtcgcgatgctcattgacccgcccgattgaactctaccacagccgaaaccctggaacattatgtcgccaccgtggaacacca

SEQ ID NO: 125639 - DNA, 343 bp, Zea Mays
gggatgacacggtcgcccatcgcccaaaccaacggcggcgccgaccacggctttcgtcttcgtgcctgtgtatccctagcttcctgttcgtgcgtaccagggagggtctaggctttgagcctttgacggttgcacgatctagatggaaattgatcgggagtacaccccaccccctgcagggggctacagctgctctgtacgaaccctactaccactgtgttgtgctgatttactgctctgaacttcctggaggtagtggtggctgtggaggttggtacaagatccattgcatttttttacaaattgtttagcagaacggctccggctgtattttttatttgat

SEQ ID NO: 125640 - DNA, 285 bp, Zea Mays
acgaggggttgcgaggagggatgtgtgcgtatatatagaggaggggtgcggcaaggcggttgcgcgcacgacgcgcggggcgttgcgcgacggggcgaggaaaaatgaggtgaccgcgaccgagcgaaaaagacaattgcgcgagacagtgtaagacagactgacttaggcgggttagataaaattagacgaagacggtcagagctggtctgcgacccaaaataacgaggatagccgacgcgggcagcatgctgttcgcgagaggaagcggttcggtgatctcgc

SEQ ID NO: 125641 - DNA, 428 bp, Zea Mays
gtaaaggttcagtgtcaccaagtcggataaggtcaaacgggccacgtggtcgcacccttcgtgaaccaatgactcaaatccactctggtaggtcacgaggacagaaaaggtcatcaacccttgaatcacgtcgggcagccatgtggtctccgtctacagccacacagtccaacgatcgaagaggccttctccctccaggtctagcggatgaacgaccaccgccaattattcatacaccagactgaagtcattgaatacaacccgggcatttactagcatgttgtgggtgaagcctaccgagataaggcactcagcgaacaactcacacattgcagtctctagcaccttcctgagaaaagtaaagtgaccgtaggaaacggtgactcctaagagggggtgaattaagacttctaaaaactctctctaaa

SEQ ID NO: 125642 - DNA, 648 bp, Zea Mays
cttacctgtttggaaaagattgaagtggagacctgacctttttacctttattagtaggagtttgatgcaagtgttttaaaatagaatgagtgagatgtacataaatgcactcaagagtctacgtcaaatcccataaggacaatcactatgcaatgtcctaaaatattaatagtaacccgtcttatatattttactacgacattttgagcccaagtgaatattaacaatctgcaaatgtggcatcatgatcagcgtgaatattatattgtagtggtcctgcttgcagatagttgaagaaaccaaaaaatgataccagttgcaacaaaataattatgcgctaaaagaaagtttgctgtgaatttgtgaagctatgcatttgagagcagattagacatatgtacaaagtttctgaggcaacaaaatacttggtctaaaggccacaaaatgcagatagtagcaatgcagaaatatgtgagtctttttaacggtcatgtttaatcttcatggagttaatgttcttttatttatgttgtgtgaagcagtaaatagtgttaggtattgattactcaccttgctaatataattgggtactacacttttttaatacaatagattttttacgtgtctaaattttaacttgagttaatc

SEQ ID NO: 125643 - DNA, 464 bp, Zea Mays
gttcaccatcaaggtcgtctgcgatgacccaaatccagcgatggttagggtttaggggttggcgagagcaatgtggatgggggcgtgttaggtggaaggggcgagagaaatgcggatggcaatgagatagagcgggatgcggcgagtgaagtcagcgatgacgcagctcatcgacgcgatgagaggtaagggggcgtcagtgaggtacctggtcgagggggcaggtcgtcgacggcggatgtgtcccagcggcggtgaggtacctggtcgagggggcaggtcgtcgacagcggtcgtgtcccggcggcggcgattagggttggagaaaatagtgggggagaaagaagaggagtgggggagaaagaagaggagtgggggagatagaggatgagcggcgtttgttttagtgacgacggcgaaacatgttttttggcgcccaacgtgtttggcaatgcggatgctaa

SEQ ID NO: 125644 - DNA, 495 bp, Zea Mays
tattgacttcatatgtcaattttgcaacatatttggagaaagtgaatagccaacacattacacaatcattgagggatacaacagaattatataagatgtgatgatataaaactgacattactctaacaattccatcattgcatagcataagatatgagatagtactagctattacaataatgggcaccacatcataaaattgtttatggccctaagccatcatcacatgcatcacaacaagcataggcgaatagagttattacagacccattgttcattacaaaaataaaagcccctgagggctaccaagccaagctatcaatccttctccccctttttggcaactagcaccaaaaataggaggagaaaaacatcaaccacaaattaccaaggaggagatggatcaaagaactatgacgccaaatttgctgcaaagttttcttccccaggctgagctggggggttagcttccagatggatcctagggaggaggat

SEQ ID NO: 125645 - DNA, 594 bp, Zea Mays
gtatgagtgggtagtagggcgagagggagccatactggcgcacggctgagacagaatgtggcaaggagcaatactgttcttagattgatctttgctaatcctcctaggtacaaactacggactttatatagtctagtacaggcgcacataaactgcagccgcccctatttattctctaacaaactcctactctctctccttttgatatctaatctaacaaacttatccttatccctctaatcttgatctcctggcgtggcctggcctatgggcagcttgggccgtctttcatatgttttacccaccataacatctctctcctcctccgagaacagctcgtcctcgagctgaaaatggggtaggcagacgtgaactgttgcaatggctcccaactagcttctgtcggctgtgttccactccattgtacctgaacatgccagacacctcgttgtatttttgctttgagcaccttctctggtgagggcaacagtcaaccattctccattgctggaagagcaggaggtagcaacgtgaaagacgtcatggatgtgtgctcccgttgggagttccaggcggtaagagatggattggaag

SEQ ID NO: 125646 - DNA, 296 bp, Zea Mays
cgaaactgctgctctccgctgattgcggggaacaacgaacacgagtgcgctgggtgcaggaacgcgatagcattctccagtggcagctggagaagttttgacaaaagtaggacacaatcagtgctattctattctatctaaacgttaaacggccacttaaacaggcgaaacggctgtttaaagttcaaacaagctaaataaacggccgtttcaaacagtgaggtacaattgcacaacgaaaacgaagctgctttgtcatgttcgcgctactacaatagttggatatcttgcggttg

SEQ ID NO: 125647 - DNA, 449 bp, Zea Mays
aaggcaataggtcatatcaataaagaggtatgtcatttatgtcttgaagaggatggaaagatacacatgaccccacccaaccacacaacaaagtcttttagggataggttacagtcgaaacccaaccaaaaccgcagatcaaggctcaggcacatgaatatatctgtttttcatgcactcctatctaaggctaaatctttgagtatattatatcctttcgagtctccgtttactgcttcttaccatgccaactttggccttccccttgcccactacacacttgtgcctcaagacgtctcaattggacattgtccaaaccatctcaactggtgttagacaagcttttctccaattgatgctagccatatcctatcatgtgtatcatcgttctaaattcaaccccttcttgtacccccacaaacccaaaacaacatatacatttccactac

SEQ ID NO: 125648 - DNA, 705 bp, Zea Mays
cacgataccgcctgctctcccgctaaccccgctgaagacaggatggctactgtaacaacaagataggtgtccaatctacttttcgccatctcggatgacaccaagactagatcactacattctttcaccatgccgagcactgttttaaacaactacgactagacaaaagtctcgtctaggatgggctcggacgcctgctcgagctcctgacccagcctcggctctctatctcacaaaagacaatgcaaagtaggagggccatcccgccggcgtgccactatagggcttgggcgcacctccgttgaccacgacaataacgtagcaacacctgtacgcttgggtttcctccttacgaatataaaaggaggagtctggggccttcagaaggggaggcaagaacacaacactttgccgctcactccactcatgatattggcaccgacctcaatcacacttagagacttgggacctgctccctctctcgactagcttgtctcccctactttgagcacctaagtgcaagatactataagtctcatcccccatcgctgaaagtagggcctgctcttgctcgaactaggataaatcttgtgtcttcttgcatcactcatctggacaggggcacgcagcacgaattcacttgttggttaggaccccagttcccaaaacactgacagttggcgtgccaggtaggggggcgctgcc

SEQ ID NO: 125649 - DNA, 457 bp, Zea Mays
cttggataaggattctcaccgtcgttaagccatcgccgttgtctgccgcgtggctctaactttccaccgcatcgccgtaagccttagtggctccccgttgatcgccggagcaattgccacggcgctggacaccaagccactgcgccagtactcttcttcctcctccgaccgccgcgcgtccccactgaaattctcggccaccgccgttgagccctataaattgaagcccccgccagccccgcaaggtcatcacacacccagccaccgaaaagcactagcaatcgttcgtcagagagcttgaattttagttttcccccaaatcaagtttccgccaccgcagaaccaagctcactgtggccagtcctccacaggtttaatcataccatccttgttcttgttttagcatctctgtgtgctggtgatgctcaccaactcgcccaattgagctaagatccca

SEQ ID NO: 125650 - DNA, 405 bp, Zea Mays
attcagggcatccatcacccgattcaatctttacttcggtcgggtgccaaaggcagtagtcatcagctgatcttctttttagtgtaatttcccaaaatttcgttgcacatggtttctatcatttctaaccattcttgacatggccctttgaactgtttctcgaatttgaacttataaggtagtcgcacaagttctttcttctcctttgtcccctttagcttcggcatgctccattcactcagcgtcgagaacaccttataggccagattttcttggactagatctcttgtgctgatctgctcggctactacccggaattctgccatagcttgttggcatggtgaccccggctccatacggcacaacggcctagtcagcccgaagcttaagctcagagggctcagt

SEQ ID NO: 125651 - DNA, 407 bp, Zea Mays
cttctccacacttctccgatcccctggccgtctccattgtgtatgccctaactctcccagagctctgaacaaaaacgtctgcggctgtgtgtagctcgtattttttccagctaatctcctatactcgcctaaaccgctctgacctatattcatggcatgatctaatatcctccgcgattttctccgcagtctgcatgtcgcgagatttacgtgaacgacacgttatgattacctgcctattgtgttacatttccataaacatggctcaccccaacgtgcgaccgccccacgttcccggatgacgcacgcgtcacccccactacccgatctgaccacacacgtcgcgttagatgattatttatttgttattagtaatttaaacaagcataaaagtctaaccacctccc

SEQ ID NO: 125652 - DNA, 451 bp, Zea Mays
gtcacacttgggtggaccagatttaaatcgatcagcatccaaccggtatgcaccaaggaccatcagatctcgatcctacgacagggatggacccgaaatgttattgcctgttctaatcttggccgcacgtcggtcgatcaacggtcatggaccagtctggctgaagcagtatttttacttctcatcttgttcgtccactaggaaacagacgaccaggacacactcttcttcccccaacctgagccgcggcagcgcacggtgtgagaccggcggtgccattgcaggcgagcggcgctcccaccgcgatgccccataccgaacgccaaaacgtgcaagacgaatgggaggctactgcagacttgttccagaagacataccagcagcagcaggcgcgccgatagtagttagccacgccgaaggggcagatatatccgcggtgagcagctccggt

SEQ ID NO: 125653 - DNA, 586 bp, Zea Mays
tgtcggcatctggagaagaaaacatacttgattattacacagtacaattacacagcctttattacattattccaagcttgtccaaattatacatactcaacccatacaactcattttccttatttagactacataaggaaacaaacctactactacaataatctagtcctccacatccttggttgttctagatccgctgctagcttcgggagggtgattattcgtgcgttcataggaggaggggctctgtcgctctgaagatgtccaacttcccataaggtcctccttcatctgctcctgatgcaccaactcccatctctgcaacttctggtggcacgtttgggtgtagctggtcatacaacatatgtacctcctcgtgcaggacattgttgtatgcttgcagattttccaaggccatgctcagctcttccatccgggctcaagcagttgcctcgcaatcccaggctatggatcgcgaattcacagcccagtcaatagcccaatcacgttctacaatctcacactgtaagtgctctacttcttttgataactcagcaatgcggtgactagcacgcatacgctccct

SEQ ID NO: 125654 - DNA, 695 bp, Zea Mays
tgccccaagggctcgtacagcttaaggaggacgagttccgagaactgactcaagacggaagatctgtcagcgaatatgtgcacaagttcacagagttagcccgctacgcgccagatgacgtcaataccgagggcaagaagatggcccgtttcctgaagggactcaggccagaactcaagacaattctggctagccaagacttcctcagtttctctcacctttccaacaaggacatgcaagttgaaagggcaaaggaggaagaaaaagggcatctcaaaagaaagttccaggttctccgggcacagcagcaggaccggcaccagaagactcgatcatttggatttccacccaaggggccaaacttcagtagaccagctggacccaccccgtcatggttcagccagcagagtcagagctctttccataccccctcagtggcaagcaaccaacccccggcgaatgcatgttggcactgcggtgatcccagtcacttcaagaacaactgttcgcatctgaagccaccaggacccgcctactccaactcggtgaatggccccaagaatacctcggcatccgcccccaaggcgccctcctccgtcagccagcaaaacaagaccacgtaccaaggaagggcacgagtgaatcacatcaatgcccaggaggctcagcaagctccgggagtagtgctcggtgag

SEQ ID NO: 125655 - DNA, 785 bp, Zea Mays
caagagcttgaccacctctttccgaaacgtgggctcatgataacttgcctcagatggaggcacgaagctgtaacaaccaaaattattgtgatactgttcctttctagttgcctttgtctcataagacaactcatgaatattggaaaagcatcttgcatccggttccagtctttggctcctcatggcccagataagaacccccactttaataggagcttctagggtaatctgatgaaggtatatctcaaatgtcttcaaaacatcgactagcatcttatgaagtgggaaacaaagcccaaccttcatgaagctcctaaaggctaccacttcatcggtttctggcagcgaaacgatgtcctctcccccagcccctcactatagacacatcatgaaaatatttccccttcatcgattcaatttgtccttgcttgatggtggatttcccaaaaacaacgtggctaggtctccacggccgatcttcaacattctcatcctcgctctcaatatcgaagctttcactatcactcgagttctcggacaacccagccagcatctcatttgtaatttttttctgtattgatcttctccatagcttcataaaaactagccaacgcagggtcagtgatcttctcctcagccattcaaacgatggttgtacagatgccgaagctcaaaagttaattaagctcgaaaaagcaaagagttaaaatggtaaacacaacgcaatcagctagatagcacgaaaaaataatcacgacacaggcttctatatatatacttagaac

SEQ ID NO: 125656 - DNA, 853 bp, Zea Mays
tacacgttgagaaggaaaatacaaacttcatggatgcgcttttacctcagttgacgacgcagacgcgagcttgtcgaggagcggatcaatggcggcgcgcggtgaggcccgaccgaaatctccccagcgcaacacagagagccgtcgagctccgccccgtgaccctgcccgcgcggacctccgcgctgctgccgcaccggccaatgcgcagtccgaggccatacttgttgaccgacgaatagcgccggcccactaggcgctccccagacctgaccccaaggccggccgatggcgaagacgcgtgggcttcctactctctctccctcggtctgtctctctcggcacgacgtgctctcctatctctctcttcgctgtgccctcatccagttcgatggaacatggattcacaactcaattgttgctcggtctatggaacaaggagggcgccgggctccataattatactacctggtcaaggcgcccaggcgagagattcagcgcaagatcctaactgaattttgttacgtgatcgggtttaagttgatgacgatggtgctaggttctgagccccacacggcagtggaataagtgaatcaatttggtgatgtaatttctggtgtcatgatgacatatgcatgcgactagatgattaaacaaatgtcaaaaataaacacacgtatagatatgttagccggctgaaacttgcaaagtgggaaactgcgaatgggctgcccacgcgtgttctttttctttcgtctttttttgcctagtttatttttttattgttttctagatttcaaaatttaaatttggttttaaaattcaaacttaaatacatatgtacatccaatag

SEQ ID NO: 125657 - DNA, 573 bp, Zea Mays
cgatcacagccgcccgatctgatccaaccatctagattagatcgcggccgcccgagcactcagaccacccgatccgaatccgagggtcagcatccgatcaacgaaacaatacacgttggattcgatccaaaccgctggcgcacggatcgacgacccagatttcgtcacgaaggggtacgctcaggatttgatcacagccgcacactctacatccaacagcccgcacaagtttcccctcgtcctaccctcatctctcccctcactgtaacgcaaggcggcggtgcccccaagcagagcggcagcgccatggccggcaatcccgcgctgggccccgatgaacggtgtaacacgtgaaagagctaaaagcatacagaggacattgcgaatcaattgtaggagttcttgcctcaaatggtggcgactgcagtgctgtcctcgatgaagtgtgggaccatggcgaggttctgcgcgggtgagcaattcccaaaccacccgatcatccattttcccccgattgagcagcggacatcatcggtgttacgcctaggtccttcctcaaccctcccaatggcg

SEQ ID NO: 125658 - DNA, 607 bp, Zea Mays
gtttgattggctagaacttgggctaggtctaagagtagttgtggaggtgcggggaggtgggtttcactttcctctctaatggcttccccttcagctctcaggggaaaccctgctccaatcccggaggcggtaggcgtggttttatccgaagccatctgccagggaagagagtcactattatgcacatgcaaattgttttcaaccaagttattttattcattacaccaatacattacaagcatatgactactacaggctgaactacacgagagcgttccctgaggtactaccgaactcattttctaaagtatccccaaattccttgagaagatcatcaaggcttgctagggatatatcctcggcgtcggaccaatcatctatcctggggggaggtggggctggaggggtcttcttcttctccgtttggcatcctcggttggtggtcttcttctggattttcttcttgggagcgagcttctttagcttcttgtcatagtccaactttaaggttcgataggcctcacgggtgttgaaatcctcgccttctgctatgtcgagacactcctggagagatgtcttttcttgcttaagctctttgacttgctgc

SEQ ID NO: 125659 - DNA, 697 bp, Zea Mays
cagggtgcggcctcgtcctccccgcgtgctcactgtgagccagccagatcggccgaagcccctctacccctggccgagagtcacctctcttcaatccccttgctctttccatggaagaagaaaccttccaagacttgctatcgtcgtgtgcgcgtaaaggtgaaactgtcgtgatacatccagggagaagaaactgcttcctcctccataccggatcccacttttcaggatcttgtcatcttgtgtcatttgtgtggctacaaactccccatggccgttcctaagtcatggctccagccaattgtgtcacgctgcaccgcatgaaatccaaaattattattaatacacgttagctttcgccttctaaatccgtttagcgttctaaatccgaaattattaatacacgttattttgtcgtagcacatgttttagctaattaattaattagttaagtaattgtttatccgattgttatttaaaatagctttcgttaaaactatcttagagcttctaacatgtgttttcataaataaatattaacgtgattaatactaatccagatgtctttattcaatacacgcctagtgtaagtgtgacgtgtgtttagcatttctcatatgtcacgttatttataattcgtgaattgttatttattcaatatattatacatcgtaaacccgttttgactcatttcaat

SEQ ID NO: 125660 - DNA, 488 bp, Zea Mays
tgaggtcggcctcaagcttcggaaagccaaccttcgctccagtccggtcccggagacatcctaagctctcttcgtcaacgccaccgaagagcaatgctcctggttgatagccgcatgatattgcataatccctcaactcttccttctcagccttagacagcttttgaccaagtatgttttgaaaattaaaatccttttccttagaagtatcttcggcaatctccttctctttccccttctctttcccgggcgctggggccagagtctcttcggcagctgtagcagcttcttccgcggccatgttcaaaagcatcttatcaatatcagaaaaagtgccttccagatttgtatcttcggctgtctcagcttcggcagtcgcagcttcagcgggggcagcctcggtagctgcagtgtcttcggcagccggtgtttttgacgccgaagccgatggtggcgtttcttcaatagcatcaataacagtaataatc

SEQ ID NO: 125661 - DNA, 421 bp, Zea Mays
atttttttaatctagagttgacgaaactctatccgtctgatttggtttggtttgccaggtgcgaggctcaccatctgctagtcctgctccccccgatcgatcgagaaatccgtgcttgaacagagtaaaacgattcaggagcagctgaaactgcagcgagcagtctgtgttttccaggtccagctagcgccatggtgccccccttcgggcgtggaaagcagtgccgcaagctcctgctcgctgaaaatgagcaccacccatacgtatgtatgatctcctgcagaagcagaacagtggacgggactgtcgaagcgcatgggcagcggcggcggcgacgcgcccatgcgtgggcagcagctccgatccatggcgcgcaccacagaccgcacccacaggcttgcgtttggcaggcccaggcggg

SEQ ID NO: 125662 - DNA, 429 bp, Zea Mays
caggaagtaagcaatacatattttttctgggttacggttacgggagactaccgaggaaaaattaatcataggcggctcttcacaccaatccgcttcctccattgctcttcccgtaccctggcctggcgaggtcgcgcttagccagctttgcaggtctcctccgtttaaaacatggcacctagctgttttggtgagaaaccctagattgattggagttggatgttctggagtggcgaggaaccctagattgattggagttagatggatgcttgctcgttttgttagttcctttatcgtccctcaaatccaagcattccttcgtgggactggtacgatgctccagttcatctaaagcagtttgccttttggggaatactggtttgtgttcgtttttccaaaactgtctggggttcagtttcatctgaaccc

SEQ ID NO: 125663 - DNA, 1144 bp, Zea Mays
gtcaaacctctgtctttcaaaccagctatctcagcaagaaggatcttgccttcagcaacctccgagtcagttggggcctctatccaacttggcactcgaacatcaggctgtctcccagagctagcagacagagacttgttgtgattttccatagtaaaccactcgaagcgccatcccttgatgctatccttcaaaggaatatcaagatactcagctttcctaccatgacgaagttcaaggctggcgccgccgaccaactaatgctaccccccgaccattccaggcttgaagtggtacagatatttccatgacccaaagtgtggattaatacccagaaaggcctcacggagatgaacaaagatagaaatttggagtatagagttgggatttagatgtgttaagttgagagagtagaaatcgagaaggtcgtggaagaaaggagaaactggtagacctagaccacggatcaagaaaggaacaaaaactactgactcatgggtatcctctgttgggatggtgatcccctgccagacccatcaggagcacaactccttcgacggcaaaaccccaaattcaaccaggtgaagtagaccggattcaaaaacgacagaagcatagtttccacagaatggaagttggttgttggggtcaattgggggaatgccaggtgtgacagttccttgcttcttcctaggcgccaccagacctagcagacgagcggaatcaatcgcaatcacgagggcgaacatgagttttaggaaagtgtttgcgacaaaaaacagagttagggttcgctaccaggaagctgccagcgaggatgtatatgcgtgcgctaagtcaggcacatcaagacagacgaagtaacccggaccagacctcaaccgagtggagtaagtcggatggacatgtcagtcggacctatcaaattaagtcatcagccgaagttatcagttgggtctgtcaacagaactagtcagtcgaaattgtcagttgggctcactcgactgaggttttcaagcaaagcaaaagtcgagcagaacaataagcacaataccaaacacagcaaacaaagggttccattcatcagaaagggttcattacaaaggaaaagggttggctcattatgaatcgaccctatcatccc

SEQ ID NO: 125664 - DNA, 765 bp, Zea Mays
gcctgaattgagacatcattgctggttttgctacggcgattcttgcaaaccaaagggggaacttcttattcatcctattcctccttgtcagacacacgtccatcgactctagtggcaccacagctctcaatatcatcttcgagattggcacttattgggtcaccaccgaggtctagggtagtagagtcaacccctagctccaatccggatgaacgccgaagttttctttttcttttctttccctcaacagacacggctagataactcattcgacatgatcgtttgcaatgtgcacctataggactgcaagctttttcatccccaccgatggcacacccagctgcagcactcgccgactcagtatgggtagatttggacaactcgccagctagcatactaagaacagcgttcacttcagcctcattagcagtcgcttgcatttggagatgagtctgtttttcctctcctgggagaccccggtatacaacaatgagggcctcaatatcttctgaagaaggtcgcactctatggtctagactgccatcttggacaggcgggttggatatgaactctgaaaagggcctctgcggcaacaaaacaacaccgtaaggacactagacatgacaaatacaggaactcataggcaacaatgcttaccacaggggaagattccaggcagaatacgaagggggagcactagcatttgaagctttgcctctcagcatcgagtcaactcgactcagcacatcctcctcagatattcgc

SEQ ID NO: 125665 - DNA, 541 bp, Zea Mays
atcgacatcgagacgtctataataacttcattaattccatcttaaaaaattatcgacccagttttcgaagatgttgatcatgcatgtgcatgttcatagaagcttataaattatacaggtgagtatgcgtgcgttgaagcatatgagaataagcatttaactggaataactcctgacatccaaaggggtcaaggttgccttgcctataggctggcgaactcaaatttgtacctattctgtaagactcgatacatattgagctcgaagaagtgcttcaaaatctgacatgcaaaaaaaattgtggcagagaaatcccagattgcgtagttcacatcagctcgtggctctagctaagcagaaatcgctgcgcgtgagcgatagatgtatttgttacttggtgatgcagaaccttacagaggtcagcttattaatagtaaaatttccatgcagtctcttttcattgttcgaaaataattattcaggatctcttaaacatatatataattaggtgtgttattcctgcgctgatcgaaagcaaaga

SEQ ID NO: 125666 - DNA, 319 bp, Zea Mays
gagatatagggcaggagggggtaacactaataggacgcctaacatgaattttgagcatccatgggaggaaagccgacacaataatgtctgacaacttgaggttttcaccccgaaactcaatggatggtcaccagatgtggcggaaaaaccagggatgaagtagccgagttgtttggagacaaactcgttattagtgtctcaggcacaaggctgtcatatgggaagccttataatcaccgattcaacaccatgccatacccgtagggaactaggataccagatttctctaaggttttcggtgaaggcaggaaaagcgtgc

SEQ ID NO: 125667 - DNA, 581 bp, Zea Mays
caaggtcatcgatgagtcaaattaaagtgtcaaaccgtgtagagcagcagcatgcatcgatcggtgacaaatatatataagccagcagctggtaccatgcattatgcacgtacatacatacacacatatgcatcgacgtcgatcgacgacgacgtaccttgtccatgcatatatgcatgcatggtacgtgtgtaatatcatgtaccgcccctcgtcctggcaaaataagattactcccttttacttcaccggccggccgtgtgtcgtcctctggacgacaagataagataacccgtgcctgcagccagctagcgcgatggatggatggataaagctagagtagtaagcttactaataccacgtcctgctgcatgcatgcccccatttaactccgctactcgtacgcgtgtgttaatttactaccagctactacgacatgtcctccgtaattagccgccggccgcggtacgtacccttgctcgacttggactttttcattgcgggtgggggctgcagaggagggggaagatcgagaccaaggtgctggtttggttgtgaatttcgaacggcggtaacgtaaa

SEQ ID NO: 125668 - DNA, 337 bp, Zea Mays
catggctccttggccgagcctccataacctcggcgtctacccccattccgccttgtctaccccacatgccggcggccatggccaccactaccgtgcaaccactaatccctatgcccaagccactacaccgcgtccatcaacctgtgcacctgcatccacgccgtagcccacccctccgcgtctcaggcgaaactacctcttcctcggtgagttcccttccctgccattgtttttctccgttacgagttcatagatcaatttcctctggtgacacgctgctcacgtgtgtcgtagccatcacctccgtcttggggttcatgagctcgttgtcccaatg

SEQ ID NO: 125669 - DNA, 1674 bp, Zea Mays
ccgtacacaagatgatgttaggtagttgaatttgatggcaaaatcgactgcttgctaggactggtgattgcggtgtgttggttgaggatgccagagatgagctgaagcttctagcattatgtacaaaaggtatttgtcgaattacctggatgggattttgctatacttcacttgatttatcatatttcctttgctcatcagttctgaacaagtgaccacgtctaactcacaactctcccatttctggttgcgcgaatttcttcaattctttcagaaatcagaattgcatgacttttatcttaacataagttagagtagctgtgcataaatgtggagaatattgatcagagtttatgatttgttcaaactgaaactcactaaattcttgcaattaaggactatcggatggtcagcatccaatttatctatgttcagcataatggcatcaagtttttgctaatatgactgtagagtcttaagacttcaattaatttttgcaggggattgacatgctatcatttgtatcaattaaaactagagctgttctcttgatataagggttttctccatatttgagatggattgaacactgtatcctttacctgcagcattttttctgtatctcgtgataatttttcagtcactctaatctctctctccatgcagctgataggttttctccatatgttgcttgggaatgcttgattttttttctagctgcataaagctttgtatcatcaaacaattcataaaagaggctgacctgttctagttattggtgtcagatttgactgcagtcccatgattttttgcttcagatgggactggactttggtaatccatttcacaattattttccaatgctgttagtatttcctttccttttgttctcaagtctttctaagaatgtcactcataactagtaatagtatttcttttccttttgttctcaagtctttctaagaatgtcactcataattggtaatagtatttcctttccttttgttcataagtcttctaagaatgtcagtcatagctggtaatggtaatcatggttgtaacctgatttgtagtgagagaccagtaaccatataatgagctatgttcttatgagataaaagctggagacttttttttgacatggttcttccttttagaatgataagaaaataatcttgatgtctatatgcacttattgagaccatgtaaagagaatataatgcaacatttgatatgtttgaaatatctctctgcctatattctaagctagaacaatccatactccatatgcttgaattatcctttcttagatgattgactcagattcgtctttgtacttgtattataaatataaacgaacttcttatttttcttcccttccaggttcagagtttgagataatcaatctgtagtctaaaaattgtatgtgtttgtagttgatgggagcacctctcaggagttaccttagtgctttagatgtaataattgttctgtaactgaataaacatttgcatttgtgatgcattttgactatatatgtgagatgtttataaaaacacgtgcaatatatataatattggctttcctccatgtttttttccagtttttcatttagtgacgcgtctcggcgagacacgccactgatttggggcgctagtgacgcgtctcggcgat

SEQ ID NO: 125670 - DNA, 553 bp, Zea Mays
agtgtcgcgtcgccatcggcgcgctgcgatttgagctgcgtttcccataggatcgccttcacggggttgccctttgtctccacttccaatcttaatgataaacgtcactgcggacgacgttcggttcagtgctggtttatctgtaataatatttgtcctcggttggattgctgacgccggtgcacatcatgtgttgcacataatgtactggaagctgataatgatgcgggttattatctgggcatgacaggcttaagttaggacatttaactgcaggatgccatgataaatgtgacaccacgttatttatggtgacgtggaagaaagagaaatggagagagaaggaaagcggattgcccactaagtagccagctgaaagcgggctattcacggactctaatacaatttgtgagagaaagagatggacccatttttaaatgtacaacttatatcattagagagttattatatgagtatgtttttagttgtctatatatgacataacattataaagctcactgttggctatattattaaacttattcttaggcca

SEQ ID NO: 125671 - DNA, 696 bp, Zea Mays
atttacaccgatcataaaagtctcaagtatatttttactcagaaggagctgaatttgaggcagcgtcggtggctcgaattgattaaagattatgattggtctattcattatcacccggggaaggcaaatgtggtggctgatgcccttagcaggtccggggttccaaaagtagccttgcagttgattgctgatctggatcgtttgtggattgccttgtgctatgtcggcaccgctagtgaggagactcgtatgcttattcaatcttccctcatggagagagtgcgtgcggctcagcaacaggatcgtttattgcaggaagctcgaaagagggttggcgatggtaaaccccgggagttctccatcgatgagaatgatttggttcgtttcagggggtcgcctttgtgtgcctcagaaatcaaaggtgaagatggatatattgagagaagctcataaaatgccttacaccgttcaccctggcgaaaccaagatgtaccgagatctgaagcaaaacttctggtggaagcggatgaaggttgacgtttctaagtatgtggccgcctgtgaagtatgtcagcgcgtgaaggccgagcataagcggcctgcaggtttactgaagccattggaaattccggagtggaaatgggagcatatcaccatggattttgtggtgggtttacctcgttctcctcggggcag

SEQ ID NO: 125672 - DNA, 421 bp, Zea Mays
actaattattattctatacttttgttagcatcactaaaagtagatattttcatatcttaaaagatatagtaaggtacgtgccagagtaagtcactttttaaggagtatactctgacattgaacttagaaaacttgctagcagcaatccatcgcctacgtctctctagaagaggtagccagctccccttccttcaaatacatggaatgcttggtgtgatttgagtacacggaatgacaatttctacaattagaagccgctaactgcatacaagcaaaacaaaaggaataattccatttcacattgaataagagattagaagttggagcacaactcgtttgtcagtatctcaatacataattcacccgcctcaagttctttagcaacagttgttgtcacaccaacagtcgatgatttccctga

SEQ ID NO: 125673 - DNA, 448 bp, Zea Mays
ggagaaggctgatgactgcgatgcttccgtgcgcggaagagagcttgggtatcaatccctcaagcaagtcttgaaggacatccttgacggagactccaactacgacaacgacgaccgcgcgcaagaagtggtacatcatgtatggcgggagttgggagctgacctcccggagggacgtgaagtctcttcgcggggaggtgctctcggcaaccctcgaggcaccaaacacggcaccccatcagaaatggcgaagcaccaccatctccttcggggcatctgattgccctaacaatatggcagggtcagacgtattgccggtcatcgtcgctcctgtcattgttaacgtgaagctctatcacatgttaattgatggaggggttggcctcaaagtcatcagttatggtgtgttcaagcagctttagatctcagagtcaaagttgggaccctc

SEQ ID NO: 125674 - DNA, 669 bp, Zea Mays
ttttgctgccctccctcttaatcgcgagccaggggagggcagcgtcttcgctcactaccgcgatacaagagcgagggcaacatacacgctacattggctcagccttcgggataaggcccacctcacgaaattaaacaacatcatcttcaattcctcaccctcaaaaagattttgcagatccccctccccaatacacgtcccggacgacgaggacaacaaatctcgttggccactccgatctacccgtagacgggttcgttccatccccatccaacgacgtctaccacttcgcgacatctcgccaacactatgcttcgacaccactcttcgacgacggtgctccacggacctcaccccagccggggtatcagacgcttcgtgcacttctagccgcggcacagcctccgccgtggccacatccaacacaacaaaataatccaaatcctcgttcgaagactcttcagtccacaaaaatgggctcccaaactcccccccatccgatgaccaagacccagtttccgaaccagacatactttcattaacaggcattgcatttacagccgccacaaaattaatatcatcagtaggggttgcttacgcaggcccagacatcgaaacctgcgcagcaaccgacttttagtatcacaaaaataaggtcctaaacccaac

SEQ ID NO: 125675 - DNA, 622 bp, Zea Mays
gtttgcctagaagggtttaaaagctgatgttaagacgtttgtcacaaactgtctgacctgtcagcaagccaaggcagatcgtgctcgtttaccgggcttgttacaaccattgcctgttcccacatcgttatggcaaatgattactatggatttcattgaagctcttccttgttcccagtcatatacctgcatcatggtctttgtggatgccttcaccaagtatactcattttctgcccctgaaacaccaatgagcaatatctggcctggtgacagtaagataaactaagctgccaacaagatgtctatatcaagatggatcctccaaaggtgtcccatcagtcggacgaagagataagtgaagatccataggcgtggcaacagtgtgagtatcactaagaccagaacgatcaaggaggtcttgtatgtacttggactgagaaagataaataccattttgagtctgcaaaacgccaaaacctcaatgcccaagaaataactgagtgcccccaagtcagacatttgaatttccttactcagatacgccttcacatgagcaatatggtctggatcatctcctgtaatcaacatgtcatcaacatataataatagcaacgtgcgtc

SEQ ID NO: 125676 - DNA, 396 bp, Zea Mays
cctggttcagccctgcagtgtttgttcatccgacggtggaagaagaagtgctgctgccggggggagtgggctgctgctacgattagtggaggtggtgctgctacagaggttggaggttcttctgattgagagaagggaaggaaagaggttggaggttctactgattgagagaagggaaggaagcctgatttgtcttagtgtttgcaagcattgatgatgatgagttcagaggagactgaagcaaaaaggttggaagaagaggctgaaaaagggcaatgattcatggtgacaagaaagaagaggatccactaatcacaaaaagtgagatgagaaatgagatgaggagtatgattcaggaactcatgggactaggtatgattggccccaagactttgc

SEQ ID NO: 125677 - DNA, 394 bp, Zea Mays
gacgggatccacgactcccctgagatgtagtgtatcctggtaaagcgtattgcctgcacataggtcagagttgaggttaacatgggagacatcccaggcccgtaacacttgaaagtggcgcagtagtaccccctataaaaaaagaatgcaacccaacaacacctttcatcagtatacataatcaacaacacctttaatcacacaataatatacaaacaaaggagaggatgtaatggacataggagtggtacctctcgacagtttggacgtcctgaccatcagatattatgcctacaatctccttacctatatcggtgtaggagtagatcacaggcgtgcccaccctacccaagtaaattttttctccttccccctcgattgtgcaagtcttgaa

SEQ ID NO: 125678 - DNA, 281 bp, Zea Mays
gacacagaccgtggcggcgacggcggccattgccggcgatcccataccccacgatttcgcccacacaattcctaactgtctagcgcatctcaatgctaggattcaatttgagtcgagggcgaggaattaccagagaagtagatgagtgcggtgctatccacgcggacgcggtggagaagaactccggtgaggaatcaaggtctcaccgcccgacgatcccaccagctagcgcttcggacaacttcgctacttctcggtgcaggtccccgactagctgccgg

SEQ ID NO: 125679 - DNA, 446 bp, Zea Mays
cttgccttggctggaacttcccgggttctgctgattattggagttgttccgcttcggatatgggcagtctttgatgaaatgtccagacttcccacaattgaagcaaccagtagatgaacttgggagtgtagggaaatgagcaccagtggcactcggctgagttgttgaggtggggcagtggcagggcggatgaatacatgttgtttaaaggggtaggagggtggacaaggtgaagaaaagttttgattaaaaggtcagatcaccaacctttgtcgcttttcaggcccctggttggacctgtcacctccatagccctttgacttcccagggcctgcatacttggcttcaactgccagcgctgtgttgacagccctgctgtaggagaggtcgaggcaggtggtcatcttccgttgtagccggtcattaaggcccctcataaaacagtt

SEQ ID NO: 125680 - DNA, 791 bp, Zea Mays
cacccggctcgctcagaaggcctcatccaacttcgtcaacatgactgacaaggctgttcagcgaaaggaaattcagaattccctccagccatgttctgctgctgtcaagaaagaagttcagaagaaggggctgctcaacaagaccaaggccccaatctcagtcgctgccctgcgcaagctggtgcgcgctgctggcctgggttgctctgcggctgacgctgtgggagtggtgccgccggccatgggatgaagatcttcagcctttgttccaagcgcactttggaggtcggcgtccgtgcttttgtgtctgtcgccgctatctgctcgtcctgttgtgctgttcgtctctctgttgttggtcggctctgtgagcctgttttctgtcttctgctgcttaggctagactcttctgggtggcttgctaatctttgtcccttggtgttatgtttgtgtggtcatggctagttgtggtaagaaccttgttgtaatgtcgtggaatgtacgtggtcttggcgactcggataaatgtgttcttgttcgtgatgccattgtctcctcttccccagctattgcctgtctccaggaaacaaaactcagcgacgttactgtgttcaaggctgcctctttcctcccttcgtctcttgcttccaattttctgcacatcccggctgccggtacccgtggcggcatcctcacggcctggaacgaaaatagtctacagctaaattcttacattattaggcgccatgctcttacttgttgctttactctcctggctgtcaatgttgtca

SEQ ID NO: 125681 - DNA, 430 bp, Zea Mays
ttccgtggtgccccaatcttatcggacggttggcgcaagcacagcttggctcgattccgttcacaactccatatttctcttgtttagaaacgactccgtcgccatcgtctatcagattggagactctttgatcctgcgtcgccgctcgtgcgattccaattcaagcgactccttcgatcgtcgtcgtcgtggtggtgaggcccgcagtccaccgtaaaaatgcatgttcctgtttaatcatctactaatcttcttagccctagtcgtcatggaggttgatttatctctcggtgaggacgctgctccggttgaagatcgtgatgtcgtcggatatgaggatgttgatttcaacacacagtctcgtaccatggaatgtgtagatgcagggattcatgcaactcatgaaggggatcacacagctcaagtaagc

SEQ ID NO: 125682 - DNA, 417 bp, Zea Mays
gatcaaccatcacaacttattcgcatcaacaacagttttgagtagaacaagctaggagaaccggtccattaaaccaaactaagtcacgactcatggccaaaagtgaagagtcaagacagctttggcattttgtcatgaaatttctctaaccaagactggcaagaatgtgtatgtgtgttctccaatgatttggtgaacagatttaagaaccttgttaccgtatctacctcagctggtgtgatcaagttgctgtcatgcattgcatgccactgcctccaggaaacataaagctttcataagaattatgatcacagataatttatccttgtaaaaaaaacctagctaacatagtaataacctggatcacttatcactcaaataaataatatgaatctgagctatactacgagaacttct

SEQ ID NO: 125683 - DNA, 633 bp, Zea Mays
cttgaaaataaaaccatgaaaatagaggagagaaaggaatattattcaatacaaataaaattatcattaaaagaacttcatcacagttggtatgatcaaaataaataattagccagtgtacaaagtgccacaaagtttgaatttgaattgaagtttgaatttggaaaaaagggagaaaacaaaacaaaaaaaagagaagcttgagaactcgactaggccgaatctggctggcccaactcggtttccctcccgcgcagcccatctccttcccttccccttttctttattcctggcacttacatatgggtcccgcctgtcatcatccagcgccatcagggtaacaaccaggcggacctcgcggcggcttctgttcttctcccccaaaatcggaaccgaagtgggttgtttggacacggagtgatccgcacggagatcacgcaggtttggacaactgtgtccgcgatctgacctccaactcccccggccgagatcctcgttgcctgccctatttaaacaccggtcgaagcgttgccccgctccatcttcagccgaccaagattcgtcgtcgtgctaggatagccagctcgtgccgccgctgtagacgtgccccacggtcgacttcctggtcgtggc

SEQ ID NO: 125684 - DNA, 441 bp, Zea Mays
ggggagctgagaccagaggccaggcaactgtcacgtggggccgaccggacgagcgtggagcgagcattctgcacatccgtgatagagaagcgttggcgtggtgcactggtgtgtgtacgtgtcggcaggtgagaggaccgtcgtgcggaatgcggagagaggctgaaacacaagcatcttttaagactttagattaattccacgtcaagccgaaatgcaagtgatcgaatacaagttcagggccgtatcatgtaaaccaaccaacaacacatactcaaggtgttctatgtgcgtgtgttttaataattccaatgcaatcatttttggtatcactcagaactgcaaactgcaaagcttccttgaaaaaattctcatactagccacgccccattccctcgccgcacgtgcctcaaatctcaccgctcccagctccgatttctt

SEQ ID NO: 125685 - DNA, 334 bp, Zea Mays
gggttgtggtacggtccttacacagagggggattctgctgatgctggggatggccgagggaagaaggtgaagatccggtctaacgaaggcacctcaaaggggagggctgtgattgcggtgacctggaagaggaagatggaggcaaaaggtacgaagagggcaatggtggggccaagggcttcaagttgttttgttgaggaattggtggagacatgtgctgggcctggggagattatgacttcgcccgatcttcgggaaacatcttcgcgaatgctgaaggtgaccgggggtcaatggcataggaaataccctgttccccgggccactggcgatg

SEQ ID NO: 125686 - DNA, 318 bp, Zea Mays
cgccgtcgcagttcacgctcatgaacgtgctttcatcacgcgcttcgtcgtcaagctggggctaagcagctgcgtgcctcgtggctcatggccaacttcgtgctctacatgtatggcaagtgtggggatgctgagacagcgagggctgtgtttgagaggatgcagatgcggagtgtgtcacgctggaatgtcatggtgtcgttgtacatccaccaagggaggatggaccttgttgtgtccatgttcgagaacatggtagagcaaaccattgtcacttggaaaaccatcatagcagggtataaccagaatgggcttgat

SEQ ID NO: 125687 - DNA, 326 bp, Zea Mays
caaggtgtttattagttggaagactgtagagtgtaattctgaatcagacattcttcaaatgtccaatgtattgccaactctgtctccttaacctaattgtatctattaattcgttcaatactttgggtaccttagcgaactttatcctgtatagctatttgtcagagtccatactatggttaacttgggttagctactatctgtgaataagggagtggagaatatagagttttggatggttactccacctggcctgttatacaagctaaaccagccttttgtgttaagacatgtatgcagatttggtgccattctctcatttcccc

SEQ ID NO: 125688 - DNA, 329 bp, Zea Mays
attataatgggctaaagaagcatcagaacatgtcatagtgtaaattaggattctgttcatagggagggtatgctgacaggccctatataatggtttctagaagctagccaagtaacttctctaattaattgtaaacttgaagccgatttctctaactctatatatccgaagccaatggatactgaccactgacagggaaaaagttgtacctaaataccagaaagaaattcaaattacagatgcccaataaaagaagtcccctgtcacagcttattaaacagagggtgagctcaagtatatacattaggttatgactcaacctgctaaaa

SEQ ID NO: 125689 - DNA, 357 bp, Zea Mays
cgagatcaaaggtaaacagaggaagtctggaggcagaaagtaaagctagggcttgaagtgcagaggcatgcggcgacgcagtacaagtggggttttcccgagtcaggcaccagttctaaaaagtgcccagtcatcactcggtcgttatttctaaaacgctgacgtggctcggcataactcagcgattatttctaaaaacgctgacatcaccaatcctcactcggtcgttatttctaaaacgacgatgtggcttgatgtgacttagctgttgtttctaaaacattgacgtcacccctaatcactcggtcgttacttctaaagcgctgatgtggctcgaaaggactcggctgatacctc

SEQ ID NO: 125690 - DNA, 992 bp, Zea Mays
ataattttccagaacttccgcatgcgcagtccaagaaatgagtacctcacgtgatggagactgcctttcctcaaataggcaggagtggaatttgcagaaccccaaagctaaaattgtactaacggaaagatggcatagacattcatgctgggttcccaaagtggcgtaatagcaaataggtaagaactaggccgcatctaggccaacactacccaatgtcctaattcgacccccggttctggactgaaaaaaagaatcaagctagtccgccctagcgtcaacctagctctcactaacagaaacctcccaaaaatttgcaccgcttgtactcacatgtcgcagaaagcaacaaatttattttacgaaacaaaccaagtcgtcgaaacacggggcgcgttacgcgcgtaagaccagatcggccaaacacaaaacaaacacagaaaaggaaaaaaaaacttaatggatgcaaaacatgaaagcaatacagccgagagagaaggactgacctagcacgccgaggcagtggtgaagcggaccgttcggcggcctctcctggtgcgcctccggcgggcggaacccctcgaagttgagccgccacgaatcctccacctcggtgggtacgccgccgccgcggccagcctccacggccgagagcaggaggagctcctccccgtctccgccgttcgccgccgccgccattctggaaccctagcagactgtgagcttggggcaaccgcgctttgacccgtacgtacgtggtgctctcccgcggcgcggcggcggcgcgcgaggactaggagcagactgacggccgagttggtttggtagttgccaagcgggcaaacgcactagccgtctagccccagccccggcccccgcgtgcgtcgtcctctctgcgattaaaagagggcggcgaggcgggcgaggaaagcgtgggagtgggagttattcgtcgcttgcgagggcgcgcacgcgctggctgcgccgagcct

SEQ ID NO: 125691 - DNA, 525 bp, Zea Mays
ccgccactggacaccgcttccgagacacttgccaaaatgttgcccaaaaagccctccgccagctatgccaaaactacagcagggaagtctccgagacaccccttcgttactttccacccagcaacaaaaatacccctacctggaggaaaagacttcagaccttgtcaggaagagatcctactgaggatgaccccaccatagtctacatggccagatatctccacacccttgacaaccattatgacgaccttttctcccactgcaccgacctaaattcctgggtagaaagcctatagcaataaatcaaggaattaaaaaaggaaaaggcatccctccaagaaagtctcgaaatatcagaaggtgaagaggccaacactcgtgaagcctactgaaccctgaaaatggactatgataagaagctaaagaagctcgcccccactaagaagatccggaagcagaccaagagccaaggatgccagactgaacgaaaagaggaagccccgccaacactgcctccctccagga

SEQ ID NO: 125692 - DNA, 583 bp, Zea Mays
tgcctcccctgccctcgaccagcatcctggtcggctccgacgaacctccagcgaagccgcccctcccccagtcggagccctcctgccccgcacgttcctccctagtcgtgttggcccctgcgcatcgccctcacgcgccttgccatgtctcgctcccgttgcttgacacgccatgtgcctatcgagtcgtgtgcgccccgcagccactaaatcgtgccctcgcggccatcatcgtgcccctcccagtaccgcacttgtgttcgtatacgcgtaggacatcgtcgggaatctgacgacatccgtctacctctccccccggtctaccatccgtctacccctcgcgtagctccgtcacaccttcgctgtcgtgtgattcgtgtcgcacgcatcacgtctgatttgcacacaatttgtgtgttgtcgcgtgtgtcgtacgtgttgttcgcccgctttggtgcacatcatttgcgcgtgtcacgtgtgttgttcgcacgggttgtcgtgtgtcgtttgtacgtgtggtgcacgttgtttcatgcgttgtcgcacgcgttattaaatttttccgcattaactactcgtg

SEQ ID NO: 125693 - DNA, 718 bp, Zea Mays
atatgtgagaaaaacaaagctatcgaagagcatggacattcagggatgcaatgtcctgatcaatcgggtgttcgagctgaatcatttgccatatgggctgtaccttgaagacactgcgaaagatatagaggagactttgaataaagggaaaatataaaaaggcgaagtctatgaagggtggggagaaggtcgagcctttgaagcgaaaagctgggtcgctagaatcaggaaagaagtcacaagttcggactagcggatcgacgtctttgctaggggaacggtgcctgctaccatggattttgtcgaagcgttggctactacctatgcaaagttgggccaggttatgacggaggccaagctcaagagtgcctcggcatgggatacagaagtaactaggggtgagcggcctcagggtgaatgcgttcctagggccgcaagcaaagacaattacacatctaggctagcacaatcttttaatgtgttctcttatggtagtaacattgaagatgttgtgtcagctgccatggagaaatcttggaaggttgtggcaaagaagaggatggcctcttcgcgtctcgtggacctgatgaagttggttcatgagaagttggcgaagacagaagcatccatcaagacaaaggcatcggtggagtcttcgcgcgtggcttctttgtgcgtagccccaccgagatgctcctgccacaggctcctgccgtgg

SEQ ID NO: 125694 - DNA, 295 bp, Zea Mays
agcaagttgcacacatggaaccttatgtgttcttctggtgtgcaaagatgcaaattgaaattgcacactatggggctagatgtgacacttgtaaacgtatcaaggccatatacatgaaaactgttggtccattacaatccttacctatcccaacacggaaaggggaagatattgtatggactttattgtgggattacccaggactacaaaagggtatgactctatctgggttattattgatcggcttacgaaaatttctcattttctgccagtcaagaccgattcccaattactg

SEQ ID NO: 125695 - DNA, 699 bp, Zea Mays
cagagctctggcaagacgacgaccgacgggcagggagcagcaggcacggtgttgcaatttcagtggtggggacgacggcaagcatcgagcagcagcagcagcaggcacggaggcgagtgtgatctcggcgttgcgaacggcgacgtagtgcgtgcaaggcgcaggtgggcagaaaagtcagagcgagcgggagagaaaggagaacgaggctgtagggacaaagagcgccattgatgggcgcccctccgctacccatgtgtacgccgctgccccaccattgatcgcatctttgcctgctgcagtggagcagccgccgcctccttttctccccttccccactgagtcgtcctcctccatcgcgccattaatggcgtcgacgcttgccgcttccttccctggcaccgttactctttccctggcttataaatcgtgctgtcgcgacctcgtcgatccatttctctaattctcgatcctgctacatgcccttgccgtgctatccaacgcggccacagttccgtactcacgtcgttcaccaccgcgcgccagtcctcatcgtcaatggacgagcccgcgacgctctccgcctgctgcttttataaatttatagctaggggaaataaaccatataagcataatataacaatgcatctaatttggcttgtaatcttatctggtcccaactggactcctagagactcc

SEQ ID NO: 125696 - DNA, 475 bp, Zea Mays
acctagtaggttaatttgtgaaatgttaagaaattgcaactataggactataggtacacattttggcagcttctagactcctgagcctaaactttagcatcaaaggaggagccaatatcgacactaagactagccatgttattggtcctcaaaattttctccgcacgcccgctcatgccgatgccaagaaccatcagcgatcatcagaacagtgttctgcattgatgcttggaccaaatcatcagaaccatccctggtggtaggaacaaacgctggctgtgaaatagttgtttatttgctcagcatcaaagcaagaaaactactcaactcatgctttttatgattaaacatcggtgaccacaatgggatgattcaatacttgaacgctctctcccttttttcagcttgatagaaaaccgatgctgtggatagtcttatgggtacaacaaatctgcctagacaagtgtcatgatag

SEQ ID NO: 125697 - DNA, 540 bp, Zea Mays
ctgtcctgaaaggagctctatctctaatacagtggaacccattgctgcttcagagacagattgttgaattgaaggcatcaaacattggtcagtgacctcatttcttccttagttgttatgatcaacctattcataatcatgtatcccctttctgctgcattgtcagatatggctcgacgatgctctaaacttgaggaaaaatatcttcgaagtcaagccgacttaacctagcggtactctgatcttgaggagaactactttcaaggtcaagctgacttggcccgagtttctgcttctctggatgatgcacgctcttttaacacttctttcaatgctcaacttgactcggaaaggatggcatatgaggtaaactcctttggttgagtttgtcatgcttattgttgcttgggtgctgaatgttgactcttgttcgtaggaggaaagatgagcactcatgacctctcgtgataatcttgataggttgtatcatgatgctagcaactccttaaccattttggaaaggagccactgcttcactat

SEQ ID NO: 125698 - DNA, 1043 bp, Zea Mays
gaaggacgacacaaattgtcgtcactatgggaagggccattcatggtagcagaagtcactcggccaggatcatatcaacttactcaaatggatggcacggaaatagggaattcatggaatatagagcatctcaggaaattttacccctagctagatttcaaaagctatcggggcagcattgtattctgtaattggaaaagtacatcatcaataaaaagacttcattctcaaaggcactcgaactatttattatcgatctgcatgcttacttgacttagggtgaccactataccctactaacggagcaatcgacttaagtcggcagtgacttaagacggtgcaacatgctcacgcttacttaacttagggtgaccactataccctactaacggagcaatcggcttaagtcggcagtgacttaagacggtgcaacatgctcacgcttacttaacttagggtgaccactaaaccctactaacggagcaatcagcttaagtcggcagtgacttaagacagtgcaacatgctcacgcttacttaacttagggtgaccactataccctactaacggagcaatcgacttaaatcggcagtgacttaagacagtgcaacatgctcacgcttacttaacttagggtgaccactaaaccctactaacagagcaatcggcttaagtcggcagtgacttaagacggtgcaacatgctcatgcttacttaacttagggtggccactaaaccctactaacggagcaatcagcttaagtcggcagtgacttaagatggtgcaacatgctcacgcttacttaacttagggtgaccactataccctactaacggagcaatcggcttaagtcggcaatgacttaagacggtgcaacatgctcacgtctacttaacctagcataaatatgcttacgatcactcatcttagggcggtctctatgcctcacaaaacaggaagaagtttcgaaaccagcacaccacatttacttctgcaatcgtaacaactgttgaattcaaacaacagaaaaacaaaaatagca

SEQ ID NO: 125699 - DNA, 511 bp, Zea Mays
gtcataacctttgtaattctctctatagtatttgatcaaattctctaacgggctgtttagatcccttcatttgaaataatttggaacggagaaatggagagaatatatctttcggtacatgtgggcctgtggcggaaagtataattaagctgaaaactttcattatcaatatgaatgcaaaacatattattatcacatgaaaaggcattttaaaattaacctaatagttccaatcaatctgtacataattatagatatttacaactaagttaaaaattaaaataatttggctaaagacacatttccgataggagaggtgagcttgacaaagttttggaacgaagtcgaggtgagtaggtgactcgtcttacatattcaagttggacatggactcaaaccaaggtcatatcgtgcttagaagcaccaaaagctggtagatctcgagttctaaagccgttatgcgtctatcgatgtgtcgccattagatacttcctaaacatgtaagcaagag

SEQ ID NO: 125700 - DNA, 419 bp, Zea Mays
cccgggccaagatagtgaacggtccaatatatctcgggctaagctttccagagacaccgaaccgaacaactcctttagtgggtgataccctgagaaggacttggtcacccactgcaaattccaaatcctgcctcctcacaccagcataactcttctgacggctctgagcggccaaaatattctgatgaatttcccgaaccttttcagaagtctgttgtacccaatcaggaccaactagggatctctctcccaaggtctcccagcacagaggggagacacaccgcctgccatacaaagcctcaaatggtgccattttgatgctagcctggtagctgttgttataagcaaactctaccaatgcaagatgatcttcccagctacccttccaagacagaacacaagcgtgcaacatatcttcc

SEQ ID NO: 125701 - DNA, 477 bp, Zea Mays
ccaggcagaccaggccatagaagaaatcattattcagtttctgtgctgaagaaaggttcagaccagttcatagaacaaatagttattcagtcacttgtcaggcacctgtcaccaattctacaacaaagggttctgaatttgtataactaataagatggttcaaatggttgttaacatgacaaatataaaactaatagtattgatttatgaagcattggtgatgtcttggcaatacggcgtatcggccgccggcaccagtgtgtgcacgtggacgtgttcacagatcttgagctggaggccgtgtggaggtgcaactaagcagttggtgggtcgttggtactgccaccgtccagactgtttgccatagagagcatggtgcaaatctagagctccgttcggattgcagacgaccacacaatcttcaagcctacacctgaaaaggatgcattttctatgccagaccactgtcaaaatcct

SEQ ID NO: 125702 - DNA, 643 bp, Zea Mays
cactgttacttggcagacatgaattcaccaatattttttgtatgataggtaaatacaagtgatagccgtgttgaagtggactccaagatctagaaggttgttggggggaacacaacgcaaattctatcaaagagcttatcagcaacatgactctaaattataatgacaatcggttggtgttgcagcatgagtcatgaacttttttattctatatttagattattatatattaagtgggcatatggtaattttgttttattattcactgacttgttcctctctctgaacttaccatttgcaattactaagacaaatatgatgttctttgtagtttctttgggcaattcagatagtaaacagaaagtggctacttcttcagaagcgcaaggttgctttacaattgtattatgagaaaatatttgatgatgagaaatggaggatctggtgaacgacttcatgagtataggttcgtttcgtcgccgaaatctacttgtgcaccttattcatctggtcgttgtgcgctcttcgattcatgctccaggcgctctttcgctacaccagcttgagtatcctagaggaaatagtttgcctttgtgatagagatctacacctgaagaactagctaacattaggaattacaaac

SEQ ID NO: 125703 - DNA, 391 bp, Zea Mays
gagacttcagaggaggtcacggcgacacggtgaaagagttgagccacgcagcgcatggccgggaggcggcggtcaccgacgaggtaatccactcggccgcaaagcgggagagagggccacggggtcaccggagagatcgccagcgcacgggtggtgaagatcttttcaaggtgagcaacacccacacggccgcggcaccaatcccggcaaagaagtcgccggcggtgagatcttttctacggcggtcgatctgatcctcaacagagcactgttccatggagaacaccaatgcagagcgactgacagagcaagttcaagccacattttctctaaattttccttagcaactcatccaaggctctgcatcaaagttgtagtgctacataccagc

SEQ ID NO: 125704 - DNA, 478 bp, Zea Mays
tggggacaattgtagaaggttttctagtgctcttggctgccatgtgagaaggaaattatcagttggttgttctgactggagacttgtggatcctcaaaagaagtatgaagtgtgggaagatatgaaggtatatcattatccttctttgatgagtagtacattattacccacatatacaaccaattggctacttttgcatgaaaaattagaaaatttatgatatcgatgatgttgccttcagttggtttatggatagcgccgaaaggaaatggaagaattttaagtcaacattaaagcatcatttttttgatgaaagcatatcatatgcagacctaaaggcaagacataaaggtagagttaatgatgatgattggaagtttctcacagaatattggaggtcatctgaatctgaagtaagtgtaaactaatattctcattgagatcacaatatttgctcttcaatagttaattgcactat

SEQ ID NO: 125705 - DNA, 681 bp, Zea Mays
ttccaactttttccttaaaagacgtttgtatgttctgttggaaggtggtattgtaatctgtgatggtagttccccttcagagagtgttttgctcttcccttctacaggacaagaaaaatcttctagacacatgaaaaaacttatagacactgtcttgcagacatgcagacaaggggttaataaaaccaattttcagtaataaaacttatagagtactccttatgtctttagtgtaggcgtcctactgaaaaaatcagctgaaaaaatcagggaaaaaattggtcccccaaaaccaattttccttgtaataaaacaggcagctttcctgcatgttcgtttcaacaaacgaaatgttgctcgggaaacaaaatagcaccacacacaagtttctaatatgccctgaaattttaagcctacggtggagcagtccaaattccaaaattgctttgttgtcagctttcgtctttgcatatgtaggttaaggttaagctaagaagtgagaaatgaaaatggcccaaacaggtgtagaggatacatcactgttaaagagtaactaaaaaaaaagctttgacagtatttcttctgtgtgatcttactgtctgtctgggggtgtgcatttgttgtcagtgcttatgtgagagagtttgtatttcgaaagtgtgtgttttcagaccatttatc

SEQ ID NO: 125706 - DNA, 281 bp, Zea Mays
gaaagatctcatggggaggcagatagggtcgcaggggaagcttatcactgtgcctgtagccgttgcgacgtggccggaccgccggtgtcgtcgtggacactccggcgacttcaattatgccacaccgtgactctttactacgcggttgtaaccgtggcacacttgagcttaccctctctgaaccactgcaccggtgaacgccacgattgtgccaccagtgacctcttccttctccggccaccaccgcgccaactccaattcacgcgccaccacccccggag

SEQ ID NO: 125707 - DNA, 497 bp, Zea Mays
gattccaaagtagttgtcggccaggtcgaaaaagaatattcagcaaaagacctcgcactcatgcagtatctcatgggtattcacagtctcgagagactgttcaagggcttcaccctacagcatgtggaccgcgccaagaacgaagaggccgacgcgttggctaaggcagcggccagaggcgagaccttgccctccgatgtgttttaccacgtcattggcacaccagccgtccgcaacccagaaggcttacaagtaaccaacgacgctgagggccatcgcatcgtcaacctcattacgactgaagattggtgggccccaatgaccctgtttttgcaaggatattaccacccaagcgacgtcaatgaggccaagcgcctcaagcaccgaagccgggacttcatactaatcgggggccaactatataaaaaggggatcagccagcccatgctaaaatgcgtgaccgaaaccgaaggcattcaaatccttcatgaagtcca

SEQ ID NO: 125708 - DNA, 657 bp, Zea Mays
ctgagccggatcaatactcgcaacacccttgggggctgggtaatcgccagcaccacccttgggggctaggttttctgcaacagccacctctacggctgaaggatcctcagtcacctccatgggagtcgggcaatctggaccaacctcttgacaccgaagactgccttccaaggtcgacgatgcgcgagatgctgcccgggatacatctaatcccacatctggaatgtcggagcaaacatccatcatatcaccatcagtcggctctgatagcatatcctcaggaacgacatcctgaagggcctgatcaaaatctgttatggataattattgcagactaacaagagcagatagagctggagaaggaatatcactatcccctctgctacctctgtaacgccggctattcttatgaattagtggaacttcttcttcttcttcgtcctcatcaaaaatgcggacaaaggatggggcaggatcacacccattgggctcagctgcaacaggatcacacccattggggtcagcttcagcagggtcacacccattggggtcagcttcagcagggtcacacccattggggttagtcggtgcacggtcacacccattggggtcaacttcagcaggtacaccaccagtgggatcaactacagtaaagac

SEQ ID NO: 125709 - DNA, 283 bp, Zea Mays
caaaagacttgtgttggccgtatagtatatctgtaacatcgtttcctgtacgtgtacgagaggagtggggtgcttcaccattgatttagacataatagatgtggaggttaggcagaacacggatgactcccattcccctccacgttgtggcgaatgctgtgatgacgaaagctgagcgtgagtggtcagcctcgtttgtttgaaccttggctcgcgcagcctatcagtgcatgcatctggttcgcccgacctctcaggctaggcgtgattcacctgacccctg

SEQ ID NO: 125710 - DNA, 542 bp, Zea Mays
tgtagatgtactcgtgttggtgttgatgtcctcatcacgaagcatgccaaaagttttcccctcgctcaagcaacccttcgtaattcaccaagctaatcgcccatacctggccacttcaacactaggggcttgatattgtcagacctctgcctacggctcaagggaaccttaagttcacctttgttgccgttgaatacttcaccaagtggatcgaggccggagcagtatccacaataacgtcgaagagcgcccaaaagttcttctggcaaaatattgtgtgccgcttcggagtcccgtccaaactcacagtcgacaacggcaaacagtttaatagccaagacttcagggatttcggtttctccatcagcaccaagcctatcttcgcctcggtatatcacccgcaatccaacggcgtcattgagtgcgccaacggcaagattttcactgccatcaagaaaagactcctcgacgacaaaaagggcaaatgggccgaccaactacctgaagtggtatgggccctaaacacgacagaatgccgggca

SEQ ID NO: 125711 - DNA, 417 bp, Zea Mays
tcctcaccacacttgtagcagaagcgtcgctcagcttggtatgatgcttgttgttcattcttgtttttggtgagggtcatcgtggggaatgcacgtctttgattattcatgagtgagcatgaagtgatcacatggtccttattgttgcatccaaagcatctccttgttccgtcctctttttccttgtgtggacatgatgcaatgaagtggtctggtttcttacacttgaagcatctccttttgcctcttccctttttgtgcttggagcacatggagagattgtcaccaaacacaacatgattaattgaacttttgccttttaccttgttcatgttgcttgcttcatttattgctttaggaacttgcttcttgtggagattgacacttgctatagtttctcccttcttaagcttcttc

SEQ ID NO: 125712 - DNA, 640 bp, Zea Mays
atttgccggctaacatgagatgagatgctatgcatctgttttctattgtcccagtgcaaacaaaaagtacaatcacatgtcatagatcgcagtacccaacaaaagttgctgttgcgcctttattgtcgcttacagttgatgcatttcttagggcccatgatcaacagaacatgagatagtgacgaggcatttaaaatgcactgcagtttggctcatgatcggacagctttataaaccaattgcatagatacagatatagatctgtagacatttcaaagtcttaaaatgcttcgactaagatatggagaatgactgatctgtaggaatataatctaaccatgatgaagagctctacttcagagtttactgtcattcagaattcacgctggtttgatcggacattatctatcttctggcctcctttaatttcagatgatcacacacacacacaaaaatgtgattcttttacttgtgattcatacatttgaactaaattccactattgtagagtaacaacctaaatgacgacagctttttgctccatcacaaattccagtctttgttgacggactataattaaatacttcaaatagctgaagagaattttgaggtttcgttgatcttttgatatacgtttcag

SEQ ID NO: 125713 - DNA, 957 bp, Zea Mays
gaaagcataaatgaatcaaacctcttataccactgtctgcgagattgtttcagaccatataaggacttcttcaacttgcacacaaagtttcttttccaggaacaacgaacccttcaggctggtccatataaatgtcctcatccaaatcaccatgtaagaaagcagttttcacatctaactgctcaagctcatagtcatgcgtagcaacgaggctaagaaaggtacgaatttaactatgcttagcaataggagaatagacatcaacgtaatcaattcctggaatctgactaaaaccttttgcaactagccttgatttatagcgcggaggctcttttggagtcataccttcttttcttttgaagatccatttgcacttaactgccttttttccaggaggcagtcgaactagttcccaagtgccattcttctcgagagactccatctcttcatgcatagcaccaatccacttttcagtatcaatagacaatataacttctgagtaatttaatggttcttgaacattatcaacctcttcagcaatatccaaagcaaaagcaacattgcactcttgaatcagtcttttgggccaaactatcttcctcctagctcgaccttcagcaagagattgaggatgagactccacaacaggtgacgaggcactgataggagatgaattttcagcaggttcaatagatggtggagcatgatcatcaacatcccccacgtgctccacctgaacactgatagactcaaaattctggttagtagcactggtagatacagccaaagtgaacatagcaaattcattgaacacaacgttcctactataaaatgccttcggtgtatcaggagtccacaatttatatgctttaacaccagatccataacccaagaaaacacccttaattgctctaggctccagtttaccattatcaacatgtgcatatgtagtacaac

SEQ ID NO: 125714 - DNA, 487 bp, Zea Mays
ggaagccccgtatctatcgtccctgtcggtaagaacccctcctgtatattcgcgatgacctcagcttcgagtaggattagtcgacggtggtgtttgggcgccggtccgaaggatggccttgggtggcaatggcaccgccgtaagggagtgcgccgccgccgcctggttacgtcgtgtggaagaaaggcaccgaccgatggatccctttcttgcggctgtgatcagatcgcctgagagagctattcgaccgattgaatcctgaccgttgattaaccagttgaagggctaggattagatctaggtaatgtttcgcccgcgaccgtcggatcacgatcggactgctcatggcgtgtaccgattcaaacccctcacgatttaatctggtgcgtccggagttgatcgaacggccctgagatcccgataccccttcgttgttacaaattcacaaaagagaccccgtagttttatagattgaactcgccgtcca

SEQ ID NO: 125715 - DNA, 409 bp, Zea Mays
gacgtcgcacagcggagaaccgaactctggcgaactcgtaccagctaaaatacgcaatggctggtgccctaacttggctaagaccagattccatacctaacgagtgtttcccctcaatcaatttcactagcggagctctaaatcgtccattccacggagacagcgcagacattagatgaacaaacgtgttcccggtaatctagagcagtctagctcaatcgaacgggtcgagaagcatcaggagaacctaaggatgccgaaacaggagagcagagagaatgatcggacctgaaacgggctagccacgacgaggactctttcacggtggcagaaactgatttgggggaaaagagcaattcatgggctctggtgagtaattgagggcacaagcggttggattggatgctgg

SEQ ID NO: 125716 - DNA, 552 bp, Zea Mays
atttactgtggttgatgacgtgctagcggtgatggacccaggcatcatcactttggctacatcgacccctggcctccgtagcctagggctcggcgtagcccgtcgtgtcctgcaggaggtctgcgcacttagttctagtctgataggcaataagtgtgttgtagggcgaggggtgcataggccattaatgcgctgtagttcgaggggctcgtaggtcatgagtgttatgtggcctgaggtgctcataggtcatgagtgggaagcggactggcgcaactctgtggctcgatgtcagacatggttaaatgtggttggctacttatggcgagttagtttgggactgggcgcgggatccactagggtggttcccttccgacacgctcgacctcttgtaaggttccgccacgcccaaccacgggcttggtgccgcagggttcgactgggggtgagtcctttcagggttgacgcgtccgcctcttccaactgacaggtaggccccagcgaccaggggtccttccccagtgtgctcactgaccgatgggtcttggggac

SEQ ID NO: 125717 - DNA, 320 bp, Zea Mays
cgcaatagtatatgccatctttatgtatgacagatcgatgaatgcaaagatgaaaacattacattctcaaatatcgattgagccatatgagtgactagatctcttttttctgccgagagttccagcctaagtggccttcgccttcgtcttcctagatgcttacttctagtggtttgtgctttggtctccaagcaaaatatgggttccttcttcggaaaggcggttctttatacgttgttctatctctccccttttatagctcaatagagggcacgttacatgcctgctgaatagtgggtcctgtccaacagaggttcaac

SEQ ID NO: 125718 - DNA, 464 bp, Zea Mays
ccccaactcacctaaagattctgaagggtccaataaagtgaggggataacttgcctttgactttgaatctcctcattccacgaattggtgacacctttaggtacacgtgatcaccctcttcgaattcagtggtcttctttgattatcagcatagctcttctgccgagtctatgctaccctcaagttctcccggattatatggacttgttcctctgcctcttgaataatctcagacccaaagaactgcctttctccagtctgatcccaatagagaggagtcctgcacttcctgacatatagagcttcaaatggtgacatcttcagactggcctggtaactattattgtaggagaactcagcatatggtagactcttgtcctaactgcccccatgcttaagggcacaagctctcagcatatcctcaagtacttggttagttctctcagtttggccatcagtttgag

SEQ ID NO: 125719 - DNA, 672 bp, Zea Mays
ccatatgtatattataatatattgtttctacgtgtctagacatgagatatttcaattgatcgcaatactactttatttttatactttatgcagtgatgtttccgcttatgtccaatttcaatccgttatcaagttgttccgttctttttcgttatcccgctagtcctgttttcgatcctattttcaatagtcctattttttattccgtttccgaaataaaatgtgaaaataaaaatgggagaggggttatcccaatcgatcctttttgttgtcatccctaattgccttattgcctctaaccctaggtagccaatgtagtttgttaaaacatcaacccaactagtgtagaaatttagctataacaatctgatcacgccagaagatctagttagatctgtaccattataaattcaccgattttgaggtgcgccattggaactcaagaatttgtgccagtaccgttacaattgtgctgcaatttgagatatgccatgaaggccccttagaccctcggccaggtgtatggatgtgtaccttatttttatatggacccttttgcccctgtgcaaatgcagagtcacggctcacccatgtatcaccgttccccaatctcttctccaattctcactcaggtaaggtagtctctccctagctttcctaattacttgacca

SEQ ID NO: 125720 - DNA, 452 bp, Zea Mays
gaatggtttgcaattgagattttaggttcaaaatttaagagtcttttttagtctttaatactgattagtatgtgattagaaaagcattagcatcttttatttctggccatctagtagacaagatttggttagagcaaggataggttgaggcaataaaggcagggcaagaaaagacttcatcttggatggtggatcttgatccatctgaagttctgattcaattcatatccttccttgtcgaggttgaccttcttctttccttcggtcttggcgtgatcatctgagttaggaacatattgttaagatatatgtgggtaggatggattacatggcgtaggtaggttagaatctctgttgggttaaaacagaggggttatgcaaccatcagatggtcaggtagttgtgtatggtcaagttagtccaatgcaccaatttatcttaggacatattta

SEQ ID NO: 125721 - DNA, 482 bp, Zea Mays
cggcggcgcaatcgccggaggcgaggcagactgacgtttctaagggcactaggggtctgggtagccaaagaggttggggaggactcggcgtgcactatggcgggatcgggatagcaggaataggggtgaggagaccggacggcagagagggagtcctcgacggactggggaacactccggcgagcaattgcaagcgactgagcataatacaggggacaatagaggcggggttatgacggttaccttgagggaagtatcaggaacacacgaacggtgttcagggcacggagaggacgtgggtcgacggcggcagagctgcgtcagtgaaccggtaagcgcggaccaggcgaaacagatggggaaggggcaaatcgaggggtgtcccgagttgcgggtgaccaggtggagcttatcgaggcaataggcgcggcgagcgccaaacagtggcggcggaatgggtgcgtggacatggcggacggtgg

SEQ ID NO: 125722 - DNA, 850 bp, Zea Mays
aaggagcactcccaaccgtaagatctggtggtgttggcacgctgatacacctaccagaagtaggcgccgctgctcgcagtcccagacgaaaccctgaaccacaggcggtacctgagaacatcttctcatccactggaaacgagtctacgggcagccggaacagaccgggaatgccggcggggatcctcatgtaatcctcggcctccttgcggttgcggtactcgtctcttggcgcggggagcgccagcatttcctcgcgtggagggctcgaggtgcttgctttctctacatgcgaaaccagcggcgagccctccctttcatggccatggtaatcctccggtgccgggagcgccagcatctcctggcaggaaggacttgagccgctcagcttttcatcaccgtacgagccttcgtcggtcggcaggtcctcgtcgtcgtactctctgtgctcgtctccgggcgccgggagcgccagcgtcacctggctgggggggactggcttgctcagcttggcgctcagggatatcctggcgcgttgcagcgcctgcaggacactctctatgtccgcgatgctgcatggcgccggtgtgtcatcaagctgtctgtccgtgcagtcgtggaaccgtgacgagctccagccggacgccttgctgttgagggtgtcactcgatgggctcccatctgatggtgcgctgacggtggtgtcgcgcttaggagaccgagtgtccctgctgtatcctgaatcgccgtctgatgtttgatcttgccttgggaccgcgctgttgttggagctctctttgttcggcagacgttcagcagacgggttgttggtgctggggacgtttttcgc

SEQ ID NO: 125723 - DNA, 662 bp, Zea Mays
ctcgtttttattttgtcgtcatataatataattcttaccaccattttgaatagtgaaaaattatggaatcgtaaaaaataaaacatcaatagcaatactcaaacttgcaaccttctatttaagaaactttcatctgtgtgtgacaaccaacagagccaatggaattctatgttataactcacccattacttactcttatttgttgggctcaacatgcaaaattgacataaatcgaaaatgtcagcaaaatgtgccacataaggagtcgaacctgggtctcagaaaagaaccagcaacgctaaccagtccagacaagagttaagttgtgtcaggtaatggaacatttagttatttgttctgtctttttgattagtttaattgccaccaaacggatctgaatctgtacatcgtcgtccacctctattcgatctgttcggtggccaccgcggctccccgacgcgaggccgccctgctccttctccttggacgcctttccctcctcactttcgcccccggaagacctcaaactgccgctcatcgttgctctccactctcctaactgtctggttcgacgttcttgcgcccgaagtgcttggatttgaggcctccctcatcctgtccgtcctactgttgctaggtgagcatgacgccatgacctctcc

SEQ ID NO: 125724 - DNA, 544 bp, Zea Mays
ttagcgagtcacacatatatatgttcagtggctgactcttgttggggatatgaatagaataacaatacaactgtcgtgttgcctatcttcttctccaagtctccaatctctgttgctttctcccttccctgctttatagacttttagaaggtgctaacatttggtatcagattaggttgtcctgaatccctctctgctgtgccatggcaccccgatcgtccacgatggatcatccagatcctaccgtccgcaagctactcgatgcaatgtcgttgatggagaatcgcttgactgaggcgctggcgtgccgtggtggcgagcagactcctgcctcctccttcgcctcgctatttgactcgttcgagggcaccacaacttcctccaccacagcgctacaatatgtcgacgacgtgttcagctcttcggtgggcgcggagtacgccgcaagcccctgtgcgcggacgcgttctccatcctacgacgacgacgaaccggtcttcgatgcatggcctctcttcgacgaggaacctgtcgacagcgctac

SEQ ID NO: 125725 - DNA, 354 bp, Zea Mays
ggcttatgcgcgtatccccattcgatctccctcctacatttcctcttgctcggagttcatggtgaggcgcaggtattcacggccagccggccaggacttcgggttcaagggggagcaagggcttgtatttatacaccacgacagagaaaccaggcgcaagcagtttggattaggacaagaaatcgtcacatgcgatttcctaagaactccgctcaatctcacgcagaggatagcaattctgttacattaggaggtcaagctaacatatgggactcacatagtagacacgaccctccaagcgcgcacggatctcagttctggcaaggcggccccaattcggcgacctgtttcaac

SEQ ID NO: 125726 - DNA, 394 bp, Zea Mays
atacatatgagattatactccgaatagcatgtctccgttgtggtgtcttgaacgataggattgcacctaaccctatcaaatgatccaaagatcaagcttgtgcccatggattgaagtctctcgctagctttgcataagttgatgggagttacaactccaagaaaacgagagaggagagcacacacaaagagcgagacaaaagcacacaacgccaagaacaatagcacaatttctccaaaatgtttgtctcatatgagatgtgtgctaggatttctccaaaaatagattgtaagtgttgctcaagcgtgtgagaatgatgtttagctcttggagtgcttgttgtgttgagagggatggtaattgggctctatttatagccccaaatccccaaagc

SEQ ID NO: 125727 - DNA, 273 bp, Zea Mays
ggggaacagtgcagaaaccggttgaaccggtttgcaaattcggttgaaccggtttgcaaattcggttgagtcaggccgaaattcggttgctccgtttttcaaattcggttgagccgggccaaaattcggttgatccgttttgcaaatttggttgagccgagccaaaattcggttgaaccaatttttgaaactgttgcgcagattttgagaaaagtgaagtgaaacaagggtaaaatggaagttttagatcaaggattttgagctttagtacca

SEQ ID NO: 125728 - DNA, 491 bp, Zea Mays
cgaaatatagttaactcaacatgtcgcaatgttttaacaatcattacaaaatcgtaaatgtagtacacaaagctaaatatttaaacctgcaaaaaatatcactctcaaattcatctttaatgttgagattccaaaatccaaagtgatactgtcagcacatgtcaacatgccagattgattgattgtccattttgtttcttaacatctaggaagaacttgaaactgaattctttccagcaacttaactttatgtgtactatttacatgaccttttgacaaatatctgaaacattgtaacaagatagattcactaatagcatgcccgcataaaagaaactcactaaactgctctacaagggacttgttatcagacataccacttggccaaataagcatacggaaattatattcataaatcaccatcacctcccataattgttaatataatcaagcttccatatatctctcttgctatcagacataccacttga

SEQ ID NO: 125729 - DNA, 439 bp, Zea Mays
gtgaggacagcaagacaaagtgtcggatgtggcattgtcgcatccatgcttataaatgattttgtattgtaagtcgggtaattttgagtaaaccttctactgccatatagtgtgaagctgctgctcgttaagttgtgccaggctctaatgatccgtgtatatatggaactcagctagttggaggtaggattgctattgtgccactggaagcaaaattgccatgtattccttctcgtatgtggaaattccttggttccttggtcccaatgccttgctaaggaagtctatagggtgtcctttctgcattagaaccgcaccaatgccgctatgacacgcatatgtatatatgcaaaatggggtcgagaagtctggcaaggccaaaaccggtgccaagatcaatgcctgcttcagtgtctcaaacgcctgttgatgctccgag

SEQ ID NO: 125730 - DNA, 628 bp, Zea Mays
gtcccatggaaagtgaccggtggagaacctcatgcgccgtcttgcaaggttgcatcctcggcctttccgttgttggcgatcgccgatctacggggtcgactggaatcgtctcgatcattggccatcgtggaggcccgtgcggcgagtatgccactcaccctgcttctgaatccctttctgcctctcgggggcatcgaaactaatgttcctttttgtcttctgaacatgacaggaaaccaagttggcggagctgtgctgggaggtcgattcggtgacccagagcatctgtgcacgtggagcaactcgcgtatagcgcctgctcgacattccgagccgcgttcggaacgtcgtggacctcagcatccaccgcggggcagctattggggttgacatccgtgtcctatcgatgccttctcggggcaccccgtccgtggtcttcgagaaccttatcaagggtacaacaaggccgcctatgaggtggtcggtgccgtgtcagcaaaggacttcatttgttggactccctagggcccttctctgccgttcgacttttgggtttcctggcacgggcagccgccctcgtcgctgtgtcgggcatcaggacagaaggtggggagacaatcgggcttcc

SEQ ID NO: 125731 - DNA, 382 bp, Zea Mays
cacaaggttgagtcccgaggtaaatccatgtcaagatcgtgtcaaactgtggagagaggtttccaaactttgtcatggtgtgtttcaggaaatttggtgccactttgctatttggacttgtttgatttaagttctgaaaaacagagaacgcggttgatctttggaaaggggatgaaattcagatttctgaatttctgaatttttcccaagtgcattagttcaggggctgatttagggattttgaaaaattcaaatggcaaaactttcttactatattttgttggttatttagtgtactaaaactttgttatttggtttttaccaaaatttgtatttttctcccaagtcttttcccaaatgccctttatgtgcttaaatggtc

SEQ ID NO: 125732 - DNA, 665 bp, Zea Mays
gagacacttgaggggagcaggagtgaattggctgaccgaggagcttcactaggactcagggaagctacatgagttgcggagtgggataaaacacaacccggtcggtttggttgcggtgggcgatgctttggtggcaatacgggcggtggcacgctcagctcgagtgaaattccggcaaagggatggcttggtagggtctgggtgggagaagccgagggcgggcgactacttataggcgcgggagtgcgtgacgttgcgattccctggctatggcgccgagcacgatctcgagcgcgggttggcgcgcgggcagatggacagagcccgttcggcttatgccagccaacgttgaacacctggcatgtgtttgttttgcagttttcccttgcatattgttgcttgccaagctggatcctagcaaaatctctgtctatgatttattgcttataccctaagctagagatattgtacaacatactcaagtgggatctgtccagcagtccattaacgaggtaaaagccatggtttggtcatgtcacgctccgagtttcaatgtcaccttctggtatgagttagggcagctaattaggtacgaatttgtccattggagccattaattttacggtctgaaacttaatgaacattgggggaggggatgattttca

SEQ ID NO: 125733 - DNA, 485 bp, Zea Mays
caccgatgaacgagctcaggacctcatcagagaagcaaagcctgcaccggcggcaccacgacgcgacacgaaccaacaacccgacaaacgttgggagaagaggcctcatgaagaagtccatgccgccgaaccacccgcctctcgcgcccgaggaggacctcgcggaggcgaacgtacgctggacgacatcctcgacgcccagtgcccgtaccacaaggacatgcaccacaccctccggaactgcagagacttcaagcactccatggggaacggccgacccttccaacctctgccacctcccccaccatgagaaggacctggagaacctcaacaaccccaacagcaggaggggggaggaggcggagcattcccgcgcgtcgacggagaagtcaacgtcatcttcggcggacatgggtcgcaagaaagcaagaggcaacaaaagctcaacgaccgtcagatactggtggcgaccactggtcctccca

SEQ ID NO: 125734 - DNA, 444 bp, Zea Mays
ccgtcgccattttttcctgaacgtatcttgcacgagcctcatctgcgagatagctcacggcacatccaatctctgcaaatgtaatgagacaaataagtttgcaaagtcaggataaataaattgtacaagcgaaactatcatgtcatttttctcactcacttccattgagacgatcaacaagattccctaacatttatttctcggctctagccgcctcccattcccttgcatcctgtgctctcttctcatttgccgccttcaatctcctctgctttgcacacatcggactgtcaaaactcattgatttcatgaacctacgcatgtcctgtatgcgatcgttaatgtacaaatcgacgagctgagatccacaacgtatcttctgtcccattagtctctcagactctattgtatgcatcacctcttctttgtcgtcgtatctctccc

SEQ ID NO: 125735 - DNA, 485 bp, Zea Mays
gtaatttgacccccacacctgcatttaaggcaacaagattatgtcaacaacatagatcaaatacaacaaaatatattgtgttatttgttaccttgttgttgggactccatatattgtgttatatcgtgctgcctcatctgccctcagctgctgcctgaacctagaactctttttttcctttgtcttatctatgtcaagctagaagtatgcctttatgtctggaggaacagagggacatttcttgacattcttccctctaagcacgagatgcttcttcaatcgggtaccaccccctccgctctttgtttctctacaatacttgcatttgaaacatgcgccaaccttctctccgtgcaaccagactctatctctatctctttctctatctctatcttcatccgacatgtctcctacagatgtggcaaaaatatcatataacttgaaacaataactaaaccataactaatacataaaccataagccat

SEQ ID NO: 125736 - DNA, 504 bp, Zea Mays
caaatagtccctccattgtgaaaaaaaaaatgtgccggaagaaagagtcgccctgctttcatggtgaaaaagttgatgtcgaaagaaaagaggaagaccgcgaatcgtgttacagtaagtgttaacagttgaaaattgggtcacaggaagtgttgatatttagattgggtctcgaccaattttaaaaagacccatgtttaattttggtcggatctaacaaaaaactctataaacgcctcacagacatggcgtgcggttatgtatagtcatgaactgctgaaacaaggcttgattgcgactagaacaagaatcctcataaattgcaacagaaaccgtagtgtaggggctagtggtcacgactcaccaagggagtgaggcggcatatgcaatgctccaaagtggagacacatcaaattattgcccagccacccagtcccaggaagtaaatcgattctggacaaagaaacaagacaatttagcattgatgttgccagctttcaagtc

SEQ ID NO: 125737 - DNA, 427 bp, Zea Mays
cgaggaatgtattaaacacttccaaaaaggttggaaagctcggaatcaacatatcactattttggagctagtttgagcaaaagaagaaatatgaatgaaagaatcaaaatgttcataatccatgacttagactagatggaaagccacttgagatacttttctaagtcataggatcactctcaagtttagccaaagcaacttggagaagattgttcaaagatcaacgggaagtcagaaactcacgttctgaaattgcctagtgcggaccgttcggccccttctggcggaccgtccgcgacaccatttcgactttggccaggaactgaaaatcgtggatagtccgactaaaccgcggactgtccgactatacagtgcggaccgtccgactataattcacggaccgtccgcatgtgaagacctggttcag

SEQ ID NO: 125738 - DNA, 288 bp, Zea Mays
tagatcgtggggctgtgagagaatcacgtttcattaaatttggtccatcggatctaatccaacggctccggtgtgccgataccccttcgactggagaagtatgcaaaagagtcctcagtttcttagataatcaacccgcagtccacactgtgggagttctgagtcttggtgtcgtttgcgcagaaccccctgggtttctgttaaatagtggccgcagtccaagtaactcagaaatctattaaatttaatacagaaattctttttaatgcaaaataatgtcccaaactt

SEQ ID NO: 125739 - DNA, 433 bp, Zea Mays
tgggcagtcttcgacgttatcgtggatactgcccttgcctcgatccacttggtaaaatattcgacggcgacgaaggtgaacttgaggttcccttgagccgtgggtagtggcccgataatatccagcccccagcgttgaagtggccatgtgtgggcaatcagcttggtgaactgcgaagggttgcccaagcagggagaaaacttctggcaggcttcgcacgacctcgtgactcgattcgcggcgcagattatagcgggccagtagaacccttgacggatcaccttggcagcgagggccctaggccctgagtgagagccacaagttccgttatggacttcgcgtaggatctggatgccttcggtttcggtgacacatttaagcatgggttgactgacccccttcttgtatagctggccctcaataagtgcgaagt

SEQ ID NO: 125740 - DNA, 505 bp, Zea Mays
gtggcctcccccattcgcgcggcctccaccgtccccaccccccgtgcaggtcgtgcaattgactcccccctcctcagtccccacgacgtccactcctgcatgcttcctccccaggacctccacttcgcctgggtcagcacacattcgatgaagataaatggtgagcatgtggggactatgtgtcgtccgagcacgcgtgtacaccagagtcgggttgctctactgtgacgccgaccacatcaccgttgtcggcttctccggctcactgctcctcttgtgcacgtctcccatctctggcaaggtattgcttttaatttgtaagaaaactttgttgattttcgagctagctaaacatcgccggtgtgcagaccttcatcaccaacaatgcgtgtgtggtgtttctgaacgccgcaaccgaggcacgataagggcgacaccaacacctgcaagcgcagcctcctctacagcttctgtttctgctaactcggtgcaaggtacgaaccgc

SEQ ID NO: 125741 - DNA, 361 bp, Zea Mays
gcaaagacactgtcttccaaaaacaagatatgactacgcgatattgagtcaaccaatccatacccaaaataacatcaaatgactcaagggaaatcaccacgagattagccgaaaagatctcatcagcaaggacgacggagcaacccgggcagactgaacaactacttatggagcccttagcagaactaaccacaattgggtgacccatcctttgcaccgaaagaccagcccatgacacacaattctccgaaacaaacgaaaaactagcgccagagtcaaaaagaacatgtgcatcaaatgaatcaattgagaccatacatgtcaccacatcccatgatctctgccatccgcagagggtagc

SEQ ID NO: 125742 - DNA, 446 bp, Zea Mays
atgatgcctaattcatataacatttgataagttgtaacagttctgagatgattatttctagctagccgaacaagccgtaagtaaaatatcgggacagtgctataatactaaacgggatctcttgtattattatagtctggcatgagtcgtgtgaagctcaactcatctgtgccgggccattttttcccccagtatgtgtcaacgcggctcaagttcgtgtcacacaacacagctgggaaagtggccatggccaagggaaatacccaagaaacatgggtccgtcccctttgctaatacaaataccaggcacaaaaacaaatggcagagccgttgaaaaccgtggccgagagccggagacaagataaagcaaagaaatctacatgaaagccctgcatcgaacagaagcgacagcagaaacagtgtattaagctgcactatcacttttt

SEQ ID NO: 125743 - DNA, 757 bp, Zea Mays
gttctctctcgcggctgattcatcgttttctgggtcgtctcttttgtctacctggtttcagtgccggttccatcgggttttgacgcaagagtagaggacttggtaggtcgttgtgttgtgactcattgttggagagcaggaccgatttcagattgaggacaatttcagccaattttgcaggaacccgtaaaacccatccggagaattttccctgcgcgtcccatgattaggagctgcggctggacagtgccctacgctctggagttttagtgcgaatcgttgccagtttcagtcaacttttgatggagcccaggtgttgagcgccaatttgggagttccagctgacgctgcagtctgcattcttctaaggccatcagtgaggaattttcgttccttggtggcagatgggttcctccagctctaaagtggacaatgaggagcccgtgaggcgctccaaggacaggaggcggctcatgaagcagctggtgcgccgccgcccagagcttgcagctgcgcacattgcatacctgcacgccctccgcaacacaggagccactctccggcaatttgtggagctggagtctgctttgtcacagcagcctccggtaggccttgcggcgccgccctcgcctactccacagtcgctgccgcagccgcagcccccgccacctcctgaaccctcactgccaccctcgccacaccccccgccgcctctgccttttagtccagtaaccaccataagaaagatggagaagag

SEQ ID NO: 125744 - DNA, 952 bp, Zea Mays
gcggggaggggagaatgagaaagacaatgcgagaatgggaatggcagaacacgaaatgacagcctaaccttaccgccttaatataaattaaaattatgaatattcctactaattctggactggggacacaattttccaagaacagaggggctgtagcttaaaaatctggaccttcctaaaactctctttataaatgtaggtatggcgggtttattttgaacaaatcgaggggttcatgtgcaaaaagtcctcgattaagggggtatcgggcaactatagttgttggatctaaaactagtggcccagattgaatctcgcccaaatcagtatacgacctgggccgcccatccacggttcagatttccccgcccgaagggttacgcgcgacgcgatcacaaccgttgaatatcgatcaacggccaaggattcttcttcaacctcacgcatttgctgttcggttacttggtatgcaggtcagggcggcactgttcatgtctcccgcctagccagccagcccgacgacaaaagccatccaactgcaacgcgcacgtcgataaccctacacggcgatacggtgaccaaccaccagagcatttaggcgctgggcagcgagtacagaaattcagaaaaagcaacgcaccggggctcggtcgacgatgtctgatgaatatgcccggtcccgcgtgcgcacgcaccaaaccaccggcgccagacaacgacttcctcaattgcactgtcgcgcaacctccctgactcttccctagccccgcagaagttgcctgaaagcgcggctcacgtgattaactctcggtggctccaagcgctctcttctctctgatggcgagcaccgcgcagctcacgggggcaaggtaacatgtcgatgggagctcctattccttctatggattatcaagaattcgggatgcggccgacaatttatcccttcgttggc

SEQ ID NO: 125745 - DNA, 440 bp, Zea Mays
gcatatcggtatggccgcatctggacaggtcgagcccctggaagcaagggcaccttgtgatcacaatcccgaacaggtggcattccttgaggcacctcaaacactgtcgaatactgatgcagaagctgctgaatatcatcagggagtcctttaagaattgactgctccttatccaacaggtcttgaatactgcagacttgaatcagggcagtctgcatgaccgaagcttggattcctcgcaacatcacagtagaattccgaagaggaatgcacaaccatttatgtgcccaatggatccacatgggactatgagcttctagccaatccataccaataatgatatcataagtgggcaagggcaacaccttcaatgtggatgaaaaggaaacaacactaatagaccaacatgcaccaatcacctgttgcgtacactataattg

SEQ ID NO: 125746 - DNA, 891 bp, Zea Mays
gctggtctttcggtgcaaaggatgggtcacccaattgtggttagttctgctaagggctccataagtagttgttcagtctgcccgagttgctccatcatccttgctgatgagatcttttcggctaatctcatggtgatttcccttgagtcatttgatgttattttgggtatggattggttaactcaatatcacgtagtcatatcctgtttttggaagacagtgtctttgtaggcgccgtcaggtagggaggtggtattcttgggaagcactccaaagtacacactttccttgtcccaattacttccggatcgtcggacaaggaagtcaggaaatcttttttctatgatggtggagagtgaggctgccttgcgagtgcaggacatccgtgtggtgtgtgattatgtcgacgtgttcccaacggagctaccaggcattccaccagagcgtgatgcgtcttttgaaatcaagttgatttcgggtacgcaacctatttataatgccccgtatcggatggctccaaaggagcaggttgaattgaagcggcaattggacgatctgcttgctaagggtttcattaggcctcgtagggcaccatgggctttttcggtgttatttgttgagaagaaggataaaaacaagaggttatgtgtggattatcgtgctttaaatcaagtgacaatcaagaataaatatccgctacctcgtattgacgttctctttgaagagctaagaggtgcccaggtattctttaagattgatttgaactctggttatcatcagttgaggattcgcgagggggatattgagaagacagcttttagcaccaggtatgggcacttcgagtttatcatcatgtcctttggcttaactaatgcccctgctgcttttatg

SEQ ID NO: 125747 - DNA, 354 bp, Zea Mays
accatctgaaggcgcaagttcgtcattaatgtcattgccttcaagtattactaagtcattcttattttgcacctcatcctgctcatcaacaaccatttcaatatctacttccattctgatagcttcggttaagtctatctaaaatcgtccttctagtccatcttcttggaagaactctccatcatatgtgtccgggtctaagttataatcttcatcgttaggaacaggtaatctaccatgcggcgataccttatacacaacatcccaacccttaagatgttatttcgtttggcacgcatatgggagataatactcttgtgtggcctgttgagccacgatatagacatcgtctcc

SEQ ID NO: 125748 - DNA, 742 bp, Zea Mays
ggcggcgctactgctgctggtggtcgtggtcgtgatcgtggtcgtggtgcatgcgccgacgacgacgatgacaagcggcgcataccgacggggcctaaccctctgcacaacagatagctagctgatcgtgcatgcagcccagcaagatccatcaatcctataagacgagaggagcaagcaacgagaaatgcaatgcaagccaagccaccagagttcagggctttcttggtacttacgagcgagctcatcatcatctcctaccaccctctgttctgttctgttcaccacggacatggaccagaagacacgatagcgatcggcagtagtggttgagcttcaggagttgcgaaaactctctggacgctgtcgtccattaatttcctcctcttcttttttttgttcttcccgagcttttcgtctgccagcaccgggtgtatattcttcctagctagctgcgctgcgcctctcttgttcagttgttctgtcagaagcaaagcaaaagaatcgttgcgctctctcccagctttcctccgctgggcgcttgttcccatcctggaaacggaagattcggctgttcgtcatatctcatgaattgctcgctcctctctctctgaccgttccagccaaaagcaagcttcacaagccacacggccttctgaacgcaaagatctcccgccagcgatcctgcgagcatcgtatctcctgtagggcctgcagctagcatactgacggcgaacaaagc

SEQ ID NO: 125749 - DNA, 303 bp, Zea Mays
cacggtgaggaccccggttggggatggcatcttgaggaccaaatacccgtaatgggcaatggccatgaaccggtacagggtcggcctgccaatgatggcgttgaaggggaggttgacttccgccacgtcaaagacgacgttctccatgcggaagttctcctcagttccgaatgtaactgggagtgcgatactccccaggggatacaccagctgcgggcccactccggagaatgggcatgagggtcccagatgggatcccgggatttgcagctgcttaaacgcagcatggctgatgacgttgag

SEQ ID NO: 125750 - DNA, 561 bp, Zea Mays
cgagtgcacgagttacattaccagacgaaggccagggcagacggtttacatgaaaattttggttgctacaattttgcgtatcgcaaggatacaaaggctccaattctcagctatcgcaccaagtggccaacctgctggaaaggtgaatggttctatatcaaggctgatgagaagaaaagggggaaactgatgacgatggttttgtgcccgctatctctaaacttcggaatgacctggcccctgtgcaacatgcagctagggtcaccatgccaactggccgcagtggaattcagggtggtggctgaacaaatcagcaccagagacctggtgcaagaatacctggccaacaggacatctccaacgtcaagtaattggggcatgccaaagctaaagggaacaaagaagaaatatgaacttgttcgattaccttatcattttaagtttgagaaacagttcaaggagccttgcctagaatggctggaaatgattgaaactatgtgcaatgaaattttggggaactacactaaaaaagaagaccaattaatgacagcagccttcggc

SEQ ID NO: 125751 - DNA, 507 bp, Zea Mays
caccggcggatccagtttcatgtactagcaagcaagctaacgttagctttccctcttctttatcttttcttttctttccgttccttttctggtcccgtttctatagtatgactttctagatcatttggtactgcccaattcaactggctacgtacactccagaagagatcttcctttaaattaaataaacaatttgtgtgctgcagcttcaatctttgaccaactcgtagcttcaactctgaagagacaatcaaaagatttctttttctccttagattaaaaacttaattagagatcatgaatgatatatacccaaagcacctacagatacaacaaattaatctagagtatcttctggcaaaacacctataatctgtataacgtgctcgatcccaattccctacagctccctcgctagctaatctatactcgcgcctctggcggctacacgtacgtggtcactacagactacacagcaattgtgttcgaataattgacgctaatagt

SEQ ID NO: 125752 - DNA, 704 bp, Zea Mays
tcccatgataggactcctggtgaggaggagtgcgctgcctgcacgcctctccaccaaatttgcgcctctcccttcagcagctgagtgccaaagcgaacccgatctccatatgcaatctcgaagacattcatcttatcctccacataagtcaaccaatctgccgcctcgaccggagtaccactgctatcgaaagaatccaacttcatgcccatccactgcatcaaagaaagaccactgactggaaggggcacctcggccccgccacctggaatagcacccgcaaggacagcgcccccgggcacttctccacctccagcaccctgagcagcacccgcaggggcgacaggaatggcttgcctcagtagggccaacttctgctgcatggcctgcattgcggctaacattgccgccggactcatcgagtccccactaggagcttgcggactaccccgagccctacgaggcggcatagctgcagccacagggatgagaataataagtaaatgagataggcatagcatctcttcagataatgtcaaagctagcatagaccataacataatcatatcaatagcaagacagaaatcccatcctacatgtttagtgtgtcaatttattactactccacttgctaggacctacagcctatcctctgataccaattgtaacaccccacatgtcacacacaatggataataccacaa

SEQ ID NO: 125753 - DNA, 371 bp, Zea Mays
gtcgaagccaagaggagggggatgatgatgatgcggaggaggaggagggggatgatgatgatgtgtcaaaggctcagaagacaaatcgaggaagaaaaagattgaaaggtggtggtcagctgtctccttccaaagataaggcaaagagaggaaagcgtgctggttgctggaaatattttaaggagatccatgtttagtctaagaaggagtttggggttatggtgacaaaagccaagtgcaaattctgttataaaagttatgcataccatccagggggcaacttcacagctaaaccgtcatttacagaagtgcacacagtttcagaacaaattggctaaggcaaaatctcaacttcctcaaggtactctcac

SEQ ID NO: 125754 - DNA, 320 bp, Zea Mays
tctttgaaagaaccccggtagagggcgaaccatcagcacgccagtattggccagacttgctgcgcctcctgaatgcccatgacgacgacgcaattgtttttactcccccggtgttccccattcatcagtctatcgtggcatgctggcctcgtccctcgtcgtcgtcgtcgcgccggccgccatgggcgcatgtgctgcgtagtgcgtccccagtttcaactttgcgcagagaacaaaaacaatcggatggtccctcttccgttcctccttttgcagaaacaatcagctagcgtatgtttgcttgggaaggggtgttaatt

SEQ ID NO: 125755 - DNA, 295 bp, Zea Mays
atatgcacattgagtgtgatgaaggagctcattgcatatgagacatgacatggtgtcatgtggctatatggagaagatcaagagacatggcttagctaagatggaccgagttgctagtgtgaaaggcaagtatgaggcccatgtgtgatggatagtgtggcagtgaaacaggagcaaggacttggcaacgatggaccaaatgcagtggtgaagagcaagctaagttgagattgatgaaccaagaaggccatgtgatgacatgaagtggatgatcattgttcatcatttaatgaag

SEQ ID NO: 125756 - DNA, 447 bp, Zea Mays
caagaatggggtacccgaagtaggcctattacttgtggcagcccatctaggcaagaagccatggagcaaggccgaccaactcttgcagggcaactctgcgaggcaaacaaggccgaccaactccctccgagcaactctacgagacagagaaacgaagacccacaatggggactagtacatccatggaccctagttccacaacccgatgtcatgcgcctggcaggtgcatgcatgtacccgcttaacgtgaaaacaaggttggccctattgacccatgccagccacgataagacatgtcgccaccaaacaccgtcttgactgatgccatggcatgccggggaatgacagggagtatccatcaacaggatctggtgtcatgaggtgtcatcacgcacgacccttaacgccccaactctaagatgtgggaccagccaagctccgctacag

SEQ ID NO: 125757 - DNA, 321 bp, Zea Mays
gaaggcctttagcactgtgtgtgctttcattggcacgagggatttgattcaagagcatatagcctttagggtatgaccgcttgtggaaagctgggatatgccgaaggagaccaccgccgattccagtgaggatgatctgatctgattgaagtataccttcagatttagggagaagtttgatgagccagacgatgactagctgaagtgtattgaagctactagtgatgagctactcggggcatactccaaggccgaagataatgctttgtccgcagctttcgggggtcggggcaagaaaagattgaacagggtatttgatgc

SEQ ID NO: 125758 - DNA, 917 bp, Zea Mays
tgacatgacaatcatgtgagttgtagttggtgaccgtcaggtctttcattgacacaatactccgtatgctagaacagaatccggatgggactctcaaattcttgagccaaacacacatcgtatgtttctcatctacattaagattgtagcttgctgtcgggagatggtacttcccattttcttgtagaacaggatgtagttatttttttatgcctaaatttaccatgtccacgcatgaattgagaccttcttttgtttggccctttatgtctagcaaggtgccaattatgctttcaaaaacgtttttctgaacgtgcataccatcgatcgcatgtcgcacatcaaactctttccagtaaggcaagtactcgaagaaaatagacttctttttgaatatagcccccaaagctggtttggcatccttccttgttttcccatcttttgtcttcttcctgaaaacaatgttgatattcttgactatttcaaaaactctatgacctctattgttacccgatggaggagtagaatgtagttcaccattattgtcgaactacttatccatcttttgcatgcggtacctgtgtccttccaataaaaagtgtttgtgcctcatgtacactatcttcttagatgcagtaagggacacgtaagcagtttcatcaatacatactgtgcaaccaacctttcccttgaactggcctgataatgtgaagagagcagggtaatcgttgatcgaaacaaaaataattgctcttagtgtgaacgaatctttatgatactcatccaacatttgaacacctgtttcccacagtattttcatatcctccattaagggctccaaaaatacatccatatcaactccaggttgtgtaggtccagaaataagaatggatagaaaaatgtactttcatttctgc

SEQ ID NO: 125759 - DNA, 401 bp, Zea Mays
gtgcaaaataaagtcatatagcattacatcgattaaaaatagtcttcatatgtgtcggggttagccggatcataactctcatcatcactatcaaccatttcaatctcaacaccatcggaagatgcaagttcgtcattaatgtcattgccttcaaggattactaagtcattacattttgcacctcatcatcctcctcatcaacaaccatttcaatatctacgtccatttcgatagcttcggttaagtctatctcaaatcgcccttctagcccatcttcttggaagaactctccatcatatgtgtccgggtctaagttgtaatcttcatcgttaggaataggaaacctcctgtgcggcgataccttatacacaacatcccaacccttaagatgttctttcgtt

SEQ ID NO: 125760 - DNA, 291 bp, Zea Mays
gcttacttgacttagggtgaccactataccctactaacggagcaatcggcttaagtcagcgacgacttaagacggtgcaacatgctcacgcttactcgacttagggtgaccactataccctactaacggagcaattggcttaagtcggcgacgacttaagacggtgcaacatgctcacgcttactcaacttagggtgaccactataccctactaacggagcaatcggcttaagtcggcgacgacctaagacggtgcaactgaaagggaattaggcttacacctatttccta

SEQ ID NO: 125761 - DNA, 415 bp, Zea Mays
tgtctttagaggtaagacagaacaaggcacgtggcggcttaccattgtcattgagcacttgggttggtcggtcacagagcattgctagatctcttcgagctttcagattgtcctttgttttttcaaaatgcatgcaggtgtgtatgagggcttcaacaacattactttcttggtgcatgacatcaatgttgtgcacaagaatcaatgacgacatataagggagctctagagaccacatatatgtgtctagttgtcgtccactccgaatccttcgtacttgtcccccttttcatttaggacaaggttgttcagctgagcatatatttctgctgcgttaagacgtttaggcggtcctttggtgaccatggtgttctttataaagtttttcttatcgctcctaaaggggtgtttcttg

SEQ ID NO: 125762 - DNA, 586 bp, Zea Mays
caagaatcgccgcgttcgagagacttgaattactctagcgctttactatttgttcgagttaagacaatcaatttagaaccaacaattcgacttgcaaattttattcaagtcattaatgcactaaaattactacaaccaattaacaacacattgtccacgataatcacccaacaatttgcgttttaaattagacatcacatgagcactactacttttcatccgcgaccataaccatacgcaatttggctacaacatcccaaacgggtgcaggaacactagtttctagttttaaccccatgattgttccattaatcattttaactacttattcggcatcgaccgacttaaccttcatctcgacggtccgagcaccacaattcacgaaagtctacctagacatctagcatcacatagagagtctactaattaacttgcaaccacttgaagtactggaaacacctacatataacaattacttaacgcaattgaattcctctatttaacaagagttggctaacacaacatgaaaaaaatagtaattcatacacaagttcatattcttctcaatcataacaccatgagacca

SEQ ID NO: 125763 - DNA, 830 bp, Zea Mays
cggcaagcttagccgccacgagacccaactcaatccgggcgccaagatttttacctgcccgtccttatcttctaactacggtgcacaaatcacggcgatcagcgctcatcgtggcggcgagtcaccggcgacggtgaacggctggcagtcgatcttatgcagatactgtaccatggcatcccttattcagttagcctgaccgagcgatttgaaacccaatttcctcccgattttcaatggcaaccagttgattggccagtaacaaatttgttgtctgatgatccaacgacaatcttgttatagcaaccatggccaaattcttattagatcagggttgatttctagttcaaagttggctcagtatcactgttagtctgaatttcagactgcaaacagcctgacagcccgagtttgagctgaattatctctaaattcttcataacaacaatgtttaactccttaaacaaagttgttcacctttgatagatttacatatttgatgtggtgacctagggcaaaaaccttagaatttgaaagttacaaagctccaaagttgagcccatatcacagaattttagacttagggtgagatctcaaatagggtctttttgcaaataagtccaaaattcagggtttagcttgcaaatcttcatgattgtgaaccatatgacttaaaacaccttactttactagtttttgcactttagtccaaaagtggactaattttgcacttaaccccctagggtttaggtttagggttttccaaggtccttattagggtttttggtatttcaggggtgtgaatgtaattcaagtctattcttagtaac

SEQ ID NO: 125764 - DNA, 491 bp, Zea Mays
aattgatccttaatataatatacgtatacatattcgcaaatgaaaactcgatctcggaagttaccgcagcggaagccactgccaaggagattgaaagccaggcggccgctcaagtattccgaggctattcttttcaatcggtataagtagtgactggattagtttggatccttagattcagattcttgcctactgtttttttcttcttttcattagtcccttttcattgctgcagctggaacaagcgtgctcatcatgtagttctgttcccacgaatcagcagttggagaaatcttcggctggagttagagtgggcattttacttctctgtcctgaactgctctatcataggttgcacttggatatttagaaggggatgcatgctcatatctctagattcaaattctgcattagtgatttgtttggatattgaccgtaagcaccttctcatccagatcgagccaaagggtgtgaactaatctcggttcatt

SEQ ID NO: 125765 - DNA, 589 bp, Zea Mays
tgtgtttcaaggaaggtttccaagtctcaatgttgctctctgtaacgctagagaaaaagatatcaatgttaaaaacatacacaatacatccaataagatgttttttcacttgcatttgtggtgaagatgcgcgataattattattttccgattcggttaacccataaagctatctccattagatctatgtataagatattgcaaaacacatctttgtaccgtagacgccactatttatagttaggtttcacctggcatggcactggttttttttctttcgtatatttagtactcagacaagttgccactcgctgctgcaaactctcatatcatagtacaggtacacatctaggcatgaagataaagccaacatcgatatcaacctgtagtcctgtacaaggcagcaagcggcacgttgccacgctgtgacagagacgtgagcaatcgccgccgtctgggttgctccacgactacgggctcgacatgcatggctcccacgctgtgcatttcgcagagagattgacgcgagcactagccgccgctggttgcttgctcgctccacggctccgccactacggactcgacacag

SEQ ID NO: 125766 - DNA, 278 bp, Zea Mays
ggaaaatagcaacatgtctggatctcacctatagtagggctgtcagtactgcactggcagtggaagccaaaaatgctgggcatggaaaatcaaagggatttggaggtgaaaggtcaaattaagggcatgagaagagaaccaggttggtgatccgaccttttcatcagaattgttctttgcctcgcccaccttcctatcccttcaagcagcatgttttcattcgtcccaatactgcccccgcccctacaaatcagccgagtgcccctggtgctcatttc

SEQ ID NO: 125767 - DNA, 1067 bp, Zea Mays
caaaaaaatcctctggtttatatttagcaaatttagtttagtccattgcaatgaatctgtaaaagttaggctcctagaaagttctgtggcttgtagctcatgacagatgttggatggatgatcggtttatgtgtcatggtctgttgtcccttcctaagtggtgcctcatgtgtgaccaggaataggagacaattaaccatcgatcaatatcatgctcctttgcaaaaaaatactagtactccatcctttgtcatgtaggttaaaataatttgcaccacgaatagttgataaggagtttgatcaatggtcggatagatcagggcacataattccataacatcaaaagaagggatttagttccatgtcatgctaggggatttaattatcgagacacatcaaaatgctttgtatattcgatgaagcaactcataacacatcaagagctctgagcatcactagtgacaaatgacatctttgggagatagcaggtgcatggatcctctcttatttgactggtccgactcatgaagagtaataggttcatgtctaaggatgtctattaccctaacatgtatgtaaagtggcatgtgtagtgtgtgggtattgctggtattttttgttttgtttgtttgtggttgtattggccctctttttattttatataatgatgtgtagttgtcctgtgtattcaagaaaaaaactatactagctaacaatattatagacacaagaccttaacttagcttttatagaaggaaatgaagtgtaacatgagcacaacatattaaaaattggaccagtacacatttactagtttagctaatgctcataaccataacacctccaaaatgatggacaaaaacatcatcacaacctagctaacatggagcataataaatagatatgttgatgaggtctgatgaaaggaagtacaagagagagaaatagagagtatataataggtattatttaccattgctggggtcgatgtaggccaaggaaaccaggaaaccaggtccagcatgtgttagaaatctcttccatattggtatctgctaaaaacatag

SEQ ID NO: 125768 - DNA, 514 bp, Zea Mays
gactgtttttacgagttaatggagcttcattttcttcctcctcattttccactgtaacaacgcaaacagcacccccattggggtcggcagtagatggagcacacccattgggatcagtgtcagcaaggccggttgcaggcacctcttcagcagcaggagctaaggtactggcgtcctcatcaaaactagatactcgccgcaggcgtcttctcttcttcttttgttcatcagcagaaggctcgagctggctggttcggctaggacgcctcgggcgagtactgacaggtttcgggacatccaaagttgtatcaacctctggaaggggcaccactgccaaggcaccatcaggagcaacatcggacgaatcctcagctaatagatcaagcatgtcatttatgtcagcatcactggggttcagaggcacttcgaaataaacctgccgttcatcatctggaatctccccgagcgaagcaaccaaagtactgacttcctcggcagaaggtcgcactctaag

SEQ ID NO: 125769 - DNA, 774 bp, Zea Mays
tcaatttctggaaaagtcaggggctctagcgtaagttttctaagactcagagcatagtgcaattggacagcgggtttattcttgaaaagtaaagggtttctttagcaaaaaggccaacgcaaaggggtctcagtggttttcggccgcgagatcaacagcagacggcttggattagatccatcccaccgcgaaccggtacgcaaccgcagccacgagatcagatatcgacggtttggatttaaaacgctaggatcacatcgcgactgtccatgtacgatctaacggaccagatcgagacatggtgaaagggtacgtacggactaatcacagccgctgaattacgatccaacgccagggagatctcccccaacctcccgacggcaaccgagcagaggcgccccggccacggcggagccctcgccggcgccatcaaatcccaccgccccggccgcccattatggctaataccacgtgaaaaatgaaattaaaggctaggtgatcacgtagagggcgtctcaccgaggatgaccaagccgaggaggccgaccacggtgcgaggcgaatccgcggcggcgatgtggatacggtgagcaattcaggccgcttcttcgtccagctctccctgatacacccacggtcaccaccgccgtgcaccagagacgatcaccgacccgatctacagctctccgcggcccagatgcccagatggtcgtgcggccgcccaatctctctctatcggcgaggtgctcacggcccacagttcctgcggttcgc

SEQ ID NO: 125770 - DNA, 744 bp, Zea Mays
cgctccccttgcttagttgcaccctcagccgaacactctcgctcgctctctctctctctctcgccctgcgcgcgcgtccgcgaagctccgctgtggtccaccgcccgttccatggccgtcatcgagcgtctgccgcatccgttgcctcaatgagctccacctctttgccagcaacgcgggacaccctctggtttgcccccaaacccctctgttttgcccggtccgcgctcactggcgttctccccgtgtagccgaagccctgccaccgtcgacctgaggcctccctgcgtccccgccattgctcaagcgctctatagtctccactcgaggtaagcaacttccccacgcccctatttcctcgtgtgttgccttgtccttcgcgcaattgctcgccggagcgggtctgcgccaccgtagggccgctccgccgcggactgcgccctctgctgccctcgcgtcggtgtcgtgcctgagtttgagtccgttgtgtcacccgagcgcgttcgagcccttccccagtgctctagaccctagccgtgccctcgcctccggtgaaacctcgccacggagacgggcggcgccgccgcgagtagaccagccacctagcccgtgcttgccgattggatctcaagcgttcatccaagatcgggtgacctaggtttaactagatcagagctaatcccaaccgttcattccggatttgaccgcccggatccgtgcccttgcccgtgctctgcagctggg

SEQ ID NO: 125771 - DNA, 396 bp, Zea Mays
aaatcagctctaacggtgtaagctgggacgaaccaactgctgctaatcactggtggagagaaccgtagcatcgcaattatgcccccattatctccccccgtgtcataatttaattccgtggattccgctctattgacgaccattatagctctgttttcaccgcgaaccagcataggtcgtcaaattgcaacctggatgacggaatggcgtgaccagtttcccactcattcccctccaattctcacgggatcccggatcaccaaatcagctctaatggtgtaagctgggacgaaccagctgccgctaatcactggtggagagaaccgtagcatcgcaattatgcccacatcatctcccccgtgtcataatttaatttcgtggattccgctctaatga

SEQ ID NO: 125772 - DNA, 526 bp, Zea Mays
gtgagctttgtggatgctcaggtgttgtcgatgagggtgggtgtcaggtgagacagggtgaggtgggatgattttgtaggggtccccctcgaccttatatacatgaccagagagttatccctttacaagttttgatcattatctactctacttatctccttcttaatcacgacttgtagccctgcatatccaaagtttgatcaccttctcatctgagtcatcgccgaatacttagctcttcaagtgcgcgcaactgcatcaccagagatatcagtgcttcggtagcgcataactaggatgccggtctttatcttcttggatcaaattcgctcgacctgattataaccttctggcccatcccgcaggacgaaccaatgggaggcccatcaggcgtcccatgatatgttttagtgtttgtgaggacccggggatatctattccccacagtatgcttggctcatctactcaccatggtgcaatgcacacctctcttggtggtggcagtgagcgcaatagccgatacaat

SEQ ID NO: 125773 - DNA, 502 bp, Zea Mays
gggaggcgttggagagttgtccgcctggccattggatgctttaccaacagatggatagtatttggatccggctatttgatctgtagcgttgaccaactgatgggggggccctcattagaagtagcgcacccgttcgactagggtcaatacttgcggttagatcttgatcggacgaatccatgtggtcataggtgtttaaattttaatccagaggatgcgaatcaggcgaccagggttactcgctggtttgtcgtgtgtcggatctaatctggaccatcggtgttagatcaaatggctcgcgtggctagataccccatcggccaacccattttgcgtatgagcccttggactttacataaatcaacccgctgttcggtcaagtatagattaattgtggttgtgccctagaattttataaaacacaccgtgtgctctcggatttgtgtatcctgtacccaaataaaaccccaggcttattaaataagctagaaaatgatttctt

SEQ ID NO: 125774 - DNA, 627 bp, Zea Mays
ccgacattcaacgaaaagatgtatcccagactccagggcgcatagaacacaagatgttgcatggtgccaatttttgactagtaaacgatcggttgtccaaattcgattttggatagctaaccaactgaaaaacttgcacttagggggcatccagaccttccagatgaacaggtcaaaaattgtgcatgtcgattcgaagaactaggcctgatatgtcgattttactgtgaagcaatggtttgcaatgaattttccagttaacgacatcttcattccatagtcgaggttggatcttttggacatgggaccaaagagtgtagaactcatgaatatgatgagatgaaattgatctatcaagcaaatcaagatcggtgctccagacaatgtttcttaccacaaatgccaatgattttctcttatttcttgatgtggtaaataagcgaggcgctagatccttggccctcatcccaccagcctaggcactatcccagaaggatgttttagagtcatcaccaatcacaatatttgttgatgctcagacttatctatacccataattcaccaatttcaactttgcaaaacccacacaaccaaatggtcccatactcataacctcccctaaatcca

SEQ ID NO: 125775 - DNA, 309 bp, Zea Mays
tcttgatgcccagtgatatggcaatgttcagtccatgaatcaaagcttcatattctgctgtattattggacgctgagaataataactgaagagcatatttgagttgttcacctccaggtgcaatgaagaggattcctgtgtctgccccctgcagcttcaacgagccatcgaaatacatccgccatactcctacagtctcggggtcatctggcacttgttgctcggtccattatgatacgaagtcaactagcgcttgagtcttgattgcagtacgaggtcgaaactcaatgtcgtgagctcctagctcac

SEQ ID NO: 125776 - DNA, 766 bp, Zea Mays
cgagcgcgcggtgcgctgccgcaatagcgagagcgacgggctgcgagtcgacgagcacggcctgcacggggcggtggcgcgtgagcgtgaccgaggcaagcaggcgaaggatggagtctgctcgaacatgtgcccacgtggccggtggcagctctccagctcgcctgcgtggctgcactgcatggtgggtggtggcagcgtcgacggctgctcggcatagaagatggaaaaggaggaagaacatgacctatgggaccacacgtcattgacagggagagaattcgaagggtattttaagtaatacgaaaatacagtggactgtaggctgtctctatgcatatggttttgcactctgactgtagtcgtatagtgaattttaaaatagaaaatgaaataagagatgataagttgctcgagacagttcagggtttatctttactaggctgctacgtccgaaactagatgataaagtaccaattatgatgttacatctccgaaaaaataaatacaaataataatttgtcagatcaacaccaataaaaaactggacaagttcaaggaaaccaagaccaataaaagcagttatactatacaatacagaaacagagcaagtcgctaccaatgcagccatccaaattacaggagaataacaaatcaaaaatttttacttgaatagagagagcgcaggtcacagtacgcaaattttgaaagaaagaatcaatgaaaacttgcagagacaattcatgacttaaatagtactacttcc

SEQ ID NO: 125777 - DNA, 461 bp, Zea Mays
aagggaacgagcgcgaggtccagccagggtgttgcgtgggcggcgagtatgaactccggcgagctccacgggcggtgaacggcgtgcggatgcggacggtccgacgacgagcttcacgacagcgaccacagctagcagaactgagcgcacagcagcaagcaggacagtagaggctccggcacggggcgagtacggagaggtagggaaccagctcaacgtgggggctatgatttatagggcgaggaggtagtaacggcgccgcaggatgggcagaggacgcgagcagtctgtatccgtgtgtttggttgggcgtatgttggaaggctggctcgctgcatgcgttgactagatctccgcgcgtgttaggttgcccgcatacaaatatttagacatgcatgcaccggtgcatctcagtctttgcgggagctttttacctgcattggtggatacgcatggaagtg

SEQ ID NO: 125778 - DNA, 381 bp, Zea Mays
gcgtgtctctgtccatctaccgcgtcaccgtgactccttaccaccgtcccatcgtcgccggtgagctcgccacgactgtggacacgcactcacgcgcgccagtgcctatttctttcccgaccgccgcgcgtaatcgctcgattcatcggccaccgcccttggagtctataaattgagtgcaccatcgtcttcattaggtattcgagcagctagagcacccacctgcaccccaaaccccccaccagagaactcaaatttgagattttccccaaatcaagtctctgccaccgtgaaacccacctcaccgcggccagccctttcccggtcagttcatccctcgctctccctcgtttgagtacccttgacgctctgggatgcttg

SEQ ID NO: 125779 - DNA, 759 bp, Zea Mays
aactatcccagagcccagaaaaaccttaaatgctcaaaaatctgatggtgctcgcccaaagcgccttcgccaggccagtcatccaactactcctgccgaggggaaaaagaagaaaaagaggaggcttcggcgagtgtcatgtttgaatcaggatgtcggcccttctgctcctgctgctgaggaagtgccagtggaactttttactggagctgatcccaatgggtgcaatccggccagagctgaccccaatgggtgtgttgttcgtattgttgacgaggatgaggaagaagaggaggaaatccccttaattcggaaaaacagtcggcgttacctagtcagtggggagagtagtgatgttccttctccagctttgtctgctctcattggtctgcaagagttgtccatagcaaactttgatcaggctctcgaggatatggttcctgaagatctgctgtccgagccaacagatggtggtatgatggacgtttgcactaacattccggatgtggggttagagttatcccgagcagcgtctcgagcctcatcgaccttggagtgcggtcttcagagtcaagaagctggtctaggttgctccattcccatggaggtgactgagaatccttcagccttagaggtggctgttgcagagaacctggtccccaaggatggcgctagtgattacccagcccccgagggtgttgccggcaatgatccggcttgggtgggcagcgcgagctacaacccagcccccgagggtgc

SEQ ID NO: 125780 - DNA, 282 bp, Zea Mays
gctgagacatccatgtcatgcttctcctgctaatgtcgatagcacagtctgatggaacagaaagtcaacacatcaggtctatttggtgacagttagttgaaatgttggaagggctttacaaataactaaatagaagagactataaagtgaacttatcttgcttggtctgctctatttgcacagaggaaaccaaggcctggttatttgtggagcaatactcctcctgtaactcttctgcacgtggtaccactgtagagttcagatatttgaggtctttgctag

SEQ ID NO: 125781 - DNA, 276 bp, Zea Mays
ttattttgtattaaaaagtaatttctataattaaataactgaatttaaagaactatggactaggcctcaatttctgtaaatgccaggggcctcgggacaagaaacccgagacacagtcaacagttacaatggaccgcgggttgttttctataaactacagggtttcttatgcaaaaggcttcagccgaaggggtatcttgtgatcacggccgttcgatttccaaccgagggcccagattagatccatgcgatttacacaaccacgcacaatcctgc

SEQ ID NO: 125782 - DNA, 516 bp, Zea Mays
gacaaattataatctcaaacaaaaggatcctagtctgctttgacctttcaaacatacaccacatgtgaacaaccacttgatctcagtttctcaccttgttgctgtgtcatcaaacactcgcgatttatatcaatccaaacgctcgacaaattctgaacacacaaaccagtgctatactgacatctgagtacgattactccacacatgcggttcagatgatgcccgaaatctgcaatacaacaaccactgccacaaccagcaaaacgagaaccgattcttccctaagctgtaagttgtcacaactgaaaggtcctaaccggattcttccttgagtgagtatacacaactgaaaggtcctcggtgtttcgatgttttggataacaatacaattaaaaatttaatccgaatgttaagggtgtatttggtttgacattcgacaagccaaaagccaaaccaaaaggcgtagactagaaagcagcttttttcaaaagttagctttcacacattgcaaaattg

SEQ ID NO: 125783 - DNA, 950 bp, Zea Mays
ggaagcatgaaaattgagttcatatatttcttcgatttgtccaaaataatcgacctcgtcaaggccgggcctaaagactccagaacacgtttttcgattgggccgactttggtcgtagcttgttgtgcgaaaacggtatccattgacgtcatacctagaatatttcttgaccctgtaagcaaagtcgttggctacttgtctcaactcggtactcatagatggatctctttggccctgcaagtattcgcaagttaaaagacgctcagttgagtttatagacggatctctttgacaaactaagcacgtaccttatgtttgaaccaggaaataaaatcaggcaatccatttcccgcaccctttctaagaagggtatcatattcctatggagttgggtcccttgatcgacgccagaattcatgaagaaattgttccatgtatggcgtcacctcttcaaggttggtcaatacatatagcatgatatggcaccactcttcatgtgtcagggtcttagtggtcgaaccacttgcgcttccgagttggcctcgaaatatgctgaggttcgattcatttcctccatcattgtaatgagggggtggattatgcatgctcggcagtttgtcgccatagtaagttgttgtgaagtttgacacctcctctaaaatgtatgcctctgcaatagaagcctcgattttcatctatttctacatttatttcaaatagtctttagacatatctcgattggatagcaccaacgtccctgaacgaccccccaatttgtgcctcataggggagatgaagaatcaaatgttgcatcggattgaagaagtcgggtggaaatatcttctcaagcttacatagtaacacgggtgtcaatctttccaagtctgtaatcatggtccgagataactcttttgcacaaagctgacaaaagaaatagctcaactctgtaa

SEQ ID NO: 125784 - DNA, 275 bp, Zea Mays
ccggcagtgtgtggttgggattaaatcctagtgtaccgtttcggccgagggagtagtggtcgttgatttcgcatcatacggttgttactagatctagaggtaattgaatccggatcctcgatcctggatccaacgaccctcgcagcataccggttcgagtaagcactggtctaatcgtggccatccactttagatcggacggctgtaaaaacgagataccccttcgtgggtccattttacttaagagcccctctgaaatcctgaaaataaaccca

SEQ ID NO: 125785 - DNA, 557 bp, Zea Mays
cttagagtgcatatacaatttgttgagatgtatgtgtcgacacttgtagcttttaaataacacaattctctagttgacataaagtcgttctcttatacacccttatgatttctcgtgaaatcccaaaacgagaatcaagggtttccgataacctagcctcatcagtgcgcactgagctaggttgtgaatgtcttccattcacaggataatcaatatcctttaggtgtccaccaacgctaagttggttaccaacgaatagatggtctgcatttactatctcagaaggtctagccttcagctgcttgcaagcatcttaatcccaatttgtgaccatacttctcccccctcttatttacaacatcattgtaatagggagttgagtggtgttccatttaaccactctttctggcacttccacataggattaatttgagtgacacctcatagtaaatgcacatggcagtcaatttgcaacttcttgcaaatcattcgaacccaaaggttcagttttagtacgtgatcctgagcctgaatgcttactgcattcatcatttcct

SEQ ID NO: 125786 - DNA, 401 bp, Zea Mays
gtgttattgtaggtgccgtcgggtagggaggtggtattcttgggaagttctccaaagttctcgttatccttgttgtcccaattgcttccagatcgtcggtcaaggaagtcgggaatctttttctccatggtggtggagagtgaggttgccttgcgggtgcaagacatccatgtggtgtgtgactatgccgacgtgtttccaacagagcttccaagcattccaccggagcgcgatgcggcttttgaaatcaaactgattccgggtacgcagcctattcataaagccacgtatcggatggctccaaaggagtaggtggaattgaagcggcaattgaatgatctgttggctaagggtttcattaggcctagcaggtcaacatggtcttccccagtattgtttgt

SEQ ID NO: 125787 - DNA, 365 bp, Zea Mays
ttaattttttgcgggggatttttgcgtgtatattacatggctccgcctcattaaaaacctcacccccgggaggaaaagagtgcgggccggaataaaactgtttggtgaattacaagggcgtgttagtcttgaggattcaaacaaaaaatttactgagattgtcaatattccatgaatgctctaagtcttcgccggatggcgttgttagcctgtacgcgctgggggacgccttcgtcttgacgatgaagggaccctcccactttggctccaacttgccctgtgactctgtccgagttgtacggacgagtacgaggtctcccccgtgactctgtccgagttgtccggacgagtacgaggtctcctta

SEQ ID NO: 125788 - DNA, 609 bp, Zea Mays
cattgtcaacagcaccatcataaggactcaaagatcagcacaaatagaatgaagaagaagaactcactcgaatgaccaaaagccagacaaaagccaaaacatttcattagagcgagcaaaaacatggtctccaaagaaatgggcaacaactcaacatgaccaagtaagagaagttagtcctcaagaagaggcaaaagaagggctcaacaccactagccagacgtcagaatcaaatcaaagcataaaatcactaggagtactgaaatcaaagctagttcatctagacaggggcgaatggctcaacacaactagcaaaactcagaatctctccccctcacagattcctgctcacactctgaaagacacccccatcgacaagacctcaaaaatctagaatattgcacccaacaatctatgcccagaacttctccctcaaaaggtctagaatttcaccccttattgacaaatgaactcatcaaaccacaaacaagggtagaaacagaaactcccccttgacaaaagatctcccccttaagaaaatgcagagatgcaaaagaaagagtagaaaatggagagaatgcaagagcttctggagtataccggtcagag

SEQ ID NO: 125789 - DNA, 611 bp, Zea Mays
tcaaaaatgaaagaagtgtaagatgggcagtttaccaccaccatatacaaatctgttgtacttattgtgtataaatagaaagcattgaagcaatcaaacaaatacttaaaaaggaaaaaaaatgcattctcgaacacgcaagggaattgcatatcgctgtattaattaaagaagaaaaaactatatatatgccaacccaataggacacaacctcgacctcaaacacctaagcatctatgaaagggctagttagaaacgaaatctcctattcccttagctcctgccaaactccaatatttcatctcctcagtggccagcaaaagagcacaatgtagatatggtgatccacctgacaatggaattcagcccttgcagcacttggccactgatcatgccatttgtccatgccaccaaccaccaaagaatgtttcttcagattgtgtagataaactccaaatgaacaaaaaaattaaagagaccaaggagaagttgaaactgagtggtcatactatttaccatgaaaatatataaacaataactattcaagtataaaaaaaagggcataataacaattgtatatgcacaaaaaactctatatcaattggccaaac

SEQ ID NO: 125790 - DNA, 616 bp, Zea Mays
ctattatcaaggatgaggttttggcagctatttcaacagtttggagcagaaaatttgataactttggtcgtctgaacacagcctaagtgacccttattcctaaaaaggaaggagcgggggaggttaaggatttttgtcctatcagtttagtccatagctttgccaagttgatcaccaaaattttagccaacgggtccagaaaattgcagtctatggtctccttaaagcaaagtactttcatcaagggtcggtgtattcaagataatttcatgcttgttcaacaaacaacttgtttgctctatcaacaaaaagaccaagaatgttgcttaagttagatatcacaaaggcctttgattcggtttcatggtcattcttgttgaaagtgatgcatgtgttaggcgttgggcaaatatggcgtgatattattagtggtccgttgggctcttcttccattatggtcctcttgaatggagtgtcaggaaagatcatccatcataaaaggggttaaggaaggggggtcctttgtctcctatgctctttatattggttatggatgtcctcggtggcatgatttccaagctgaagaggaggggctgctgcactccttatctacgag

SEQ ID NO: 125791 - DNA, 759 bp, Zea Mays
ccaaatggaccttattgtcaattattcaaaaacggagggaagttaatatgcacatgtacagcactacagataatagctgtgcatattccaaccaaatgtccgtgaaaatgccagttgagtgccactaaacacacaccaacttaaagttgttcgatctgtacgatcaccaatgcaagaccacccaaggtaaaaggaacagagttcattccaaatcggattacgggaagaagagatgggagggccagcttgtcaagagacgaatttgggcgcaatttattagtagcaattattataaatagacctggttagcacggccccgtgagatccagccagagagccgcggggtgcgagttgagtttggatggggggaggaggcatggagcgtaccgggcggcgcagaggatgagcgggcgacgagatcgggcgggaaaagcgctgggtcggagaagaaagcgcggaggcggagggcgtgcgcggagcggccgtcctcctggagctcctgcaatagctctagcgccgtgaggtgataccgctcctccagcaagaagttcaccacgcagttgcacaacgaagcccaccgctcgtccgctgcaccaacgcccactgccgccatcctccttggtatcgggcgggcctacctctatcgcggtgaagctcgccgggcgtcgttgtgtggcatgtggccgcggcggaaggcacagatctcacgcgtgtgactcgaggccggtgaaagaaggggaaggagacgatggcctggaa

SEQ ID NO: 125792 - DNA, 625 bp, Zea Mays
gcaatattctgagccaaccagagtcagatcctgatgactggagggaaccaatcatcagatacataaagaatgaggaggagccgaatgacaaaaatgcagcagagcgcctcgcaagacagtcaactcactacactctcattggggaaacactatacagaaggggcgcgacagagtcctcatgaaatgcattctttcggctactgggaagcaactgctagatgaggtccacgctgggcaatgcgggatacacgcagcatccaggactctagttgggaaggtcttcaggtccggtttctactggccaacggcaaagagtgatgcagccgagttagtctagaggtgcgaagcttgtcaatatttatcaaaacaacagcatttaccagcacaacaactgcaaaccatacctgtaacatggccgttcgcgtgctggggactggatatgattggacccttcaagaaggctcaagtaggatacactcatgtactggttgctatcgacaaattcactaagtggatagagttcaagcccattgcttctctaacttcatctaaggcagtggaattcatacaggacataatattcaggttcggaataccgaacaacatcataaccgacctgggatct

SEQ ID NO: 125793 - DNA, 295 bp, Zea Mays
caagacacagggcacaatacactggacggcgggtttatttttaataacgatggaggctcatatgcaaatgcgtgaccgcgaaggggtatgcacggtttctggccgccagatcgcgaatcaagggccacgattagatctaggttatcatcaaccagtacacgatgaccgcccacggattgaggatctacggcccggatctactcaccccatcttcctctctacaccgttcatcacaaatggatgcctcagatttaatcacgcgaaacgatatgatttggtctaatctagaccgtcg

SEQ ID NO: 125794 - DNA, 308 bp, Zea Mays
gagagatattatgaccggcatcagctataagagacaccgggatcaggattaggaggcttaaagagccaagttatcattagataaggagatagctattagaagctattagataagagttagtaagataagatgagtggagggactataaaacaactatgtacgcctctatttggaatcaagcagaagcaattactattgctcgcttccggaggaagcaaggcgaaccctagctgccaccccttttcctactctcggcttgcggcccactccgtgaacagtaatgcgggtactatagccacccctactct

SEQ ID NO: 125795 - DNA, 373 bp, Zea Mays
tggttctaatcttagccttttccgctgacttctcgttttcagccaagtcaacgatacgagacgtgcgggtccgtgctattcctgataaaaacttggtcgtgctagcacttttttgcttctttgccttcaaggggggaaccaattttggtaccgcagacctcttttgtggctcacttgttgtttgctcagtatctttgggtgggggaaggaggaaaattggacggcgatgctggtggcggagggttaggtggtgatggtgggtcaagaggaggcacgatcggtgacgatggtggggtaggaagaggatgggcaggtgataacggtaggttagcaataggatcggcaggtgatgcctcctgaattagtgggaggg

SEQ ID NO: 125796 - DNA, 488 bp, Zea Mays
agcgagacaatgctttgagttgccatctccgttcacaggaaggaagagcgggaatcagtttgtaggtgcatcattgtcttcgcccatccaacaggtgagctccgcgttacattgcacccatgttaccatgatttcggcgatcatcataaaggattgaagatgggtggagaggagttcgggcaggaagcttttgggagggatgatggttttatctatcaatcacaaggccgataagggtggataacttggaagtttgtaaggatcactcgtttgcaaacaagccattcaagagagaatggtgtgaagatttgaattcatcccagtgggatagtcggcatcagagggcaatttctcaaataatatcgcttgactccacatctaaggagtgggataatctcgacgcttctaacaaccatcatcgtccttggatgcccatggaggtgcatcaatacgcgatccccatggatgtccttactgaccaggaagac

SEQ ID NO: 125797 - DNA, 830 bp, Zea Mays
gtgacgatagagacaatatcctccatttaatgacagacatgatcgagatgaagtccccctcgagcattcgttgctgccttcggaacctacatccacatgattcaaagattagcatatgattagtcataaccaagtagaacatgatcgaaatctagttggaccttctccccaacaatttattcatatcttgctacggtggtagttgcttgtagtcgtaactagctagagcttgtagttgtaactaatttagttacttgtttttgtagctctaattgttcttactaaaagtatactttggtgcttgtgattagaactagaaaacaaagctgctagaattgcctgggaggtttgcttggctaaaactagagctagtgaaagtagaggctattaggatttgttattttacaaatcccccttgcactagtgttgtgaattttgcaggaaactttatataggatattcacccacctccctctagccatttagatcctttcaaccatgcttaatctataagcccactactatagtccaagctttgatgaaatgagaatagatcacttcataagaggagtgaaacccatgcaagaaataaccaaactaaacaaggtagttaactaagaaattaagcttatatcaaaggtctaagtatactactaaaggtaggaacacttgaatggagtacttgagtaaataagaaagtttgtattcaaataagggaagtcttactagataggaaaggtataaggtctatattaccttctgaagactacttttaaactttgagcaaagcttaactaaactctacctcccattactagcctaactacaac

SEQ ID NO: 125798 - DNA, 1173 bp, Zea Mays
ttcccctcctctctctctttcaattctctccccttttgcaatcagactcgtcactcgcgcacaaattccaccactcgccaccctccgtatgggaggcaatcgtcggggatttccggcccaaccacaggttgcacagcctccgtgtcaggaatgccacaccggcctttggaaggcccacggagcggctttgacgggcagaaatagaaaggaaaaaaaaaaacacgacacctcccccctctgcgccgccctcacccaccgccgtcgccacctctctcaccgcggaacaagacgctgaggaagaagagccggtacggagacggcaagaagacgcggagcagtacgtacgtctccgatctggtgagcttccacccttttttgcagcacttgagcgtcagccgagattagcgaggtagtgcgcacgtcttcaggtactcgatcaacacatccagcgatcatgaagggtagagcgcgtggcgcggctagaacgttggctatgggggatggcatggcgggagtggcgttcggtgccgcgcggcatgtggggctgttgtttgttcccagtcctgtttgtcgtcttcctctaaatatgcaatacagacaacagaaaacgctgccgttagcagcaccaaaacctttcctgcgtgtttcgcgtgagcgtgttctgcgttcccaggttcatcgccggcggtcatctccggtgagctccaacaaagttgtagaaatgtttggtttgtatccacactagccctgtcaactcgaatcctctttagatcacctggatcccacctcccaggtggatcctgtcctgacaatgacaatttgctaaaactgaagcacgcacgtatattgaaggagagcgattgtatgtccaggggactcttgctgtgcatggcgattgatttgtctttgtgtccttttttcatgaagtgtactggttttagctgcaactctgcttgaattgcagtaaattactctacagaggagctgctataatatttgtttccaaaaatctgagatgtaatatgtgtactgagaaataagttggatgcataaattaggtgtttcgtttgtaaagcaaaaggcttggttggtgtgaaagtagcacaataaagcatctgactgccttatcttactgttttttttagctgggccggtagtagtattcttagggcg

SEQ ID NO: 125799 - DNA, 342 bp, Zea Mays
ctccgcgtcccccgggagagatctatctccaccagggacaggccaccgttttggcacccgatcccattgatccgacaaccattgttgttgtcaaacaacaccagatcgtgatgggtcttacttgggtgtcgtcgtcggtcggttgtccatcgttgcatcaaccttctcgtcgttgggtcatgtctcgtcgttcatctggtcccctcggcatagtgtcttgtcttgcccactagcgctgcatagcgcctaactatcttgaggcccacggcagtgtccctctactcgaccatttgggcgaactgaagagcagcgatgtggtccgcctgggtctggcggcgcgcg

SEQ ID NO: 125800 - DNA, 839 bp, Zea Mays
agggaatctaagaccagccttcaaaacacaccgaaacacaacgacttcgtcttccctttgactcggtactaattcatcacctcctaaccgcaccctctcaatattgtcaatgtagccgaagcgtttaagtacctcaatgtgtcctttgatcttggacttgccgaagtccacatggctaggcttcatggggcgtatgatcgtgctgtcgtcctcaatatcaatattgtcactgtcttctgactaattcaaggaaccaacttcggcctgagaagtggtggctcccaccactgaaacaaattccttagcccgtgcctctagcacatctgtcgaaggtgtcagcgacatctttgcagcactctaagggaagagcaagtaatatctaaactggccaaggctggttcaaaaacatgcaaagatgttcgaaactaacttcgaaggtggagcaggcactaacaacagcgaatacaaatagcaagagtcgtgccctataacactgggtaccaccccttttatacgcgcaaaccatttgactttaaccgtcgcactcaatgaccactgggtccaactatgcagtgttgtcgttttcataacgagctttgggaaggtgttttttggaccttcggcacaaggcctcccaattataatttttgcgctctaagcttgttatgaagcaacaaactcatccctcaaggggctactgttgcggacctacattgccgaaggtcctctgattaattgtattgcatgactgccttaaggatacaacaaaagccatgccgaagatcacttgctgatgaagagacagtcagctgactaacacatggcttcaccataagtaa

SEQ ID NO: 125801 - DNA, 711 bp, Zea Mays
ggtttatatgggtgaatatgagtgaagtgtgtgcttggtttgaatttaggcgaagaaaatgaaatttgggcactcggctcggaaacgatcgctcgaaacggggaatttggtgacattaaatcctggaatatcggattggcatgaaatttggcgaatatgttactggaggtattgtgaaggtgcctgaaaaatttggggtcaatcggagcatttttggctggtttggacatttcaccgaacacgtgacgtgcgaagttctagggttttggagaaatggctattagaggctgtgaaaccctccctaaggagctagaaacctgcaggagtactcaaggaacataaagggactcaatcatgcacttggattcacaggatttgatggaaattggaatttgaatcaaaaggtgagtgagagctccaatctggtgaagaacagagagagagtgagtgatagggaatcaggggagtctcaccagagaagaggacaggattgtagcacgggttcgccggaggattgccgccggtgagggaggggtcaccggagcgcaggaggagtcgccagagatcgagagagaggcagtggctagagagaaacagagcctggcctcgggctcgggcagggaaaagattttttaaaaaccgattatgggtgcaccagacagtctacagtgcctatccggtgcacaccggacagcgcataggagaaagagg

SEQ ID NO: 125802 - DNA, 463 bp, Zea Mays
tgatggacggtaacatgtgtggtttgacaacagtattatgtcttccgaaccggaaaataaaaattttgcccgtcggccactcaatcagtgtgtactgcaggtagggacagatggaccacaggcatccaaatctaatagggagaagacgagagatgggatgtaagctatagccatcggatggtgtatacggtcagatttatagagtagaacttaagaatttgaaatacaagaaactgctagagatagccagatcgtgtatatggtcagatttatagtcagatttatatagtagaacttaagaaattgaaatagaagataggatagaagcttatgttatatgcagtacaactaaattgtatatatacacactgattcaaagtatttgtggccggtctaagttaatcggtccaagatataattgaaccgaaggtttaaccggtccagtgaataaaaaaatatcatt

SEQ ID NO: 125803 - DNA, 355 bp, Zea Mays
gtccaagctccggtaccactgttaggtgtatagaaccttaggttgttaccctagctactacaaaatgaagaaccaagaagtataccttcgggattagggagagtggtcatgcgaggttggagtccaggtttgagtgtcattattggtgacgacgcctctgggacagtagaggcagtgacctaccatccagctcagtatagagataaattgtatctcgttagtctgtgtatgagcaaggaggcatggtgaatattggtatcacgtgtcgaccaactgtgtatttatttacatggtatgaagggactgcaaccaagaaggttatgatagcctctatcaaggtgcgagtgaggttccg

SEQ ID NO: 125804 - DNA, 365 bp, Zea Mays
cagtaatgctctggtagaagtaggtagcgctattggggaaccaaggattctaattgtgttaaaaaagacagtggcaaagctccaatcttgattgctgtaggtaaccgacctcggaatccttcgtaatttgatttgcaagatcacccccataaaggcatcactaatctttatggcaacagacataccagactaaatggataacagctcaacagcaatgttggttatcagccaagagcctaaactcctttgtcatgtgttaccatgtcagtcctgaattatgcattgttgtggatcttgaggatctggctacaagccttcaacttaactgttatagatcacatgatgatgataatatgtatattcat

SEQ ID NO: 125805 - DNA, 464 bp, Zea Mays
actgcttcggcaggactcattctgggtcgtccatagcgtgatatgtggtcgcagattggatcatggcgccgggcgctactgaccgttgatattggatctgtcggccatgattaggtaccagtttgattaaaaacgcgatctaatctgaaccgtccggatcagatcatgcggttgtgtgatgtccatacctcttcgccgtgtaattattgcaaaagagaccctggggttctacctattcaacccgccgtccacccttatgctgttaatattacggattggtcctgaactttatgagttagaccctaggcttctgcaaaattgtgtccgcagtccagaaagtgaataaatggaataaaataattcagaaaatattttctaatatagaaataaacctagaatcttagttaattcatattcaattcatcttagctccgaattaatttattccagttgctataaattca

SEQ ID NO: 125806 - DNA, 407 bp, Zea Mays
agatgttccagaatcaaataaaactgatgcaactatgaagttaataagaaatatactatacaccacgtcagcatccttaggaactaattctgctgtcaaatggttgactcttcctctactctggttctgcggagtcctgttctgtgcagatccacgagcaggtgtgttctggttagtcctttggttgttcttcttctggggtgtctgtgggttatgcctaggggcagttgttggcataatggccaagttcgccacacttaaaacaaccattgggttgaacaggagtagttgcattgttgttcatggccggtgtgttcacgatgcttccctgacgattctactgttgcccactagacctttggtcggtctaggtgttgcttctctgctagttctggtattgattgttc

SEQ ID NO: 125807 - DNA, 709 bp, Zea Mays
gggatgggtgcattgcgttcgtgagggagtggcgaagctcaagaaccatatgaattggactgggacttagcagagggaggaggtcggagctcaccggagaggggagcgacgacggcgccgagtccaattgagctcgagggaggggaggtggagtggctgagttctggtgtggaggaacaaggggctcgggcggacccttttataggtggccgagagggggaaggaagggaggggacggcgagcgccgatgagctcgccatgatggcggggatggagcaaacgacgacgggatggctcgggcaggcgaggggtgaggggatggctcgggtacagtggcggggaggtagctgaggccggtgcacgcgttaatggcgaggcgacggggcgggcggtggtcggcggtgaacacgccggtgaaggcatgggcgggacaagggacctgacaagcgggctcgggctgccagcgggagagcggcgcgagagggagagggaaggagccgctgaccggtggggccgggctgtcaggcgcggcacgagcgcgcgtagctaggccgcttgggccgtgggaggagaggggggtaacgggcgtgggcgcggtttgggccggatacggcccagccgaggggggaagggtttttcctttttctttttttctgttttctatttcacatttccattttctatttttgtttctttttatttccttttc

SEQ ID NO: 125808 - DNA, 405 bp, Zea Mays
ttgaaattatctgaggctgaggactttagagatatgagggttgatagaggtccctagacgactaagagaacatataacttttgttgttacgagcgtcctagggcctggatcttagatcattcttgatgttagaagggtccgagatgctcgggtcttagatgatgattcttatggacgtctcagggtcctagtttgttcgtttgggatgcgttagcttagaatagctttttattccatgcaggcggtgagaccatgctcccgaagtggtgagtccctactagaattgttatgattgaatatgtttgaaacttaggatacacaaattatgtgctgaagtacagatagttgttcgaaactaaatagtattcactcgtgttccgttccacagtgaaaacacgttcttta

SEQ ID NO: 125809 - DNA, 706 bp, Zea Mays
tgacgctgaccccattgggtgcaatccatctgtcgctgaccccaatgggtgtgatccatctgtcgctgaccccaatgggtgtgttgctgatgaaaatgatggggaggaagaaaatgaggtccctttgactcggaagaacagtcgacagtatattgccagtggggagagtagtggagttccttctcctgctctgtcagccctcgtcggtctacaggagttatctctggcgaactttgatcaaactctagaagatatggttccagaggacttattatcagagccagcaaatggtgacgcgatggatgtttgtgctgatgtgttcgacgccgggttggggtcatcccgggcagcgtcccgcgcctcgtcgaccttagagcgcggtcttgagggccaggaaactgactttgtttgtcttgctctcatggaagtaactgaggggccttcaggcttagaggcggctgccgcagagagcctgaccctcagagatggtgttaacgctcacccagctcccgagggtgttgccggggatggttcggctcgggtgggtggcgtaagtcacgacccagcccccgagggtgttgccggagacgatccggctcaagtgggcagcgcgagctatgacccagcccccgagggtgtccgagcggggtctccctcttgtacttccatggatgttcacgttggatctcctccacactctggtggc

SEQ ID NO: 125810 - DNA, 375 bp, Zea Mays
cggacatgtggttaccagcgaatggaagctagctgttggggtcgatgggcgggatgattgcagcagcgatgctctacctcttctgcttgggggccatcacgatctttgtggcggaacgagtgggctcagaaatttagaggaagcaaaggagcggatgaagagaaaaagtgaatctagggctcggaaatcaaaaaggcacgttggcgcgagtataaatggggttttcttggttcgggcactatctctaaagtgctaggtcactactcggaaaagaaaacctcgggcatcactcgacatttacctctaaaatgctagcagtatcaggcacatggacgaactatcaaacgtgcaaacagaaaagcagcgaaacatcga

SEQ ID NO: 125811 - DNA, 573 bp, Zea Mays
tgaaggaagtgcgattgaacacagtaattcagtcagccagataccagcagaccttgaggcactatcatgataaagtcatacgacatcgatcctttgcagtgggagacttggtcattcgctgaattctaacgggggaaggacgacacaagttgtcaccactatgggaagggccattcattgtatcagaggtcactcggccggaatcatatcagcttactcaaatggatggcacgaaagtgggaaactcatggaacatagagcaccttagaaagttttacccttagcaaggcctcaaaagctatcgaagcaacattgtactctgtaattggagaatccatcatcaataaagttttcgttttcaaaggcattcaaactcttgactatcaactgactccgattcaattggacttgaaatcaacacgcttactcgacttagggtgaccactataccctactgatggagcaatcggcttaagtcggcgacgacttgagacggtgcaacatgctcacgcttactcagcttagggtgaccactataccctactgacggagcaatcggcttaagtcggcgac

SEQ ID NO: 125812 - DNA, 1160 bp, Zea Mays
tacttcagggtattgaaaattctgaggtaaaagatcagtgtaggttagtgagggcaacgtgatttttagttattactctgagcaagttttagctcttatgttaatgcataagctttttgtatctcctgttcaacagcattgttgcctagttcatgtattatatattagttcgatacatgcatagcgtgattgataatacctgaatgaatttgaagacatatatgaatgagttccttttcatgagcagacgctgccactggtagttggacttgagaagctcaagcctcttgacaccgtaacttgatgtacaaagagctgcaggatgattgtgatgtcggttgtatggaacagttaattcctgatgcaatctcttaccaataataaatgttttgaaggcttcagcaaattttgatacagaaacaaattggtatggataatcatagtggcaccaatactgctgttgatctttcttggacaaaacctgcgatgaaagaaacgtgaatccacgagaaattccagtcggtatagaattcaaaagtgaagaggtgtgtacttcttgcaaaaaatcagccacgttttttctttctggacacctgaatcccatagcaccaaaaaagtcaactgcatattcacgtggaccttggtatacgatttgaccttcggctataagaatgacatcatcaaatagctcatatgtttccggagctggctgaagcaaggatatgattgtagttccgtcaagagcatgtgttgaattccttaggtatttgataatctgatatgtagttgcactgtcaaggcctgtcgatatctcatccatgaacagcacgcgggcagaaccaactagcaattcacctgcaagtaccacaatattagcacaacttgaacactgaaaagagcgtgctattttgcaataactaatttcagctgacagcgctagcatacttaaatggcagtaatatgcagtcacctgttgtcaggcgcttcttttgccctccggagatccctttgatcatttcatctccaacaatagtatcagcacagacgtccagtcctaaaatcttggctagatcaaaattagcaatcagaagtcttggcacagtaaagtaatcaagaagttataaaaaaagtaaattgtgctaacaacttttgaaaataat

SEQ ID NO: 125813 - DNA, 608 bp, Zea Mays
atcatccttcgcctccaagaaaaacacctacgaatagtaggaaaagtcgtaaacaatcaccaaaacttaccacttccccccaagtgagtaaactataactagaccaattgtgtctatgtgtagcaacttgctgggttacttagttataactaaggtgacaaggggtgagaagtggcaaccatctttccatgatgacaaggataatagacaagatctttctcatatttaaacttgggcaatccttgaatgaagccaagtgagcttaattgagctaaaagatcaaagatcaaatgacctaatctcttatcccacatccaaatatgaggaagattctactacaagacatcgagaagggccaaaagaacgggaaaatagcacaaaaactagtccaaatggggaatccaacaaacaagatctccttttacatccaaaacatgagaaagacccttcttaaagcacacttcataaccatcctcaaggaattgtaaccgaaaacagattaaaatgtaaattgaaaaccaaagcaacatcaaattgaaaaccaaagcaaaatccttgaaaacaaagcactcattcacccaaatggtgccatgagagacaaccttacc

SEQ ID NO: 125814 - DNA, 406 bp, Zea Mays
gaaaggtttcatccaaggcatgtctgaagtatccataacccgatgtagggtaaggaaaagatgggccaattttagggtcagttggggcagcacaggcaagctctcagtagcaaccttcacacaacacgtttcgtccacctgctccgagaggagaaaggagaggccgaagctttggttgtagattcaatgcaccccaaggaaaccattctgcttgttttgtggcgtggacaaaggctacaccacaagaacatgccatcataccatcgacaagcagaggagcttgcttcatcaactgtgcaaccctcatagtcaaaagaggtgttcagtacatccttatactattcaccatacatcccacaatatgtccagcctcagtcacaggagccatggcaaagtttgccttcgg

SEQ ID NO: 125815 - DNA, 296 bp, Zea Mays
ttgtgttgcaccacttgccagccgtcttcgtccagtcgctagggcaccggccgactctgcaccttaggtcatgagccgaccaccgtcttctcctcactggtttgtttctcactcgtcgctggggtagaagctacacgatgcgtgggggtagcaagcaaggcttctttataggaatggggcgccagacatgaatccctagaagaagcagggctagggtcactccaccgctgggacttcagacggccaccctggtggtcagggcaacgtctagtcggggcacatagagcgagttcact

SEQ ID NO: 125816 - DNA, 394 bp, Zea Mays
atcaacaccagagtagacgacaaagtcttattgaggacaaaggctcagaaacaaacccatgtgcaaggtaccacggacgtagcgcaaagtgcgctcgagaatgtcaaggtgtggctcctagggatcatggacgtggagacagacttgctgaacgccataagatatgtctggcccggtgaaagtcagataccgaagagcaccagcaaggctacagaaatctgttgatcaggtacatggttgccatctactgagagctttggattgatatcaatgagcattgagcatggcttgcatttcatcacgctcaaggatctcaatcatatagtaccgctgggagaggaagagactcgagcctgtgtgttgaacatgcatgcctaggaagttatgaagagca

SEQ ID NO: 125817 - DNA, 587 bp, Zea Mays
gttggacctttctgacttctgtgcctccttttgttcaccatcaaggtcgtctgtgatgacccaaatccagcgatggttagggtttaggggttggcgagagcaatgtggatggggcgtgttaggtggaaggggcgagagaaatgtggatggcaatgagatagagcgggatgcggcgagtgaagtcggcgacgacgcggctcatcgacgcgatgagaggtaagggggcggcggtgaggtacctggtcgagggggcaggtcgtcgacggcggatgtgtcccagcggcggcggtgaggtacctggtcgagggggcaggttgtcgacggcggtcgtgtcccggtggcgacgattaggtttggagaaaatagtgggggagatagaggatgagcggcgtctgttttagtgacaacggcgaaacatgttttttggcgcccaatgtgtttggcaatgcggaggctaatgcgtttaagtatattagcgctgggtatatatcgaaaacatgtacatagctcaatggttttacctgttgactaagagaccaagctccaaggttcaagcacctgcaaggagacattttttgtgttttgcc

SEQ ID NO: 125818 - DNA, 413 bp, Zea Mays
tataaaggagtcccgcacttcctgccatataaagcttcgaatggtgacatcttcagactggcctggtaactattattatatgagaacgcatcatatggtagactcttgtcccaactccctccatgctgaagggcataagctcacaacatatcatcaagtacttgattagtcctttcagtttggccatcagtttgaggatgataggctgaactgaagcttaacttcatatccatattctcatgaaagcttttctaaaatctggaggtaaactgtgagcctctattagaaacgatcttctttggtacaccatgtaaacacacaatccgagccatgtataactctgccaactgagaacctttataagtagtcttgaccggaatgaagtgagccactttggtcagtctatccacaat

SEQ ID NO: 125819 - DNA, 629 bp, Zea Mays
gtcgtcttgtttctgatgattaaaacatggcataaaataaatagctaaacaaattgaacggtgactgcgttgactatagcacgccgcacgcccggctaaatatattggtttgtacgactggggtaacacatcttcaccatatacagcatgcaccttaattatgtgcatacggagtatatcttacaccggtcacgcttttgacgcgcgcgtatcttactttattatattgcacgaaggtacaacactacatatttacacagctcgatcgcctgatgtcgagttacacacactgacacgttctgagccgtcacattgacacgacggtacttcgcaggctacctacatggacgtaggtaaagcgtgcgctgaggtacagagctagctagcgaactaaaaaaaaaaagacgaggacttcagagtccaggacacgcacgtgtctcctctccaggcagctgcttcactcccagaccgcctcgttacggttgagccgtgcggccgcagccatggacgccgccacgcctccgggcctcgccgtcccgtcgttcctgttgcggttctccgcgccagccacccccaacgcatcggcgctctccaccggcttgtccgccaccaacctcgccgtcgcgttc

SEQ ID NO: 125820 - DNA, 422 bp, Zea Mays
agcagatccatgtacaggtgtgctggtggtagtattcgaatccgctcctttaatatgacttcagttaactacagaactaagcacatacaatttcaaaaaataaaggaagacacatgaacttgggagcagatagaagatcacggtcgcacctgaagaacggaagatgtgggccgcaacaagacgaatcgaagcgagcaagtccagatctaaggatggcgtccacgcttggagaggaaaacaacggatgcggtgacgaaaagcctcggcggagtcagatttgtgggcgcttcgtcttcggacgcgaacggtattgactgctcacgaactcgacgtgctccacttggtcctgctcgcggccgaccgaaaccggctccgattcgcccttccgccggcagatccgccaccgcatcgccggatttcgg

SEQ ID NO: 125821 - DNA, 593 bp, Zea Mays
ttgattttggttcttgatgaccatcacaaccttatatactaactggtttgcctagtctttaattcactggtgcataagtccactcaactcagagcccgacacttcattagagtttaacaactcgaagtgaagtgaagcacttcattagagtcaaggttcatcactattatctctagatacccaagtgctcaaagaatcacttagtgattagcatgggtgctttgtgaagtgcttagattatttataccatttcttatagtgtttatttaggtttaggcctagtgtttgagtgatgttagaacaccccttaccccttggtgcttgtgtgcactattgaaatagttgtaccagatagccttgtagtcttgtaagatcacaccaactgtgtttgtggtatagccaccaccgtgtactagagggagaggctcacaatgttttgactagaaactggatagtgaagatggtggagagcatccaaaagataccacaacatagcaccacttgcatgtgaagaagacccagattatccatgaagttacccaactaggagcttcgtcatcctatggtatccttgcgagggggctcaaacgagg

SEQ ID NO: 125822 - DNA, 566 bp, Zea Mays
ctttatttctcgtagtagataattggtagaaattattaaaatgtgtgaagcctatattgtgcatactcaaatcgctctaaatatttgtattgcgttgagcttttgaactcacatcgagcgattaaattgtatagtgggtactcggacacgccgattaggttgcgttggtaatcggctgagttatgacattagctgaatattgactgcgccttggcaacacgacgcagtatttgtgccgttcgaacttcgctgtgtcatgtgattgctatgtcgcgctctcgctaaatcggatcgctcccgttgagtcggagcgccatcgccgagtcacacatttttcgtgggccctgaaggcattgcatgtgtgtcgtaactattgagtcacagttgcgcttgttgcgcctgttgtgcctattgcgcgtatttatcgtgtaccccaactaccaagccacaactgcgtctgttgcactggttacaaaggtttgatgtgttgtcgttgccctgatggtcgcacacacgttgacgccagatacgctagagcttgtactcgcgtggattgtgatgggttg

SEQ ID NO: 125823 - DNA, 480 bp, Zea Mays
cattttctaattgattttcttaggttttctattcctctggtcgcgcacaaaattaaaccgaaagccaagggttaccaggcaagaaatccctagactcagggcactatgcgcagtactgtgggttgatttctaataaagctagggtttctttagcaagattacatggatgaaggggttccttgcgattctggccaaccagatcagatcctacggcccagattacatttaccctaacatcaaaacggtatgcgcagggcaccgtcgaatcggcgatctatgttctagattaaaaacgcctatgatcaaatcctgttcacacgatttcatattcacggcccacattcgatcacgcgaaagggtaagccatggccaaatctcggtcgcccatccataaaacaacggtcaggccctatctcctagcgtcggtcgaacagcgacggcgggacaggggcgccacggcggcgcgccatggccggaaac

SEQ ID NO: 125824 - DNA, 599 bp, Zea Mays
cggatgtctttttagtaaagacttcgggttgtgcacttgttgtgcttgtccggctgcacccttaggcggcttttgcgcggatgtctttttagtaaagacttcggttgtgcacttgttgtgcttgtccggctgcacccttaagtagcttttgcgcggatgtctttttagtaaagacttcggttgtgcacttgttgtgcttgtccggctgcacccttaggcggcttttgcacagatttatcgcacgcgagggtagtttacactacctgtcgcggtgacctcgtatatgtcgaatgtcgaaggccgttgtagcggtctttttcgacacttggtaatgatgcatggagttttttgcgggggttttttgttggtatattatatggcgctgcctcgttatttattgttgatggtgagttcggacgggactccgaagcggcagacgatgttttgctagaagaatttttgggcggtcttcgatgttatcgtggagaccgccctgacctcaatccactttgtgaaatattcaacagcgacgaaggtgaacttgaggttcccttgagctgtgggctgtggtccgacgatgtctagccctcatcgtcgaa

SEQ ID NO: 125825 - DNA, 708 bp, Zea Mays
cgggggcaggagagggacgaataaacacaggttgtctgaagggatatgtgggcgggcgaggagaagaacgatttgaattgaaaggtcagattaccaacctcgtcctcttttcagctccctaagttgatctttcacccgcatatccttttgacgttccttgtcccgtatttttagcttcaactgatagtgttgtgctgacagtcctgctatatgtgaggtccagacacatagctattttgcactgcagtttatcatttagtccactcatgaagaaatttttctttttcaagtctgtgtccacttgctcgatggtgtattgggagagatgatcaaatttattgagatactgcatcacagaatctccctcttgctttagacgtataaattcttctagtttcatctgtagcactccttccggaacataatgttccctgaatgccagtttgaactcttcccaagtgacttgatgtcctgcaggctggatggccgaaaaattgcccaccaggtgctggcagagcctcgcaactgttggacggcaaataggggcttctgtatctcggtgcatcagatcagcccgaacttctgttccatcacctgcacccgttcattagcttccaggggttcctccgccttgacaaagagcagtggatgggtctcagagaactctagataggtggtgtctcgtggtccttgagatggacctcttcc

SEQ ID NO: 125826 - DNA, 685 bp, Zea Mays
acgtccgctctccctcccacgcttgcttgaagagagtatgttggtctcactgtcttccccctcaagtcgctccctctcatgcccgcttaaacacacaggggcgatctggccatcgtcgtcgtgaagctagctaggctcaagcgagcaggcgcccgttaggtctggagacattcccctatattccgaggagcgcatacattacctatcttgtccacttcagtggagctagttcgaccaagccatcgccgttgacgcgcaaggaataagacgaggtgggtggggatttcagaggcagatatatcaggcaagtttggaggcggtgaggaggcgaagctctctatgctataataacacggatcctccgatcctaggcaaaaggatacttcaatggattggaggtcatccttggccaacgttggttcttgcatccccgcttcatggagggcaaggcaaatcctaaccctaaacccccttctccccaatctaaagttggatctaggatttgaaacaagatgtggctttgatttcttctcaacatcgatgagcaccttaatgaattttgtcctagtaagtctcctctatccatatgtaatacgtgtcaattagcaaaaagtcattagttaccctacactagttcaatttattggtcctcctctcctctagaaatgtttttttgatatttggg

SEQ ID NO: 125827 - DNA, 686 bp, Zea Mays
catgatatcatcattccatttttccttcttaattactgagaccatatacctgatcttctttgtactacatttcaatgacatgtttttatcttcatgtacaacatgttatacaatgttctctattctattcaagtgcatcccaaacgtaataccatataaaaattcagataaaggaaataggttaaatgtgatggacacttatactaaacgtatcaatctctgcattttccctgtttctttgttttttgattatttgttgcaacgatctggcattatttgtgaaaatatatataaataacttgctaattttttaaaatatgtgcccaaaatgatacaaatacaactcactccataaatgaaggtacaaataatagttcattaacattttttacaattcggctgaaggttcaagcaaggacccttgcgcatcagtgaagaaacgaacaataaaatcttccaagaactaaagattccctcgtatcaccgccagtcttttgagttgtgggatatttattttgtattatctatgtaatgatatgtatatatgttttttaaacaatttgtttaaatataacaaactaactccagatattgcaacagacatattaacccttggtatgtctcacctaactttattttagataaacctatctattctagactctactcatatgttctgtgtttgg

SEQ ID NO: 125828 - DNA, 773 bp, Zea Mays
ttgaagagtgagatgttgggtaagggacgggttacgcgatgtctcctaactggttcaccaagctcgtcggccgccgggatcaatcacatcgtcgcgatgagcgagatcgggactactagatggtctagcggcgcgacgatgatgagcgggataagggcgtcgggaagggagcatccgaacggtctggcttgagcagcgtcgtgatgaatggggattgatggatagatgtgaggacaggaggaggataagtgtcgaaaggactagaccgatccgccaagttggcccagaacagaaatttttaacccatccaaaacttaatttttctacacttaacaatagatgtacattaggtataataggttattgaaaattgagggggccatggtctacttttctgccctttggatcctcctttgcttcgtcctcagcaaagcttgtggaggacttgccgaagaacaggccatagtaggcaagttacattgagatgggccgatccacattgaagaagaaagatttgcaggtgatgaagaagcttggttactttgttaacagtgtcaatgtgcggctacatggggaagacacgacttcgaagcccaagaaatacgaagttgtcatctacaagtgttttttcatggctggacttcggctgccatgtatcaactaattgcaaagattttgcataagtatcaggtattcatgcatctgctgacaccaaaagctatttttcgcattggcgttttttctaggctatccgaagccatggtggatgcagc

SEQ ID NO: 125829 - DNA, 306 bp, Zea Mays
atttcttcggagctttgtgcatgcctgcccttcaaaatggtcatcatggctttccttggctgaattttggtacaacacaagtttccattcatcattgggcagttctccttttgaagtcatgtatggtcgtccaccaagacagttggatctaacaatggttgatgccacgtcactccaggatctacagacgtggttgaaggacatgaaacttatggttaggctggtacgccagcatttgttgcgagctcaacaacgtattaaagcccaagtagataaaggtcgatctgaccgtgaattcaatgtggg

SEQ ID NO: 125830 - DNA, 627 bp, Zea Mays
agtatttctagagctgaggagtagccctgaattcatatctctaagcgaggcaaattcagaactatctaagaagaacaagtaccaccaccacttaggcacaggtggttacaagcatcaagtttctaaatggagacaagaagacgccgagaagaaggccacagggttaccgactctttccgagcaacttggtgaaaggatggctaattggatccgtgttagaaaccccagggaaactaaggcgggtgtatcttttgatgatccaattgtcgaagaagctgcgaaaaacatatatgcaatggcagctaagcagagccaaggatcatttaagccacaaagggagggagacatcctaacggctggtctcggtaaccctgagcatcctggtcgtgtacgaggaatctcgtctaagtaaggatggaaggaaggattcgaaccataatgggaaggtttgtacaagaaacgtgatcgatacaaagaagagttgttggattattttaagcaggaggcaaagaaagagttcaaagacctgatgtctcaaatgctatcaaatcctccaccagaattgatgcaactgttggcgagtgatgtctgttcaacagatgaccactccacagttgcaaataattc

SEQ ID NO: 125831 - DNA, 338 bp, Zea Mays
tgaacatctatatatcgtcgtggacacgttagtagtgcttcttgtatgccacttatgagcagcttcgcaaaggtcattgaaaattaagtggcaccagtctgtctcatggaaacgatccatttcttccgtcagtaacacctcatggttagatatgccctagctggaagtggggaacaacaatctattgaataatataaaaaagaagcatctaatggagaggtcatcatcgtctccttttctcaaacggtcctgaagtgatgcaacaacgaactcatctttagacaaaccaagttcagccctcaggttattgcccgccactgcttcatcgatgcttagtg

SEQ ID NO: 125832 - DNA, 672 bp, Zea Mays
gcaccaacctgctggggaggttgaagacaaaaagagcacgaactctctggcggcaaattcaccggggaggatggtgccggcacaaatccttccgccaaacgccgacgtatcccatccaagtaggcggcacaccatgtcgagcacccactcagtctgggcatgctcgagatgaacttacaaggccatggtaaactatggtgacacaaagcagaaaccttgaaggcaaagggcgcagaaagctcgaaggcgaaagggcaccgtgagtgggagaaaagcaaggcatggctgctactcgagggatgaacccctttttaaaggcagattcccctgctcgcgccccgaagcgtcataggcaaagtctcccccgatgcgcaccagggttcccatcctatgacacgggggcccgacctcacatgtcatacagctggtccgctggtcccaaagtacgaagaaggcgaatcgtcgggcgaggagcgtgtaccgccccacggtaggtgtgccgcttcatctttgccgcgaccgatggcccaacctccgacgtgggggcctaggcccacatgtcacgcatctggcgtgccggttcctgagtacgaagaaggcgaaccgtcgtgtgaagagtgcacccccgcctatggtagtgcacctcttcgcctccgccaaaaccaacagccc

SEQ ID NO: 125833 - DNA, 420 bp, Zea Mays
atcaactgtccgcgcagaatttggaccgatgtgagttctcgatctcagctttgggcttgtcttcgaagtgcatgcatgttggatacagattcccaactcccttgtgtctgtgtagatcgcagatggcgggggactggaaagaagatggttccttccgctgctcgtggtgtgcttgaatccagtagtggtacacattctggtggctttatgatgaaaaggtgagtggtttctaagtgctgcattaccagatcacttcaaaactgtaagttctgatttggtgacaagggaattggagagtacatatggaaggaaatagctggctattcaattttgtatagcgagagatttactgccccatggatcttctacaattctcttgttatccaatcggttttaaggacttgtttggaagaagggggt

SEQ ID NO: 125834 - DNA, 429 bp, Zea Mays
tttttcttttggctcgctctatctgtagttcggtctgtcgtaattctggttgtgagtcgcatgatgtccccggctggaagcgtgctattgacgcggttggctggttgagtcctgtttcttcagttgtgttcctcatgtgtggcactttctggtttagtaggggagcttcttttgattaatgaatgccaactattgtattccatcgtggaatgtgagggggctaaatgacccagctaaaagggcaagtttgaaacatacgattctctcttctggggcaattattgtttgtcttcaagagataaagataatgagttggaataataatttactaaaggaaacattgtgatgcaagttagcagctcagacggttcatttaccatctcttggagcctcaggtgggattctaattgcatgcgatgcagacttttt

SEQ ID NO: 125835 - DNA, 657 bp, Zea Mays
tgaagtaataaaccttgattcaggtattatatcctttagccccccatcttccaggtttttcctttttgatatcacttttgtacctttttcaggaaggccatctgaattcggatctcacccatttttttcctggtttctagatggtgtcgcccatgcgggcacaaaaattccccttcctggatcaagaatccgtattttggatccaatcactccatttcaactcaatcgaaacatgtttgattttgaattgtttgtatcataatcaccatgattcaggatttcagtatgatccataatctcacaccaggttggttttccatacatagattagatgtcatgggcaacttgtttgtgacacacatatagcaattcccaaaaggatcacaaggtaaataatccgcaagcataaacaaactcaaaatctcagtgacctaaatcaatcgagatgagcaaggaaacagaccaagggagagaacaaaatcgtagagtgatgaatcgggcgtacaaatggatctacacattcgctcgaccgatccagaggtgagcacctctgtgatgggtagccgagggatctgtctagcataggggaggagatgccggtgaggggcgtgacaaaacgagaagtagagtatgatggcagcgatggagaaaggcttg

SEQ ID NO: 125836 - DNA, 276 bp, Zea Mays
cgatcgactacctcaccggcgtgcgccgccgtgcgtgctcggtgttgccgcgcagcggatttggggaaggaagaagaaccgtgggccgtaggatctcaggttgacggctctgattagaagcaggcgataccccttcgcgacattaaatcagggtcgttgatctttgatcggaagacgtaggattgatctgcgggctctcgtcaaatgctggtctagaaagagatagatctaatcctgaccgttggaattgatctgacggtccaaattagagtgtac

SEQ ID NO: 125837 - DNA, 600 bp, Zea Mays
gtcgattgctccgttagtacggtatagtgatcaccctaagttgtatacgagtgtcgtgccgatttcgagttaagcccaacctaggtcagttgttgatcaagagcttgtatgccttggaacaatgaaactttattgataatgaaaccatctgcttacaaaatacaactcttcctcaagagttttgaggcattgttatgggtagaatttcctgaggtgctcaatattccatgaattctccacttcggtgccatccatttaagtgagccggtaggatcccggctgtgtaacctctgtgacgatgaatggtccttcccatggtggtgacaatttgtgtcgtccctccagcgtcagcactcggtggaggactaaatctcccactgcgaaggatcgatgtcgcactgctttgtcatgatagcgccttattagggtctgctggtatctggctaactgaatgaccacattttgtcgttcttcctctagtacatcgatgtcctccaacctagttgcttctgcttcagctatgcttcgaatgttaatctgggtgctccaaagatcagatctgctggtaacactgcctccgatccatacaccatgaagaat

SEQ ID NO: 125838 - DNA, 621 bp, Zea Mays
tgtagctgtagtattcaaaattcaagaaaaataattaacacgaataaagaacaagtgcagtaatcttgtatttaattatatgcacacttgaattactatagtacaatacccgtgcattgggacggcatacaatttatttgataagggactcagttcatagcaacgacatacaatttatttgatgagtgactcaggcaatagggattcacaaacaggaacagacggtgtagagttcgcataaagacttaatactctgattttcgaacacttttaagagctatccgtcataatatcatttggggcagcagctgcacccaccattatgttacatggagaaccaagtaaagaatataagagcttaccaggtaagtagtaggaaaagcaacacaaattaaacgcaaccacaaaatcttagcttgtttcttcattataagaaaactaagtcattccattatgttagattgttggatcagaaacaagcatctaaatttggtataccgacaggcgacagccccttagcgcatagtgggttgaggcattgcatcaaacgcttcaagggcaaacaagcataatggaaagccagacagcaccggaacgatcaggacacgaggatcttaccag

SEQ ID NO: 125839 - DNA, 315 bp, Zea Mays
acgcaaagggccaagtcactggtatggtctgcagttgctgtgctagtagatgttgttgttttgacaagtactggcaagcttcgcacctctgaactaactcggttgcatcactcttcgctgttggccaatagaatcctgacctgaaaaccttcccgactagtgtcttggacgccgcatgtattccacattgcccggcatggacctcctccagaagttgcttccccgtagatgagagaatgcatttcatgagtacgcctgatgcaccccatttgtataatgtctccccaatgagtgtgtagtgagccgactatcggg

SEQ ID NO: 125840 - DNA, 419 bp, Zea Mays
caaggtgctgcttgccgaaatttgctcactgaaggacagaggtctgactgccgaagccgtggttgctgactttgtcttcaagaacattcaacctctgaaggatagagtctaccctgcttacttgttaactggcgtcaatgattctacccgggtcactaataggcaaattcccaatgaggacctgctaagccgactggatatgatactgagggcagggtctcgaatgttggcgctcccttatcttactctgcatggaacctgcctccgcatagtcacttctctggctttgtctcaaatcctcctgtttgagatggtagcccgggccatagagtgcgaccctccttagaggacatcgaggccttaattgctcccctccggaatcttctcgaggctgagaagaaaactcacttcgagatgcc

SEQ ID NO: 125841 - DNA, 411 bp, Zea Mays
ccgaaggcacctatggccaaattgggtgagccggaggtcgagagaacaaagatatcagaaattacaagtccttcggcagaggtgacagtgccgaaggcacaaaaagatcttacagttacccctaagaggaaaaggatggtccacgtactagatgtactggaagaaataaagacttcaagctctactctagggaaaacagccgaagcttcaaaaatgcaaattgaaacaaagcaaactgaagccgaagctgcaaagagtcatgccaaacctgaagctgggccctcagagcccgccaaaaaggaatccctggaaattggagataaagaaacggaaagagaagcttcagaacaacttatgtctgaaccaactgccactcccacacccgaagcatcttccgaagctcttgattat

SEQ ID NO: 125842 - DNA, 410 bp, Zea Mays
ctcagggtgaccactattccctactaacgaagcaatcggcttaagtcggcaatgacttaaggcagtgcgacatgctcacgcttacttaactcaaggtgaccactataccccactaacagagcaatcggcttaagtcggtagtgacttaaagcggtgcgacatgctcacgtctactagatccggcataaacatgcttacgattactcgtcttagggcgatctctatgcctcacgaaatagaaagaagtttcaaaaccatcacactgcacttacttctgcaatcgtaacaactgttgaattcaaacaacagaagaataaaaatagcattcagtaccaagaacactttctaacagaatattcgagcacattgaccacatacacatataattcataaatgcattcagtattttc

SEQ ID NO: 125843 - DNA, 731 bp, Zea Mays
taagacccaggctaccatcactagcaggagggttggacacaaattcagaaaatgacctatgtggtggcagatttcaggcagaataggcaacaggagcaccaacatttgacactctaccccttagaatcatatccagtcggctcaccagatcttcagtggggattctcttgtttgtgacccgggtagagtcattgatgccactgtacagataagccgggtacgccctgtccttcaaaggctggatattcttgaagacaaaatcagcgaccacaacttcagcagtcaggcctctgtctttcaacaagcagacctcggcaagaagtacttttgcctccattatctctgaaggggtcggagattctacccagcttggaatatggacatctggctgcctccccgaccgagggggaagggacttgcagtggttctccacaatgatccactcgaggcgccaccccttgatgctatccttgagggggatgtcgaggtactctattttcctcccgcgacgcagctctagacttgcgccgccaacgagctggtgctgtcccccagccatctcgggccgacaatgatacagatacttccagaggccgaaatgggggagaatcccgagataggcctcacatagatgaatacaaatagaaacttacaagatagaattagggttcaagtgggtcaagttcagatcgtagaaatcaaggaggccgcagaagaagggagaaacggga

SEQ ID NO: 125844 - DNA, 273 bp, Zea Mays
attgactgtaagacactagaggaggtgtggtctggcaaaccacctcaatatgatcacttgagggtgtttgggttctggtgtatactcatattcgccagaacaagttgcaaccttgagctttgaagtgtctttcttggctatggtgatggagttaaggggtatcgtttgtggtgtaaagcagataaacccccaaaggtgatcgtcagaagagatgtgaccttcgatgagatggcgatggttacttctaggttgtcaacagttgggagaggctcc

SEQ ID NO: 125845 - DNA, 458 bp, Zea Mays
tttctaattcaaagggttaagttagtttagttgccttttagcatattcatcttaatttgcctttgtattgtttaatcaaacaatagtaaatttaatgccatccagatcttaaaaatttcaaacacaccggttgcattatacctattcacttcatgaggcttagttttattgtagttctttacatgtttgtacttttaggtatgattcattcttttttggtaataagtaggatatgaagcatacgttttaatatatttgtgtgggtatggctttgtttgactgaaacaaactgatgtccaaatttgcttatgtcaatgtttattataaaaactcgacctgcggagggtaagactgccccacggcattacaattaagaagacttcatgcagatcgagaaaaccccaaacctccgtcccaccatatacaacggtaccgtagcccatgtgagaacggtcgcg

SEQ ID NO: 125846 - DNA, 573 bp, Zea Mays
gcgctcctgatttccctctcgccgcccgatggggcccggtggtcagggttatcctctccgttgcacgcgcgctcgaatccgtggaacccggagctccctgcgtcgattgtgggggacgttgcgggcacctgcggacccagccgccacttcaaccacctaggcgacttcctcggagttcaactacccgcgccaatcgcggtccggtaggtagtggattcggaaccgagctccgccagtgatttaaacgttgggcgggcgctgccattgccgtcgttgacactcatctccatcaccactccgcgtctgtgacccgatccctggcattcgggtgtgggcgtggattgttctcggggaaggatccgggtgcgtgggtcctcgggaccgggaggattcctcgccgtcgttaccctgccgccgcggaccgcacttcgccgtagcctgcttccgccaccgttcgtgcgcgctgtaagtccctccatggcattcgttgttaagcatttggtgcgtaggaagtctcgggtgggaattggtccgttagctggccaagttggctgtactccggcgacgccccgc

SEQ ID NO: 125847 - DNA, 355 bp, Zea Mays
cgcggcaacccaatcgctcgccggagctctgcagacatcgctggattgcgttgtgccgtggttgggtctcctcgctgttcaagccatcggtaagattgtccctgtcacactcgttttgacccctgctacgattgttactcatcggatcagagttcggggcattgatgcggctgattgatcgagccacccatggccgccgccatggattggggtgcctcgtcgctcggcgaccgccggatgtgtgggagatgagcggcgaatcgtgcgtcgtccgattcatttcgaatgggcgagattagaagatgcggatagctgttcgtgatggggtctcggtcgttagtcccttgatggacgg

SEQ ID NO: 125848 - DNA, 388 bp, Zea Mays
ctcttcctcccctctagcagctcaatggttgcctcccctcaatgattgatgtcccctgggacacggtgctctcctctgaccttagacgacgcttggtgccccccgcacccccttcccgcgactgcgctcgctcccatagctctcgtggccaacgcgcctccaactgctgacggagccccgcccgacgttgctgagcctccaaccatgggcctcctccacttcttcacggcgcgtccaccctcccaggcactggtaaattctcctacggtggtccttccccgccccacgcagtcgattcgccctaccgacctcttgcctccctatgcggctcctcccaccggcgtccaccgccacgatccctccctcggctcgacaccgctattgtgcc

SEQ ID NO: 125849 - DNA, 425 bp, Zea Mays
taacaatcctcttggcacaagatattactccatcatacttggtcaagtagtctattccaagtatcacatcgattccactcgattcgaaaattatcagctctactagaaagcttaggcctctaatttcaatcttagtctgagggcatgagtgagtggctctaagttcacctcctggtgatcgaattaatagtttcttcttcagggatagtttggtatattatgttttttcacaaatgactttgttacgaaggagtgagatgctctagaatcaaacaaaactgatgcaggtatggagttaataagaaatgtaccttacaaccatgtcggcatcctcaggaactgattcctctgtcacatgattgactcttcctctactctggttatgtggagtattgttctgtgcggatccacgagcaggtgtgttc

SEQ ID NO: 125850 - DNA, 464 bp, Zea Mays
gcgaccccatgccctcaccggaagccgccgcgcggaaagcttgccagcgccttcttctccctttccggccgccgcgcgtcctcaaaattcaccggccaccgcccttgaagcctataaattgagggcgggggtaattgcgccatataatcgccaagctatagcacccactctcatctcctctcgctcaccgtagctccgcaattcgggtttgcccccaaattggtttccgccaccgtaaaacaccacttccccgtggactgtccgttctggtaaggcaccatccaaattgcgcgttgttcttatgtccctatatgctagtgatgctctccaaaccctctaattaaactagaagtccaccaatcaatgggaacacgaatgaacttccatagccttcgctgtcctcgtggacagagggttgtagagctccaattccgaaattaatttgggggaaatggtcggggtag

SEQ ID NO: 125851 - DNA, 620 bp, Zea Mays
cgcgggatgccgtcgcgcatgcgcgtgtcctcggcaagagaagaccgccgccgtggggtcggtggttcctcgctgtcgtcaaatccggccatgggccaccattcaccatggtggaccctctcttcatctcctccttcggtaaggatccctctactgggttcgccttcctctccaattagtgtagcacacgtcggatttggcgggggaatatttacatgtcgcgttcgcattctccggtgtgggcgccgccgtcccgggcatgcgccccgtcgtgcttggtgtttgcgtccgggcggatgaagaagatgccccctacaccgtccatccggggataaacggtcgtgattcaatccatttacatgttcggggcgatgcaactgtggccgttgattccgaactgtgcgtccatgatttgatcgctttcgtttgaaatctgggccgtgggatggtcggtcgatgaccgagattagatcccatcttcatgaaaccctaacaacaggattttaatctgaggccccacgttgcttaccggttcgcggctcgcagtatctaatccttaccgtcctgggctgatcggatggccaggattggctggtacctcttcggctggtaatcttcat

SEQ ID NO: 125852 - DNA, 883 bp, Zea Mays
ctaacgagccattgtcaaccacgcttcctttggacaggtcatacgtagatgctctaaaaggtgtgtattatgcccaacaattctggtaacattcttcctgctttgctgtggtgctaccctttctctttttcatgtgtagatgcctaccctgagaggtcatactacggtggacccgaacacgtatgcccatactgccatgctgtttttggttccaagagcgtgtcaaaaatgattcctgctccacccaaaggaaaattgtgtacaacctttgctgtagaggagggaaagtgaacctaaaaccatttgaacatctgtcgcctatgcttgttgatcttttgagatttgatggaggtactcgctcgaggcatttcttgaggcttatccggtcctacaattcattgtttacattcacctgtttcggtgcggctatcgacaaaatgataaataatgacactgcaccttatgttttcaaaattaatggggtcgtgcatcataggattggcaccctacttccacagcgtgggacacaaccaaaatttgcccagctgtacatatatgacacggaacatgagacccagaacaggctaggcatgtttgagaccgatgatggcgctggtggccagccagaccctgaaatggcgtcgtcgctgctcgatatgctgaatgaaaacaactcacttgtcaaagcgtttcgatacacgagagagcgccttgagcgcgagggtgatcaaaagataatactcagattgctaggctgcaacacacgccatgatgtacaatacatcctaccctcaaatggtgagatcgctgccattattgttggtgactacatgactggggaatacacatacgatgttcttgtgcacgatagagattgtggcct

SEQ ID NO: 125853 - DNA, 401 bp, Zea Mays
ccacggtttgttcagcttcggcatcagtaataccttcggcaatagtttcttccgcacaaccaacctagaatgcctcatcatttctaagatgggagctgtctcagtcgtttcagtctcatctccctcgcgggtcaccctagcagttgatctaactctggtcatttcgttgttcagactcaagcagacgaagttgcgcttcagcggtgaaatgcttgttcgaaacgtaatgcaaaaagcttcaggttcggtgaaaattttcagcagcacaacggcgcaatagcaatcaatgttgtggtaacttctcaccaacttatctgtttatatagccctgcaggagaagaaggcgaaccaccaagacgctcgtactaactgatcggtggaccaataagtgttgtgaatat

SEQ ID NO: 125854 - DNA, 611 bp, Zea Mays
ctttgcgcagctgattcagccacctcgatttcagagcacccttgaggcctcacgccttgtgtttggatcttaccgccctgctcctgagattcctgtgccagcttctgcttctgtgtttgacactccggccgaggatgcagcacttcgacagtttgacacccagggtacaacagatgatgatgatgatgattttggggttcctcctccgcctccgcctcctatgcctccacgctcacatgatcatgaggctgggagttctcgtgctgcccctgctcctcctccagctttggaccctgctcttgcggcgattctggccaacctggcagccgagcaggcccggttatccgagacgatgctctcgatgtttcagagcatgcaggacaggcaggatgcacttcagcagcagcttcttcaggatagggcagagaatagggcattcatggccctcatgcttcagcattctggtatctcagctcctccggttcagtctgctccgcctcctccgcttcacgctccagtggtgccttcgatcttgtctggaccccctgctggtacctctccgctccggccggtcactttggcgttcacctctccggctctcagctctatct

SEQ ID NO: 125855 - DNA, 348 bp, Zea Mays
atttctatggacacagaagatgctccacacgctcatccagattatccaattgatgtcacaggatggacccatccaaagagaagattctctatggctgagtactgctccaggaggatagttaatcagtatgatctgccctctaacacaaacattcagttttttcatactcaacttcagtttgatgtcttctggggaacactaatggacacaaactttcacaagcatcaagttattgattggaattttatgctaggttagtcagtcatggagggattgattccaaagttcgaggcatgtggtctctatgactttatgggccagaagacagacttcagtgagatggctgtg

SEQ ID NO: 125856 - DNA, 453 bp, Zea Mays
atcatcaatacatggcagggttgtgcctactctagttcgaatgctattgatcttgttagtgccattattgaccaaatatgatgttgtcatggcagacttgatggttgctgcacatactttcatgcatgacatgcaccaggtaagtttgtaatggttatggtagaatgaatgtgtactggatgatcagcttggtgtcaccaatctccatgcatcttgttcagcactcaattccctcagcagaagcccatgaggtcacaactcatggtatccatttcagccccaagtcggcatggtgaaatactgaaatggaattggtctttggtgcacgtgttgcagctgtgtaatttcttgttatgtccaccatttaagagcctgatatacagccttagcataagaaaattgcttggttcttgagtacatggacaccatctgccacagtgactagtcgagcac

SEQ ID NO: 125857 - DNA, 497 bp, Zea Mays
tcctagagacgaggactctgggctcctcgttaagggtgcaggttgaagtggagacccagagctactagcaattacaggccatgaggagatagtatccctcatccaacattgagtatccatggtataggtacttatttataaccaactgctcttgttgtcttctttgttgtatgaactatagtaactcaagcatatatctagatcagtagtgatggtgaaatccctagtggaagtcgatgccacacgtaaattctttgtttggctactcaatagaagaagatttatatacccacaccccaagaaacttgccccccagccatccatcaatccaaagataacccaaattgtagcactagatgttgaaacgagtcgtgttgagcaaggaacaatgtctacactgaagatggtggcaggacaggacatcgagcttgcattaactagcaaagtgattccttccatccatgcaagaagctacatcccagtgggtgcggcaaaag

SEQ ID NO: 125858 - DNA, 582 bp, Zea Mays
aagaaaattaggtgagtttaaatctataacaaattcaaatccttattattattttttcaatttcgttaaatccacgtgacatagaaataaatgaacaagttctacatgtacatgtgtggccgcttccgggaatgatttggtggagctcatgtggttgtggagaaacgttggttttgccgccgccggatgacctcacctcatgtatggataattggatgtactattagtagcttttgagttttcaagcatcggcagggcagcaatgtctttttccttgcttgcctgggaaacaaaatgatggtaggaagatgagagaacagtgtcatcttgcactgtgtgcagtgtagtgtagcagacgcgtcgccgctgaatttttccacagttgagtcagtgtgcagagtggaggtggaccaactctccaactttgcgcccttctctctcatagagtagtctcatccggaagaccggaaggcccagtagatggctaaaaattattaattaatgggggagcttcaaagccttgttcactggcacgggacagccctgcacacaaacctcatcatcatccataataaagcccgg

SEQ ID NO: 125859 - DNA, 586 bp, Zea Mays
gtgaatttgagattggggctagggtctgccggatttcgtgtgctccggtgtgtctccgccgtgattctctggcggcgccaccttcgcccgatgggaattgggggaaagcgccacagccgtcggatggccatcgggtggtgtgggttggaccgtgcgggttggttggttttcagcccttggatcgtgatcttgcgggtaggattagatcacgccctcattaaatagtgaccgttggatcttgatccaataggccaagtagcgtaccggttcgtggtatgggtggttagatctgggccgtagatcctcaatccgagggcggtcatcgtgtactggttgttttaacctagatctaatcgggcgcatccatcgctgatcggacggccagattctcgcgataccgcttcggccgcgcatcttacaaaagagcccctcgggtttcggcgaatgaacccgccgtccagggactctgttccctgtgtctttggtaacttaccccgtggcccctgcgcttcttaggaaatgaggcccagtccagagcacatttaaaatgtataaatgaattagtaaaggtattattaatacaaaa

SEQ ID NO: 125860 - DNA, 371 bp, Zea Mays
atccaatttacccactgaaggtcgatggtcgtgcacaaagcaaacacaaccaaaaactctaggtgggactttaaactctcgttgttccaataggagttcagcaggtgatctcatacccagtaccctagaaggcatgcaattgatcagatatgcagttgtcatcactacctcactccagagatacttaggcacattcatttgaaacatcggggaccttaccacttctaataggtgttgattctttctctcggccacaccattctaagaaggtgtaccaggacatgtggtttggtgaataatcccttgatctgaaatgaatgagataaactcattgttcacatactcagttccattattagtgcgaatgattt

SEQ ID NO: 125861 - DNA, 484 bp, Zea Mays
agcaactgatccaaaaggcttcgatgaccccgtttgtcctcttccaagtggtagaaaacacaccatgagcaaggagatgataaaacatatggccctttcaaaggacaagggaaagttggagcagaagccaaaccaggagaggagctagaagcgtaagctagaccactaagtttacatggcccaacgaaggactcaacaaagatggggcaacacacctcccatataggaacactatgacaacaagtacaaattcatcatggagggacgatatatctaccacccctagagcaaccacatgtcacaacattgtctacacatcacgggcttcacacagaacctactaaaggtgcttcatcctaaggcctcaaaaccgaatagcaacaaaaccatcaagaagggtgtctctgatgacatcgttggggggaaattccaaccacttaatcaagatattatgttcatcatcggtggcccggttagtacaatc

SEQ ID NO: 125862 - DNA, 355 bp, Zea Mays
ctagcacgtgtggccaaccatttggggcatgcagaggcgcttggggagcatgcttctgtctccgacttgcccgagctctttggcccttgttctctagtgaagcatgattcaccatcgttgatccttgcttctctcgtggtggcctgcacggatgttgactccttggtgtatgaggacaccagtgcaaacaccgtagtctccatccttgacgagatgccctctagagtctctagttcgaagattcttagagagacagaccttacctctaatgaggtggttgtaggggcatttgaagcagattctcgccaaatgaggtccaccgagcagaccattgaggtgccttcagagaccttca

SEQ ID NO: 125863 - DNA, 393 bp, Zea Mays
gtaatatcatctctggtttcttcgtctagtaggttttgctccttcaaccatgtagtgaattgatgcttgtattgtttcatgacccaatcctttgtgcagccattactgtcaaccctaatggcatccatgtgttgatcaatatatggttgcatcagttttgtactctgaaggacactctaatgcacccgacccacttcgttgaaatccttgtcgatgaagacttttctccccatggagcccttaccagccaccctacccttgtgacgagaatcgggtaaaccaatccctctccatccttttagttactcttgatagcactagatgacttctttggtattgtaaccctctatcatggagccctctaggtaaggtcgattattatgcatttattgg

SEQ ID NO: 125864 - DNA, 374 bp, Zea Mays
agattgtctacattccatgagtgctcgaggtcttcgtcggattgtgttgcgagtctgtaggcatttggtgacgttttcctcgtgacaatgatggggccttcccatttaggctcgagttttccttgggattctattctgctgatttggatgaggatgaggtctccctcgtcgaactctttaggagtaatagtgttgtccctctaggcctttgtttgtgcttgatatttgttcagtgcttcgagggcggcgacctgatccccatcgaggaggtcttttgttattgactcgttgatgtctggtgtggcctcggtgcttgtttggggtgatccatgcttgagctcttgcaaagtcatggcctcggatccatacattag

SEQ ID NO: 125865 - DNA, 278 bp, Zea Mays
tgaagctttcctaggcttgagccgagaccctgcctccacggagaagcaagcacaacctcgccggacttcggccgctcgccgccgcacgtagactaggcttccaggcaaaccattttccaattacttgcgcctatgagctctctgacttcccgtgaagatccccaactcactggattgagctatgacgtcgtgattaggccggaatcctcgccgccgacgtgctcccccgcctgcgcatgaggtctgaccaattccggccatccccgacgccgacccgc

SEQ ID NO: 125866 - DNA, 342 bp, Zea Mays
catcgacgtaagcctccacccgcttgccctagtgatcggctaagcacgtttggatggctctttggtaagtcgctccaacgttcttgaggccgaatggcatggaggtatagcagaaagatccaaatggggtgatgaaagcagtcttctcctcatcttattttgctaggttgatctgatgatatccggagtagcattctaggaaggagagcatagagcaaccagcggttgagttaactacgtgatctattctagggagcccaaagggatccttcgggcaatgcttgttgagatcagtatagtcgacgaacatgcacaatcaactttattcttttttagtacaag

SEQ ID NO: 125867 - DNA, 535 bp, Zea Mays
actgacctactgattcatctgaatgtcgcgattgctctggcttatctatctcatcttctaaattatcagactcagcacgtagtacctcgtcgatcagctctataaagttgtctgctatatcatattgcttctcaacaattttgttaaggttgtcttttatggctaagcatgccttgtcaacctctaagtcatatccagcaagtttctctgtgaatttagtacggtgacgaggagggagctggttgatcttacttgacatcatatccttgatcgatagaagttggatgttaaaggtgggccgaggagtaggggcagggcgcggagcataaaaaatgttggtcttgcactttggttggttgttctgaaaaaatagtaagagtccatcacaacaatcctaatccatctgtttcataaatcttaaaaacatgtatataatacagcaaaaacttgcctcagattggcgatcgagctgaggtacaactgaataacatgtctcggtcgagcttcgaaactaaatataaaatgtaagtgaaag

SEQ ID NO: 125868 - DNA, 454 bp, Zea Mays
aatttggcaagtacagctttggtagagaaattatccttacccactcgcacacacccacatccgtatcacattcaatggcttaatgacggtggtaaaataaaggtaacatgctcggtacgtatccccgtttggatggggtcttattctgattatgctgattgtgatgttatccctatggaagcatgctctttgttattgggtcgaccttagtattatgatactgatagtttacatcatggtcatttgaatcattattctttcatgtttaaaggccaaaaaatagttatacccctaaccaaattctgaaagatgatcttagtagggctgctaaaactgcacaacaagtcaaatctccatcagccgcacctgttacatctgaaataaagtagaatgctcctgttttacttgctacacgtgctgattttgatgatttacatgaggctcatatgcccag

SEQ ID NO: 125869 - DNA, 947 bp, Zea Mays
cgacccaagtcaagagctggtgcatcgaggggctccgtcagcgtgcgacccaagtcgagagctggtgcatcgagaggctccgtcagcgtgcttcgtggtgagtaacctcaagagcgtgcgcgtcggttgttcaccgaagacgacaacaatgatgaggacatcgcgaggggcgttctcatgtggtggatctgaaaccgcagatcgaagtggtcccagctagagcaacatggtggatctaaagccatagatctatgttctatgtttaatgtttgttacttcagcttgatagtagtgatgcatatatgtttttagtgaaattagtgtcgttacctctcatttcctttcctaatttactcatttccctcattgcctatcttgttcttactagtatacaaagtgatagctcacattatactactattttgactatgttatataagtaatatagcgatatataattattctaaaaccgaaataagctatcattaatgtttcatcacagttttatcccacatacactgaagccttccatgctggcatctttttgcatacacatcaaacaaatgttcaagaattcaagtacaagcagttcatcaactccttatatggcttttgtttttctatgtttggccctacatatgaaacttctgctacatttagatccttagttgctgcctgttttgtaaaactggtagctaatcatttatcatagtagctgcttcatgtttcccttatgccagtagcagtgcgtttacttaatcctgtttgttttgctagtattcatgatagagtccaaagtaatatcattgcagttagtggtttcgccctaatgaaaactatatagcttatatccccctgttagtttaccaaattatgacatctatgaatatattgattatctatgcttctcttgtagattaaaatagtaccgctacagattgtgcaag

SEQ ID NO: 125870 - DNA, 371 bp, Zea Mays
agatcaccccatcccgaacgggtacctcacatctaatcgtgatcgcccaaactgaatcggacggcgcaaacaagccttcacccctccaccgacccgacgatgaaacccaacggctagggacaccggcatccagcgcccacggcggagaccatggccaggacataccatcccacgaaccctagccctaagcatggatccgaggtatggtacacgtagagaagacattggtgaactggacgagggatttcttaccgcaaattgctgcgatgactgacccggtcatgacacgatgcgagttgcatggcggcggcgccctccggtgaggaattccgccacaccggctgccccacctgcccgaacgagcagcagac

SEQ ID NO: 125871 - DNA, 771 bp, Zea Mays
caaaacgactctgcagagcatcacatcgacgaccagcgtgggggtgggcgcagccgtgcatggaatcagtgtgcagcgtcgttgtccacctaaatatagtatgggaagaatcggtcgcgccaaccacgcatcctggtgacctcctctgacgggggaattggccggagtgccggcaattgctcaccagatttcaagaaattgcctcggaccgcccttcatcgtcggcgtagcggcctgctacttattccacggtgagttacccttagatcgattcgccttgctctcctcttcgcgtgggtccggatagttctgtaggagtgaagaccgtaccgccaggccacctatctcgacgaaagcgccgccgtgacatcaccctccgctgtcgtgcctcggtaccgatggggggaagatagggcttctgtcgtccgttgccagatgtgtggcggggaataggcggggagcatacctcttcggtcacttaatccaagccactggatctttggccaattgccaagattagatcaccgcgtaatgagttagtaccattagatttagatctgatggatctcgtggcgtactggttcagtattttggccgatctaatcctaacccttggtttctaatccagcagcctagatcctagcaaagcataccccttcgtcgagccttatttgcaaaagaaaccccgcataacttaataactaacccgccatccctcaatagtatgagtatttcacaattaagtccctggaattagcaaatgaacccctg

SEQ ID NO: 125872 - DNA, 294 bp, Zea Mays
cggagggcgagatttatactggttcgagcagaacatccatacatccaatcattggtggcttacactaccgacatcattgatgatcaaactcgtagtaggggttacaagcagtcgatagagggaggagagactcccatatctcttattggggtggaagtgaagcttagaagctatatggtagagtcctagctaagtcttggctttgcggggttccggcctcctggtagcgctcctcctcctgttcgtccttgtggctcgtctctgtttgaaggtgttcgatcgtcccgcagtccg

SEQ ID NO: 125873 - DNA, 395 bp, Zea Mays
ctcggacttcaccgtggtgcataaaagccgaagctccgcgaccccttccctccatccacccgtgagctcaagcaaaagaagaccgccgccgccgccaccaccataatcgcgttcgccgagagataccgccgcgggcaaatccgggctcgccgacgacccggctcggattggggaacccaggggctccctttggctacgttgaaggcaaccgcgactgaattaccgaggatcgtacaccggcggctccggaattcctcaccggagatctaacaccgccgcggatccgcacacctccgtggacagcttccctccgatcatcgccgtgggtatgtcgcctgcccatttaatcaccatggtcccagcattattttgcgctgttaggatcgaagtttaga

SEQ ID NO: 125874 - DNA, 641 bp, Zea Mays
tgcaaataaaccctccggttttctattcctttacccgatacgtcctcgacggcgatccacgctgggagccgagctccgacgagctagaccagccggagggggccaagaccagcgcctagactaagactaaaccaaatccatgaccaggggagtatttcccccaacataattgcactaatgatcaaggggtgtgctctggccacggtgactgtgagcatcacggcaataccgtcgtgttcccggcgatctgaggctacttcgtacaaattggtggttcggcaagcatcccagagcatcaagggtactcaaatgagggagagcgagggatgaactgaccgggaaagggctggccgcggtgaggtgggtttcacggtggcggagacttgatttggggaaaatctcaaattcgagttctctggtggggggtttggggtgcaggtgggtgctctagctgctcgaatacctaatgaagacgatggtgcactcaatttatagactccgagggcggtggccgatgaatcgagcgattacgcgcggcggtcgggaaagaaataggcactggcgcgcgtgagtgcgtgtccacagtcgtggcgagctcaccgacgacgatgggacggtggtaaggagtcacggtgacgcgg

SEQ ID NO: 125875 - DNA, 273 bp, Zea Mays
ctcaccgccaaattaaggcactgtggctggttcaatgtagcgcggtcggtgagtaagaactttcacctttatcctcttcggcacgggcttgcttggagcagctgaagcaacatccttcctagaagttgcaccctttcttttttgcccccgcggcgggtatcgatagtcagggtacacaaatccaatagcgtcaaaaaccctatttagtattttcttttttcggcttccgaaggccgtggataatgcattatcttcagacttggagtatgctcc

SEQ ID NO: 125876 - DNA, 283 bp, Zea Mays
ggtggatgtttggctgatgcgggtgcggaggcggaagagggggtggtacgacttgtacctcctggtggtgctggtatgcgtggtaaggtggatgttgggcggggccgtggttgtatggttgtgggagatggtgttgatatgtgtgggcgacaactcttgggttgtcggcgggttgtgcccgggacatcctgtccctggtggccttcgtttccgggcagtccctcgtcgggtgcgcgcagtcttcgctgtgaaacaggcagtaaaacctgcgcgactgctgtgc

SEQ ID NO: 125877 - DNA, 495 bp, Zea Mays
gtctcgcccagcccagtcgccctctactcctgacgctgccggagtgacggacgagtggacgacgccacgccacgccggcggctggtccctctcgcggtcgcgggtcgtggctcggcgactgtctcagcgccgtcagcgggctcaagttgcaagcagaagcaggccgcgggtcctggctggctggcttgcaagttgcaagcagctttctccacgcgggtcgcgggtgccggctagctcctcgctcctgcggctacggtgcagactgcagacgaccgcgcgggctccagctttgtctccgtccgaccgtcttagttacaatttgcctcctgctatctaatctgcattgtgtgactttcatttgttagaatctaaggatattccttcacttgtcactgatctgaccaatttagaggactttgcaacatatgtaaagcttgcgaatgaagaggtatacatggttcactgcacaaaattacatgacattcagtttattgt

SEQ ID NO: 125878 - DNA, 431 bp, Zea Mays
ctaacatttgatcagttattactaaatatgtgaaaagatggccggtccaaagaatcgcccagcatagaaacttcgctcacctacccacgagcaacgataggtctgaccgattaggtcttctcaccaattggaagagtcagctcgtaatgatattcgattaagacccaatgtatctacacggacacctccacccctatacccacatgtgccatattagtatgcatatcttccaacactttatgtacccaatcaaatgtgaggaattccaccgtacctatttgggatgccatagtaccccgcctggagggcatcccaaacttttatatttgacaggttggcactaccagtgcaatatcgattgggttcaccgcaatctagtcaccaaacataggtccaagtgtccaacaagattgccggactacacgaccacg

SEQ ID NO: 125879 - DNA, 359 bp, Zea Mays
taagtcgttgccgacttaagccgattgctccgttagtagggcatagtggtcaccccgagttaagtaagaatgcaagtcaatcgtgaacaaactgagtatctttgaaaccccttttttattgatgacatatttccactttacagagtatatcgccgtcccgatagcttctgaaatacagctagggataaaacttcctgaggtgttctatgttccaggagttcccgacttctgtgccatccatctgagtgagacgatatgatcctggccgagtgacttctgctactgtgaagggtccttcccataagggcgataacttgtgccgtccttcccccattagaattcggcggaggacgagatct

SEQ ID NO: 125880 - DNA, 516 bp, Zea Mays
atattcagatcctaaagtttgcaagctactaaatcccgacgaccagtagcgataaggcatatgcatgatctgagcatgttctcgaacattcgcataatcgcatggcactgcggaagctatccgcggtcgcgtaggcgctcagcatggctctccaagcgacgtcgttcatgtgagacattctgtcgaacagagcgcgtgcctgatccatgtgctcggcgttggcgcaggccgtgaggagcgatgttaaggacgacacgtcgaccgtacagtagacaacagcgccacccaaaagggaacaggcgggcattgagatccaatgtcacggatgcgctgttaacgtcctccgtcacgctcgccgtcatcgctatcgacgaccgcgaacaagcgcatggcgcgacgcagtctgttcatgctgttgtgtacttcatggcggcgcagttggagaagcacgcagccatgaggctagaagagcatgcggcaaccagggacgaagacgagcgggagcgagagtgcgcg

SEQ ID NO: 125881 - DNA, 376 bp, Zea Mays
gtggagttctggagatggagtagggatggctgggtagtgcttacatgtacctgcgagataaaattatatataaaaaaactcgtacctcgttcataggtatgaaattgctcgaggcggtcttagtgcagtttagttgatgcacgagatgtttagatctagctgctgatgtgtttttggtcaggtcagagttgatccgttgttttgaatgctgaatatagttaacaacaagtaaataaacagaatacaaatggaacttgagaaagttgcagcatcttgcactagcgtttgcttcagtcttctatctgatgcttcctttcatgttcaaagttgaagctatgctgtgtgcaatagcagatcgattttcggcctatatttg

SEQ ID NO: 125882 - DNA, 1073 bp, Zea Mays
atgctagaagaatacaatctgcatgaagatatgactctacgcaagttatatgaaataaggaaaaaatggataccagcattttttaaaaatgacttctgtggggtaatggtgtcaacacaacgcggtgagaggatgaacagattagtgaagaaatcacatgtagatgcgaacacccctctgcatgagtttgctaaacaaatgatgaaaatgttgcatagcaggaaaattaaagaatcaaaggaggcattgatgagcaaggtatatggtgtttgttatcaataatcaatggcatacatgtttatgtaaatacgttatttaattatgatgttaacgtcttatagggaccaaggacaaccgatacgttgtataggttcgaagtgagagtctctagggcatacatcagagctgttatgaatagatttgaggaatcaatgaaatacgccactgcatacagaatattgaaggacacagacggttgtgataaagattggatcgtacaacatacaaaaagatctaataaaattgtgtggggacaacatcaattcaagataacagcggacatagaagctggagagtatacatgcgagtgcaaacaatgggaacgtacaggtttgaacatcttgtcttgattatacgaataaaagtgcatattagatttttttattgttatacaaaataatatatatcattaacaatataatgattggtcttcatgatttcaggtctattatgtgttcatcttttaagagccttcatgcatctacaagttgaaacgataccttcaaagtatatattgtaaaggtacactgtctcatcaagacaagatgtaccgttcgaaagaattgataagagcttcaggggaaaggatggagttactaaatcatacagacagaaaatgttgctaacgaaaacaatgaaagttgttcgccaggcgtgtatgtcaaaagcagggtacgataaggcaatggatgtgttggatgagcttgatggtgttctatgccgattggagccagacattggatgtaatgagtcatgtgatgttagtgataatgaggaaaaacaggtaataaaat

SEQ ID NO: 125883 - DNA, 323 bp, Zea Mays
ggtcaatgtactagatgtgctggagacaataaagtcttcaagcaccactccgaggaaaactgccgaagcgtcaaaaacgcaaattgagacaaaaccatccgaagccgaagctgtaaagagccagaccgaggccgaagctgggccttcagagcccgccaaggagaaatccttggaaaccggagaagaagaaacaaaaaaagaagctacaaagcaaattctgcctgaaaaaactgactcttcaactcccaaagcatcttccggagtacctgattatattgtacgacatgcttcgggcaaaaagctatctgaagaggaaaagcgag

SEQ ID NO: 125884 - DNA, 556 bp, Zea Mays
aacaacaagagaaaatgcaacaaataatttggggtatgcaagatgattacaagaggctagcgcgtgcattcgataaattcgtcgttgctaattttcccacgcatgaggttgaaaccaaggagaatatgcatgattcaccgactacaaattgacaagatcaatcccatccactttacgggatgccaatgaatacatatcccaaacaaccagaacctcctgcacagatcaggggtaaatccaccgacctgcgcacaggcggaccgtccacacgtgagcgcgaaccgccagagcatgcaacgattggccctgttttccgaaccaaaccaccaaaatacatgccagggttgccgtattccacgcaaaccctaacagacccacacgaacattccgcctacacggccggaccgtctgcgtacatggccggttagtctccgcgttgcaccggacaatccaacacaaagtatacataatacaattcaaatttttatcacccatttctatacttgtcttagacaaggttccccttactccctatggctcctcaacaccatatcac

SEQ ID NO: 125885 - DNA, 688 bp, Zea Mays
aaatttgaacatggtacactttgatcattgatgactctcaggaccaaactcaaattgaaatttgaattctaaaaacaaaagggaaaagaaaccagaaaataataaaataaaaagaaaaacttacttgggccgggaatgccattttggcccatctcggtcgtccccgccagcccactgctcgcgcgtgcgtttgcctctggctcactgaccactggaccgctccctggccagacacgcccacgacgcgttgccaccgccaggtgggccacctccgtcagcttcacctcctcaaccggatcgcgtaacagattcaccgcagagctcgtttcatccccgagatcaccgctaaccaattgcaatcaatcgcccatcgatggctggttcggtgtataaatgtggacccctcccaagctcctcggatcatccgccccaaaagcttccattgggcgtggctccgaatccatcccaagggaatcgaacgccaccgctggtggctgtttggttgggtttccgccgccgtcatcgtctggcaataatacgggtgctcgcgccactgagtttgggtcagcgtgcttgcaaagagatcccggaggtgttcgcggaccccactgccccagaactcaaaccatcgcaccgtaatttctcgtcgccgccctgcgcatcgcctggatccgccgctcgccgtggc

SEQ ID NO: 125886 - DNA, 730 bp, Zea Mays
cggcgctggaactccagcgaccaattctcggctcgcccgttgacaatcccccctgatgcgacaatgaagacttgcagggacctcctgcgaagtgccccgaccctcttctctcggctttgctctcacctcccctgttcttgcgaccgcggtggcccctttctattttccgatggcgagctcggctctgcggttcgggatatgatggcatatatacccgtgaagttcgtgcatgagcgaggatcggtaggcgagaatctagggatccgtttgaggcagcaggccgattccggttggttgcggcggcggtaacatacggggctccacggttgacggtcgagttcgttaggatccctatccaaacggccctaagtgcgagacgggtatggactggaggtcggtgccgaggaggtagcagggaggtgtgagattctgttacagagatcgcggggtgctcgggccacacaacggcagcacgaggcgttcggcatggtccgccaaactcgcgaagacgacgaacgggaggcgtggggcccactgcgcagcgtgatagtttggtcgcgcagcgggtgcggtgagcggctgacgagagggtcccgcccgccagcgagccggggtgtgcgatgggccagcgagcgcgagaacgtagttgggccgcgcgaagcgaggagttggctcgaagttgggccgaatagagtggaattggcccatgaagcctttttattcttttctt

SEQ ID NO: 125887 - DNA, 475 bp, Zea Mays
ggccgccggaggtggggtcatggcgtttcagtgccctaactccgagtaatgtcgacccgaacgaactcagtagagagctagctatgtatagggtcaatgttccgttaatttagcgtgcaggatcgccgacggcctggctccggccatgtccgccgccgtagccggtggcgttgccgccgtgttctaggtggggaaaagggggtagatcatggagcgtcgatctcatgacggacgaccgagattagggctggcgtacccgttcgccacaagtgaacggtagccgttgatctaggatccgtgggccgcggcgaaacctcggcttcattaaattcaagccgttggatgtagatccgagcgctcagggcgcataccggttcgggttggtccgttttaatctgggccgttagaatctgatcgggcggccgtgaacgcacgataccccttcaccgttgtaaattcacataagagcccctcg

SEQ ID NO: 125888 - DNA, 619 bp, Zea Mays
cacccagtatggctggccaatccagtcatcgtccccaaggctaacgggaagcttcggatgtgcatcgactacaccagcctcaataaggcctgtcctaaggacccatatccacttccacgaatagatcaaatcatggattctacctccgggtgcgatctcctgtcctttttagatgcttactctggtttccatcagatccagatgtctagacaggataggaaacataccgcttttgtaacagtggatgggctttactgttatgtcgtaatgccttacggtctgaaaaatgccttgccaacatttgtacgggcgatgagtaagactttcggggacctaattagggacagagtagaggtatacgtcgatgacatcgtggtcaagactaagagagggtcgaccttagtggaagacttaaccctggtcttcgacaagctgcacgcaacacgcatgaagctgaacccggacaagtgcgtctttggtgtctccgcagggaagttgcttggattcctggtttcacaccggggcatcgaagcaaacccagagaagataaaggcaattgaggcaatgagacctccggcccgcatcaaggacgtccagaagcttacggggtcactggccg

SEQ ID NO: 125889 - DNA, 298 bp, Zea Mays
caaaaaaacagttttaactaggaatcaggagttttagctaggctcagatgaagacatcttacacaaagcatgtgcatgtactaattaagcttccaagtcaaagcatcagtcttaaacatagaacagaacagaggagatggaggaggagcagataaatagcaaagggggagactggaagactggaggagcagcagaactatggcgtcgctgaccctggcgggcggcggctggggaagacaggaagagccgaagaggacaaacagacaggtggcgacggcagacctggtcgactgtggaa

SEQ ID NO: 125890 - DNA, 634 bp, Zea Mays
cccaaccgcatcctgagctcatccacaggaaacgggaaacgataaaattctttccacgaggcaagggccagggccagggccagggacggagaaagcgagagcgccccggaaaggcgtccgttcgcgggcgaaaccgggcaacttccgcacgcgccggagcccccggaaaacggcgaacgcccacaccgggaatgcgaccccattccattcccattccagttccaggggtgtgcgtgaaccggcagcgctttgaaagcgttgggcctaaatgcccggtcactgtcgacgcgtagtacatactgctactaccaattcttcagatgcaggggcctctcttgctccgatactctaaaccatgtatgtattcaagtgtgctttaggaccaccttcccttgcttctgtgattggttaaccttctcaaagtggacctcgcaacatactccacggccacgccaaccctctctctctctctctctctctccaccacatatccggtggacagttgtatagagaacagaaaggagctcgcgcgctaatcatgttaccatgcatgtgtgataacaaatctgaaccgatcacatgcttgacgctccatccacgttcaatagcaagagagcaatagcaccagatgccg

SEQ ID NO: 125891 - DNA, 354 bp, Zea Mays
ccggtacctcgacgaccaggtggagctcgtcgtcggcgtcggagcccacgaccaccaagaggatcatgaacaagggtagcgccgaaagcgagacatgattcacatgaatagctagtgctactgctaactgctaagaagaggcatcgaaaaacgcaaaaactcctcttcttcttcttcctctttcatttcggtttgcagttcgtcgcctgtaaaacaggggagccaaatgagcttgcagtttcttcctctcttcttgttgcagcttgcagctcttcccgcaaatatgatgtaaccctacgtattacactgtcgtaccaaactgagtaactgacgatgcacccagcattccagaat

SEQ ID NO: 125892 - DNA, 494 bp, Zea Mays
cgcgttatgctcaatcttgttacgttttacacaattttggtgtgcgcatgtttcgcggcatccgggcccacgaaaagatcatgtccccgcaatctgggcagcttacgtctatcgggcccacgaatccaggaaccgagcactcattttttcagctcatctctcccgtaactctcgcggcggccgaaccctagccaaatccgccgtcgtctgctgcttctcctccgcgcccgtcgaaccctagactaatcgccgccgtgagcttcttgtccaccgcgcccgccgaatacacagatattctccccccgtcgttccaccgccgtcgcattctccttcaccaccgcagagacccggactcgccttctccgccgcatacacgccgtcgccttattcttcgtctccgggaagggacccggaatcgcggaggcggttgtgccgccccttcgttcttctcctccgcagagaccgagacctcgatcttctccaccgcggcggcc

SEQ ID NO: 125893 - DNA, 661 bp, Zea Mays
tggtggtttcgtcgggcaatgtgcggggtgccccgttgtcgctgcattggttttaaagattactttttgtcttctgcagcggccccaaagaggcgcgctatcgcgtgcggcggttcgctctttccgcacccgaaatccggcacacaaactatatgacttgtggacccgggcccccgtgtcagagactgggctgcttgggtcctaggtgcccgtcgaacgggatttcctgcggtgatttaggggtacgcggaagggtttccctgaacaaggattcaggtttccttgaaaaaggattcaccccgcgtgcagcagttaccttttcgcattttctcccaaccggctacgcccctttgccttcgtgctcctctgttccatgcatgtgccgccgcacacgccatggcttcgcttggtcatcctagccgctttcagtctaaggaagcgcttaatctggtgcgtggcctgcttgggtggagcgcgccagggctcgccggaagaatccgtgccggcgttgccccccttggcaatctcgccgtcggggagtttgtgttgttcacctcctacatctcttgcgggttggcgctgccgatttcgcccttcttcctgctactgctggaggagttcgggcttcaacttcaacacctcactccccactccatcctcc

SEQ ID NO: 125894 - DNA, 500 bp, Zea Mays
gtccgatcacaagtgtgtggttcagattagattgcaaaccggtatgaacccgcggccgctagatactgatccaacggtccgcaagtccgtttccccctcactcgtacatccgctgatccccggccgagatcgactcggctgaatcggtatgcagattcccatcatggccgttgaccactaatctaacggtgctcgtgcatcttccctaacgtgccgtcaccaacggaggcacccttgccgccacggcggcgcaactcgccagcgcgagcgagcccccgattcgaaacacaaatttacctgccacccgattaaatacgatgtttagactaatgtgaattggatgagggtaatcataccggctgcggtggagagtgcgatgccgcccatggtgctcggttgccccacgacggagatcaacctctagtgagcaattgctgacacaccagtaaccggattcggatgaggaggccctggaaaccaccccaagaccccgacgtcgc

SEQ ID NO: 125895 - DNA, 556 bp, Zea Mays
gttaagtcggtcgatgccgattaagtagttaaaatgattaatggaataatcttggggttaaaactagaaactagtgttctcgcacccgtttgggatgttgtagcccaattgcgcatggttatgatcacgggtaaaaattagaaatgctcatgtggtgtctaagctaaaatgcgaactagtgggtgaaaagcgcttcgatatacatatatgccggatttgatgattgtggtgaatgcgttgattagttgggtatggtagttctagatcgcgaaataacttgtataaaaattagcaagtctacttgttagttctcacttggttaatttaactctagcaattgcccaagtgttagaataattcaagtatctatatcgcgacaattcttgaatggtatatgagctgaaatttattaattgctgttttggactgcacgtactgttttcggtgtgctgtatgtttgatgaactaaattgtgttttctctagatatgtgctatagaaaagttgtagataacatgattatcttgcttgtactaaaatttgacagccataaacct

SEQ ID NO: 125896 - DNA, 432 bp, Zea Mays
ggcacacgcccttagtgtggctagggctcgtccactcggtgcagccgtgggaagtcgtggccaagctatcagcgcacgctgcagcgagaagagcgtcgagcgctatggagaggggtcgtgggcgcgcttgttcagcaagggggtgagcaacagtgcagtagggctgaccgctgggaagggagaggagggtcgcatgataggtagagagggaggggcgcatagggaccaaccatgggagagagagctcgaccatggggccatggctatgtgcacgcaggtagaagattacccaagaagagagaaaagagaaaggcaaatgagaaattggggaaaattgggatacaatgagttctgaccatggtcaacatgattagaatgttgttcttatgatcctggagagggaggagcggggatttggttactgagtctatg

SEQ ID NO: 125897 - DNA, 826 bp, Zea Mays
cagtgacctagatcccagtttgagagccattccgactatgatccagtgagaatttacctagggttgctataacaaagttgtagagctattatagaggaacaactttgctgcagagatctgaatgtgttgtcatagaaatttggaagaaatatggccctaaactatggctgtcaggttaactgaatggagcatcccatggtacagtgcctgatgaagattagaacgccagcgcgacagtcccccaccgtcgacgaccgatccttctccgcgattcgtgtcaccggcgactggattcgtgcctggagttgctggatagcatcgcggggtaaaagatcatcaccccgtgcgctggacgccactccggtgactcaccgccgtaccgccctgctttgcggcttgagcagataagctcgccggtgaaccgccatcttccggccttgtgccacgtacccgagtgtttccaccgtgtcacagtgaaccttttgcgactctccgtggctcgccggagtaactgccacggcgctggacaccaagccgctgcgccagtactcttcttcctcctccgaccgccgcgcgtccccactgaaattcccggccaccgctgttgagccctataaattgaaacccccggcagccccgcaaggtcatcacacacccagccaccgaaaatcactagcaatcgttcgtcagagagcttgaattttagttttcccccaaatcaagtttccgccaccgcagaaccgagctcaccgtggccagtcctccacaggtttaatcataccatccttgttcttgttttagcatctctgtgtgctggtgatgctca

SEQ ID NO: 125898 - DNA, 628 bp, Zea Mays
gtcgttgctctctatctcctcgggtctgggtataaagctcagcgccctcgcgcctcccatgttcatcaaaccgtagcacccgtgtgacgtcgccgcggtgtagaaacttgtccgtcgccgttgccacatactagagattgccgccgacttagggaaaaaagatgcgctcggggaagctttgtcaagggttttcagacgtctccgcatggaacttcgggggcgtgggcggccagggctcggcgaatttcttgccggtgaatgaatccgccgcggacgacccactctccgtggtcgggcttctgcgcttcgtccctgccggctgccggttagacacctttcccctgcattcgttgtcttacaccgcacacaggaactagtttgatgtccacattcaggttgagcatggctcccatcagcccacatcccagttcagtgccgaacatgtcggatagctcaacttcgagcaaagtttttcctagatcgaaataaggacagggaaatccttcttaaccgaaattgtttctcaacaacagatcttcaggtttgatataatgattacccaccaaaagttcgaaaatttagaaactaaagaggtccaaaattgagaagaacctgctgctttctaaat

SEQ ID NO: 125899 - DNA, 358 bp, Zea Mays
ggcaaggctaagctaccacttggtaaaatagtcttaccattgtcctttagcgctggccccaaagcgcgaaccaagcagatcaccttcgatgtcatcgacatggtgtacccataaaacacaattcttggcagagggacaatcaatacctttgaagcataaattcatggactctaattctatgaaaataccaggacttcgagaggtcattacagtcttcatcctagggcaattgaatgttcactgcctgggcaccaacacatagaaaaataccccagagccactagctgtggtcgacaagcatcagaaccccattcaaagtgacgaaggggccaagaaagtagccctcgacaccgctctc

SEQ ID NO: 125900 - DNA, 301 bp, Zea Mays
gaatgatcaattgttcagtgctatggagattttctagacatcttttcttatgctgaaagaccgcagagtcagatctgatatgtgtgtgctttctacagatgtttgagaacaggcgcagaggtgcaaggcgtgctcagctagaacagcaggcaccctaggaagatgcagctcagcagcagttgccaccgccacccccgatgaccattgagcagatgttcctgatgccgacccaagcagtccaagcaattggtcagaccttagcagcaatgcagcaagtgcagcagcaaccatccccacctca

SEQ ID NO: 125901 - DNA, 417 bp, Zea Mays
tgctacgagagttggagacggaattggccactgattatctatgcagctcaaccacaaccgttgccacgccttccattgacctaaaacccatgtttagtgatacaatatatcctccaccaccctcaccactaccatgacatgagccccatggttatgattacttgtatggttcctggaaggcttctccaaccccacaccatccatggatgccctgaccatgaggtgctaccgctactcacctagtgtcgccatggttccgatgaggaagacctcgaggacgacgatgacgagagcctccatctccacagatggctgctcgagttctgagcccaagaagaaatcccactctgtcagcttcgctggcaaggccaacaaggtaaataatatgcctgttcttcgtttcaagacgtacgtggc

SEQ ID NO: 125902 - DNA, 547 bp, Zea Mays
cgtcggattagctaaagagattcggttcggagacgggtttgtttcacgtttataatatggtcgcgatttttgtaatgatacggtatggtatggtctacaaaaatctaagcatacaaatatcagtatgttcagcaaaactctatgataatcgtaaccattggtataaaaacgcatttatgcatttctaattcctctcaccagtccgccactactattcgcacgtgcacttgacgaaccatgctagcagtagcagcccttaattcgatacattgggctactatagcactagctaaccgtacgtgcacttgacgaaccaccatagaaacgcttaagcaaccgttagagacgcttaagcaattcgtatgctagttagcaatagctcgcagagtaagacgcgcacagggagcttagtgggtgggtcggagtcatgccaacaggacaggacggatggagcggcggccgtgcggcatgcggcgctcgacgagtttgacaaccgccagcacggaggagagggctagcgcgttatctggctgcgcgcgcggcagtt

SEQ ID NO: 125903 - DNA, 409 bp, Zea Mays
ttcggcagttttcctcggagtggtgcttgaagactttattgtctctagcacgtctagtacattgaccatcctttttctcttgggagttgccgtgagatctttttgtgccttcggcactgttatttctgccgaagggcttataacttctaatatctttgttctctcggcctctatctcttcaatatcatcggccttcggcatcatagtcgactcttcattcttctgtgtaagagcaggtccttcggcttcaatagccgaagaggtctcaccaccaaattcgggcactgtggccggttcaatgaagcgcggtcggtgagtaaggaccttcacctttttcctcttcggtgtaggctcgcttggagcagctgaagcatcatctttcctggaagttgcactttttattttttgc

SEQ ID NO: 125904 - DNA, 315 bp, Zea Mays
gtattggtagggacaccaggtgctgcttcaactcttggaaggcttgttctgcctcttcggtccaagtgaatgggccggacttccgtaatagcttgaacaagggcagtgccctctcagccagccttaaaatgaagcggctaagggtgactaacgaccccgtaagcttctggacgtccttgatacgagccggaggcctcattgcctcaatcgccttgattttctccgggtttgcttcaatgccccggtacgaaaccaggaaccctagcaacttccctgcggagacaccaaagacgcacttgtccaggttcagctttg

SEQ ID NO: 125905 - DNA, 631 bp, Zea Mays
caaccactcattgctccaagtaattactaaggcacttgctttaatactgaattaggttgacatgaatgatctttgttcaactcttatttagtcaatagaaatttcagttaataccttttctaacaaaatctgcattgtcggatctaattcaaatgtggtcagttagacattttaagttttctactattaagtaaagtagttgtgggacatgaagaataaagtgtaaagccaccgacacaacactgggtcacaccacacatgtctaagctttatggtagcatccacatgcaactgacctagactctgtatactctgactgaagtctgcatcatgaggtgatggcggcacctactaaaccgtgtacaatcatgtgttatcatttcacatccccgaccaggaattggatgttaaatttgtcttatcaagaacaccagaaaaagtgtaccatgtatgaccccattagataactggaaagaaacttctgctgtactttgtaaagtaactatggtccatggaagcaaggaatactttatggccacagaaggatacggggagaaaagggataagagccctaactttacatgcactccatgcataaacaacgtagcttcctatagaacaaacaatgccc

SEQ ID NO: 125906 - DNA, 804 bp, Zea Mays
tgccaacccgcgctgtggcagcagagcacagtggtggacaagacagcgatcacgtctagcgcagcggtatgattacgcttgtgccgaactgtgcgcgcatgacgcctggcacccttcgacaggacgcctaatatgacaagtcgtgcggacgagtcttcgagcgcaacctctccgcctcgctcgacccaagtcatccctcgggaaagttctctgcctcgcccgagctcggccttagccaccgactacgccgtgaatcccgcagacagccactccgcccgactgtagcgcatgtcgagagatggctcggctagcacctcgggaagatctctgcatcaaccaagcaagggctctgatctcgatgagtgctgtagagaatctcaacatcatcatgtgccaggatgatgacacaccgtaagcagcctttagctcataacccggcgctgtttacaaccactatggcatgggcgtccactccctcgagggctcgggcatatagacaacccatcggtcttagtcttagctctctacgggaagtcagcaggcacaaatctactgcacggttcgccgtcacgtcagatgccagggcatgtctccttcgaatacaagactcagcttcagtgcggacgcttcccttggtgtataaataggacagtggtccctccattgacaaggagacatacgtagacgagttcttgctttctcactctgtcttagatattggcacttgcctcaatcatcactagggacttgaggacttcccctctcccgttgtgcttgtaaaccccctgctacaggcaccatagt

SEQ ID NO: 125907 - DNA, 507 bp, Zea Mays
aggggatggatgatggagtggagttgagggaaaatatatatatagatggagagagcatacatgcatgaccagttgtccactccaagttccttgcattgcctctctacgtgcacctatttgaagttccttgcctgtcgtgtctccaagagaaagaagacgaagaacaaagttccttgcttttagggcagcaccaagaaagaaagaagacgaaggagaaagttgcttgcttttacggcagcatcgatctatccgcactggtagcttcacagagaactgtgtatgtgtagtccaggtactcaaaattgcatctccattccgttcgtcgtcgccatagctaccttctcctttgttggcatcgcgagagaaagagaaaaagaaagagagagagagatgagcaacgccaaaaccgccagatttgggcctgcggccaactgggaaggataccggcgccagccgaactacacggaggcaatgaaggagggcatggactgcaggcccgtgtcggga

SEQ ID NO: 125908 - DNA, 654 bp, Zea Mays
agtattacaaaaagttcctcctcctgaaatctcaactgccatctgtcgatgaccacatagccatccactatgcaaccatcggtttccacgccagcgttttgtacaaccattgaataagagacgcacccaaaaacttgcaagagttgtatcagctattcaaaaagtatgcttggtccgaagagctacaccagcgcaagatagaatcgcaacaaaaaccgaaggacaccccgtagtctagcagaacatgggtcagactggcgcagtccaaatctgacaggccaaaccgcaaccagcagcaagtgaacaccatcgccaactagcaccccaccggagacataactcgtcactaggagtaccccacacaacagggccggagcaccaacaccagaggtagaggaagaggccgagccctgcagccacgaaggttctactgcctctttcatggcgaagactctgcacatcccactagggacagccccaagaccaaggccaccaaagatagaatggccagaaatcagccagtcgacaatcaacgagttgttgcgcacacctatcatccctagcaataccaccaacgataattccacaacgaaccaatccatcccaaccagcccaaccatatgtaccagcagcaccaagagatccaagttctcc

SEQ ID NO: 125909 - DNA, 1048 bp, Zea Mays
gccgtgtttcataattttagtaatctcccccaaaccaatgcttatcaggccgtttctccttgcataaggtgcccatccgctagcaactctgttcagttggcggcgcgcatattgttgcttaaaccctggctttcgcttcgctttgtccccaactccaactcccgctcgctccccccccccccccccccaccgatcaatggacccgccgccgattctccgggaggcgtgggagggctgcagcgccctcgtcgacatcaacgacggcgatcgcctagccttcttccgcctcacccgcggagcctcagtactacactcccccgcacccccacctccctgacttcgctactctctcccctctcaaaccaaccctttgtgtgtaaccgtacaataggtccctgattgataacaaaacagctcagaatttatctagcgatgatatagaggcaatgaagcggtgatattctgatcatatttgacttctattgaatatactgacagtgctttattctctgctccctgtgatttacatctaatttgtatgcaatttgattttccaaaacagggttggtgcgactggtgacgagattgtagaagctttaatagcaaatagctcaacatttggaaagaaaattgtcttctcgcaggttagtacaactagctagtattgtccgtgctaacgcacgggaggagggggtggggcggtggggtcatggggagagggggaggcaggggtttagtgtgtgtgtaagggatgagggacgaaggtcattggaaattgaatttgagtgagtaagatagagaagggttatctaatgatctgaactattggttttgaatatatgttacgcgtgggtgtgatttgtttggtggatttagagaagatcatgggtgtggaggtgatttggttgagtggattttgcaagtttaaactggtgggttatatagggtatagataatttcttgactttatttttctttggtcttccgaagtttcaaatttgttgacaattgatttgattaaatcattttgattgcagaagtacaagtt

SEQ ID NO: 125910 - DNA, 276 bp, Zea Mays
gccttgttggcaatgctcacgcctacgtgctgggctggtggccctgctggccgcacgccgcgcgagccgtgtgtaccgccctgctgacgatctccgcacgcgtcgcccataccagtgtgtagtctactctctctggtgcagcgacatgtgctccagttgccggcgagtcttgccgagggggtcgacgggatgaggccgattttttctcgctctgagctgctgagacgttgacccgtacgggtagatatccctactgcgtgatacggtcgagcccca

SEQ ID NO: 125911 - DNA, 898 bp, Zea Mays
gagatgtcatatttcaagatccttggtggttggtgctagtcctaaccccaactccgccgtttcataactgatacaatgaacaacaacaaaaaacacttcaaattggttgtgccacttgtgcccctctttccaggctaccttagaccatatgttgaactatcctccagtgttcactggcatcaacgcctgctcgctttgcccagggcatgcatattgccatgtctccctacatagacacagatcaagcgtgtctcgtgtaagcccagggtcccaccaagtatcttcgaggttaatgttgatgttgtcgaggatctggacatggctcatattctggttctgaagacctcatgccatgcccaaagctgtctgccgtcaagtcaaggttattagtagtagtattcacattagtccagaatctgaacacgacagacacttcggttacgaagataccaccaccaccttaaaaaccgaagatattattccatgtgcccaacctccatgtttcctgcgccgcaagtagggccgcgccatgtgcccaaagtgttgagttgttgatccaaattatgcatatcagggttctcggttctcactgcatcatcattattattcttgtaaggccgctaaaaccggcgttatgtaaacactccatattatactctacattatagtaaagatttcatctggctgtgtccgtggttttttctttcgcattgaagagtttcccacgtaaaattttgtgttgtgctatgtggtttgttggttgatctacttcgttttacttgtcgtttctgctaacatgaagtgttacatctggccaaggatctctctcttacacgacggtcaactggtaaccaacacatggataagtgttaatttgggagccacaaaactagaaaaa

SEQ ID NO: 125912 - DNA, 746 bp, Zea Mays
tgaaccgaaccacctcgccaatactgctcgatcagacgctaaataggtcgctcccatccatcctcgtctccctctcacctgggttcgcctattcctcccccgttcttgccttgcgaccgcctcggacccccaccacagaccatcgccgcgtcagcccggaagtgagccgccgccggtgattcttccccttacctgcgctcgggtccgcacgtgtggtcgggggcgttcgccaggaacccgtgaagctgcgggagccctcaattcgggctgtggacctcgggggactcagggatttatcgccgaagtcgcgtctccgccatgcgccgtagccagctctggtgcgtcgtcctcttcggtgagtcccgcgtcctgatgattcacctcgctaatctacgcgcatagcacttttcgggtcggggtttggggttgtgactcgccggattgatcttcccggccatggcctccgccggggggaagagcgcgccgccgcgcgattcgatcgagagagagaaaagaacttcggccgttggatttatcgtcaacagtgcagattaaatcgtttgtgtaccgcttcgggtgatagatctgagtcgtcggatgggaatcgtgcgggcggatcaacctagataatcgaccattagatctggatccaggggccagcgtcgtttcccgttatattaatgctccgatctatcctcgccgttggatgataatcggacgtccctggtttcaggataccccttcgc

SEQ ID NO: 125913 - DNA, 531 bp, Zea Mays
gagacttgacgcactcggcagtagatcacatttagcttggctgatggaaaagcttgaccataatgacatgacaattcaagtcggcccagggaaggagctcaaaattacaaaggatacagtgcaccttattttggggttaccaaatgctggtggaggaacgacattgggcatcgatgaagctgttgctgccaacaatttaagggctgaacttggtttatcgaaagaagattttggggttgcagctcttcaagattgtctgaggaaagggtctgacgatgatctaagcatcagatcctttttcctgatactgttcaataggttgttgttgtctactgccagctggggaataaccaaccatgaggttcttttaactgaggagatggatcgtttccaccagatggactggtgccaacttattttcaatgatttatgccgtgctgccaagaagtggcatactaggagcgttacgaacgtttctacaaccatttacggatgttccatcgtcattcttgtaagcatatcctttttttg

SEQ ID NO: 125914 - DNA, 794 bp, Zea Mays
gtagaactagtcgttttataatttccaaagacttatgagaaattaatactttagttatattgatatggcctaggaccaacttggcccagtaaacggctcagtctggcctgtaggccgtggcgccggcatggtaaggactaaggaggacctagagcctaggtggctaggaggtctatctcctgtagtcctgtactacccctgtccctaagtcagtccctatatatagaggccccatgtacccttgcaacttaaggagaagtagatcaaagggacaaagggttagcccatcttttcttcccctgacttgggcgttgtcctactggtcactcttcctgtcctctcatttctccccaaatccccctccctaatctggggcaatctaagtactaacatatatattctcccttgttcttgtgagactggttaggtgatagccaacgatctcaatatgcgaagatgtgacctccttatccataatacaaagagaatgtgcaccgccaacctaatagtaacaaaccatggagcagaaaacttcccctattgttctcttgcaaaggattgttcaggttcatataaagatccctgcaaactacaaaagctagaattcgaccgcatactttgtgatgttccgtgtagtggtgatgggactattcgcaagggtcatgacatgtggagaaagtggtaataacaggatctttgttttgtctgctgttttatgcttccctgtatgtatcctcaggtcgcaatctgttattgttgttcaggaactcaggcatgggtaaccaacttcatct

SEQ ID NO: 125915 - DNA, 650 bp, Zea Mays
caaggagcagggtctgggatcctttcattgcccctggaggggaccaactcaagtacacacttcaaattttattcctagcctccaacaacgtagcagagtatgaagccttgatacatgggctcaacattgttgtgtcgctcggcatcaagagactgatggtatatggagactccctagtcgtcatcagccaggtcaacaaagactaggactgctccaccgattcaatgggcaagtattgcgctgtggtcaggaaaattgaagacaaattcgaaggcttagaattccaccacatagaaagggataacaacacaacagcaaaagcactgtaaaaaatgggatcgagccaggcgcaagttccacccgacatttttgtcctggaaatacaacagctgagcaccaccccagggccaacataggaatgcaaggtactggatcaggcagagccagactcaaaagactagagggaaccaattatcaaatacataaaaatgagcaggagccagacgataaggccgctgtcgagcacattgcaaggcagtcggcccattatgccatcatagggggactactatataggagaggggccaccggagtcctcatgaaatgcattcactcagctatggggaagcatctgctggaagagatccaca

SEQ ID NO: 125916 - DNA, 342 bp, Zea Mays
aaacgacatggaatggtattgaatttcccaaacctgctttcatccctacataaggaagcaattagcaactgataaccacaggttggcgatattaactctgctactaaaatctatctcatcatctaggccttgcttctagcccataccttctctgctctgcctgctgcccaggtgttgagtgacacattatctgccaccaggagatccacgggaggcattggcagaggagagtaggtgggattgcaacagtgtgagtaggtgaaggtgccatggcaaggatgcttcaccaatccctactggaaccaaccatggcacagctcaagcaagtttgaagtgatttaa

SEQ ID NO: 125917 - DNA, 661 bp, Zea Mays
ttgaaagttcacccaagaagccggccattggtccttactccaaaagctgcaatccatacctggaggacagagtttcagaaatggggcatcctgcttccgttacatgtgcttcaccactctaacagaacaagcaaactgatggggggtcttagttcgaaactgcaggcggttttgaagagtttccaccagccatcgtggaaaacaatgcgcatcatgcattgtctggacaaactatgcaagtggcatgaggaaccaagcattcttctcatgacgtattcttccttcttatcgcttacgaaagaagactcaaaactgcgtcatcaggcgttcataacgaaagttttgatgaacaaccccgggctattgattcttgatgaagggcacaacccaaggagcaacaaatcaaagttgagaaagttgctgatgaaggtgaagactgaattcaggatactcttgtctggcacggtctttcagaacaactttgaagagtacttcaacaccttgtctttggccagacctcgttttgtcaacgacgttatgaccacgctggttacagaatcagaaaagagaacacggagccgaaccggcaaacatcaagaagcactggcaaggcatgtttttgtggaaagagtggggcacaagatagagtctagcagcaaac

SEQ ID NO: 125918 - DNA, 432 bp, Zea Mays
caaacagaagaggggaaaagctaggatgtgcagaggagttgtaaacatgctacctcgtgttgctcgtgttgggaataggaggcaaactggaaactcatattagatagagcacaacgtggatggtgactataggaagactaagctcatgcatcaaacattgtccggccattagagatctatttgtcccttctagaaagtgagacgaaagttttattattttaacgggctgattgtgtgccaatatttgatgattgcatgttgctacaaggaccttatgcctcagttaactcatctcagtgccacagcggtgtccgggcatgtgtatccgtttgtgctaggcgaataagatggattacacgtagcagccgcatgttgctggcttgggcttgttgcttatagattgctcggttgtttgattacaattgactattg

SEQ ID NO: 125919 - DNA, 477 bp, Zea Mays
ttcaactttgaattgtctgtttcatcttgaaggtaatattggatcattaccactctgtacgtgcctagccttaagtgataacatagaagttgccagtcctaaatatcttgaccctaggtgctcttttgtgttgcaattgtgacctgtaggtatagttccatcctgtatagttctggtaccaatatgactaactacagtgatgatctggttcgttattttgcactatgagatgtataggaataaggctcacctgcgtggatcaaactggctgatgtcaaatctggttcgttattttgcactatgagctgtataggaataaggctcacctgcgtggatcaaactggttgatgtcaaatctggttactgtgggtggtatggtctcttttctgttcagtgagtgggaagggtattcctgctgctgcctgctttattctgcattaaaaaaacacgaaaactatgtcaatcttctcagttacg

SEQ ID NO: 125920 - DNA, 460 bp, Zea Mays
tggtatccctacagtcttttgtttttgtcttaatctcaatgtcgtacaaaattaaacaggttatactcatcagcattggtccgaagatgttatagatctcttctgtctttctttctgtgagaactagatcttactaacttcaaataaacgaaagcggagtagctgaccaaatgataagtgcccttgaataaaaattaccattctaagatgatatatgattcaattctgggatgttctgtcaggcgactgtgctctttaaaaatatagcataaccaagcagtgagcacgtttgcttgtgtcggcctgtcgggcagaacgcagaagtaaatgttcatttgtaatgtgaaatactaatctagctgcataagtcctatctgtgtacgctgcagccataatatggtgaaaacacatggagctctccttcatttatttactgaaaagataataggcaggaaggtct

SEQ ID NO: 125921 - DNA, 285 bp, Zea Mays
gactcgcaagattatggcagctccctccatcaataatcacctttactactttgtcttgcactttggctcgcgtttgcaaaagattatgtcactgtccaattttagcttttttcatttgaacaatcaagatttgcgtaaccacaagagtagtaccatgctcaaattcacatctagtgtgttcctcaattttatgagtgtcttctacatttcctgcttcagcttcctcttcactagctgatgtatattctccatcatcattcacaaggatcacacgattatttggac

SEQ ID NO: 125922 - DNA, 1122 bp, Zea Mays
aaatggcccaatggcacatttccctttcacaacgcttgagcccatagagggtgaaccgactgtaagggtgattttgtccattaacggtggtgacattgtattgctcgagttagtcggagaataagacatgtcggcgacgtgccgagggtggtggcgcgtgttattcttgaatagtcggcgatgacagcaagtggcgcgtggaagagagagagtcggttgagaaaatgagaggcttggaaagcgcaaaaaccctagcaacgatcattcccttctataatcatagtaaaataaagggcaatgataataacatcagtcgtttcacacactatacaaactccgagtaaaaactccagtgtaattaagtcagggtcgatactattgcgtaattaccccattgtacattattttccaagaatgtagcaagtaaccaggggttcaaacgtacttaggctccctgattaccctataaatacatccatctgcaccccagatgataggcacttgacaagacattcgtgcaccctagcctcttgatttgttgagcaatgttgcctcacttgctcccaagtgcttgggcccacatgtcaagatccaacaatcatgccaactaattgggtaccaattgatgactctacatgctatgattctgacaactcataccaccatgtcaatatcgaccatgacaatgatctatgagtgttgttggtgtcacccgttgatagatgagtgcttatgttatgaacttttgggaactatagtctctacatttgaagccagtctataattcaaagtttggtcacatgttttagtagttgaacatcaacaataactttgtagtttgttgcagctatgtgtaaattaactactgtaatgatctaatgtgtttctatccttgaattattgagtacttgagtatatcattgcattagaaaagtaatgtgtggttatgattggtgcctatttcattgtctactaagtactataatcgttgcacttcaatgttgtataaagtatacactttgattgttgttgcatcgaatacaggagcaaattggacccaatttggatgaacactttgatgcagacatccacaagtgaattggatctaagtccatacaccac

SEQ ID NO: 125923 - DNA, 578 bp, Zea Mays
gaccgtacagggctctttggttaagcaaacatttggataaaaattgattatccaaaaatacttatattacgacgatgtgatgaatagcacctggtatagggtcatgtgatgatatcattacagtagttgaatggtggtcattcatgcgtatattacgacgatgcaagttcaaaaatactgcaatccgatgtttatgattgatcttggtcgtatgcctagcattaaacatcttgcacacagtgaaattcaagatcgaaggatcttgcatgcggccgtcgtctgtttgagtcctgctctttgattaacacggtgccacgggttttgatttgacgatagctaataatgcagcgccaaccacacgcacacgcacacacaccattgagttcttctgacatttccttcggcggtaaactcgtgtaatgcactgcgaggacaggtacaggtgcacggtggcccagctgattcagccgcggagctgccgttggttgcttctcgttgccatcgatggaattcgacctgcagaggtcgatggcgacggcacacgcatcatgaaaggaatgacgaaacacgaaaggaat

SEQ ID NO: 125924 - DNA, 1269 bp, Zea Mays
tggccaatgtctccatccgcatgtcgtggctagagcaccaacagacatcctcttttgtgggcgccatgcactaaggtttccctacgagatgtcgggatatggtgcaccaatgatttcgtccttcttcaccgccacctctatgcctcccaccaccaccctacccatgtgcctcccaccaccctcctgcacaccataatagccaacgttgcccctcttcccattcagcagatcaatgttccctcaactttctctcctcgccattctatagccaatgtttccgcaagggctgcctttctcatctgcacggacgccctccaccgttgatgttgctggcacaccagtcggtttgggtgttccctgcttcagtatgcttgacttctccacctactacgacaaggaggtcctcctaaattggctcaaccattacgagcaattcttttgtgggtagggtacgcttgcctcagatcagccctggctcgcctcataccaccttgagagtgtggcccagacatggtattataccctggagaaagatcagcgcaatgccatcgtgggagaggttcaaggatctttttcgaactggtgaggctccccttccatgtcacagtccaacactaccaggagcgcttcaatgcgtcagtgtgccacatgccgaaccttctaccagtccaaaatctcgacctcttcgttgggggtcttctagagcacatgcagtcgacatcaagctctgggaactctgggacctgcagacagccatgcacctagcgtggacctacgagcattgcgtcgcggccaccatgctagctctggcatagtagaccgcctggcctccccaacgctcaccattagtgctacttgccctgctgcacgcaattgttatggccacgcttgtgtcatctatgtcacctgtatcaccgccaatgacagccctatttgctccctcgcgctagttctgtcacctcttaccggagaagatgagcgagcatcgtcgccaagggttgtgttacaattgtgatgaaccatatgtatggggccaccatggcaacatctgttctatcttgaggtcatcgactacgtgcttgacaagtcgctcgaggacaagagcgtcgaggttgtggctgaggatgggtctgatgcctcaataatctccctccacgccatggtcgacatacatatcaaggacaccatgcacccccatgcctacattcatggccaccggcttcttgccctcctagatagtggcttgacccacaacttcatcaatatcag

SEQ ID NO: 125925 - DNA, 478 bp, Zea Mays
tagcatctaggcacgtgtcatccgagcggcaaacggctaactccggttaacttatccacaacggttgtgacccaggtgggtacggcggccggagttcatccacgacgcgatatttccttacccctctgcattatctaactgcgccgatcacaaatcaccgcggcggacgtgaatccaggcgcatggtcgtcggcggtgagttctctgcgctggcgttctgatccggtcattgtaccattgaaacccgatttagagcgcctggcagaccgacttgcaatgcctagatctcgaatttttgtgcaacaacttgccaatacatctgtagcaaacttgtagcccttcataccagctacaattctgctatagcaactaccctcaatcgagcaatagatcttactgaaaatcaagccctaagttcatccaacttcactattactaaaagttcagacctaaggctgactgacagcacaactttggg

SEQ ID NO: 125926 - DNA, 529 bp, Zea Mays
cttggacggggggctgttttgagaaaaatgtggggtttctttagcaaattgtccacaccgaagaggtatcggccagatctggtcgttagatcaaaaaccgaccgcccagattacatcgtcccttaagtgaaccgatacaggctcacaaccattggatttcagacccacggtcgaggtttgtcccagcgattgactaatctacaccgctcccattggatccgatggtcacaatttcctagcacgaaggggtaagtggtgatcaatcctagtcacacaaacgtctagatcttcatctcctacccccggtcggcactgggtggcggcgtaggcctagggccacggcggagccccactggtgtaagccccatcggcgattccaagttccaaacccgaaacggatataggataaacgattagtagaacccattgaatcctgcgtgggaggactcaccggtgattatgcatcaagggtcacgaccacaatgtgatgtggtgccacggcggtcgccattgccccggtgagaaattg

SEQ ID NO: 125927 - DNA, 301 bp, Zea Mays
cttctctgcactgttcttagacatcttagtattgaccatgaaagtttttctgctgacactcaaatttccagtgtggtaaatgttagtcaagagtgcatgaatacccctgtatatgttatccattttccctacattgttctgcaactgtgaatgtgcttgttggctttatagctatcggatcactactacttttttctttcaaaagatacacttcccttttattaattggtgcataaccctggcatgcacgattatctgcaagatagcgttatgctcaaatactttctattaaattttgcag

SEQ ID NO: 125928 - DNA, 684 bp, Zea Mays
ttgtatattaaagtatggaattatggtttgtcaactactttactactatctccactctaaataggtacttctaggtttgttttgggtaaaaaaccccgatatgttaacttttaaccaagtttgtacaaaaataattaacatatatgacaccaaattgaaggacagacctggtagagtggcgagaagcctttccactgagccgtcctgggttcgacgcaccctctctacaaaatacagggggtaaggcttgtctcggttatttttgccctggaccccactcatgtgggagccaccataactgggtctgtcctttttatatatgacaccaaatcagtacattccgaacatatatttcataattgatcaaataataccagtttagtgcttaaatgttgctattttgttctaaaaatttggtcaaatctaacatagttcgaattaggacaaacctcgaagtatctatatggagggagtattatttattgttgaatctggtttatttgatgccttgtaggaagagaaagaaatgattagagatcagcaggaaaaggctcagctagaaagaaacatgagagaaagagatgcagctaacacaaggaaggtaattatccaattagctgatacttcttgacttgcgtctatttcatttggagaacaaatagattatagttgtagagttgaatt

SEQ ID NO: 125929 - DNA, 1589 bp, Zea Mays
cgtggcaagcgctgggattggtcggcgccagctcggccactagcagggggcaacgtggtggtggttcccgtccttctccttcccttccctcccccaccgggccccagtccccttcgcgctgcctgcccccttcgatctcctgctctctttccccttctctctctatctactgttcttgcttgagctgcgatcctcttcctgaggcgcgggcgttggatgtgatacgtggttggctccgcgccatctcctccggtggcgatgagctccaagtccacctgctgctgcttatgaggtatggtgcttgcgagacttgtccatggttgcttgcttcgttttgcttagagatgctctcgccggggcagccagttgggctggtatccaagcaacctaggattggtagaattcgagcagtttctaccagtttccaagctatgtgattaaatcattaaagtgccttttcaaaattatcttctccatgtagagatagagatgtattttcagttcatgagttgtacagttcctactgaagggagacctacaacgtgctgaaattctgtgttcaagaccatgttttttttattttattatatcaactataataaatttgaaattactttcatggaagtgatttagtggagtaatctagcatgagggttagttccagtggaaattcatcaggagtgtatcttgttgggatcaagtctgtatttcctttcggtgagcgtttttttccggtccatcatctataacaacctacgatcttgtttcagatcttgctgaatgaattttgtggtttttgagccatcctggtaaaccttggcatggccagtggagagacaaacgcagggaacacccagaggtgtgcttatctcatctttaccttgaaacacactgtttgttttttctagttctagttactactggaaggctcttcagtgtttttttaaaaaactacccactgatgtgctaactgcgagacttcaagatttttgtttacagaaatcttttgctatttaagtagctgtcagaaatcttgggagcactactatatagacattttaatataaattgtgagtgctggtagccttatcttgtctttctgtttagggggaatacccttccaaatggtgacatctatgttggcaactttgctggtttagttcctcatggatttggaaagtatatgtggacagatggaactctttattatggcgagtgggatacaagcaagatgagtggtagaggagcaattcagtggccttcaggtgcttcatatgatggagatctttgtggaggtttcattgacggaacaggcagtttcaaaggagttgatggatctgtatataaaggttcttggaggatgaatagaaagcatggaatgggcacaatggtttacgccaacgatgatacttacgaaggtttatggaatgagggcttgccagatggatttggtaaatatacatgggttgatggcaacatctacattggactttggaaatctggtaaaatgaatggcagaggagtgatgcaatggacaaatggcgatactcttgactgtaattggcttaatggactggctcatggaaagt

SEQ ID NO: 125930 - DNA, 482 bp, Zea Mays
ggattgtgagacgactgcccgagcccggctggaagagctaagcgtagcccaggaaaatttgcaagcgtataataacactctacacgaggaagtgcacgtgttgtatgaccagttgcatctgaacgtgccaccgaaggttgtggcaatgggagctggtgcatcaggagcagctggcggaggaccatatggggagttggatctctttggagcccctccttctatgaacatcgcggatgatcattcttccgaagctagtagtggagcggaaggagccaatgacgtggataactagattagtgtagtagtatgtagtttccttatgtaatctaaatatggaaaagtaagttgtataagttgagtatgtataattataataagtttggaacaatgtaacaaaggttgtgtaatcgtggcatgtaataatcaagtatgttttcttcttcagatgccatccagaactcgtgctcaagacggggctggaa

SEQ ID NO: 125931 - DNA, 1196 bp, Zea Mays
cagagaccaaaggagcagcagcagctgaagaaggaatagaccatctgatcttcactgtataacccagagagataaccccttgcaaatctccagtaggcgcctgcagaggctcagtaatccagagctcccgtgactccggaatcatggatgtatcaatgcaccaggcagaacatctgaaggaaaccaggtcactcaggccagaggtatccgagtgcaccttaaatagccaagcaaaaggatttattaaatgttccaccgtagccgtctcccacacgtgcactgggatgccatctaattccaggttaaccagctgaggaagagttctgccagaagagttgaaaaatctagaccatcgcttgcagaccactgtgaaagtcgcagcccgctgaatggaccacctcgagtcgagcctttgagccatatcttcagacgggagaaccagcagaaaactatttggtgataagcgacggagaacaatggagtcttcagtgatttccaatcttggtgagagcagggatgccacttcgaattcagaaactgagtcacggttgctgatcaccgagacaaccactgccaaacgaagatcttcctcggcaacagtcatggcgtggttccaacccagcaagcatgggggtacaagtcctgaagaaggcagatggggctgcatataaatcctgctcccatcatctctgggaggggtggggggtttccgtcttttgcgagagtgacgccggcgagaacggcccctgatagtgacggcatcagcgcccccagcaaggtcagaagccattccttgaaacaaatactggctgcctgaaattgcagccaccgaagtcttcctccgccaaaccttccgaggcgctgcagggtgaatagattgcctcgtctggcacaaaccaccagaagacggataggaaagcctgctccaaacagacttcaagatcccaggaggttgctgatttcgaagacgggaccagacagaggctctttctggagcgacaccgccaagacgtgaccacactgtctgcttggaaacagctgtggaaaactgagcacgatctggagcctccgggcagcgggacgccctatgcccaagcccacagcacttgaagcatcttgtccttgaacggcagtcacggaccaggtgatttggtgagaaacagttgaagcatctgtcggaaagattggtaggtgca

SEQ ID NO: 125932 - DNA, 343 bp, Zea Mays
gaactgactaaaatcattctagagctgctgctgcctctgactcaagtgcatgaatgttgtcactagtcgagagggtctcaaattgacttggcagagcacccatattatcctgaaagctctgttgcatgttgttcattctgctcatgattggatcatgaacgatatcctggatatgagtgcaaagatcaacaaactgagagtgcatcccatcaagccgatcatcaataatgtcgaaccttgagtgcagggagagtgttggccatcaaagtgagtttgcatggcatcaaatctgccatccacatgtgtcatcatgccctaaaacctaccatccatatgtgtttgg

SEQ ID NO: 125933 - DNA, 440 bp, Zea Mays
tagcaacacaggcagcacccccattgggatcagcaacagatggagcacccacattgggatcagcagcagatcgggcacacccattgggatcagcgtcaataaattcagtcacaggcaattcttcaacagcaggaaccgaagtaccaacgtcccgatccaaactggatactcgccggaggcatctctttttctttttctgctcatcagcggaaggatcaggttgattggctcggcaagggcgcctcgggcgagtactagcaggcttatgaatatccaaggtcgtatcagcctctgggaggggcgccaccaccgatgtcccagcaggagcagcatcagaagagtcctcagccagcaaatcaagcatagcacttatctctgcatcactaggattcaggggcacctcaaaatggacttgtcgttcatcatcaggaatctccccg

SEQ ID NO: 125934 - DNA, 603 bp, Zea Mays
gacgacatggtagatttcgatgaatgatctaaagatttgatggataaggtcaccacatgattcaccaggaaaatgattaccagattcggatgaaggagaggtaggaaaacaagatctgctaggatgagcaacagaaatgctatgaagattcgggataggatctatggaaagaaacatggccatgatagggtttgtgcaactatacatcaaacaacaagtgcacaaggagacttgggttggcctagcagacaagctgtgggggtctataagctgtgcaggtgcattaccaatagcgcaacacacaagggctagaaaacaccaacacaagcatgtgatttaatttttttcaagggtttcacttgctaaccactaggttggttaaagtgggggggggtcttttcatgagcagaataggcaacctttttttgcaaagagggttgaacaattacaataccacctagatagcaagacaagagaaacacataacatgacctaacaagacttaccaatctgacacgaggtaagacatttcttatagttcctaacataacagtacaccacattattcacaagttcttattattggaataaatatgagagaag

SEQ ID NO: 125935 - DNA, 502 bp, Zea Mays
tggaccctcaactggtgtaacaatcccctacgaaaggatatgtttaagggcaccatgaagacataagcaacagttgaattcttcttccttgctaggttatatagaagcttccttgctaggttatatagaagcgggaatcgaaattttaacgttcccaacccgacccaatcatcctcccaaatacgcacttgggagttgggaccatcatgtacctgaaaggtgatgggctattggcgctccttttcactgtcctcccatgccttgagctcatttcgaagggaaccatgttatttttttacttgatctccattcccacgagtcacatatcagtcgagaacagcctgttcaactaagttttgaccagtttttaatcttcactcacactgtgcacatattttggatggacacgactggaccagggagcagtgtgaggttgttttgcttacacatccagttcaaaaactgggtattaggtgtcataacggtttgtagcaaaaatgat

SEQ ID NO: 125936 - DNA, 414 bp, Zea Mays
acaacatcctgggtagcatcaggagaggggtaacaactcgatccggtttagcaaatttttgtgaattttactcatttgtctcctctcttgagccacttaaggttgaagaagcgctgggtgatccggattggataattgccatgcaagaggagttgaacaacttcacccgaaatgaagtctggtccttggttcaaagacccaagcaaaatgtgattgggacaaaatgggtctttaggaacaaacaagatgaacatggcattgttacaagaaacaaagcacggttggttgcccaaggctacactcaagtggagggacttgattttggtgaaacatatgcgccggtagcaaggttagagtcaattagaatattaattgcctatgctactaaccatgatttcaagttataccaaatgg

SEQ ID NO: 125937 - DNA, 397 bp, Zea Mays
aagcttttgaactacatacatcaatggcaagggggagaaggtgctatagttttaattgtgttgcttgttatggttccttataggaaatttaacaggtgaccaattaatgtcttttccttgagccatttaccttttcttttctccttcttttgtcattataagcatgtgataactctttacggtcatcaccattctcatcacggttgtcgttcttgctcaatctcgatcggaggtggacttaaatctagttcatttataatactcgaggtagagattaatccactagttatgtcaatcatcaaaaccgcacatagacctagtaagaggtacttcgaacacaaatgtattatgtatggttcagagacggatccatagggggcaaagtgggctatcaccc

SEQ ID NO: 125938 - DNA, 371 bp, Zea Mays
ataggtagcaggaccgggcttgcctctccctcttgtcttcctactctcgcgaccgccaccgtagtagagatagagttgggagcgaaacagagagtggggggagattgcccctcgcggccgccggcggtggaatccttacctcgcccacgccgcgtccctggtttgcttcctgagtgcatcgccgagacattgggaagacgctcgtgcccccaggaaagaggaggaggccgtggtgtgtgggggaattgctcaccggagtctgcggggtaccgccgagccgcctcaacgcgtgggcagggccgtcaccgcttcataccgaggtaatgcgcccaccaacggattcgccttgacctcctctacgcgtagctcgg

SEQ ID NO: 125939 - DNA, 471 bp, Zea Mays
cacaaattggaaattcaaattcagattcaaaaatgagaaagaaaatagaatagaagacaaggaggataatagaaaaagaatagaaaccttactgggctcggatcactcctttcagcccacttgaggaagtcgcccgcgcagcccagttatgtctcacgcgcgctggcgccactgaccctgggggcccgcttgtctggcttccgcgctcactcctccagccgagtccgtgctccgctgcaccttgggcccacgtatagtctctcctgccgcactcggtcaccaacgcgtgggccccatcagccagtgcccaacgccatgagatcttgccttcaaccaccgcgcggagctaatgccgcgggaatcggacaccatctacctcgcgtcttcaatcccgggcggatttaaggcagccgcacccccctacccaccttgttgacccaattgcgccacaaccagttgaagccattgccg

SEQ ID NO: 125940 - DNA, 279 bp, Zea Mays
tgaccccgtaagcttctggacgtccttgattcgggttggaggcctcattgtctcaattgccttgatcttctctgggtttgcttcaatgccccggtgcgaaaccaggaatcccagcaacttccctttggagacaccaaagacacacttttccgggttcagcttcgtgcgtgttgcccgcagcttgtcaaagaccagggttaagtcttccaatagggttgaccctctcttagtcttgaccacgatgtcatcaacgtatacctctaccctatccctaatcag

SEQ ID NO: 125941 - DNA, 278 bp, Zea Mays
gcgaggcacaactgtgtattttcacccaaaatcaatgaattttggaatgcgcgtccacactattgtccacacagaaacaaatgttttcatatacacaagaaacaccacaaagaggttcgatacataaatcctaagggtagggacatcgtctaaacaggggcaggtgggccacaaagcggaaggctctagggtcaggggcgatcaggagggacctgacgtcgacccagctcgcggtcgactgagcatgggggtggacctgctcttcgttgacatccagc

SEQ ID NO: 125942 - DNA, 575 bp, Zea Mays
tgtccatggtgaccgtgtgatcaatggacaatccaacgtgttcccggcgatctaaggggtcctagcttaattggcggggtcggggagcatcaggggcacacaagtacactaaaatgaaagagcagtgggtatgagcggacctgagatgggctagccacaatgaggtttctttcacggtggcgcaaagcagatttggggcaaatttggaattggtgagctctggtgaacaattgagggcacggcttggtgcttgactaccctacggacccgtcggtgtgctcaatttatagtgtgcttgagcggtggtgttcaatttggatgaattgcgctagcggtcgagaggggaactgagtcactagtgtggtgattcgtggccttcaccgtggcagacccaccggcgacgagccaggacgatggagcggtttatggtgactcaccgtgatgtggtaaagcgtcgaggaacctagcctagccggataatggcgaacgccggtggtgccaacgcgatcgttcgcggcgggatactttggccggagtgaacaggagcttaagttcatccacacgacgatctttac

SEQ ID NO: 125943 - DNA, 467 bp, Zea Mays
tctttgcagggctttttgaattgtttctcgaacttaaaacgataagggagccgtacaagctcgtgcttctttcccgcctcttttctcttcggtattccctagccactagaagttggatatgttctgtttgataaatactcttgctctaagtgtctagtactgatgtgctcggccaccactctaaattctactttagccagctggcagggtaaccccaattgcatattgcacaacggtcgagtcatgccgaagtttaactctaacggactcataaccatgctcattagcttctccctctttttcacatccgctttcatgtagaaccatacattagtccatctagtcggccacttggtacgatagccaataaccggggccttcgtatccttccgatatgcaaaattgtagcagccaaagttcctgtgaaggccatctgctctagccttcgtctggtagtgaagttcgtg

SEQ ID NO: 125944 - DNA, 646 bp, Zea Mays
gatccatggaaattgggagcacctgtacgatgcagacacttgaatcttgtgcatgaaagaacactctatattgtcagctactagcttgccctgaagaaaattgctcgagctctgaagccctctgacttggctaataggacgccgcccccaatttgccatggtagggagcatcagagtactcgtttcgttctctactggagccggtaagttcagcctctgacagcttagagaaccgatgagaagaatctttctggatctcggcctcggcccgatcccataatcaaatgctcgtggagctggtttccaatgcgcatcgccacggcatctgccgtttcttactgcctccccaacatctcctcgcttcagtcttcacctatgcgttccagcgattgtttacagccagtagctggacgcatcggcacaagagggtccaagagcacatgaaacctcgagcatgtctgtcgccggggcatttgtttaacccacctccacccccaaatgagatttaatttttgcggataagtagggttaccaaggttcctcttgtcgttataaccggcacgccttccttaggaaacagtcattggcatcatcatttggatcttagtgctggtgtctggccactgcgaaaatcattgtagccgag

SEQ ID NO: 125945 - DNA, 279 bp, Zea Mays
atttgcgcctaaacttagccaacttggcctcgccggagttcatccacgccggttcgccgcaccccacgtggtgactggccaattcagcctcgcactgtgtccctgtgttggtccatagtattcccctgccctcgttggagctaatccgagccttggcgcaccggattccccctccccgcgaccgggattcgtcactggagttcccccgattcgcccagagctttccctccggcgttctcacgccctggtctcgatctcgtgtccggaaccccatcagcg

SEQ ID NO: 125946 - DNA, 399 bp, Zea Mays
gtcccatcgtcctcccctccgttccgcattctcctccgcacaatttcgtccagtggtgtctgcgatggtcaggaacggtggcaactcatcatgcgactccaaaacaaatgccatttgctcttgattagcctctctaccactgtttagttggttactcaccactttgttctaccgcacacaaattctgagagagcaagcgactccaacacaaatgtcatccaagccctaagcacagattgctcctcttcctgcatcgacccaacatctaccgctcaacttcttccttcttttcctgcatcgatcgaaaggtctgtattgatcggcacaatgtttgtcgctagatacgcctcttcttttctttattttcaaatcatattcttctggattattatgttattc

SEQ ID NO: 125947 - DNA, 510 bp, Zea Mays
gcgatagggcaatcgaacaagttcattcttcttctttgttccttttagcttcggcatactccattcactcaacgttggagataccctgttggctaggtattcttgcactagatctctggtgctgatttgttcagccaccactctgaattctactatggccagcggacatactgaccctggcttcatgttgcacaagggtctggtcatcccgaagcttaaagccagcaggctcatcaccatcgtcatcagtttctctctcttcttctcatcggccttaatataaaaccactcactcttccagccagttgaccacttggtgcgatagctgaggaccggagccttcgtatccttgtgatacgcgaagttataacaaccaaaattttcatgtagcctgtctactctggccttcgtttggtaatacaactcatgcactcggcagaaagcttcagcatttgggtccatcccttggcttcgaagggcccagattaagatgctgagcctagcgatagc

SEQ ID NO: 125948 - DNA, 692 bp, Zea Mays
ctcggtttaagcccatggcatcgagcgtagcagagtaaaggatgttgagcccgcttcctccgtccatcaataccttcgtaagtcgtactgaccccatgatgggactaacaatgagcaggtatcgtccggtcgagggttatgatctgggtggtcggtgcgatcataggtgatggcttggtcggactaatcgaggaaaactggagacgcttgccgagcatagagtatttcgcgtcgtcctgccttcagatgtcttcttggcgtgtagtaatctgacccccccccacccgaagatcgttaggcattcagtctcgtccgagaatgtggctcttgccttctttcgcttggcgccctgcctaggcttcgctcccgtttcggccggtgttcctccacccagaaaacttctcagtagcccgtggtccttgtaggcgtgtcgaattggatagcgatggttcagacacgaggcttcgagcagtttctcgaaatggtcattggcttcctcggttggcggttgctttcccttctgacccaccaccgccattagcgtttcatcgtgcatttgtctttctttcttttatcaggtcgccctcggagacctccattaggccccttgtcgcgcttggccttctacccgcgatgatgaaagatcgctctcaacgcgtcttctcctgatgcgtgagtggttgcgatgtcca

SEQ ID NO: 125949 - DNA, 288 bp, Zea Mays
ggagggcgtgactcccgtgagcagcaaattaacgtgcgcttttcgtaaagcgaccgagtaaaggattcagatggtggcgcggtgagaagagaatcttaccgtcgttgagttgagttgggcctactcatagataagtttgcttctttcaataccctcacgtgaaaggccactgtgtgattggccgaatcggtgaacggggagtgctgccactctcccggttcgcttgtccctatccgccgagttgggggaggttggcgtggagcgcgggcccgccactttgggtaacca

SEQ ID NO: 125950 - DNA, 605 bp, Zea Mays
agaatgtgtaagaacatttactaatttctattttttgttccaaacttcatgtgaatccaattactggctctgtaggattgtgtgctaatttatagtgcccagtgtgtcgtttgctaatttggacaatatgtagtttgtgtatagtttaccttaccttctacatgcattgtttagtttaccttaccttctttatcaagtagggttgattagtattttagtacatttgtgactggtaggatggagccatcatcactcacattgtgctcataagaaaatacccttcgcattctctgtcctgaaccactgtgtttgcttgttgtctgtttatatgaatgtaatagaactagctgaaatcctgttgtccagttttgcggatatattcaatttaatctgtttgctaggaaccaaacagatcaccaatgcaaatggatcagcagggcctgacctagccaagcaatgagttgattcatttttttgctgaatttttacaactgcataaattaaaagtactctaagctaagtagcgacacactcgtttggtcgattactgcatcaataatatgttagtttcgtgcaacactcgtttggtcgagtactaatcagtt

SEQ ID NO: 125951 - DNA, 327 bp, Zea Mays
attattattccggcccgcactcttttcctcccagggggtgaggtttttaatgaggcggagccatgtaatatacaagcaaaaatcccctgcaaaaaactaagccaatgtcgaaaaagactgcatcaacggtcttcggcattcgactataccaaagtcaccgcgagggacagcgctggctacccttgcgtgcgacactccacgcaaaagtcgcctacgggtgcagccggactagcacaataagtgcgcaaaatcgaagtcctctccaaaggactctccgtgcaaaagtcgcctaagggtgcagccggattctccgtgcaaaagtcgcct

SEQ ID NO: 125952 - DNA, 453 bp, Zea Mays
gatcagttctagccatcttctttgacggagtttgagatttggctgagtgaagatatacttcagactcttgtgatcggtgaagatgtgacatttgttcccaattaggtagtgcctccatatttttagggcatgcactatagctaccaattccaaatcatgggtgggataattctgctcatgcggcttgagtaggcgcgatgcataagcaatgactttcttgttttgcatcagaacacaccctaagccttgccttgaggcatcacagaagacgacgaagtcctggtgtatatccggtagtgtcaaaatgggtgcggtcatgagcttctcctttatgatctggaaactttcttcacacttcggggtccacacaaacctattgtctttcttgaggagctcgatcataggtcttgctatgctggagaatcccttgataaagcggcggtaatatcctgc

SEQ ID NO: 125953 - DNA, 285 bp, Zea Mays
aaaatcactgtgtcacctatctatttcactttactgcgatcctattctttctagcacgtctcttcacttataatattgctctaaatttaacactcatcttgtgagagcaattaagtgaagaagtcctctcttctctcgctcttcatctaaacttggttttgattttactaatccacttcagaccaagtttgtttttgttgagctgtttttacaggatcacctatttaccccctctaggtgctctcagttgtctcactcatagtcaccctgcatatcttccacatg

SEQ ID NO: 125954 - DNA, 364 bp, Zea Mays
cgcatggcgagatggcgccatgaaaccggggagagacgctcgtggtcgcctccatttctcctcacttgccgctacctagcatcgcatcccctccacccaagctcgatcgatgaccaataaaagaagcttgagatcggctcctgcatggccggttgcgtgtcgctgggggaaatagaatagaaagaggctagatttgaggtcgctgcgttctcaccaccctctccacttctgaattgaagaacctacgatccgttccacaaccgggcagcggtttgttccgtgctgcaaattagatcgagaggccatcttcttcatctcagagtttcgccgtcggttggttcccggagccgcgccatttctcgac

SEQ ID NO: 125955 - DNA, 1018 bp, Zea Mays
cggcgaggacggcgacaaaggtgacggtggcgagggtggcgacggcaatggtggcagcagcaagggaagcaacagcggcgggggcggcagcgacgacgacaagggcaagggcagcaatggcggtggcaaggcgccaccagcttagatatgtagcgtagttgtaggggtagtaggcaggtgtgatggtaggggtagggggcttttgctaatgaactgattctgcttaatgtaatgatacccctttaactaaagttgatgactccctcctttgaattctgagtctccagtttatgtttcatgtttgaagtcttgttggtattgaactccctattttgctcagtttttgtgtccttgctatttgattctagtgacttatctctctcggccgacctttactccgaagcaaattctctgtccgactccacttgactgacttatcatcctttcattcaatctgaaaaactgctccccttgtgctgatgctgtgataggtctggggtatacaggttctacgcctgacggtttctggcgaaaaccctagttctgttttcgctgtaacttcctctcgaaattctcatgcctccgcgactccgcgcccgattccgttctcgcgtgaaacctcatggctcccaagaagaagcagggagcctcaacagccgtcatccctcctattgatcccaacagtcagcttcccttttgcggtaaccatgcttccctcatttccgaatccgatctgctgcatcttgtccaaatgggtgttcttccctcgaaagaattgagttcgtggcgggtttgggaagggattaccgtgcccacagaggacacccatgagtccgttgtcttcgttcctttcttgattcggggtctaggtttacccgtctccccctttttccgtggccttcttgattactattcccttaacctgacccacttgaatcccaattctgttcttcaaattgccattttcgtgcacctttgtgaagcctttcttaggattagcccgcattttggattgtgg

SEQ ID NO: 125956 - DNA, 559 bp, Zea Mays
ctgggatcttaattttccacctggtgacaacgttcaagatcaacctgcaggcaacattcaaggtgactgggaccaatggattgtcaatgatcctcctgttcaaccacctcagcagccccttctggaccagccacctgatgagcagcaagtcagcaacccccattcggacctgtcctctgatagttcttctggccatattcatggcgccttgctgcagaatggtcagattctgaatgggcagattcctgaggaccctatggttgtggggccggtgccaaactttaatgcccctgccgaccatctcatgattgggccccaagaggttgatggcccacctatgcaggatgttcctcccgtgcctggggatatagctattccggatgcccagccggtggtgccttttgttaatgggcacaataacgtggggttgaactttatgttttcgcatgactggcatgcggatcctgttttgctgagtctcttagaaaggaaaaggaatgcccagtttaacaggatctgggagagattttttgctccggcggattgctcagtgacctcg

SEQ ID NO: 125957 - DNA, 369 bp, Zea Mays
ggggaaaataatcaagggcgaggtagtaaagcaccgctcacaaattgagatagaagattggagattttagataacagatatgacgtaatcaacaatgtgtgggcgagaaatgggaaaggcgacaacaaacaaaagcacaacaaaaggatggagttgcaaggaagaggaaaaggtgataaacatcaaggtaagatatagaggcgataagggcaaaggtgataacgatgaaaagcataatccatggacagagttaaggcaagactcgcaaagtgatgaagtggagaaaacaatcaaggataagataagtgaggttctgacagaagagttgaagtaaaaattcgttatcgaaggaaattacaaggaattaac

SEQ ID NO: 125958 - DNA, 684 bp, Zea Mays
ttctttgtgcaatgtgcctcaaactgtgatacatacatcttaaacattgttgaatattgagtggccaacgaaagcagtggaagactcatctaggttgagtctgtagctgtatcaccatttgtatagtgttgctgtctggtttaatttcttttgtactacgcatttgagtctggtgtcatgtcattggcaatcaaccagaattcatttttttacaacaagccctcattatcgatcatttaattatttgcatcaatttttatggtttgctttgattggagcaagcggttagcggtaaactagggaaattataaactattaatacaagatggatgcagaaccagaacaagcaaataccaagaagcaatataatattcacgctgatcatgatgccacatttgcaaattgttaatattcacctgggctcaaaatgtcgtagtaaaatatataagacgagttactctactcttaatatattaggacattgcatagtgattgtccttatgggattggactcttgagtgcatttatgtacttctcactcattctattttaaaacacttgcatcaaactcctactaataaaggtaaaaatgtcaggtctccatttcaatcttttccaaacaggtaagctttataagctccatatccattaactaatatttttactacagtatttgagattata

SEQ ID NO: 125959 - DNA, 511 bp, Zea Mays
cgaagtcccaccggtgagaaattgcgtagcctcgggtccacaatcccaccaggcgaggccatgattgacgtcccggtggccatagtcatccgcctggcccgccctcgagggatctccatcggtgagccagagtcaccccacggcggacatctcacacacagcttcctcccatggcggtcgggtataggtgacgatggccgccagcagagccccgcggcagcggcagtgggacggctatgaactagagaggagcggtgctggtttacggcagaggacagtccccacacacccgacccgcgcgcgggtggtcatggcgtctggcgatgcggggaaatctgagcatatgcgagcgaggacgagaagagaggaggtcgcgaggtcccggctagataacagggcgaagttagtgcggaaatggtggaggccgtaacaacttcagctggcaacggagccgcgcgatcgtggaggatccggtcagcgcgatccggttcacgcggggaagaaggtcatc

SEQ ID NO: 125960 - DNA, 320 bp, Zea Mays
ctcgaccgtacacccccacgcgtccctgacccagcccgagcacgagttcaccggcgtttgcccagagaaccccgtaccagcggctgcacaagccatgaccaccgtagaccggccaagccagccatcctccaccccatccgacccttgggatagcttctccgaacctcagtgaagctccccgagccgaggatcgaacaatacctcaccggagacgccagatcgacgtcgccggacttcaaccggccatcgtcgcacgtagaccgagccccacggtaagtcattcttcgattccttgtacctatagcatccttagcatcccg

SEQ ID NO: 125961 - DNA, 621 bp, Zea Mays
ggattataggacctcacgaagctacatagtccagaatcaatttatgggaataacatagaaccggaccaatcacacaaactaaaaaatcacgagatataagcatgtcaactaactgaatcgtcgaaaggagcaaggaatgagtgtcctcttgtcgaatcctccaacagtcacctgtcaaggaaggagacgggcattaaaataggtcgccagcaggccagcacatagtgagcaggagaaacacagtgaataacagcacctcatggatgtacataggccataatcagattatgggcatagcgtagaactgaaccaatcacacaaactaaaaattcacgaggtacaagcgtgcaagcatgtcaactaacaaaattgtcgaaaggagcaagggatgagtgtcctcttgtagaatcctccaatagtcacctgccaaggaaggaggcaggcattagaataagtagctggcaggcgagcaaacacagagaacatgttgagcatgttaaataatatttagaccatgtctacgaccattcttccaccagtaccttagcacaggaattgaactggtaaagaaaactgtaatttctctactacctattaaggggcagggggcatccacaggcg

SEQ ID NO: 125962 - DNA, 273 bp, Zea Mays
gtccatagggatttgtacctcctttgtttgttttctttcagatgacagtattactatagggcattgctgtgtggagcagtagctacagtcacaaagtccagtctttccttaatgaagcttgaagctatgtacttcaagtgattttatgccagctgtacgcagcatctccacatgaatctaacttttggcctgttcaataggaaacctatgttttgtctgttattcaatcattttatggacaccacctgcttacctgaccttttttcctatcta

SEQ ID NO: 125963 - DNA, 466 bp, Zea Mays
cagcagtacttggctgggggcacggccacatgtcatcctttgtcattgctctctttgagatgccctgccgttcacgactcactgtgctagaatgcaacaaaatgggcatcagaatttagacttgtcctgtctcttggtccaataccaaatgacagcagcagccaagagagtagtatctgtcctggcccggaaatcctaggctcttgttttttggatgctggtcacttcgattcagagtcttgtcctcgaattaagccctacacgacccatcacaattcattagactatggatgaggcatcatggatttaggaagctccataaaccaaacatcccctgaatcgcaaggatcaaaggtgcgggtcgctatgctatgcggttcagtccaaatatttgtctgttcattgaagcgatcgatttggacttgtctttagcattgttcgcttcacattgcagaccagagaaagt

SEQ ID NO: 125964 - DNA, 556 bp, Zea Mays
gtttgcccgaagcgtcctcgccgagtcaatcaaccaacttctcctgctgaggggaagaaaaagaaaaagagacgtcttcgccgagtgtcatgcttggatcaggatgccggtccttctgctcctgctgctgaagaagtgccagtgccagtttttgctgaagctgatcccaatgggtgtgacccgactgatgctgatcccaatgggtgtgaccttgatgatgctgaacccaatgggtgtaatctggccacagctgatcccaatgggtgtaccgtccgcattattgatgaagatgaggaagaggaggatgaaatccctctaattcggaagaacagccggcgctacatagccaacggggaaagtagtggtgttccttctctagctttgtccgccttcattggtctgcaagagttgtctctggcaaattttgatcagactctcgaagatatggtcccagaggatctgttgtcggagccggcagatggtgggatgatggatatttgtgctgatgtgcctgatgccgggttggagttatcccgagcggcgtcccgtgcctcat

SEQ ID NO: 125965 - DNA, 372 bp, Zea Mays
ggctattggggacccggagatgacacaggcgtggagggcctgtgaaagaaagaagatgaagaatataatgacattccaatatgattggaatgatgaagtcattgcccagttttactcaactctgtggatcaagctggccgatgaggaaagtccctacaacgttccttatcttaatttctacatcaaaggcagctggtacaaggtgagctaccgtcggtttgctcacattcttggattcactgacaatgatatttctgtggataagatcaagatccatgatttctgccaacctaccaaagatgaagccagagatcttcatctctctgagtctggaaaatattgggagtccaccaacatgcacaagtattacag

SEQ ID NO: 125966 - DNA, 770 bp, Zea Mays
tccaatctttaggtgagtcggcctcttgctttttgttgttcatattagtgaattatctttcttctgctcatctgtctatgatcacaggcttttgttgatggaatatctgcccagctgagatcctgtggtgccactgttctagaacaaactctgtctctaatgcagtggaacccattgttgctccagaaacaggtcgatgacttgaaaggtgtcgaatgctggttagtgatcttacaacttccctagttgtttttattgatcaacttgttcttagtcatgcatctcctttcagctgctttgtcggatatggcccaatggtgctctgacccaacggtgctctgaccttgaggagaaatattctcaaagtcaagccgacttggcccagacctctgcttctttggatggcgcacgttctttgaattcctccctcaatgcccagcttgactctgaaaggatggcacatgatgtaaactcccttggttgactttgccatgcttattgttgattgggtgctgaatgttgcttcttgtttgtaggaggagaaatgagcactcgcggcctctcgtgacaatctggacaggttatactgtgatgctagtaactccatgactatattggagaggagccaccgcttcactatgtcagacctggatcatcatcgtcatgaactgcaagtagcccaagatgaggttctgtggcttggacaactgttatcgaccaaggattccaccatcagggatctacgtgcttccaagaagcttgtcgtgaag

SEQ ID NO: 125967 - DNA, 342 bp, Zea Mays
gaatagtctgcaactgttgggcgggtaaatgctattgttttgataagaacttgcatgcttcacactgcatcattcttagttgttggccagtaaaacccgaacctaaaggctttccctactaatgtccttgatgctgcatgcacgccacattgccccacatgaatctcatctagcagctgccttctagtagccgagtgaaaacacttcatgaggactcctcctgcgcctcttctgtacagcagaccccctatgatggtatagtgggatgactgtctcgcaatgcgctctgctacggctttatcatctggttcttccttgttgcttatttatctgatgattggc

SEQ ID NO: 125968 - DNA, 353 bp, Zea Mays
gtctatggtggtctcatcctgaaaagcttttggaaatttttttgagcatttgttgtttttcatacatgggcaatgtctgttgctttcaccacatggcccgtgtatcatgaattcatcgactaaagcataaccaagcgggtcagtgttcagatccggaatctcagcgcatataaaattgtcgacaacagaagcatcaaactcctttgcgccagcagccaaccacacaaggcaatgtatatgtggcaagcctcgtttttggaactcaacagtatacaagacagcgagaactggtccgaatgtcacgccctgccttatatcagctatgaactcatcgactttcatatggaagaccc

SEQ ID NO: 125969 - DNA, 518 bp, Zea Mays
ctgctggcgtttgcatggagaaaacggctgagttatgcattgtcggtgttttttagaaataactgtcgagttgctctgcaccatgtcgacgttttagaagtaacaatcgagttatgctgggccacgtcggcgctttagaggtagctgccgagttacgctgggccatgtcggcgctttagaggtaggtgccaaattatgctgggccacgtcggcgctttagaggtagctgccgagttatgttgggccacgtcggtgctttagaggtagctgccaagttatgcgaggacatcttgctttttccgagtgatgacttagcaatttttagaaacggtgtctgacccgacaaaaccccatttatatcacgtcgctgcacgcctctgcattctgagccctaacttcaccttcctccaaacatttactctgcttccctctgatttcgtttcctttcaatccgttgacaagattgcgatggcgcccaagcggaagaaccaacattttgctgcggtggtcattcctcc

SEQ ID NO: 125970 - DNA, 432 bp, Zea Mays
cattgcaatagtttaggttgtatttaacatatcaaaatgtcatggcatttcattgcatcagattttcacatatgataaatgctccaagaccttcatggtttaaaaaactatggagcatttccttatgatcttcatggcactttttaaaaggcagtaaaattgtacaaaattgctttagtccaaggttaaaggcaatgaacgttctgcttctctctattagaaaaaagtgcaaacttctctttacccttctctttatctccctatgtctttctatacttgtacacatcctctctctctcctacaaccaaagtataggaaacatttatgcagaagtgagagcacctagagggggtgaataggtgatcttgcaaaaacaacttaaaacaacataaatttggtctataaatgaagttagtactaaaaccaagtctg

SEQ ID NO: 125971 - DNA, 589 bp, Zea Mays
tgccgacttaagtcaattgctccgttagtagggtatggtggtcaccctgagttaagtaagcgtgagcatgtcacactgtcttaagtcgttgccgacttaagtcgattgctctgttagtagggtatagtggtcaccctgagttaagtaagcgtgagcatgtcacaccgtcttaatttgttgccgacttaagtcgattgctccgttagtagggtatagtggtcaccctgagttaagtaagcatgcaggttgacagtaaacaatttgagtgcctttgaagtctttttattgatgatatatttcccagtttacagaatacaatgtcgtcccaatagcttttgaaatatagctaggggtaaaacttcctgagatgttctatgttccatgagttcccaatttccgtgccatccatttgagtgaggcgatatgatccaggccgagtgacttttgctactatgaatggtccttcccatagtggtgataatttgtgtcgtccctcccccgttagaattcggcggaggacgaggtctcccactgcgaaggatcgatgtcgtatggctttgtcatgatagcgcctcagagtttgctgata

SEQ ID NO: 125972 - DNA, 305 bp, Zea Mays
ggctggtggtgttgagcccatttctactcttcttgtggactagccatttgcgtttggttgtgttgagctgttgccatttcgttgacgaccaagctttgttccctctcaatgacttgtatttggcttctgttggctttttggtcatttgaccggattctttcttccttttctgatggtttttatgctcgtgtggtagtgttaagaatgcactcatcaagggggagattgcaaacacaaggttgatttgtcccttatggttcaggttgatgacgagtgattgacaacatgggtagtgctttggtgtg

SEQ ID NO: 125973 - DNA, 809 bp, Zea Mays
agctgcagaggtacggggaggtgggcctcactgccttctccaccgacttctcctttagcacctaggggagaccttgctccaatccctgaggtgtaggcgtggttttatccgaagccatctgccagaggggagaaaggattactactatgcatatgccatattttttaaacacgttattttattcatcattcaagttcattacaagcatacaattgccacagatcacactacgcgcgagcgtttcctaaggtgtccccaaactccctgagaagatcgtcaaggctagccagggacacctcctcaacatctgaaaagttttctatccctgagggaggcagtgttggcggggcttcctctttttggtcagtctggcatccttggctcttggtccactttcggatcttcttggcggggcgagcttctttaacttcttagcgtagtccatcttcagagtccggtatgcctcacgagtgttggcttcttcgccttccgccatgtcgagactttcttggagggacgccttttcttccttcaattccttgatttgttgctctaggctttccacccgggaatttaggtgggtgcagtgggagaaaaggtcggcatagtggttgtcaagggtatggagatatccggccatgtatactatggtagggtcatcttcattaggatatctccctgacaaggcctaaagtcttttcctccaggtaggagtatttttttgctgggtgggaagtagcgaaggggtgtctcagagacctccctgctgtagttttggcatagctggcggagggctctttgggtagcat

SEQ ID NO: 125974 - DNA, 333 bp, Zea Mays
acttacgctgcgattgacgccagcgatgtgattcatgctgactagtgcctggataacgcctcggggtgaaaagatcttcactacggatgagcttgaaacgctattccgtcctatgctgtgcccacttgcgcccgcgacgtggccaagcggccgtcaccggaacttgcgccattcaccgcggttgcgccatgccctcagggccatttaccatgtcgcactgagccgttttagatagctgggtcgtcgctggtaagcttgccacggtgaaggccatggtatcacctacgccagttactttccttctctccggccgccagcatgccaatccaaatt

SEQ ID NO: 125975 - DNA, 473 bp, Zea Mays
gatggctgcctaaaggatgaagcagggcgtgaagtgctgaggttggaggccaagctcctccagcagcagcacgaagaaagatgaaatcggcagcgccagaccgctggggaggttggagacaaagagcgtgaactctctggcggtgagatcgctgtgaggagaggcgccgacacagatccttccggcgaatgtcggcgcaccccatctgagcaggttgcgcaccaagttgagtgccacctcgggctggagacgctcgggtggatctagcaaggccatggcggctacggcggcagaagagcgcggagaactcaagggtgaaagggcgcagcgagtgatgagaatggctaccacgctcgggggagtccctttttaaagaaagattcccccactgacgccccaaaacaccgcagaagatctcgcccgacgcgtgccagggtgacccagcctctagcacggcggcccgggcccacgag

SEQ ID NO: 125976 - DNA, 657 bp, Zea Mays
gtaaagttttgcttttttatcgagaagaaaaaatcggaataggtaaagacgtatctgcagcagaggggtatccactatccagatcaaaccgcaaagagaatgataccatgaacaaacagccgattaaaattacactcaatttcagattcctcttacaaagtacaaacagtacacatcttattattattgctctagtttacggtttgaaaattgaatcatattgctcagatagaaaacggatccacgaacttaccacttgtatcggtacacaaccccatcctgtccagtaagtatggatttttctcaacaattgacaagaatcaacacccacaagtatagtttaacatactttcagcaaggtctcaaaaccggattcatatatatgaacacaaatcaaactgcaaatagaaagatcccagggaacatatcagtgcaaaatgagtaaaattatttaataaaacacattgactgcatggttgacgagtaaattatcatccattgctacaatctgaaaatgggtatcgtatttgtgtgacaaaaagtatgccatcctttgctaaaatttggatggcaggtgtctcatactatcaaaatgtcttcactatcaattcttgttcctaacagtttaaataactacaatgcaacaccacagataag

SEQ ID NO: 125977 - DNA, 1690 bp, Zea Mays
gttgattttataggaaatgatcactgggaaagtagtcgagcacatgaaacattagaacatacacaataaccaaaaacaatgtgaaatggaggcgtgaactgaaattccgtgcatggtaggttccatggtagtctggtactcatataacataggttgtatcacagccaccaacaagcccacattgaaatagtacaatagtacaatcatgcatccagatcatctgatacatttggatcatgacttgcacttgagttgtattgtaatcaaaggtttgcacatgtagcagcactcacaagtaaaggaggccagaagcacaggccccaacgcttcctccaagacagtcctttcaagtagagtgttagatttgttatggggcagaaggtatgtggatgagacttattgaacttttcgtagttagatgttcatcagacaaggtactgattcaacgagcaacacttcctcttatataccttaacttgaagagcaatttgattatgagtttatgacatagccaatccccccaaatcttgaaagacagcaatctcgaaccttcactcacccaaattcatgaggctacaatgcagcagcagaagcatccatcatggactcttgactcttccatagtgttctgtagatttttagtaccattctaacataaaaaaggacacatacagttgctagcggatcccacctgagtggcgtatgtggaaggaataaccaaggcaagtcttaccctgcattttgcagataggctgtgtccaacattagtaccattctaactaaccaaggaaaaaagatttgtaaatttcattagatgaggacaccgacagacaccttcacgaaacaaatataccttcgctagctatagaattcctgtgccagtgacacctacacccaccgaatctgtcaggatcacagaaacggccaaaaaatcatgccctcctccacctcaccctaccgacagagcccccaggcgatgagatctcggccgccgcatccaatattccgctgggcgctggcagaaagtccgttgaagacaaagagcgatcccctgccgccgggttaggggtggggactttgggtcccggaggctgatctctcccctagacctgcaatggcgggagggcggcccagcggtgggtggctggggtgacgaggcagcggcgcgccgccggccgcgggaggcggatgcggctggtgggcgcaattggggcagaggaagcacgtcgggcgagctaagggagggcagtgaagccgtgacggtcggcggcgggagcgctggaggaggctgggacggcggtggtcggccgcgaggacgacggcgcggcaagaagaggaggatggtgtcgcgcggcccgtcaaaactcagacgggtggagctcagcgtcagcgaaaccccagtggccccacgcgagttgctacaattgggcgatatcgacggacgcgagatcgagaagggggcgtggactcaccgttggcgggtggacggtggtgggcgacggcggcggttcgtctcactgtcgctgcactcgctcgcccactgcgctggcggtgtgtgtgtgctggtgcgtccgttagggagagtgagagatgtgaggaactgcgttgggaggagcgataggactgggtgccttttttgcgggtcactcctgtcgttgtcgcgttatttcggaaatggacagccacctgc

SEQ ID NO: 125978 - DNA, 276 bp, Zea Mays
gggatgcgtactgcgctgctcatgctgccgtcgacacaattacttgggaagaattctccacccaattcaggaattaccatattcctgcgggactcatgaagattaaaagaaaggagtttctatccctcaagcaaggaagtatgtccgtgagtgaatatagggacaaatttattcagctatctcgatatgctcctagggatgttaaggatgatgagaagaagcaggagctctttctggacggtttgattggacccttgcaatatcaactggtatcgc

SEQ ID NO: 125979 - DNA, 549 bp, Zea Mays
ggcttttactagtgttttgtctttatggattgcggatgtagccgttcgaacaactggctttaatacgaaatgaacagtctggtctaccaaccctactcttcttacaaaatgccctatcaatttgtagttcgaatagctggctttaataggaagtgaacagtctggtctaccaaccctactcttcatacaaaatgccctatcaatttgtagcagttgttatgcttgttctggtgacataaaacgactaaactagatgagacgtcgttaccagcatggcaacagcacaccttttttctccttaccacatcagacacaacaatgtttgaatgcctaagatccaagcctccagctgccgacaattcagatatcatcattcaccctcctgcacccctataatccatgaatccagcatgcactcgaacacaacacaaggcttctctctctctctctctctctcttttgagttcctgacactgcggttcacacactcacatggcacacacacctgccttctggccgaagcccacccccaggcaccaactcagctac

SEQ ID NO: 125980 - DNA, 464 bp, Zea Mays
ctcaaatcaccaggtccaccaccacggcacgcccacgcccaccgatcgggctcccaggatgatggcggtcggtggaagacacgacaccgtatgccctcctgtcggcggatcgatcgacccagatggatctgagagtctgagctgagtacgtacgtacgcacgttcactgttacagcgttacgcatccggtacacgtcacatgtcagtcagtggcacacggtgaaactcggcagccggattcttctgccactgcagtccaggccaggtccagtcaccgcggcgacacgagcgtggatccgctccgggttccatatgccgcgcgcgtgttggttttcgcacggccggcactggaccacggggtgccgcgccacctactgggcgggggcgggggccgtggtccgtggacacaggcgcggcaacaatcactgctagacttcgcccaagggttaacagcagcagcgacg

SEQ ID NO: 125981 - DNA, 591 bp, Zea Mays
gcggccttctttgcatcctcttcttgcctccattttggaagctgtcgttggtaaccacctgtgcctaggtggtggtggtacttgttcttctttgcgagttctgaattggctttgcttttagctaagaagtctgggttactccactgctctaggaaaaccgcccactgagctgccgaaattttgtaccttttggtcggatccaagcctttcttcgcccaattggtattcatctccgacctccagttacgaaacatggtggcacactgcttcattgcatatcccttaactagttcttcgataccccagggcagaacgaacctggtcagcatcttattccacattagattcttgacattggctgacacatctttccactgctggattatgatgtcaatattatccctaactaaaaaaccaagtgcgttccgaaacttagctcgggtctcctctggagccaggtgctgtcctatcgtgctcacttctgagactctatacgtgttctccggccacctgttcagtcctctgtcacctcgtttccgatcgctctgcttccttttccttgaggtctcggtggtctctgtcggttccggt

SEQ ID NO: 125982 - DNA, 625 bp, Zea Mays
acattgttttgtattatatataaattgctggtataagtttgcacggagagtgtgccattgaacaagtgtgccgaagtgtgttacatcaagtgttgcgttaggtggcatggttgcgtagaaaaatttgagggccgtcgagttgtgcttgtctgatgtgacgacaagaattaaaaatgtctgccaattttatacgaagggcgagtctgtgggtgattgtgtgtgccgagatgcgttgtagtagtaattgcgttaagttaattggtagtgtctcgaatacacgccacaatgtggttgtatgcgagacgaggttatgtgcatggtgggtttagtaaaaatccatcggtgtcacttgtgttaagttgaggtttatttgtgcgtggaaagtaataatgtgtttaatacttagaagtcttagtcgatggtagaaattgtctcggcttaaatagaggggtggtgacatgccaaggtagtcatcatttcctctatgtttataagtcgagtcgagtcgatgcgcattatgtgttcgttaaattatgctttgcatatagtgtatggttgtgctcttggattctagtagccacatcgggtggtcaagtaggatcattgttgggggtctgcttcatcg

SEQ ID NO: 125983 - DNA, 551 bp, Zea Mays
ggttgctaatgctttgagcctctataatgattttgaagtgactgaaattgagctttcatgctaatttatacacttggtcacgattgaatttctcacttgggagcagtgaacagtttttctgttatagtatatgataatgttgttgtaatataagagtgtcaattttgaatatcagattatgtcatccagggtttgccctgaattgtttttatgggcttgtttggtgttggaagccatcaactgtgttggttactcgtttttgatctctaaaagatataaaaaataagacaacacaagttattaaattagaagcatctccttttaactaactcttctacgactattaaagggagaaggtaataagatattgcaatataggtaatgaaaacattgtgtaaatcatgaagagcaaaatatatcactcatctagatgtatacatttgcatttatttcattccgattacaagtgttcctcggctttacacaagctagagcctgaaggtatcttcgaaggttgagcgatctagtgctcaaggctcgaaaaaggtccc

SEQ ID NO: 125984 - DNA, 655 bp, Zea Mays
gtgggttttgtcgctaccattggccgggaatttctcaccgtggccttggcaccgccgttgtgccgctgctctacgtgggcaagactcccatcggcgtaatccgtagtggatgtatgcctctcggtttccccgcggcacctacattatgtattccctggtggatgtgggaatcgagcttcagggctggggattcgtgctcgccggcgtattgccaccgctgtctgggcgccgcgatcggtgggtgtggctggaggaagaagatggatgctgaccgttcgattgtagttgggcgatggagatgggatcccatagtaatagaactcgggccttcggattgaaaacaagcggtagagattaaatcaggcgcttaccgagtcggggttctaatctggtccctggatccaggatcggacggctctgaatcaacgatacccctttgccgtgcacttctttcaaaacagcccctccgtttctacaggttcaacccgcagtcctggcgccagccgatctgtgtctaggaaattttaccccgagccccctgcatctctgtttaatatgcgcacagtccagaggtcatgggaaattgaataaataatatcaggaagtggtttttaatgagaaaataattactagaactttaataattcatagaaaa

SEQ ID NO: 125985 - DNA, 359 bp, Zea Mays
acaagccaagggacatgttgcacatagactcatgtccagttagtccacacaacttaactcatgatgctacttcattgacaatcactcatcataaactagaactatacgggcacatctcaaccttgtgttcacaatatccccttgatgagtgcattgttaacaccaccacacaaacacaaagatatattagataagaaggaaaggataaggaagaactcacaaataacaaaaggctagacaaaaagccaagtcaaagtcatcagaaataagcaaagtttggttcctaaaatacatgggcaacaactcaacacaacaaagcagaactagctagccctcaagaagaggcaaaaataggctca

SEQ ID NO: 125986 - DNA, 511 bp, Zea Mays
agaataagcaagaagaaattatgtagaaaaatatgaaggtagtttgccaattattcttatataatattattaaagcggaacgaaaacgacttcgattgacctatccacgtcgctctaaaaaaacgtggtcgtccgatcgtggatcatcggttcatttcttctcacccgcgagactctagcgtgttgcgcttctacattcttctcgcagacatcctcctcctcctcgctctctccgcctcgtgacctcttgattcttctcgaaatgtcaccccccggctctctccgcctcatgtctctcgttggctataataatatcgtatctgctgccctctccgccttccctcccagcgtcgtctccactgccctccccttcgacctccctaccagtgtcgtgtctgcggtcctccgtcctccccctttgcctctgcaccgtatccacgaccctccccctctgcctccgcgtcgtctctgtagctcggaccgcctcgtcaccgttgttgcgcccgtttct

SEQ ID NO: 125987 - DNA, 682 bp, Zea Mays
cggccctcgagatcgcactcaaaggtcgacgaggcacgggatgacctcaacccagcatcgggcacgttagcacaagcctccattgcaccatcatccactggctccgataacaagtcctctgggaccatatcctcaagagtttgatcaaagttggccagagacagttcttgcagaccaatgagggcagacaaagcaggagagggaactccactactctcaccactggcgatgaactgccgactgtttttcctcgtcaaaggaacttcattttcttcctcctcatcatccacattgacaacacaagcagcacccccattgggatcagcagcagatggagcacccacattaggatcagcagcagattggttacacccattggggtcagcgtcagtaagtccagtcgcaggcacttcttcagtagcaggaaccgaggtaccagcgtcctgatcaaaactggatactcgtcggaggcatcttcttttcttcttttgctcatcagcagaaggatcaggctgagtggttcggcaagggcgcctcgggcgagtactgacaggtttctgaacatccaaagtcgtatcagcttctaggaggggcaccactgccaacgcaccagcaggagcagcgtcggaagaatcttcagctagcaaatcaagcatagcgtttatatctgcatcactagggt

SEQ ID NO: 125988 - DNA, 573 bp, Zea Mays
gtctatgccaagctcttcttctctttcccaagtagcttcatcctctccatggtgactccattgtaccttgcacatttttatcaccttatttcttgtaacttgagtcaaagtgtccaaaatattgatgggatactcagcataagtcagatcatcttgcacactgaggtcttccattggtagttgctcctcaggtaccctgaggcacttctttagctgagacacatggaacacatcatgtacgtctgacaggtgatcgtgtagctctagctgatatgcaacttcacccactcgctttaagatcaagaagggtccaatgaagcgaggggacaatttgcccttgactttgaatctcctcattccacggagtggtgacaccttgaggtacacatgatcaccttcctcaaactccagtggtcttcttctattatcagcgtagctcttttgcctcttgaataagttcaggcccaaagaactatcttcctctagtctgatccaatatagaggagtcctgcatttcctgccatatagagtctcgaacggtgatatcttcagactggcctggtaactattatt

SEQ ID NO: 125989 - DNA, 289 bp, Zea Mays
gcgcaatttcacgccaatccgatataccaggcttcaatttcacccaattccctgtttcgagcgatcctttccgagcctagtgcctaaatttcatcttctttgcctaaattcaaaccaagcacacacttcactcatattcacccatataaacctattcgtgaagtatcggctcaattccatgtcatttcatacctcaattcgaattccaaacctcctatgacactatttctcgttcaaacgctgttttcgcgtcgtttgacctctcgatcgccatatctctcgttttctg

SEQ ID NO: 125990 - DNA, 1233 bp, Zea Mays
ggatagccaagtccgagactcctccaacacgaaaggccaaaaaataatggtaaaagcccactagatgaggaggtataaaaggggggaagaggaccgaaggtatcaagacgagcactcacgaatttgacgaaacctagtgctagatgcatcaggggtcagccggggatagggaacatgtacaactgtgtcccccatctgattccttttatacctctaaggcctgcctaagccacctggcgacggccacatctcagggagaagtgcagcactagaggaagaagggctaaccctcatccaattcagaggtatagctcgcgccataagaggagcaactccgtgctagagataagaaccaatgacgcccgcacctataatgcctttctcccgaaggatgagtttgccccttgagataattagagatctagcccttctcaccaggtatgtcatccagttggggagcctcgagcagaacgtccaacacaaagcagagaagacttggtcccggtatgatcccttgaccatagttctgcaaataaaaccattgttgatgccagcctctgtttgacaacgaaagtggaaccgggttatattcgcacgacctccggttgtgtagacagatgctcgagcacccaattggccacacctccatcgctctccactcttccctcttccacagctcgacgcagaaaaaataccgtcataagttaaaattaggctcaccgcctagataaccttcacacaaggcaacaaaagtggcaatatgttgaatcctgtttaggttcaggtaatggagttgcacctgcagataatcaaaaagaaccatgacaaggaaatgaagaggaagatctaggccttgctcatgaaaacgaatgaacgagaccacataaccaggggaggggctggaattttctcagaaccaggagctagccagtcaccatcacctaataggccacacttgaatagagctcgaaagtgcgcctggtccaccgaggatcggtgccaccaagccatagggaaacctggcgaaagctcgaaggcaaggagaaggctaaacaaggaagatggaacaacgaggaagataagaggagagtagggggaatgggtaggatggcatgattaaataaagaccaccctatgactcctcaacacactgaccaagatgcaataactcatctaacaagggaacaggcttggcccacccctaggtcgatgccacaccgacgcgcaacccac

SEQ ID NO: 125991 - DNA, 525 bp, Zea Mays
caattctttgttcttggtgctgctgctgctctcaacaagtccaccgggaggtgaaagcttgtggttgtggccgtgcggaggcttgcaaagttctggcgccaggttgggtgccaatgtatttgtaggatgtttttagattaaaacgcggatccatcgctattctagcagtctgcagtatatatgcagtctgaatgtctaattgtttgttcatatcgattgctgctgcatcgcttaaattgattttaccattcatctctgagcaaatcatataccagcatgctatagttttgtttcgaaatttagattaagcttgctacagtagcagcgacttagggcagataaacagatccggagccctcgaaatttcgattgtgtgcgtatggaaatgctggaatggatggatcttcgaaaatatccttccaacagcgttatcgaactgcaagaaaaaatgttcataagagatgtagcgggtctgtcatagaatgaaaaaagacacaaaaacacgcactatgccctggctcagac

SEQ ID NO: 125992 - DNA, 663 bp, Zea Mays
cgtggagacatatacaatacagtatatttagcgagggcgtgattttagcttttgtctccgtgtcttgtttttaccaagagagtaagttatgctactatatttagcaaaaactatcagaagagagtatagcacatactcaaattgcctattttctcaccatggacgagccaaaaattagttactagaatattaatttttgaagcaaagaaatcaatacaaacaaatcagcatcaattgtaaacgagcttttaggctggtgattacacgtggagtggcaatagcagtacaattgaacatatagaaatgtatggtggattactgaattgcgtggacttggaaatagcctcgaactaggctgcctgtatatgcgtggagagaaacccacgaggctgttcggcggagctttaccaagctaatggggatcagtgcaccgactcccattaccatgtgtatgtgtgtttgcgtgctgctacgacgactactttcacgcacgcgcacacagaaaacgcgatgctaccactccatatgactctaagatgttttgacatggctgttcggctgcttgccaataaagagtcatgtgggccgaaaggagaaatcataaataatagaaagcattatatggacatgcgtttctgggtaagtttgtttccaatcattaat

SEQ ID NO: 125993 - DNA, 337 bp, Zea Mays
caaatgcttcctgttgctctgccccctaagcgaattcagcatcattcttaagccgaaggataggggtgaaggcatcaatcttcccggctaggttagaaataaaccttcgtaaataattcaccttgccgagaaacttctgcacttcgaccttacaggtcgaaggtcccacattccgaatagacttaattcggtcagggtctatctctatgccatgttcatggatgataaatcctaaaaacttaccagccgacaccctaaaagcacatttacatgggttcattttcaaaccataccgacacattttatcaaaggctttgcgcaaatcagctatatgaga

SEQ ID NO: 125994 - DNA, 368 bp, Zea Mays
cgtcagcgtcttagaaatgacagccgagttaaaacgggccgcgtcggccacttttgaggataatagcctagtgatgatgtggtacatcggggttttagaggtaaccgccgagtgatgatgtggcacatcagtgttttagaagtaaccgccgggtgctgactgggcgcttttggaaacgacatccagctcaggaatatcctgcttatacagcgctttcaaccgcctctgctttccgtgccctagttcttgtttttctgcctccaaattctctctgcaattcagctctcgctctgttcgccagtagattcgagatggcgcccaagagaaaggcctcgagttcatccgctgcggtaattccccctgtcgac

SEQ ID NO: 125995 - DNA, 437 bp, Zea Mays
cgaaacgaaggcatcgttttcgatatatcatcaatcttctagcttaatttccttgtatgcctgggccctcaattctgtcgtctgaactctgaagcaaacaaaactcgaagcttcgttcgctaagagtcacctttgctcgtgacgcggcctgtgcgtgcctcctcatgtggatgcgatagcttgaaaccactgcgtgcgggagggttcagtattgtatttgccaaccacgcaaggtgatcgaaataatggctagcgtacgtacaaaatgccatctacaagcctcctcttcgtaattgctcgctctccttcgtttctaaataccagtcttagtttttactctgtaaattgcagcagtcacagtcaaacatctatatttaatctgaaagcgaatatatatgcatggtgacatatatatatatctgtgacgacggttgaca

SEQ ID NO: 125996 - DNA, 329 bp, Zea Mays
atattgaaagggcattaagaagcttagttctatggttggtaacaaaggaagagttgaagggtgcatagctgaagaattcaaatataaagaggtagcagtgttcacgagtgtatactttgcagacgagaacaatatcaatgcccctacattgaggtatcatgatgacaaagtagggactcacaacaatctccaaatttttgagattgagggcaagactgtcggagcatccaccaaatatcatcccgagcgcgaagaaaagttggatgctttgctctatatgtatgaaaatatggatgagatgactccgtatttcaagtaagatgaaattt

SEQ ID NO: 125997 - DNA, 464 bp, Zea Mays
ggcctcagtcagatgcagataaaattcttttcctccaggagattaaggaaatcagagctgcctgtgctggaccttgggtcattgctggagacttcaaccttatatataaggcttcggataaaaataactcaaatctgaacagggcaatgatgtctagattcagggcagctattaatgatctggcattaaaggaaatccaattgcatggcaggaaatttacttggtcaaatcagcatgctaatcctgtgttggtaaagttggacagagttttttgctcttctgattgggaggctatttttccaaatgtgctgcttcaaagttctgcttctcaggcttctgaccactgccccttactcttgggactccatgataattcctttgggaaaaaaagattccactttgaagcattctggccaaaaattgatgggtttcttgatactgttcagtctgcatgggactctgtg

SEQ ID NO: 125998 - DNA, 362 bp, Zea Mays
gcagctgttgagcatatcttattttggtaaagttaaacgagtttgtttgcaacatgctttgatctttaaagtctagaatttatccggaacaaacttataaatcctccatgtgcccagttcttcagttgacatgctagatttctgaatgcagttgctatcttctggtcccataaataatagtactcacatcacattcgctggaacccagaagcatcacatatgccccaaccacccaagagtactacagtgctgggtgctcctcaactaattgcggtggtacttcttctatttctcatgtgcgcctaggaccatgcatggacagccttcagagcaactggcggtgaccacaagaggtaatcttg

SEQ ID NO: 125999 - DNA, 764 bp, Zea Mays
ataaaaagaattgaattccagccaataatagagaaaatcaataaaaggctagccggctggaaaggtagacttctttcaaaggcaggtagggaaaccttggttaaatctgtgttgatcgcgcaaccaatttatctactaactgttttcccagctcaaaaatggttacttaaaaggattgataagatcagaagaaatttcctttgaaaaggagaaaatctggactcatgcaaagggggtcattgtctgatgaattgggctacaacttgtttaccaaagaataagggggggcttggcatccttgatctagagcgctttgcaagagcgttaagacttcgttggctgtggcttcggtggacagataaagataaagcatggactcgcttgcaactcccttgtgataaagcagatgttgatctattcaatgcatccacaactgtaacaattggaaacggcaaaacggctgatttttggagatcgagctggattcggggtcagacgccaaggaacattgcaccaaccttatacatgaaagccaagaggaagaatatctcggtgtaccaagctcttagaaacaatcgctggatgcacttctgctctccttacacacaagatggagaaacaaaagaattcatctccctctggcagggtatcaataacacacatgaactcaatgatctcgatgatactattttatggaggtggacggctgatgggaaatacagcacaagtagcgcctacaaaattcagttcaccacgaacttttg

SEQ ID NO: 126000 - DNA, 274 bp, Zea Mays
aggcgttaggatctatcagatcagtcctcaatgaccggttcaaaggataaccctttccaatgaacatgatcagctttgacgataagaaagtcctggttcagcctagtgcgactgataagggcaaaggcaaagagatcatcatcaatgacccacgggaggccaacgaaatcaccaaaatttcttcgaggaaagtggttgcagagaagaccctagatggaggggagacattgaagatcactatcctggcctccaatgctgggggacaggtgcagac

SEQ ID NO: 126001 - DNA, 321 bp, Zea Mays
cacacgtaaatacaataaagtgatgttttgctggattatcaaataactgtttctatgttaattcttgtttttgagcaacatggcatggacactgcctactaactacaaggaaagagttgtacaccagagattcagagctcctgatggcctaaccagcaggttaggagctttacatcaaaatatattcataacatcaaagaccagtgcacactcgtcgataaaaaatcctgatggttaagttctttacattagcagatagcagatagctaatcctacccatagcacacataacaaacatgatcgaaaaaattctacaacaac

SEQ ID NO: 126002 - DNA, 868 bp, Zea Mays
aatttggctgctcatcaacttttcgggatggccctatcctggtgggataccttcagcactgccgttagagacgctacctgggcagaatttgaaactgctttccgagaacatcatgtgccccaagggatcgtttagctcaaggaagatgaatttcgggaactaacccaaggtggaagatctgtcagtgagtacgtgcacaaattcacagaattggcatgctacgtgcctgacgacgtcagcacagaagccaagaagatggcccgctttttgaaagggctaagaccagaactcaagactatcctcgccagccaggatttcctcagcttcttgcacctctcaaacaaagccatacaagtggaaagggtgagggaagaagaaaaaggtcacctcaagagaaaattccaagtcctccgagctcaacatcaagataggcaccagagaatttgatcctttgggtttccacccaagggaccaagcttcaataagccagctagacccactctgtcacgtttcagtcagcaaggtcaaagctccttccagaccccctcagttgcaagcaaccaaccaccagctaatgcctgttggcactgcggagaccccaatcacttcaagaataacttcccctacttgaaggcatcgggacctacttactccaactcggtgaatggccccaagaatgccccagcgcccgcctccaaggcaccctcctccatcagccagcagagcaagacccagtatcatggcagggcacgagtaaaccacgttgatgctcaagaggctcagcaagctccgggagtagtgctcggtgagttcctagttgaatttactcccgcttctgtactttatgattcaggagcatcccattcgt

SEQ ID NO: 126003 - DNA, 589 bp, Zea Mays
attaaaaatttgattcaaattcaattaaaattgaatttatattgggaatttgaaaaataaaaaaaaagtaaagaagggaatcacgtgttgggccggccagctaacccacctcggcccaattcccgcgtcggccatctccacttttatctccagcgcagcccaattctccatttggcgccgacacgcgggccatctctgtcggtgtctccgttgcctcggttgtgtgctcagctcgctgacgtgtgggaccacctcgtcatccctatcctccagctgctatccgccacacccgttgacgctgtccgctcggatttggatcccaacaacctgcgtgggatgcgggtggatcttggctttaacccctcaaccacctggcagccttcacgcgcgcgcactctggtcgcccgccaccgacgcatgggccccctctgcagtgcctccgtctccaacggagtgcgagcctagcggaacaatctccgatccgttcgcggaattttcctcccccgtcgcggactcgtttcctataaaacggccacaccaccccgcgtcatcaacctgccgcttgttttccttgccacccccgtttgcc

SEQ ID NO: 126004 - DNA, 302 bp, Zea Mays
aagtcgcctaagggtgcagccggactaagcacaacaagtgcgcaaaaatccgaagactatccgcgcagaagtcgccgaaaggtgcagccggactaagcacaagcacgcaaaaatccgaagcctatcgcagagacttcgcgcaagagccgcctaaaggcgcagccgacccagtacaacaaaagcagaaacgacaccaagaccaattataatcatgctggcacagcataaccaatcacaccagacaaagtacacagccctcgcaggcacaggcacgcgagggcacacaactccattttacaagc

SEQ ID NO: 126005 - DNA, 380 bp, Zea Mays
ttggtgagccggctcgaaatgatactcagaggcatggtatcaaatgttggtgcccctgttgcctactcggcctggaacttgcctccttccaaggcctttacccatttcgtgtcaaatcctcctgctggtgatggcggtttgggccttagagtatggccctctgccgaagaagttagtgctttggttgctttgcttgaagaaattcctgatgatgaacggcaggttcactttgaggtgcctttggatcctagtgatgcagagataagtgctatgcttgatatgttagccgaggattcttctgatgtcgctcctgctggaacattggcggcggcgcctctcccagaagctagtaaagccttggatattcagaggcctgtcag

SEQ ID NO: 126006 - DNA, 640 bp, Zea Mays
aaaggaaaaagattgaatagtgttgggctgattctagcccagtcggcccaataccagagggaaacgtgcgcgcgcgtgcccgcgccctggcgactttgcacagagaccctcgggtttttaactaactgggaataagttctttcactatttcttgtgtcgctgacaggttgcaaataaaccctccggttttctattcctttacccgatacgtcctcgacggcgatccacgctgggagccgagctccgacgagctagaccggccggagggggccaagaccggcgcctagcttaagactaaaccaaatccatgaccaagggagtatttcccccaacataattgcactaatgatcaagtggtgtgctctggccacggtgaccgtgagcatcacggcaataccgtcgtgttcccggcgaccagaggactcctagcgcaattgtgtgggttgtcgagtatcaccggcgtgcagagaggctagaacaggaacaaagagggcataagcagacctgtggagggctggccgcggtggtgtgtggttcacggcagcggagaatcgatttgggggaaacaagaaattcggacactctggtgatcgattgctagcaatttctggtgattgggtagttgatgatcttgcggaac

SEQ ID NO: 126007 - DNA, 564 bp, Zea Mays
cgtttctggacactccagcatgtggatttttacaactcagtgatcctccccaagaaacatcagcccatactacatcaacgatacatcaactgggaaggatgtgaggctattggggacccggagatgacacgggcgttgagggcctgtgaaagaaagaagatgaagaatacaatgactttccaatatgattggaatgatgaagtcattgcccagttttactcaactctgtggatcaagttggccgatgaggaaagtccctataactttccttatcttaacttctacatcgaaggcagctggtacaaggtgagctaccatcgatttgctcacattcttggattcactgacaatgatatttctggggataagatcaagatccatgattttcgccaacctaccaaagatgaagccagagaccttcatctctctgagtctggaaaatattgggagtccaccaacatgcacaagtattacagatacatcaactcccttagcaggatgaccctcattcctaaagggggtaatcagatgaatattcttggagagagtaaggttttgctctca

SEQ ID NO: 126008 - DNA, 357 bp, Zea Mays
tatatggcctagatgtcactattataaagttttatttggtttttatgtcaaagcgggttgtaaacatatagtccgtttctcacctctctcctccacttcagcatatagttgacttaatttgtttattgcatttgcacttagagatagttcttataaaaagaacatgtcgcttgattaatcatctacatttacgcttagataatggtagcatttagctaaataaggaggctctatgcaacttagttacagacaaataagcaaggccgttatggaggaaataaattggatagtccgaccacttgtcctgatgatacagtcagtttataggtcaaaagtttgaatcataccacctaggag

SEQ ID NO: 126009 - DNA, 541 bp, Zea Mays
cggcaatgccgacaccgccgtccgcgacgccatcctctactgcaaaaagtgcagcgtacgtccatggcccctccaccgatgatcagtccgctccatcctctcccaagactccaaactgacactgccgttcccgcacactttttcaggccgccggacaacaagacgcatagcacacgaccttgtcacgtgaagtcctccgagccgtccgtcgccctgtgccgtctcgtcaccgagctctttgtctgctcatcgtctgtccgacgtgatggcggtcatggcatcgccctgtgccatctctataccacacctcgcacaaagattacagcgtccgtgtatttgaactgccgcgtgaatggctcgtgatgtacagtttaaaatccaaagtttaaacattaatccgtagaaacgaaacggagtcggccttttctgcctcacgtaccggtggtggtggcctggtgggggtgccggggagggaaggaatagtaaacagattgcggcagcgactgaaagcgtcattattccagaagaaatcctcggctct

SEQ ID NO: 126010 - DNA, 666 bp, Zea Mays
atttggaggctgtagcagtcctggaaacactaggcatgatagtaggtatgtttctagtcaaatcccatcttgcagaagtgttatttgatactggagcaatgcattcatttattactgcatcatgggtagaggtgcataatcttccaataaccaacacgtcaacaattcaaattgattcagcaggtggtaaagttcgagccgatagtgtttgcttgaatgtaagtgtggaaataaggaggatatagtttcccgctaacctcatagtgatgggtactcagggaatagatgttatcctaggaataaattggctagataactaccaagcagttatcaactgtgataagaggacatttaagttggtgtccccactaggagaagaagtggtgactgagttagtctcacctgagccaaggaaaggaggttgtcaccagatggatagatagcaaggaggctgatccacccgagactatcaaggttgtggtagaatttctggatgtgttcccaaaagatttaccaggtatgccacctgagcggaaagttgagtttgccatagagcttattcctggcaccgcccccatttctaaaagagcctacagggtatctagaccagagttggttgagctcaagaagcagatagatgagctcttagagaaaggttatatcaga

SEQ ID NO: 126011 - DNA, 583 bp, Zea Mays
ctggggtccggtgccaacacatgtccaggcctagcctggtgcggacctatccgcataacgctactactccccgctcaagcggagacccgatgctaccacatggcctaccatgcgtgacgtaagcccacgggcggagcctgacgtaagacctctgggctgcgctgtctctgcatttattgcgaagaagacgcgccgcctgactaccccactgacaaacgatgtgccccttcagcatttaatgtgtcctgtccactcagctggcaggcggcgcccgggccatcctgcaggcggcgtgcctatccatctgtcggtaccctgcatcaggggtaccccttactacggtatgaagacacgatgcctgtgcagctatccctaaccgcgtggagaacagccccaaggatatctcgtgagcagttgaggtggtgttctcggagacaacgtcatcaggcccagacctcctcaagaaggcgtaggacccctgtgcgcacaacccggacccccgaagtaaagcagcccggagccattggatggagttcggaccccaccaagtaagctccagaccacccataacaaggtcccgggg

SEQ ID NO: 126012 - DNA, 333 bp, Zea Mays
ctcaaagatggccggcctccaagtgcttcaaacgtcgaacctggcgttgacacaggggatagggccaggccaggccaggcttcattgcggagtcaaccaatcgaccttgagatgactgaaataaacaaagtccaaaaaggagccaattcctcttcctcatcagtggacgtctacgctacatgcatgtaccgaccggcgacgggcggcggcgagctacttttctctgctgctggcctcgctctcgccgcagggaatcgatcgacagacgacagctagctagctagctcgggcggagatggagttattgctgtgtggctttccacggtaccatcc

SEQ ID NO: 126013 - DNA, 769 bp, Zea Mays
gcagatggcttcggataaaaccacgcctaccgcctcagggattggagcaaggtctcccctaggtgctgaaggagaagtcggtggagaagggagtgaaacccacctccccgcacctccggagctgccattagacttagcccaagttctggccaaccaaacccgactcattgaggtcctcaccagaagccttgagaaccagtgcccgaatggtggaaggcctcaggacaggattggagattttctaaggctcaagccttccacatttgctggatccagcaacccactcgacgctgatgactggctgcgcacaataaaaaggaagttacaggccatcggatgccctgaaaaccagcgtgttcatcttgctgctcatcaactcttcgggatgggcctatcctggtgggataccttcagcgctgtcgtccgaaatgctacctgggcagaatttgaagccgccttccgagaacatcatgtgcccctaggaatcgtccaactcaaagaagatgaatttcgggaattaactcaaggagggagatctattagtgaatacgtccacaaattcacagaattggctcgctatgtgccagacgatgtcaacaaagaagccaagaagatggcccgtttcttgaaagggctaagaccagaacttaagactatcctcgccagccaagatttcctcagcttctcgcacctctcaaacaaggccatacaagtggaaagggctagagaagaagaaaagggtcacctcaagaggaagtttcaagtcctc

SEQ ID NO: 126014 - DNA, 321 bp, Zea Mays
catgaacagacctcgaacaagctagccacggcgaggtcactatgcgtggtattttggaccgatttgggggaaatcccaaattgaggctctctggtgagtaattgggggcacgaacgggtggattggatgctggaatacctcacggagccgagggtgtgctcaatttataaggcccttgagcggtggccagtgaatttaaaggagacacgcggcggccggagaaaaggatgggcactggcgcacgcgattggtggcaattaccgtggcaagctcaccggcgatcaccggatgggctaacatgagtcacggcggtgtggttaa

SEQ ID NO: 126015 - DNA, 1130 bp, Zea Mays
gaaaactagaggggcctctacgcaaataaacctaagactcagagcacagtagctagggacggcgggttttattatgcaaaagccaagggtttattcgcaaaagagttaagtgaagaggtatcgttggatatggggcgcccgatccgaatcctacgcccatgattaaatcggctcgcgtagtgaaccggtacacattgcgggccgatggatttaaatcctctggtccagattttaatacatcgcgatcgaacaccatcagccgatccaacgatccacggctgagatgagctgggccgaactggtacgcaacatctaatcctaaccgtcaacgcaaagatctacggtccaacccttcccttccccagatctaatctcatccactcaaacctcatcaaacggccataaggccatcttccacctggcaacacccaagcagcggcacccacaaccccgcggcggcaagaagcccaccggtggtcaccgacctccacaccccaagccccaactaccgattcgatcatcgattcgcgcggagaagaacaatgcgaacacctgagggggtacctttttggaagaaacggcaggaacactgttggccacggcagggagcggatgacggtgagggaaggggccccgatgagcgattcggtgagccggtgtgcaaatttgtccaggtgttgccaagacgagcttcagtacgccccgacaacaaaccaggaccacacaacggtctgtaagcaacgatgaagaccccggacggcggtggcggcctgagcacctacactatcaattcacggtgaacccgtagagcgaccaaggcaagtcccgggcggaatttataggggcatagagtccgcggagagatgaattgctgattccgcacggctggcgcggaggttgggccccaggatttgcggacggcgttgagaggatctcgcgtgatttcgttgatacgaagtctggttggggagaacacccgagcggaaccagtccccgcgtgcggaatgaggtcccagatcggagcaggccccaccagcgatgtcctccacgagtgccccgaagaggaggggtcgtttgcgccagctggagccgcgaaccttgcggcggctgttacagcggcgcccgaccca

SEQ ID NO: 126016 - DNA, 402 bp, Zea Mays
tggatcaattccccctgaaccggtaactcatgactaatcaaggccattgactctggatccgacgaccgagaatgactcgccccaaacagaccggaccacggcggcgcaccaaccatccacgacggagcactcgcccttccggtgacccactgtcgacgccccagagctcccaaactaaaattaataggtcccgacgcaaactataaaggaaagggagctgggccatggccttacccgcactggaaggtagcagaggtcaccggctacggcgcagatggcttcacggcggcaccgaagtcgtcgacgagaaattccggggcaccagaggatcttccgcgcccccaatcgcaagaacaaccccgcccgtcggttggacacgccggtgttggccagggaaccacg

SEQ ID NO: 126017 - DNA, 379 bp, Zea Mays
ggatttcccccgccagagatcgacgtcagtgaggagcccaggctgaaacgatgcatggatctaatcctacgcgccgaattgagatcgaacgacacagaggtccctggcaaccccgacagcggagtacgacgatagtgccctatccatggtgatttctcaccggaggagcgccgtcagcgtgcacgatggcccatccgacaccaaaaagtgcgcaaaacggaattcatactttcgcgattacaatgggggaaaacttaccggtaatcgcacgcgcaggagctctgcccacgaaatcaggcggaatcacggcggctcagcggctccggtgagcattcaacatcgccctgatggtcgaaccctaccgtcgagtccacgaacg

SEQ ID NO: 126018 - DNA, 309 bp, Zea Mays
gaaacacaggatgagacgatcgagaggtgaaaatgacgtttgaacgataaatagtgccataggaggtttggaattcaaattgaggcacgaatcgatatggaattgagccgatacttcacgaataggtttatatgggtgaatatgagtgaagtgtgtgctcggtttgaagttaggcgaagaaaaagggattagggcactcggctcggaaacgatcgctcgaaacggggaattgagtgaaattgaagcctggaaactcggattggcgtgaaatttggcaaggatgttgctggaagtgttgtgaaggtgcct

SEQ ID NO: 126019 - DNA, 415 bp, Zea Mays
ctcaactgcccaaggaaaattaaccgagtcattcacagggcactttgaattgtttatgcaagtttatttattgtgcacgtctaggatgaaatcgtgaaactgagagtcaaccaagacagacgggcagccaaagacaagaggactactactgctgccggagtaatttacatcgatcagctttgcttcacggggaagtaaaacttcttctggagttcaataatgatacaacaagcccatccacatcgagtcatcaggacctaccgttctgaatttactttccaataatcagaatcggtcgctatcggagtatccgtcaatgagacgcagattcatggtccactttcagttattgcatcttgcaatctccgtggtccattctgtgatgccggaccggataaatgctcatcgccttgtc

SEQ ID NO: 126020 - DNA, 294 bp, Zea Mays
cttttgggggacttcgtcagctgaggtcttcatgaagcattattgtttacactagcagaaaatggttgtagatggggttgttgaccaatttggtagttacgcctttaccttgaagatcggaaagactaaggggaaggtagttcaactaatcccttgtgcgaagaacaagtggggtggttagaggagaactggttctatgtgtgttgtccgagcggtgaaggttggcctcaaccgagcatgatgtcttcattcaattttgaagcctttccatgctataaggttgcagaaaaggat

SEQ ID NO: 126021 - DNA, 428 bp, Zea Mays
gaaacctcctcccccgaatactccgaatcgccgaagtcctccgagggaggacttggatcgtgcttctacttgtcgccagcatgatggggcgagccttgacttctcttgcctttgcccatggtcggatggagaagaggagaaagggagaagaatataacagatgatcgaaggatgagtgaagagaacaacggtgcaagcaggctatttatagaggccgggagtgaccgtccacttcctaccacgctcgtcgaacagtcgcaagtattcaataaagaattcaagccgcctgaaaatgagtcaggcaacagacgccgcttcgcgtaacacgacaccatttggaccaaggtcaactcctcaggtgatatgattacaccccacggtcacatcaagttactactctaggacagtgtgctaaacgctctacgtac

SEQ ID NO: 126022 - DNA, 358 bp, Zea Mays
gtcatttggtagggtgctcatgtgggaccctgacccatataatgtgaccaggttgcttgttcgggccagagtgacgtctctccaagaagttccccaattcattgttttttcgtttgttgaaggttttcagggagtttcctagacagtttagtgtgacattgttcagcagtttatgcttggagcccaacctgaagatgaagatcctgtgccaccttacccacatgatggccatcagcttccagtgaagttctttgggatgggtcagcttgtggtcaactttcagtttgatctgaatattccccctcccatgggagggatcaatgaggaagaaaacattgccaataatgaggatgatggt

SEQ ID NO: 126023 - DNA, 297 bp, Zea Mays
gaatgttgtcttggagatatcttcttgtcgaaccctgagctgatagtaaccttaccttagatcaaccttggagaagtacttagcccctctaagttgatcgaataagtcatcaatctggggcagggggtacttattcttgatcgtgatggcattcatatcacagtagtccacacatagcctcatgctaccatctttctcttcacaaagagcattggggctccccaaggtgatgtagttggtctaatgaaacccttctggtgaagctcttcaagttgcttctttaggtctacaagttcc

SEQ ID NO: 126024 - DNA, 614 bp, Zea Mays
gatggaggagcaacggaggtcccggcccacgggcagggcggatctgtggcggccgaacagctccgttgagaaattccgatccgtataagccaagttatcagacgatgttgccacactcgtactccttgatatatggcgaagctccagatccaaatcccaagctggatacgcacacgcggttgagcttctggtgtggcggccatggcgacccctggctttataagggctaggcggggtccgcgcggggcgcctcagccgaaacaacccgcatactccgccgtcgtcgccaccctattgtgccagcaacggcggatttgtagcgccaaaccaccccaacccgagatacgcgcaacggcaatctcgcgcgcgccggtagcctgagggagaactagctgaccactagggcccgcgtgacagccaaacgacccgcatgcaacgagaccgccacccaggccccacaagacagcgcctaagggtacgcgcgcacccgagggagactggccaaccgggctggcgcacggagaagagtgggagctgggccggcacctgaaggacaaagggaaaagggatgggccgctggttgggtcggttggccgagcggcccacgaggaagg

SEQ ID NO: 126025 - DNA, 673 bp, Zea Mays
tgaagatcggacgggcgggatcagaccggggaggggcgaacggctgtgggcgatgctgctcttctccgcggcggtgaggtcgccggagctgaggcaggcgtgagctagggtggctctggggtcgccggagttgggcagagagggacaggacgccacggcgaactcaatggcacgaaagaggccatgagtccgagggcagagaggggagaacggcggggagagggtctcgggcgggccggagtaactccggtgaggaatcccggctgccagagggggcaatcggccgtgatagggctcgggctagttccagtagaggtgggggaacaccctgggccaaagcccaggcactggacgaggttggggatggccggacaccacgcgagcacggcggaccgccgtgaccaagcaccagcgagccaaaattggccgagcacagagcgcaatagggaaaattaggcacggggacaggtgtctcacctcgaggcggagcttggggaggcttggcgcgttctccggcgagctgggtggtcgagaacgcgggcgcgggtctccggtggcgtctggtggcgagggcagagctgcgcgaaatgaggcgggggtgcgtgcggggcactggcggggctctaagaagggagctaggcgcgtgggcgggcgtcgtggccgagaaatccgg

SEQ ID NO: 126026 - DNA, 561 bp, Zea Mays
gatgtggctgcggcagagacttcgccgcgtgtggagggtgccgaggatcttcctggtatgagtactgggtgtaggcggcgtggcaggcgccgtcgcatggggatggagcgtggccgacttcgagtagacggggttggtaggcgagaattgttgtcttcgccgaatggggcgggtataggcgaaggggatcttcgggagctttttgagggtgaggaattgaggataatgttgtttaattacagggagatgggtatcagtccgaaggttgagccgatgtgataggcgattccctcgccgtgtgtgtgtaataggcgatgccctcgccgtgtgtatgtaattgtaatggtgatgtgacctgttggccatattcgtacacttgtattgttccggctgcgtacatgggcggctttgtgcggagtatctttgtaatgatagacttcgattaacattattccgggtgcgcccttaagtaactgttgcgctatcttttgaataaaagacttcgattaatgctcctgtcgtgctgtttcggctgcacccttaggcgacttttgctcggaa

SEQ ID NO: 126027 - DNA, 369 bp, Zea Mays
tcctccggatttgtcctatatggcgcacgatttggcaaagatgcaccaggaataagatcaatttggtgctcaatccctcgtgtaggtggcagcccctctagtatctcacttggaaatacatcagaatactcctgcaaaatgttagcaacaacaggaggcaaagaatgttgtatatcttgaattgaaatcaaagcatccttgcataccaaggcataagcaacagaagtggaagcaaataattcattacatcagattttgttgcaagcaagcaatgtcctttcaattttatcccatctttgttattaccaacaactttaatattcttgttgttctcagatttagctttggtagctttagcaatatcatcac

SEQ ID NO: 126028 - DNA, 604 bp, Zea Mays
caaaggcagacgaagagacaaacagatgagataagaaaacaccgtttgcctactcacctacagaagtcgacgaaccagccgacgccgcaacctaccccaaacccagtcttcacttacacattgacaagacagggtgaagacgaatcgaccagaggagtctgcacgacgaccaagagaagattcctacccatcacatgtgaagaccttggtccaccagctccatctgatgctccgcgctttatattttagtattcctaggcctggctcctttatacatgtcccccttagtctatcaaagagagggcacttgcgtagaaaaagggatggacggcaccggaatcgagcccatccaaggactcggggatagggatatatacagtcaaactcgctcggaggcatctcgaactagtctcagactttctcaagttctcatcaatacaactcacaaatatagtatagtattacgctctgacggcctgaaccactctaaacactcgcgtattcttatatggtattcttatgttcgttcatctctctaggcacaaaccctaggctacctccatgttcttaagattttccaccaaccggtaggagtttattctta

SEQ ID NO: 126029 - DNA, 512 bp, Zea Mays
atcatgtgcgaacgcttcagaaccgcccattcacagatctacggttaccctctcctttcctctcgatctaaccctaggtgttggattgccatccaacggttacctacattccccgctctcaacaaatcgtggccgaccaacccgagatcgacgaccaacacatcttcgtctccaacgggtcacatgccgacgcgccccagggagagatgtagtcatcgacggtggcgccatggccggaaggtttcccaaagccaacccgtgtaccatgctctaatctgaggagccccacacgatgccctaagcaagggaaatgcaatggacatatacgtaccccacagtgcgccgcagagagccccggacacggtgagcggcggcccgccaactccggcgaagaattcccgcggcctacgccaatccttttccgattgttctcttgcccaacttctacgtgatcggcctaagctccgggtgacaagattggggcccaaatcgtgttgttggtgattatccac

SEQ ID NO: 126030 - DNA, 573 bp, Zea Mays
gggctttcttcttccgctcagcctagctcccttggtttttggtcttcttttggatttccttcatgggggcgagcttctttagcttcttatcgtaatccatcttcagggttcggtaggcttcacgggtgttggcctcctcgccttctgctatatcgagacactcttggagggatgccttctccttcttaagttcctcgacctgttgctctaagctttccacccgggagtttaggtgggtgtagtgggagaaaaggtcatcgtagtggttatcgagagtgtggaggtatccggccatatagacaatggtggggtcatcctcggtagggtctctccctgacagggcctgaagtcttttcctctaggtgggggtatttgtgttgttaggtgggaagtaacgaaggggggtttcaaagatctctctgcagtagttttgacatagctgtttaagggcttttcgggcaacactttggcaagtgtctgggaagcggtgcccgatgaaggtgacttggaagggagggtggtttgggtaacttcggctttctcccaggtagacctccatagagcacttctcca

SEQ ID NO: 126031 - DNA, 306 bp, Zea Mays
tgcgggatcgccgacgacctggctccggccatgtccgccgtcgtagccggtggcgttgccgccgtgctctgggtgtggagaagggggtaggtcgtggagcgtcgatctcataacggacgatcgggatcaatactctgtgtaccgattcgcgccgcgtaatctgtggcgtcgatccggagttgggcggttaggatctagtcgcgtgtacattgaacctggacccttgatcacggatctgagggcccgtttgcataccggttcgggataaaaccgatctaatccacaccgtcagcttatgatccaacg

SEQ ID NO: 126032 - DNA, 404 bp, Zea Mays
gtatctttcaaattctagggtttttgccctaggtcaccacataaaacttatagacctatcaaaggagaacaactttgcttaagagtgtgagcatagttgttaagaaaatttaggagataattaagcccaaagttggactgtcaggttactgggtctgaattttcagacaaacagtgcaatcactgagactttgagcgtggattcaactatgatccagcaagaatctgcccatggctgctatgacaaacttgtagctgatttatagctctccaacttttgctgcaaagcatggagtatgttaccatatagacttgtgagaaaatcggccctaaactaggctctatcaggtcgactgaatggagatcgccatggtacagtaccccataaggatcagatcgccagcg

SEQ ID NO: 126033 - DNA, 427 bp, Zea Mays
tttttttttctctcctcatcattagtcgcagcagagagagagtgagagagccgcaatagtactacgactctgagaccttgagagagagagagagagattggagatgatcagatgataggtgtatgtggtgtcctattggcacaaggcgtgtagtacgtacgtagggtacagggcacatgaattgagatagatttgctggtgacagatgaatcacagacgtccggtccggccaatgcacactgacctgccctgactgacacagctgcgtgtgtcagacgaactaggaaacgtccacgtccaggcctcttgctatctagctcgcttctttctttccttcgccttttggaagctgtcgtatgccaggattttaatacagtatacttgtaccactatatagtctatagtctatacatacttgttgtatata

SEQ ID NO: 126034 - DNA, 491 bp, Zea Mays
ccactgaaagtattttggaatttaaaccgatatggtagccttacaagttcaaacttctccccttcatcttttctcttcggcattccccatccacttgatgttggaaaagttttgttggccaaatactcttgtaccaagtcctgagtgctgatgtgctcggctacaactctgaattctactttagctagctggcagggggagccgagttgcatattgcacaatggccttgtcatgccgaagcttaactttaagggactcttcaccatgctcatgagtttctccctttccttctcgtcagcctttacataaaaccactcgttggtccagccagtaggccacttggtgcggtacccaatcacaggagccttcatatcttttcggtatgcaaagttgtagcatccgaagtttttatgcaggccatctgctctggccttggtctggtagtagagttcatggactctgcagaatccttcggcattggcactttttcc

SEQ ID NO: 126035 - DNA, 328 bp, Zea Mays
gaagacatggacgaggaggtggtggtggcggtgcttgttgttgcgtctccaacacagcaagtctgtcgacgatctggaataatcgtcgatccagcctctcgtaagtcttgccaaggttcatgtcaatgaaggcatcatgcaatgacttgtggatcgtctcctccatttgctcctttaggagcttgttgtttgcctcaagatcttggcagctaacacattcatcgaagtcagtagggatccttgcttcttcgtcgctgcctaccatcgaaacacaaaaacaggaaacaaacgatgacggttatccctaataatttcactacacgctcct

SEQ ID NO: 126036 - DNA, 436 bp, Zea Mays
tggggagagagcaggtccaatagccatcaaagtccaatgacaagggggagaagaggggagaagaggtgtaaagccagtaggagggaggtgttggccatggggtgataaccctagatcttggctagtggaggctaggagagagagagagaggaagagaacctgtaggttgataccatgttagagaatgaaaatcctaatccattgatagtgggatgcagtattgaatatactttaaccctaatgggctccatgggctgggctctaggtccttaacacatatatagtctaacagtatggtcagcagactttgtagggaaaatggaatcattgcctacaatcatgaaggagatgtacaattaggatgtcgaatcagggaaacattaccatcatctggtgtcttgtagttggaagcactagagccgacctagtaggtgac

SEQ ID NO: 126037 - DNA, 541 bp, Zea Mays
gattgaattgtgggagatttagtggatggttgcgcaagaactttgtaacaaagtgatagccggtacattggacaacaactttgctacaaatggattagtgagttactacatcaaaattggagaacaaagcctttcattttgctctgtcaggcgctctgaagaagatcccgatggtacagtgtctgaaaatatcagggatgcaatgcaccttgccaccggtgacctcagcgactggattcgcaccgaccaccacgatttgtgctctctagtgtgcagattatgatcagcagtgaaaagatcttcaccgtggatgagaccatgagctggccccgtacccacttgccatgcggccagtctaggtgacctcgccggagtttgtcgtctgccgctcggatgccacgtgcctcaaagctttaccacgtcgtagtgattcagtataagcagcctgtccatcgcctgaagcattgccttagtgaccgccacggtagcttgcgctagtaacttacccctctctccggctgccagcatgtcttccccaaat

SEQ ID NO: 126038 - DNA, 398 bp, Zea Mays
gatgatcccaaagaccttcgtacgaaggtaggatcaaagcaccaagtaaaggcgcctaagactcagaactaattcctaagagaatgcagggttagagagaaaaacaatggactaaaggtgccaaagacttagaagtcgttcctaagggaatgtagagtcagaaagaaaagcactaaagtaaaggtgtcgaagacacagaaatcgttcctaagggaatgaagagtaaaaaagaaaagcactagagtaaaggtgtcgaagactcagaagtcattcctaaggaaatgtagagtcagatcctgaagaccttcagatggaaggcgggatcagttatatttcgatgtatcttcgtcattacatctttggtaacatgtacttttgcatcatagcatacatttgca

SEQ ID NO: 126039 - DNA, 463 bp, Zea Mays
tggccacttggtgcgatagccaataaccggggccttcgtatccttccgatacgcaaaattataacagccaaagttcttgtgaaggccatctgctctagccttcgtatggtagtgtagctcgtgcacccggcaaaaagtgtatggtagtgtagcttcggcattagcatccattccttggcttcggagagcccatatgaagacgctaagtctaacaatagcattgggggtcagctgatgaaggtatatttcaaagttctttagaacctcccctatcatgtcatttagggggaaccgaagccctgctctgaagaagctcttaaagacgataactttgtcctccctcggctctggaattacctcttccccagcaaatcgaacaagcttgctctcagactccccgaaatagcccagttttttcatcatagtcatgtcatcttcagttacagtagatttttcaaattca

SEQ ID NO: 126040 - DNA, 277 bp, Zea Mays
tgtagagaggtgatgacatgtcgtaagtagtcatcacttcctctataattataagtcgagtctatacgcgttaggcgttccttaaattgtgcttcgcaaataagtgtattttgtgtagtgtggattgattgtgagtgcatgtgtcgcaagaaaagaattagtgcgcatataggcgatgaatgggtgtgatgaaatggtgacatgccttcgtagtcatcatgtcgtctgttggtgtcttaactgaaggtcatagagaaaggtcgattacctgtgtgtt

SEQ ID NO: 126041 - DNA, 731 bp, Zea Mays
gatgtctactgaacccaatcaggaccaactagagatctctctcccatggtctcccagcacagaggggagatacaccgcctgccatataaagcctcatatggtgccatcttgatgctagcctggtagttgttgttataagcgaactcggccaaagtgagatgatcctcccagctacccttccaagatagaacacaagcacacaacatatcttccaaggtttggatagttcgctccgactggccatcagtctgagggtgaaaagcgacactaagggagagtttggtacccaatgcactgtgaagactctctcagaatttggatacaaatttggagtctcgatctgaaacaatggacttgggcaccacgtgaagcctgattacttctttcatgtacaagggaaccaacttttaagcagaatttgtagtcttcatgggaataaagtgtgcagacttagtcaagcgatccactaccacccatatagcatccctgcctcgaggagaacgaggtaagcccaccacaaaatccatggtgatatgctcccacttccactccggaatttccaatggcttcagcaaacctgcaggcctcttatgctcggccttcatgcactgacatacttcacatgcggccacatacttagaaacgtcaaccttcatccgcttccactagaagttttgcttcaaatctcggtacattttggtttcgccagggtgaacggtgtaacgcgtttt

SEQ ID NO: 126042 - DNA, 451 bp, Zea Mays
cagaaggggtgcatcaggcgtcctcatgaagtgcattctctcatctactagaaagcgacttctggaggagatccatgccgggcaatgtggaatacacgcagcatctaagacactagtcgggaaggtcttcaggtcaggattctattggccaacagcgaagagtgatgcagccgaattagttcagaggtgcgaagcttgctagtacttgtcaaaacaacaacatttaccagcacagcaactgcagaccataccagtgacttggccctttgcgtgctggggactggatatgattggacctttcaagaaggcgcaaggaggatacactcatgtactggtagtgatcgacaaatttactaaatggatagaattcaaacccattgcctctttgacctcagctaaggccgtggaattcatacaagacataatatttagattcgggataccaaacagc

SEQ ID NO: 126043 - DNA, 294 bp, Zea Mays
tgattgcgatataggagttccatagatattgacgcttacgtcctctattgaaattgtgttatcagtgatgcttgtgtgtgatcaataggagaactaataaatagtcatgtccaaataaataaaatgtgtgtgcttgtgatgttctaattatgttgcgtaaataaataacatgttgtcgtctttttaatggtgttaatgctgaacgtcgataatgtgtagatgacttaagcgaacatgtggttgctacggtgtcttccattttattgtttagttcgccacggtgtccttatatat

SEQ ID NO: 126044 - DNA, 359 bp, Zea Mays
cacaaggatgttatgttagttatgtagaccagtggacgatccaggattcaatacctgactacctgtggaaccaagcacattagttttaaatgaattaacacaaatattacatgattagcatatatataattgtgtattctgtgaaccccctaggctttacatggatccactgcgacctctctgtgtatgtccatgtgtttgtttgtatgtttttggggtggggcattggagggaggggttccataaataacaaatagagagtagaggattggtatgtatggatgaaacatatatgccaacaagttcaggaatgttcttcctaatcctttcctattagcttgttgtggttgattaccttt

SEQ ID NO: 126045 - DNA, 661 bp, Zea Mays
cccgatccaagatcaacggttgtggtttaatgaaggcgtgcatcagccccaaccctccgatcagatcggacggtccaaagcagtcaaacccgaaatgttatggtctctttgatccttaccgttcaaaacacatctaacggacaaagcgcattcactggcattctaatctcagccacatagctagcatccaacgaccaagcctgtctcccttcacaccttccctcatgcccaacccagacacagcgccgtcgcgtcgcacggtggaagccatggccggtgaacctcccggttagtgttcaagtgccccgatttcaaaattaacaagcgctagaccatgctaaggttgcgatgaacgaatgggagacattactcaccagatttagtggcaaagaggccccggccccggcaaggtgcaacccgcgacgaacccgggtctccggtgagcaatccacaggataccgtcgactctggcgaccaagggccaggcggtacgtgatctacgctcgataaccatgcaccccaaccccacgacgagcaccgagcggcaatggaggcaaggcgaggggcgcgacgactttctttccttccaaggcgtaaacagcaacctcacaacggtacttggtgcttgtaatgctccggccagatgggtgagacagtcgcg

SEQ ID NO: 126046 - DNA, 372 bp, Zea Mays
ctggactcccactgatggaggtggggcctgatgctgaaaaccagaatatggcttcttataatcccgcttctttccaagatcccccgcttcttcctgcaattgagcaagcacaacagcagtatcaaaatcggatgggcgttgtagcattaccacagctttgatatcgtctttcagaccctcaacaaatttcaaagtataatacaatgggtctggcatggtatggtatgcattaagttgatcgattaactgagcaaactcctccacataagatgacacggtgcccatctgttggatatgaaatagtcgtctgagcaatgattggtgttgatttttggcaaagctatcctgaatcaggtggcaaaattcccccca

SEQ ID NO: 126047 - DNA, 284 bp, Zea Mays
aatgacctggatcagagggaggatgtgaggggtgtcattcaacgtcctatatggtcgcgcttcggcatcagaaggccatcaatcgcaactaggaatgaagtgcaagtgtgccaaatggctttcaacaccatatgcacctacattggcatgagagatctagttcaagaacacatcactttcaaagtgtggcctctagcaaatgagtgggaaatgccgatggaagctgcctctggctccaaccaaggtggcttggtttatattaggtacaccttcctatacagaag

SEQ ID NO: 126048 - DNA, 581 bp, Zea Mays
ttcctctcaggcgatgctcaataactctctctcatagcttcatagtgtggctcatgagcttaatccctcgatagttggtacaactttgaatatgtcccttgttcttgaagattggtactaatgtactcctccactcatcaggcatcttgtttgatcaaaaaaattggttgaacaacttggtcagtcaaacgacagcaatatcccgaggtatttccacacctctattgggatagcatccggtcccatcgccttgccccctttcatcctatttaaagcttctttgacctttgactcttggatcatgcgtacaaattaaagcatctatttaaatcatcaaagaagtcatccaattggtgcccatagtctcattgtcaccattgaaaagattgttaaaaatacctctgccacctctttctgattttaccaagagttgatccatctcattcttaatgcatttaacttggttgaggcccctcgtctttctttttcgaatcttagccatcttatagacatccttctctccttcctttgtacttagtcttcggtaaagatcatcataggctcaaccctttgcctcactc

SEQ ID NO: 126049 - DNA, 418 bp, Zea Mays
ctaaccaggccaaaaaagtacctctagacacctcaataccaaatcaaacagtgttaattagtgaagacctcacccaagatagagaggccaatatgttatcttgcctaaatcgaacaaggacgtctttgcttgatcaacccttggcctcatcgacgtgaaccgttcaatcatcgaacatggtctaagcatagacccttcagtccggccaaaaaagcagaaactccgtaaaatgtcagatgagaaaactgaagtagccaaggtcgaagtccatagactgcttgaagccaagtttattgagccagttgactgccccacatggcttgccaacgtagtcatggtcaagaagaaaaatagtaagtggcgaatgtgcatagatatcactagcctcaataaagtatgccccaaagacaactttccc

SEQ ID NO: 126050 - DNA, 599 bp, Zea Mays
gtcggcaggggggcacacggtcctaccggttgtggtagggcaacctggagggagtccaggggcacatgagccatgaaaggcaccggtgccataggcaggagcggcgtggggaaacctgcaaggggaaacaaatggtggatgactagatggagatgcagagttaggatcacgaagaaaattcaactcgggaagggagtcgatggtgcactgggagggagtcgaaaaggggaaatccgtcttgacgaagatgacgcgacgggagatcaagagaggatgagtggtgaggtcaaggcataggtaccatttgtgattaggggagtaactgaggaagacgtagctggcggagtgaggggcaagcttgtggggagcggtggcagaaaggttggggtagcctttctagacttgaccatctgctatttcatttgttttggcccaccaatcattgaaggaaaaattttccagttgaggggtcaatcctgaaagcctactttctggaagaggatataccatacttgttgagcaaatacacatgagtaaatgatcaattgtttctccagcctggtcacaacatgcagcggtcatggattttgagttaccat

SEQ ID NO: 126051 - DNA, 711 bp, Zea Mays
cggagggatcatgagctagaggggagatcgtggagggagtgggcagtttggagggagattgtgggggattcctttgcgcgggcgtctgggagtgagcgggtgctcctgagatggctgagattgacgatgaacaggagagcacgggacggagacgacgctagcaggaagagctagagggcgagggctcgctgggcagagaagggagactggccctaaagccaagctgggtcagggtaagaagcgtgtgacctcctggcagctacttgggccgcaccaaagaaacacagcccacgcgacctatgtcgtcgtcacggcttacacatttttatgaccataccggccagccaacatagcttctaccagcttataagccttccttcttagagaaagcaatcgtggtcaaatgctcctgccagtgtcaaattgaggcaactttttgcgcgagcagacgtgggtccggtgtgtgcaaaactaagggtggctgtcacgtgggcgcccgtagtctgcaatgtgggcccaacgtccggagtgtgtgatggcttgcacgataggaatgggaatgggggattttgtcacattggaccggagcgccccaagtcaggagttgctcgacgtcccgcgtcacagaatgtgatggtttgccggacagcagcggcggaggagccattatggcttagtgtggcatcagccataccttacttttaataactc

SEQ ID NO: 126052 - DNA, 468 bp, Zea Mays
ctgacagagcaatcagcttaagtcggcaatgacttaagacggtgcaacatgctcacgcttactcgacttagggtgaccactataccctactaacggagcaatcggcttaagtcggcaatgacttaagatggtgcaacatgctcgcgcttactcgacttagggtgaccactataccctactaacggagcaatcggcctaagtcggcaatgacttaagacggtgcaacatgctcacaactactcgtcatagagcgacatctatgccttagcagccgatcaattggcgtaaatcaggaaaagactccaaaaccagcacgccgcacttacttccacgatcgttcataacgactgttgaattctaacaacagaaacaaaatgttagagttttcagcaccaagaacacattctagtaccctatccaccgagtatccgagcacactgatcacgcacacatataattcacgaatgc

SEQ ID NO: 126053 - DNA, 303 bp, Zea Mays
ttattccacacttcccaaaatagttaactcatatgcttaaataaagaataaattgactactgagtgagaaaaagtgcacaaatctaggacactggatctagccaagttgtttttttaactacgcaggagaactgcgtgtcatttcaagcaagaaaaaagttacaaatacaaggaggcggttaacacccccagaaacactagaacactttacacaacaactgaacattaccacacccagcctaaggagcctccctatgaaggagcttcttaaggttagaagccccagccaagccccatgtgcag

SEQ ID NO: 126054 - DNA, 317 bp, Zea Mays
cacaaagacatgaatcgaagaagacagcttcggtcagctttgattctacggacatcggtgcacatatacagaaaatgaggagaagaatcagaaagtttgctcaacatggaaggagggaagaaaaagacggcgctaccctcatgagacttgtggtccatgcatgcgcataaaccttatcggctcgtttgtaattttatacaaagttgtaccgtgccactataaataggagcatgtcatgcataaggacggggttcagacgtaagagaaccgatcgagtctctctgcctttgaagctacctccgtgtgctctccgatcc

SEQ ID NO: 126055 - DNA, 890 bp, Zea Mays
cgacatccttgtcatacaaggagaaagtcagactagaagagataacgaagaatagaaacctgattccgtcgcccaactcttctagttcttcttcgccaatccaccttctctgtacccgctaccttaacatctggtatcagagtaggcagccctggagtcgcttccaccaattccaggtcatcgtcctcattctactgtcgcagtcggcatggaggtcgtgatgcagaaggtggtcggcatggaagcggtgatgcagaagatgctcgacgaaatggcgaacatagaatcacacatcacggacgcgatgtgtgggcactgcgatgacttggagcaccggatggaggaagcataacagaaaaccgaagcccgtctcatttcccttgagatggaccaaggcgagtttgcagggtggaagccaacgctggagaaacatctcgataacctactgtttgaggtgcaacgcgcgaacaagttcatgaaatgcgaggcgttcgaccatgacttcacgcaatcgggtcttctccaccctaacgagtcggcgaccaggcgcacatctgccagggttcagttcgtcgacgggccagatggccaccgtgacgacaacaatcaacgggtacacgagtggggtagaaattttccccacactcatgtcctggtcaacaataacttccataatcccatccctggtcgtgtgaatgatacgttcatttctgggcatgatcgggagtcccaaggtagtctgtcgtgcataaactttccccacttcgatggcgacaaaccccagttgtggaaaacttgctgtgaaaattactttgatatgtacgatgttgaacctaccatgtggattagagttgcaacaatgcattttagtggtcgggcgcaggttggct

SEQ ID NO: 126056 - DNA, 687 bp, Zea Mays
ccaaaactgcactaaaaatattgatttcagactttcagttctgaataaactaagtcaccaacaacctgataatccaactttggcaaagtttttctccactttttgtataggatcattccaaacacacttgaagaaagttgttccccaacatatgatcttcaattcctctatataaacctcagtccaaaaccttatagaacaaccacaaaagggctccaaacttggcaccatacaacaaatttcagatttcagaactgaaccaaattcagttacaggaatgcctagcagctgatctttgggggcatttttatccactttttatgtgggaacaagccaaagtcacttaaagaaacttgttcaccatcatatgggcttcaacttctctataaataccatagcacaaaacattatagaacagccacaaataggcttcaaaactgctatcaaaacactgaaattcagtttcagttactgtttccaatctgaaaattcagaaatacagcagcaccacttagaaccactctttttcctgggttccaaatgtttataggggcaagttgcttaataaagtttatactcctatagttcctctacaagtttgatatagtaaccattaaccaaaacctcttggattccaaactacaatagcccaaagtttgctccaattgctgaaattcagaatctgaa

SEQ ID NO: 126057 - DNA, 278 bp, Zea Mays
cgcgcgtcgggtgatcatcgggtggatgtgtcgaggatctcggcggacgacgacggggtgataggtcggggcctcggcgcgagaacgagccggggtaccgcgtcgaccacggcgctggtacgtctggatgggatcggtgtagcgagacgacagagcggtgtgggatggtgcagaaggggacggtgtcgcacggggctgtgcgggagacggtggggccgtgcgaggcgacagaggggatgctgaggccacacgtggctgtgcggggaagggcggcgcag

SEQ ID NO: 126058 - DNA, 362 bp, Zea Mays
caagacaccaacacttctgttcaaattggacatagcaaaagactttgattcaatacattgggagtatatcctcacccttcttgagcacctaggcttccctataagatggaggggctggattgcggcaattctctccacctcaacctcaagggttattctcaaaggcgtaccaaaccctcccatctagcatgggcgaggcctaaggcaaggcgaccccctatctcctcttctttttgtcattgcaatagatcccctgcaaagactgcttgaagcagcaactaaactcggaatgctctccaaactccgtggccgctcgcccgacctatgcatattgatgtttgcggatgatgcggccatatttg

SEQ ID NO: 126059 - DNA, 490 bp, Zea Mays
cttttttctgcgagcgtgatatgtcgtcttaagttaatccccaagttttatactgagcattcttcttgatggggtttggagtgcacccttttatctgtatgtctgagattgtgacaccggcttaaggcacgtcctgacttaagtcgattgctttgttagtagggtatggtgtgcaccctttatttgtaagcgtgagcatgtaccaccgacttaagccgatccccgacttaagttgattgcttcgttagtagggtatggtgtgcacccttttatctgtatctgtgagcatgtgacaacgacttaaatgatccccgacttaagtcgattgctccgttagtagggtatagtgtgcacccttgatttgtatgcgtgggcatgtaacaccgacttaagccgatccctgacttgagttgattgcttcgttagtagggtatggtgtgcacccttttatctgtatgcgtgagcatgtgacaccgacttaagtcgattg

SEQ ID NO: 126060 - DNA, 383 bp, Zea Mays
gggcggtcgagttgtgcttgtctgatttggcgacgagaattaaaaatgtctgtctcatttatgcggagggcgaatcggtggatgattgtgtgtgccaaaatgcgttatagtagtgatggcgttaagttaaacggtaatgtctcgagtacacgccacaatatggttgtatgtgagacaaggtaaaataaggtgtgctcgatatgaatgttcgatcgttgcaggtagaaattgtctttgcttgaatagagaggtggtgacatgccgaagtagtcatcgcttcctctatgtttataagtcgagtcaaaatgcggggtactagtggtacgctaggcaggcggtgtccaaataaattaacctgtcgatgtggtagctgtcgtgcgtga

SEQ ID NO: 126061 - DNA, 472 bp, Zea Mays
tttttacctggcttgacgcgacatagcttaccggggtagcataacggaagggttggccatcatgatcccacttggcgtgggtggctctgacaggacgtgacgtgtcccactcgccacgtcgcgtgctggttgcatgatcgggtggttaatccagcctaccggttacctgtgcttttttcaaggcaagtcgtatcctacaaaatcgtaccttcttccacccaactctcgaggttggtgtggaggatctccctatgcggtctaggggctcacttcctaggcgttgcttgggctcccttcttatacaaaacagaatgggaggcttccaggtctggttacacttaccatgttctcacgcttaggcctctatcttcttctagttagcttcgatccctcggtctgacaccatgaaacccaagaggtttcctttggggacctcgaagacacacttttctgggttcaacttgattcgaaa

SEQ ID NO: 126062 - DNA, 489 bp, Zea Mays
tggggaccaattcagcgtcaccagcagaaataaaaactctatcatcaggtgtgccggcctctaaggcgaccttctgacccgaagctcgtgctgctgccatgcaaccagaatgtggaggagaagacccaacgtgaacatccatgtaagtatgagaaggagaacccgctcggacaccctcaggggctgggtcatagctcgcgctgcccacccgagctggatcatcaccggcaacaccctcgggggctgggtaaacgcaagcgccatccttggggaccaaattctctgtagcagccacctctaaggctgaaggattttcaaccacttccataggaacagagcaatccagatcagcctcttgactcttaaaaccgcgctccaaggtcgatgaggcacgagacgctgctcgggataactctaacccgacagcaggcacattagcacaaacttccatcattccaccatctgtcggctccgacaacagatcttcag

SEQ ID NO: 126063 - DNA, 368 bp, Zea Mays
actacttattaaggctctaatagtagtctgccattcccatgttctgccatttccgtgttctgccattcccatctgcacactccacacacattcctctcgtgaaaacccattcccatctgcaccctcaacacatgccattcccatctgcacactccacacacattcctctcgtgaggagccattcccatctgcaccctcaacacacaccctgcacatgtgggcccacgtgacagcctctgtctcttttttcccgtcgcggctcaaacccattcccatgttctgcacaccgcatgccctaccatatatgggcccacgtgacagttattttttcgttgcagctccgtgtcctctcgcgcaaaaaatgttag

SEQ ID NO: 126064 - DNA, 588 bp, Zea Mays
gaaaaagatagattggcttcatgggccgggggatgtcattttggcccacctcgcccacttgtccgcgcggcccggccagctttcctcaccgcgcactcactgaatgacgggacccgcctgtcagctcaaaaccccttccaccgcgccacagacttgtgggccgcgtctgtcgggtccttctccccgttgtcgttgcaacagaatatcgaccacctcgccggagatctcgcttctcgtgcccatgctcggacttcgctaccggggtataaatcgggcgtcgcggtatcctcgttctccccaacccgatgtgtcgagcccttctcctagaacctaagcttgtctgtcgcccgcactagcttacgccatgaattctcatcaccgccgccagccaaaccaagcttgaccgcagcctgtgcctcgctctggaatcgggtgcgatacttggtactcactgctcaatatctccaccttgggggcgtgatttaatatgcgcgggtcgacgaattgttcgccggaatcctggggaaccaccggccgtgccacaccgtggcctgacttcgccatgtcttccccactggtgagaattcc

SEQ ID NO: 126065 - DNA, 461 bp, Zea Mays
gtgtgagtgtatgtaacatgtctcttggtttgtgaatgtggcggtcgacggtgaagatgactgccatgcatgttagtaccatggaccaggagccattaacgatgaacattaagacttaattaagggactagagaattctagtgactagttgtggttgctaaaacctagggatactatcaagcatgaggatatggtggagcacatcgtgtcgccgacatggtcgagtactagcaagacacatgtccaagacgtgtgggagatgtgttttgattatgccatttgtgatgctttggtggttgagcctcaaaaacctatagcaacggtttcgcgagtttagcaccgttgagggctcctttggaatgcaggaatcacagaggaatcatctaggaatttcataggaatcggttcattttcataagaaaaacgcaaaaaaaatcatgcaatacaaaagagccctgaga

SEQ ID NO: 126066 - DNA, 424 bp, Zea Mays
tccgcctcgcccgaagtcaccaccgctccgttcgtctcgcccgagccgatcccaggcagataggacagaggcacccaacagccggtaggggacactcacatttaatgcgcacacctaccccacacagaggcataggagcacagtgactaacaagacaacaatcatatccatgcgcaacagcataattacgctcccgctacagtgcacgcacgtcgcctgccatccccccgatgggacatctaatacgataggagaagcagaccggccctcgggaatatgacgaccccaagcttcacagcatacatctcctaggtgtataaatacaacggtggtttcttctaagaaaaggggcgaacactcagtagttttccaccaagtctttcgatatcggcacttgcctcaatcagttctagggacttaggga

SEQ ID NO: 126067 - DNA, 324 bp, Zea Mays
tattcgatttaaacgatctctggactgggcttcaaaatatgagaacagcagggggctcggggcaaaaatccccaagacacagagacaagccgtgcaggacggcgggttgttattttaaaacttcaggggctcatacgcaaaaccaacagccgaaagggtatcggcccatcggacccgtccgattcaacgctgacgctccagattagattggccttcttgcaaaccggtacgcaagggcagccacaggatcggaattcgacgtctctgattttatgaagcttgatccatcccgaaccgtccgatcaaaccccccctacggcccag

SEQ ID NO: 126068 - DNA, 333 bp, Zea Mays
gcttgacagtttgcaacatctttttgtggctagaagctgaaaaagctgaaacaaacagggccttcatcatcacaacttggtacccaaatcgtagccaccggtacaccagcgcgccctgctgcccacgccatcggcacaccccgatctcgttcccaaccatctctgattcggttcccacccctcttgctctatgtaccaccccgccctcctgccccgtgcgcctccaatcttgttgccaaccaccagtgccccgctgcccaccctgctagtgcaccatgctcgtcacccgccaacgccttgctcttcatccactggtgtcctgctccccaaccg

SEQ ID NO: 126069 - DNA, 298 bp, Zea Mays
gagttgcccgcttccctgtaaagttctccactgctgagggtaatcagcttgaggaacaactcgctctctggtgagattgctatcgactccagcttgctgccgaagcttaatacttttgatgttggaaccaactatctgagtggcgctatagctcctggcatcagtgtgtgcaccaagttgaggacactgaatcttacaaggaacatgctcgtggggggataccggagagcttcaaggagttgagatccctgtcgtacctctcgctgaccaggaatagtttcacaacctggcatagaca

SEQ ID NO: 126070 - DNA, 460 bp, Zea Mays
tcttaatgttgtgtatttaatgttgcttccatgcgcagggtaccacatctagtcggtagaggctagagcagctcatctcacctctttcggaccaccaatagccgtcaggtcacttagttgtagatcaggtggcagatgacaagactaatgaggtggtagatgatgaggacaatcagatgatagcagatgaggtagaggttgaggcgacaacagatgagaaggaggcagatgaattgacagtcgcagccactgccagcattaggtattttattcttaattaacacctttactattaatttcattttcaaataacaagtttcatacaagtttcatttgcataggtttcttcagtacctaacatttaagcctcggaaggagttcgagcaacgacacataacaaggtagaaggggaccaggtgttgggaagaggtggtctgggacggacaagggcaccgtacac

SEQ ID NO: 126071 - DNA, 370 bp, Zea Mays
caaagatggtaaatgatttagcttggtcaattctcttcttgaatcttggaaggttgccaatgccttgcaacatcaaaatttattgtgtgagttgcacaagaactccaaaaatgttaggcctcttgtcatgcaacaatgccttagctcccatattgttagaagcattgtctgtgacaacttgcactaccgagtccggtcctaaatcctaaattgctttatccaccaactcaaatatgacctcacttgtgtgtgacacatttgacatctcctttgacttgataaaacttgtccctgcagtggtatgtgcacaaatgttcatgatgcttctcatcttcatatatgtccaagcatcagtcataacagagcaacc

SEQ ID NO: 126072 - DNA, 414 bp, Zea Mays
ctgaagttggactgctgaaggagaggggtttgactgcagaggctgtggttgctgattttgttttcaaaaacatccagccgttgaaggatagggcatacccagcctacttgtaccgaggtttagctgactcaacccgggtcaccaatagaagaattcccgctgtagacttggtgaaccggcttgaaatgatacttagaggtaaggtgtccaatgttggtgcccctatcgcatactcggcctggaacctgcctccttccgaggcttttacccattttgtgtcgaatcctccagttactgacagcggtttgggccttagagtacgaccctctgccgaagaagttagtgctttggttgcttcgattggagaaattcccgatgatgaacggcaagtccactttgaggtgcctttggatc

SEQ ID NO: 126073 - DNA, 988 bp, Zea Mays
cgtggcaaatcttccgacgcgggtacttcaggaggaagtactcagaggtttcgggctgttcctaagtccgagctggggctagtgtgtttccgctgtggtgatgcacatcgttgtgcagagtgccagtggagtggcaggtgttctatctgcagtcaggaccacaaggatgtggtgtgtagcaggaatcctaatgggaagctcagataggagccggtgacttcctcatcttctcagggcactatcaacatgatgtcaagtgctgagcagcagttttcagttcctcttcctccgcagcagctttttgtgccttggacttccagttcgtgtcgatgcagggttttcctcagtatcaggccacgcctactcctacaccgtctactcctatgtcgtctcagtttggagctccgcgtctgcctcacccggcggctcagtggggttcttctgttaatttcactccgggagcttcctcttctgcgggtatttctggagcttatgtgctacccgcggcggatggcaggaagcaaggagacgtggtgacaggtacgatttcagttgattcgtttgcagcccatgctctttttgactctagcgctagctattcgtttgtttcggaggattttgtgtcgcgggctggtctttcagtgcagaggttgggtcacccaattctggttagatctgctaatggctccattagtagctgttcagtttgtcagggatgttccggcattcttgctgatgaggtcttcttggccaatctggtggtgatttccttaggggcattcgatgttatcttgggtatggattggttatcccagtgtcacgcggttatatcctatttttggaagacaatgttattgcaggtgccgtcgggtaaggaggtggtattcttgggaagttccccgaagttcacgttatccttgttggcgcaattgcttcctgatcgccggtcaaggaagtcggggatctttttctccatggtggtggaggg

SEQ ID NO: 126074 - DNA, 814 bp, Zea Mays
gtgtatatatagaagtattctccaacgacgaagagaacatatataggagtatactccaatatggcaatggcgtgcctgtcctgcgagtctgcaagacaacattttgtttctctctgttaattaggtagcctgtcaacgtctgtggttccctatcactagcgatttcaattaggcacaggtcccagatcttgatctgcatctgagtcatgcgaactgtgcccctaacacagcgaacaggcaaccgcccctgcatgcgaactttcattctactaaagaacacttccattttgtcaggtcctatcatgtctacatatcaatcatgtgcccctgcatgcgacacggtgaagaactgaagatcggctcgtgagtcgagctacgctcagttgttgcactacgggtgcgactcagaatttcaacagtgaagtgatctaacgtttaatatatagagacggcatggataagctgtctagacaattagggccaggtgtttaatgtatgtagagagagagagccataagtaatcgtcgaggacttaagggctgtttggttcgtcactaactgtgccatctaaagttagatgtccgagttgaagaactgacggcctagaaacgcaccagcaaaagcctggctggccaaagacagcctaactgacgggctcagcgtcaaccagaacatggtgcaacaatacagacttttttgcatggacaaagcaagagggataatatccaggatgcaaatatagatcccctacgttttagggcctgtttgcatgaaccagtttctatctctccggtttccagaacaggtgatagca

SEQ ID NO: 126075 - DNA, 334 bp, Zea Mays
cgagctcgccatcgatgacttcgacgaggagttgatcgaccctgagctacgctactcgttccagcgcaacagcaaggtacaatcctccccctccccacccaaccaatcattctttaggttgcaacgggtgtgtatgttttttactgttatctcgtaattggaattgtagtccattcagcaaaccttggcgctcctcatctatcgcagcctcttcggcatcgccatcagacttcctgtcatgctgctccgaggtaggcgtgcctgattttccgataggtcagtcgatcatcaatcccctgccgatacaacataccgaactactccatcatcctgc

SEQ ID NO: 126076 - DNA, 1227 bp, Zea Mays
accgagtctggtcaatttattttagtttccggtcccatataggaattgaatatatcgtaatgcacactagtgggtgaagcaacagcatcatcgcttccatattattgcatcttccgactccctcgattcaccagtcaacggcttcatttcttcgctgcaccattaggctccgttctacttctacctaataacaggtgcgttagtttttttttctgcttgcagtaggcggtacttgcaataattatttttggttacagcatttgttcataataagtcagctaggtttctcctagtctgattctgttgacttttctgaggtgtagtggggatctctgatacacagtgcttgtgtatctaggtcaaaccgaggtcaagatctgatcattttctcagcatttcaggctatatctagatgctagtttctagagggtttttttgggggttctcagcgtttgtgctgaagaaatcacttccctttcgaatgaaatcgtgcatctattcggggaatatgcacacaccgttggaacaaagggaaatagtgtttactgtcagatttcaaccatctcattggggggtgtgaagcacttttgctgtttatcatagttcttcagtctgacactctgactcatcgcttattatggacgttcttgcacatgatgtaatggcaagagcaaacgtctgtgctgctatagtggcaaatttcttgtgctctacactctgactcttgctgtttatcatagttcttcgcggccagagcaaacgtcagtgctgctaaagtggcaagtttcttgtgcatatattggggttcctgttttccttgtgctatagtgccaaagctgaactttaattgcaagttatcaggccaaatgtttgtagatactgctgataatcacgcactgcgggtcagctaagcttcaggaaacgataggcgaaacactggccacgagtccagaccatgttcctctcttccctgtaatggtcgccctttcctacacagggcggctagaatgcgcagcaagggtcgagaggcctgtcggcagtgcgccccttgcgaccgcgtgtgacagtgctgagccatcactacttgttctgatccgtatctatccttgtcactacagttctgcaaataatctttcatggttctgtctttcctggtcaaggaaatttactggttctggctttactaatgtattgtgcaactagtttgaagggtgtagttgtttaatt

SEQ ID NO: 126077 - DNA, 779 bp, Zea Mays
ccccagtgcaactaattctaagactcagccgaactcctctacggacggcgggttctatttcatttaactcgagggtcctatttgcaaagcgcaagccgaaggggtagctcgcgctaacagtcgtccgatcaacatccgacgatgaggattagaagtctattcgaacaaaccggtattcactctgggccctcagatcctggatctacgtttacgatttaatgaagtccgatgcacgcgccgatcgtccgatcccgatcggacgttccccacacactaccttcactggtatcctcgttcaatctagaccgttggttcacagatcaaccatccagatcttcactaactagcctgagccgctgatcaaatctagtcgtgcataatcaaaccaacggcgcgcacattatcttctccccccaacgcgactgcccagaaacacggcgtcgcgacgagtcagacggtggtgtcctcgccggtgactacccaacccacggaatcaacgaaacatactggctattacctagtgcaatcgaaagaggggaaagaggcgaacgcaaccatccaggactcaccggtgattatgtagcgcagatcgccgcccacggtgtgatgcggatccgcagcgccggcgagcaatcaccgatggcgtagcaaatttgaagccgagccctaccccaggtaagcttccaccgcgtccactgatgcccccgaacccctccccgaagctcgggcgacgtccacggcacacggcgacgacggtggaccttttctttcctcccctc

SEQ ID NO: 126078 - DNA, 619 bp, Zea Mays
gctaatcgttcagtcgtccgattaatcagcaattaatctcgattaatcgtccattttggactagaaaccaaccatgcatgttaggtctttttgacattagtcgcgattagtcgactaggtcagttattaaggggcgattaggagtatcgacccgattaggtgtgctaatcgttcagtcgtccgattaatctcgattaatcatccattttggactagaaaccaaccatgcatgttaggttttttttgacctcctgttttttgacctagctacaattccatatgaacagctgccgccagcaaagaagacagttgctcaaaccgccatgagttcatttgttgtttctgctcctccaaagccaactacccaaaaggcaagcaagtcagtgaataccaagcttcgcaagtctccagaagtagttgtagagaggcataaaaacaaaacctcttagtctacactagagcactgcacaaagaaaggaaaaggaagccaaacaaattgttgacgaccatgttgatgattttctttgagaacaagattccaatgcacgtcaactcaaggagttgggaggttatgttggattccaatgggcagtatcagtatggtcctagataccgcggc

SEQ ID NO: 126079 - DNA, 371 bp, Zea Mays
acaaaattcccccaccaggtactggcagggccgcgcagttgttgcgctgcgaacaacggcttctgtgtctctgaacagcggagaagaccaaacttttgttcaataacccggatccactcatcagcttccaacgggtcctcagccttgacaaatagtggtggaagggtttcagagaaatccagatatgtggtctcacgggggccttgctgataaccccttccaccctgctgctggaattgttggcccaccatttccctaagaaagtgggtattgtctgcagttgcgttcaccaaggcggcaatcgcctcggccaatgtgggaggaaccgggggtggatttggggtgacatcccttcccccagaagttcctgc

SEQ ID NO: 126080 - DNA, 515 bp, Zea Mays
ccttaatatcgcttctttgactcaggacattcttcacataaaaccactgcttcatccatgaacccgaccacttttccaaaaggttggcacgtgatgcccaacatctgactggtacatgaaggtatgacatccaaagttattatgatattgtttttttccagtggccttcgtctggtaggacaactcatgaatattgcaaaagcaatcagcatctggttccattccttggctccttatttcccaaatgaagatcccaaccttaatcaatgtgttaggagtaagctgatgaagaaagatttcaaacttttttaagacttcaaccaacatcatgtgtaatgggaaccgtagcccaatttttcatgaagcttcgaaaaaccactacctcatctttcccaggaagaggaacaatattctcaccactgattctcactatagatacatcatgaaaatatctacccttcatagcctcaacatgccctttcttcatggttgattttctgaagaccacgtgactc

SEQ ID NO: 126081 - DNA, 651 bp, Zea Mays
atcttcatcttctccaggaaagtcactaggtaaaatctcctttcaaattgtcagataaaaataacccaggtcaggtaactcggtgaagacgagtgagcgcctacatgcctctccaccaaatttgagcctcccctccaatagttgcgtgccaaagcgaacacgatccccaaacgctatctcaaatacatccatcttatcttccacacaagttagccaatttgtcgccataccggagtaccactgccatcaaaagtgtccagcttcatgcccatccacttcatcagagaaagaccacagataggaagaggcacctcagccccaccacctggagcagcacccgcagagacagcacccccgagaacacctccaataccggcaccctaagcacccgcgaccggagcagcaccagtaggtgcaactggaatggcttgcctcagaatggccaactcctgctgcatggcctgcatcgcggctaacattgccgccggactcatagaatccccactatgatcttacgggctgccacgagcccttcgaggcggcatagctaaagccataggagtaaataaaaatagcacaacatcaacttcaagtaaatcaaatgagcactgacaattcatggtatagcaatattaatgcaagcaacccatc

SEQ ID NO: 126082 - DNA, 275 bp, Zea Mays
attaaaccaatgaaagtctttatgcatatgcacatcctctttgttccatccttcttctccacaaataacactggggctgcctaaggcgaggtactcggtctgatgtagcctttctccgacaactcatcaatctgcttcttgagttccaccaactctggtccggacactcgataggctctcttggaaataggggaggtgcctggtataagctctatggcaaattcaactttcctttcaagtggcatacctggtaactcctcgggaaacacatctgg

SEQ ID NO: 126083 - DNA, 336 bp, Zea Mays
ggtggaggtgggagtgggggaggtacgatttgtacctcctggtggtgttggtaggcgtggttaggtggatgttgtgcggggccgtggttgtatggttgtgggagttgctgatatgtgtgcacgacaactcttgggttgtcagctggttgcgcccgagacatcctgtccctggtggccttcgtttccgggcagtcccttgttgggtgcgcatagtcttcaccgtgaaacaagcagtagaaacggcgcggctgttgcgctcgtccccggccccgaccacgagttccgttgccgcggccctggggggataatcttggcggcgaggggcctcaccagcgg

SEQ ID NO: 126084 - DNA, 700 bp, Zea Mays
ccactataccctactaacggagcaatcggcttaagtcggcaatgacttaagacggtgcgacatgctcgcgcttactcgacttagggtgaccactataccctactaatggagtaatcgacttaagttggcaatgacttaagatggtgcgacatgctcgcgcttactcgacttagggtgaccactataccctactaacggagcaatcgacttaagtcggcaatgacttaagacggtgcaacatgctcgcgcttactcgacttagggtgaccactataccctactaacggagtaatcgtcttaagtcggcaatgacttaagatggtgcaacatgctcgtgcttactcgacttagggtgatcactataccttactaacggagcaatcggcttaagtcggcattgacttaagacagtgcaacatgctcgcgcttactcgacttaggtggccactataccctactaacgaagcaatcgacttaagtcggcaatgacttaagacggtgcaacatgctcacgtctactcatcttagggcaaccactatgccttaccagccaaacgattggcataagtcaggaaaaaactccaaaaccagcacgccgcatttacttccgcaattgttcaagatgactgttacatcctgacaacagaaacaaatgttatagttgttagcaccaggggcacattatagtgctctatccacc

SEQ ID NO: 126085 - DNA, 423 bp, Zea Mays
ggttggtcttctttggccctcaatcctggagttgccatccgagttaaggacatatggctaaggatatataattaggatagccagggtacacgaggtaggtgggtttgaacaaagttttactttgcttttgtgatatctggattagacaacctatgatgtaggttaggttgttgtttacggacgagttagtccaaggtattaatttagggtaagatatgtttacagaattagggcctagtttatgtcgccaacatcatctaacttatttaagtaactcaatttggattagatcatgttagattaggtgtgatctagatcagattggtataactagataaggtctatttattttaggctagatcatggttgttactgtagagtgggatatgtatgcctattagaacaagataaatccataaggat

SEQ ID NO: 126086 - DNA, 302 bp, Zea Mays
agagaagccctccaagcagagcgaggttaacatgctatacagacaaagcattcgcatgttgacaacctccgatcgcagtttaacaatggataaatatgttctgttacttaaggtcatattgaagcaaacatttattattatcacataatggcatagaagtggtgttggaaagtttgaaactaccggttaatttatgctacttaagttaatggtgaaacaaacatttgttttgtagtgcacaaggacctagaagcagtttgaaatatcaaaccatgaaattacaccatccaaacaatcatgtg

SEQ ID NO: 126087 - DNA, 445 bp, Zea Mays
cacaaggtcatgcgaagcatgccaaaagttctcccctcgcttaggcagcccttcgcaattcaccaagctcatcgcccatacatggccacttcaacgctgggggctggacatcgttggaccactgcctatagctcaagggaacctcaagttcaccttcatcgccgtcgagtatttcacaaagtggattgaggccagggcagtatccacaataacatcgaagaccgctcaaaaattcttctggcaaaacattgtttgccgcttcagagtcccgtccgaactcacagttgacaacggcaaacagttcgacaaccaagacttcaggtatttctgcttttccatcggcaccaagcttgtctttgcctcagtgtaccacccacagtccaacggtgttgttgagcgcgccaatggcaaaatttttagtgccatcaagaaaaggcttcttgat

SEQ ID NO: 126088 - DNA, 462 bp, Zea Mays
agaaatcatgaagccatttgacatgcctgttcttcttgctcagtgttactgacaaatcatgaagccctgtgccaaccctgtgctcggttactgttaccagatgggacagagccaggaaaaaaattttaggagggactgaactaaaccactacaatataggagcccctttctacaaagtatgtgtacactaaaaatcttaggggaggaggctctagtggagctccatgtgcacgacaacggtggtaggaggggctcgagccccgcccgccccagcgctgcctcgtccctaactgttactgagaaatcatgaagccatttgctagagatggccaaacgggccacccgacccggcctggtaaagctcggcccgttttgggcccggcccgctaggcacggttagaaaaccgggtcggtccgtctgagcccatcgtttttctgtccgagcccgacccactgcgggcc

SEQ ID NO: 126089 - DNA, 688 bp, Zea Mays
aacggtctagccacatccgagatacgaccacgagctggctagaacttgcggccacgacaccacatgcgcatggtgttactaaccaaagcgaggcagcctaggccaatagcgtgatggccattgtacaaaactataccgacacttcaccggggcacaaagttcatgcgggagtagtcatggcaacaagcatgcagtgtctttcgacaccctaggccggactaggtggtgcacacgtggcttagataagtgtttgcaattgttggtccccatatgcatataggtgacccaatgcacatacacactagtgatgtctgcagtctgctctagagacagtgcctttgatatgatttggcttccagttcgaatagcttttaatccatcaggacgcctaggagactgacagggagagaccggcaacgctgcctcgactacaaggcgtagtttgtcttctagcggttccataagttgtgcttttaattgtcatccttattttcttgggctcctaccaatttgcatgttgaccgatgagagtgcaaagtgcactgttgtcaaacaccaagtccacatgaagagacacctccgtgagcctgtggattcatagggtagagtgtacctaaagttgcccaaaatgagccccatgtcatattggaactactccgatggccttggcatgacaccctactgccag

SEQ ID NO: 126090 - DNA, 677 bp, Zea Mays
caccaattgcaccttgtaattgttggccttaaccattggccacccatagttttctgagatcattatactccgtatgagtatctaatgtagatactaggcttatggccatacttataacatccacttgtccaattgcaaagtttgaggactttttagtaaattgacaaccatttcccctcctataaatagtgccctaaggcttagagctacaaagtggcccttaaatgactcttgctatgtcagtctctttttattttaacatccttctctccgtccttctctttataaatctaaccctctaatgtctcacttttttacgttaacctcctaccataaccttatgttaacctcctatcctctctttataaatctaaccctctaaccctttaagagtctttataaacctaaccctataacctttcttttttacccctccatctaagaagactacccctttctttttttttctttataacaattccaactcaactttataaacctaaccatctaacatttattttttacccctccctctaaaaagactattcctttctctttaagttacgactcaaattttaatgttgattttcaatggtccaaaaacatctaagaattatgttatcatattttattggagttataactttaaaagagatctctatttttatttgagtttg

SEQ ID NO: 126091 - DNA, 450 bp, Zea Mays
ctcagccacactttttggtaaaggaacggggtcatcttacagcaccagaaaaagaaggctaggaggaagaagaagaagagggatctggggacgcaaaatcggagtcgaagaggaacatggtgaacttacaaagcctggcttgcgacacatctgagggcaaccggggaccaagaaaacatacgaaatgatggccttatctactcccttgcgaacctccatggattctctaagctaggggacgattctcgaatcgctaggagacaaggcactcaatcgcgagccctccaggggagcgtcgacagaaatcttgtacatatgtaacctcctagccataaggggagctaccccggtatgaaggtagttcctaataaccccttccaatgtgaccctcggtcgtggagaatcaatacgaccgtaataggtccggtcgtcttcttctccccatcttcc

SEQ ID NO: 126092 - DNA, 643 bp, Zea Mays
gtgactttttgtgtgagcacattgtaccaaagttgtaaagggattatagttctacaactttactacagaaggttggcttagttgccacataaaaattggagaaaatccaccccaaacatggactgacaggctgtctgatgaggctggccatggtacagtacatcggggaagaggataagaatcagcccctcgccggcgataaggacgctaccgcggcgtgggatgggtcgccggcgtccgcagtaaagatctggcgcgacgtggcttcaaaacgttgaggtggcgctacccggttaaacggtggccaccggacttccgtcgtggctctgccgcgcgggtgtgctcgccagcgcggtcacagcttggtggatctcatacatctccggcttgcggcctataaattgcgcccgggttctgcttcttcaccacatcccgcacctcagtgactgagcaatcggctgaatttcaccggagctcacacgcagccccaaattccctcctcctctgttcttgctccgccgcataggactccaccgtggacaacactcttcgggttggtagtttctcaattactctctgttctagctcgtgtatagtctcctattgctctctgtaccgagcaattggaatttggccgaagtcc

SEQ ID NO: 126093 - DNA, 629 bp, Zea Mays
tgcacttgatgtctttctctttcatgtaagtgtcctccctttgtagctgtttctttttccttcctcacttattgaaaatactcaagaaagatgttaatagtacaagggagtaaatgatgaatgatggtttctttagatagaaaataagaacaattcatcatccataagtcacatatacatgaagtaaacttcttaacattagtgcacatcaaaagaaatatgcactctttaaacattttgattaatcacaggaaatttacttcttcatattgaatttattaaacattacttggaagcaaatcaatatgagaacaaatatagcaaaggcatgaaatagattctaatggacaagtgcattttaattagaatgagattgagtgcacatctatccgactttggtccaataaagaatttattctttacataggtagaatatgatatattagagtaaacaaccattgatgggaactatatttgattgagaggatgagttcccatacctttgcttttacctttcttcctttgggtgaagagcaaccctttgaagcttgtggctttaaacttgcacttactctcttgtagattttcataagtgagctcaagataaatgttaatagcaacacaagcac

SEQ ID NO: 126094 - DNA, 682 bp, Zea Mays
caggccctaaacaaataccaagctcaaacaaaagcatggcgcgaccacacagtcatcccgagggaattcagcgaaggagacctcgtactcgttcggacagctcggactgagtcccggggcaagctagagccaaagtgggagggccctttcatcgtcaagacgaaggcgtcccccagcgcgtacaggctaacaacgccatccggcaaggacttagagcattcttggaacattgacaatctccgcaaattttttgtttaactcctcagggccagctcgcccttgtaattcgcaaaaacggctttattccggcccgcactcttttcctcccggggggtgaggtttttaatgaggcagagccttgtaatatacgcgcaaaaaaaatcccccgcaaaaattacaacgtcgaaaaagaccgcatcaacggtcttcggcattcgaccacaacgaagtcaccgcgaggggcagcgctggctaccctcgcgtgcgacactccgtgcaaaagtcgcccaagggtgcagccggactagcacaacaagtgcgcaaaatcgaagtcttcaccaaaaagactatccatgcaaaagtcgcccaagggtgcagccggactagcacaacaagtgcgcaaaatcgaagtcttccccaaaaagactatccgtgcaaaagtcgcccaagggtgcagccggac

SEQ ID NO: 126095 - DNA, 1214 bp, Zea Mays
aaccctagcgccgcctcctgcgcgcgctcgcccagctgcccagcaccgtgcccagccgccgcggcgcctcgcccaccactctctctctccctctcccccctattcccccacgacgtcgtgactacctccactacgatccttcccctgcttatggagatgacagttccaagcatactccaacatctctctccctacacgcacaactagccatggccgcgcggccactgcaacccgtgcgagcacaccctgcgatgcacgagtgttgctctgcacaaccgctcgacggtcgtcccccagagcttccccatgatgcgcgtcgtgaagcccctcgacgaagaccctaggaacacctgcaggggtcggccatcgtgcacaggtgagaacccactcctctctctccctcgtcccgccggcgtcgtccctccgctcgcgtgccctttctcggcgcgagcgcgtccctgcgcagcggagctgggtggccgtgctccagcccctcctcccctcacctagccctgagcgcggtagcctcttgcaggccccctcgcgcggcgccaccgccgcgcagcgcccatgcccctcgcggccagtccacaacggtgccccggccaaccccctggccagcagcggcgtagcgcccatcccaacagcgagcaaccgccagccatgcacgccgactccttgctgccattaccccgccccgcgtgacgtccaactccagctggtgttgcgtcgccttgccgcatgatgcgcgtgccgtcgtgctcgtgaagaaaagcaaaccgtccgtgtggccgtgtgcgagtatgtaggctaggagaaaagaacggacgttgggcctcacaaacatgcatgtgcaggcagcgttcctccatgattttcctgcatgcgtacagattctagagccaaaacgaaattgccgatcccttggatatcgtatttccctccccagccaggctgcatgccagagaaataatccttaaggattctctgtgccccaaatttgtggccctaggtgtggcttgtttcgaccaataaaaatgtgccacgtcgttattaatctgcgattagttaaaatatattaacttttgcgttagacatctgaattaatatgtttctattgagttagcttcgtaataatatcatgcacacattaaacatattatcttgtcataacgtatgtttgttttacttaattgtaagttggtctgttggtt

SEQ ID NO: 126096 - DNA, 560 bp, Zea Mays
tactgcctccgggattggagcagggtttcccctgagagctgaaagggaagccgatagagaggaaagtgaaacccacctccccgcacctccgcaactacccttagatctagcccaagttctagccaatcaaacccgcctcatcgaggtcctcactcgaagtctggaaaatcaacgtccgaatggtggaagaccgcaagacagaatgggggatttcctgaggctcaagcctcccacgtttgccagatctagcaaccccctcgttgcagacgattggctgcgcacgattaaaagaaagctggaagccatcggatgcccggaaaatcagcgtgttcaactggccgcccatcaactttctgggatggccttagcctggtgggataccttcaacgtcgccatcagagatgctacctgggcggaatttgaaacggctttccgggagcaccatgtgccccaggggctcgttcagcttaaggaagacgaattccgggaactgactcaagacggaagatctgtcagtgaatatgtgcacaagttcacggagttagcccgctacgcgccag

SEQ ID NO: 126097 - DNA, 718 bp, Zea Mays
atcatgttttgttttcggggtcggggagcatcaggggcaggtatgggtgctgaaacaagagggcagaggacatgaacggacctgaagtacactggccacggtgagatcctttccacggtggtggaaaccgatttgggggaatcacgaattggcgcgctctagtgggcaatcgaaggcacgagttgctggattaggagcttgactacctagcggagctgggggtgtgcacaatttatagtgcgtttgagcggtggctgatgaattggacggagacgcgcggtggccggagaagaaaggggtcactggcgcacaagattagtggttttcaccgtggcggctctccgacgatcaccggatatagacgacccgagctattgcgacgtggttaaaggcctgaggcatggcgcaatcgcggtgaacaacgcggatttcggtgatggccgtaaggccacgtcgccagcacaaatgaccaagggacagcacggccacagtgtcctggacctatccgcggcgtgatcctttcaccgacgagctcaatccacaaacctgaagcacgaattgtggcgagcaggaccaatcacggcgaagggtcaccggcgacgagatactctgaacctgctgatatttgtgtgcattgtaccatcatgatagttcatcagaacaactgatagagcaggtttggggtcaatttgctccatattttatgtggtgacccaac

SEQ ID NO: 126098 - DNA, 430 bp, Zea Mays
acttacatggctttgaagaatatgaggtgtgtcctattcatgcggcccaatatgtctcatggggatgtgcttctctgcgccgaccacatctgccgtttttgtgtgctcatcgatatgtccaggtgccctcaatgctgccgggggagtaacggagacaccctctgtgtatggggcgatcgcagacgctacaggatgcatgtccattgaaatagacgtacctgctggcgtatttacagatgctacaagtggcatgtcatcgccagctccggtgctagacattttctcgccgccggcactacctctaacttccgccgccgctaaccgcctccaatacctgagataaagacgtggatgagctaaccttgtatttgtttcctcccgtaactgcgcctttatttacgcgcacgaagagcacgtatttccttatctc

SEQ ID NO: 126099 - DNA, 999 bp, Zea Mays
gttaagtaactaggtggccatgcaaaagtgcatgccatgaagcataaccattggttggttgttttatttgatgatccttctgcgggttattatatttcttttgaccagggtctttcaattagtatctttcaatctggatctcttggtgatgaggattccatagtgttgttaaagagctgccaagccgtggaaataaattgtgtttcaattccatcttacaatttctcatagccattggtataatgcacaggatgatgggtccagataatcggataaaagggcctcttataacacctttaaaaaggctttttcttaagacaaattcttcgtacacagcaggtacagtacttcgaacggatgatcttttcgccaacttgtgctctaagtagccgaacttcaggggctgcctaatggttgatagtgaaaaatatatctgttgtcttcttgatggactgagaatagaggaaattgcagtagagagtgggttaccacaagattgctatcatgctggttttgttacaatggattcaatatttggatgcgagctatagagtgtggacagcacaccaagatgctcttctttcattgttctctcactgcaggtctcatcaagtccaactaccggcactccgatggtagcttttaatcttttcaattcaatcaaagtatagagctgcagtattatgaatgatgagcttgtgtctggtggtgatgacagccatggccagaataatgaaagtgagcctaaacaggatttaacaaaggttccttaaacttccaagaaactcataagaaaaactccatccgtgctggtcattaattttaaaagcctctttaaaggagttgtaagagacccttttatccgattatctggacccatcctcctgcgcattataccaatggccaggagacattgtaagatggaactgaaacacaatttatctccacggcttgacagctctttaacaacactaactatggaatcctcatcacaaagag

SEQ ID NO: 126100 - DNA, 534 bp, Zea Mays
acataattcaacaaacaagccattaatggttgtcaactcgacaaatgatgatagtcccttcaacactgataccggtggaagtggaacaaaaaaatttataaagacaacgacatcttccggtccgtaccttttgctatctatactacttattaaggttgtaagggtagcctcgctgtcgttcaatctggatcgtccatcaccacactaacctcctcaccccgccccatcatatcatatactacttattaaggttgtaagggtagcctgccgtcctgccttcgttcaagctggatcatccatcgctgtcgttcaatctggatcgtccatcaccacactaacctcctcaccccaccccatccgcgctcgcttcgcgcaaaaatttgacacaatttgacaataccaagagttgattacacaagctgactgcttcctctgtagcaggaaggtttataagttgctaccgcaacctttggctagccgatatggtacaatatatttgcaccgcggtagcctgcgtgtgctgcgttatttggt

SEQ ID NO: 126101 - DNA, 495 bp, Zea Mays
aagccatgttcaccgtaaggaaacaacaaagggtattacaaaggcatgtacgctggatgcaagcatgaaacacgtttgaggccgcactctctatcatgcacaagaacatcatatgtgtattccccggtcgtgtagtcgccaacaataatggtagcaatctcaccatttgagggtaggttgtattgtacatcatggcgtgtgttacagcctagcaatctaagtgttatcttttgatcaccctcgcgctcaaggcgttctctcgcgcatcggaacgctttgacaagcgagttgttttcattcaacatatcgagcagcgacgacaccatttcagggtctggctggctaccagcaccgtcatcggtctcaaaaatgcctagcctgttttgggtctcatgttccgtgtcatatgtgtacagttgggcaaattttggctgtgtcccacgctgtggaagtagtgtgccaatcctatggtgcaccaccccattaattttgaaa

SEQ ID NO: 126102 - DNA, 538 bp, Zea Mays
gccatttaattattgtcttattattatatttacactaaattctatggtctcaacataaatagggatacatgtacgcaatttatttttgttgttatttatgcttgttctatatctccacacaccaccagcaccaccacatgtgtgggggttattttattatatttatgtttgtcctgtatcttcagcttacctctactttattttgggcttgatttggtaattcttaatgcagcgggtggaaccagattaaggacatcaagatggcattattaatatgggcttgtgtatgctaacgacaaatcagagatcccactttgaacttcccttacaccattgactcaaagcaccacaactccacaatgatatcagctttcaatccttggcgtcgccctccctcctaaggctgcaaatggtgtgcgcggctatatgtagctgctgcgcaaggacagattggtagcaacctagcagatgcccggtgtcttcaccattttcatctaacatgagcatccccctgtgatctcttcttgatccttttttc

SEQ ID NO: 126103 - DNA, 697 bp, Zea Mays
tctgttaagtgctgctctaagcatgaggtaggtatagtaggagcacaagcatcttggaagaatagagaaggaaggggatcaaccaaggatgttgatgaagcatcgaaagaaggatgaggataaaaaggacaagtctcatcaacgacaacatcctgagatatcctcatccgatgagcaattggatctcaacaacaatgtcccttatgctcagcactatactcacgaaacacacactcaattgactgggcagtcaacttagtccactcacgaggtgggagaaacacagcatacaaccaaacatatgaagacttgaatcctcaggtgtcttgccacaaagacgcttaaaaggaatccctccttgaagagttgaggaaggctagatgtttgtcaagtagcagtagaaacaacctcagcccaaaagtgaggaagaacagaagaggcaaacataagagcacgagcagtcttaaaaagatggcaatgtttgcccttagccacaccattctgagcatgagctctaggacatgaaaattgggcaagagtcccttgcttagaaagtacctgacgaagagcatcagagagatactcacttgaagtggaagggagatggtccctaagtggaagacagatatccaacaacagatttataggtgcagactgcagaagactaagggcctgtttggttcgctgtctaacttgc

SEQ ID NO: 126104 - DNA, 392 bp, Zea Mays
cgggttgtttttgtgaaaacagaagggtttctttgcaagtttacgcgcgcgaagaggtatgggtggatatctgccgtccgatcgcgcaccaccggtcaagattagatcagcccatgaccgaagcggtaagcaaccggagccgtaggattaccagccgatggctaggatttaaaacaacggaatgggatcctgtgcgcacgatcatgatcgaacggtgcaccaaccccgatccaaaaccattcccgcattttcaatcgtggccgcaggatatctaatcaacggccaccaacgcgtcttctccaatccgcacaagggcacgacggcgctgagaatactgcggcggcggacgttaccggagccgcgcactccaacgccagggcacctaatacttc

SEQ ID NO: 126105 - DNA, 499 bp, Zea Mays
taaatctcttttttcctattttcattagttccaggactgggcgcaatattatcagggaacacaggggctatctcgcaaaagatcataatactcaggattccacccgcactggacgacgggttaattaatcgaaaactcgagggctcttttataaaacaggattggcgaagggggtactacttgatctgaaccatctgatctcaaacgggcggttcagattaaacaccatatgtttaccaaccggtacgccacatgggccgttgggttggagatctcttgtcaggatttttaaaacgttaggatctaattccccctcgtccatccgttgatcaacgactggcgttcatccaatctaaacactatccccctacttatcatgacccttgatcgggtgatcaacggcgctggcattaccccgccctcacggccagcccgtggcggcgcacgcgccctccagcggcggcgccatagccggggatcaggcaccaaggttccgccc

SEQ ID NO: 126106 - DNA, 464 bp, Zea Mays
gcaaatcttccatctgatctctcgttcggacaaaatccatctccaaagagccattgctgatgtagctgcgaatgaaatggaaacaaatgtcgatgtgcttaagccattccaatagaatttccgctctccagtttatactcaatttagtggtgtcttgcatcttcttccatataatgcttcgaatggagccatcttgatgcttctttggtagttgttgttgtaggaaaactcaaccaatggtagccatgattcccacgatcctttcgacgatagtacacaagcacttaacatatcttcgaggatttgatttagccttttggtctgtcccgaagtttgtgggtggtatgccgaactatgcacaagcttagttcccaaacctttctgcaattgttcccagaaatgagcggtgaattgtgtccctcgatctgacacaaaaatgttgggtatcccatgtaaatgaacaa

SEQ ID NO: 126107 - DNA, 738 bp, Zea Mays
gatgagctaggcgcttcgtatgagatggctttggttgcataaaaccgatctaatacgtccttgggctaacatgccgatccaagttccctataaagctagggctttcttctccactgttctgatctcggaggtgggaaacagggctaataccttgttttggacagataagtggctttcggggaaaaaatcagcggtatttctcctagattattccaaaccataccaaggaggattgctaaacagagaacatcccaagaggccttactgaatagaagatggatctcagacatcaagggagccttatatgttggagtattagtggaatatattcagctgtgggatctcctatctgaagtagtgctgcagcaagaaatagaagacaaacatgtgttcaacatagtttcagatggtatctattcagccaaatctgcatataagggtctttttgcaggctcaacttcttttggccactactgtagggtgtggaaaacctgggccccacctaagtgcagatttttcctatggcttgcagctcacaagaggtgctggactgctgacaggcttgttaaagaaggtcttgaccacccatccaagtgccctttacgcgaccaagaagctgaaaccttggaccatcttttagtatcttgtgttttctcaagggatttcttgttcaagctgttgagacaattgggtctgcaaactctcgccccacagccaggtttgccctccatgttatgg

SEQ ID NO: 126108 - DNA, 632 bp, Zea Mays
atcgctgctcctgttgttgttgccgcactagctgtggatgctgctgttgtggctgctgctgctgaggtcgttgctgttgcccctcctgctactgttgcttgctgttgctgctgttggtgctcctaggggtgatcacccccggatggtggtggtggtggcgggatcgggggactaacgcgcctctgcgtgtcgtgggcctgggagctggcctccttggtcccatctgcagccttctggcgcttctaggcgggttccgaaacgagcaacccgttagcgcgacgcaacctgcgtcgcctctccccctccgaccccccggagctacctggggcggaggcactgcttgcagtccctttacccttgtccaaggggctgggggccatggtgggattggcactgggagccacaccgatgggctggggacccccagccggtgcaccagagatccggatcccgcggagggggttttggtcgccggtctggcaaaccgccacgccgctgtcatcgaggtcggcaacgtggccaggatcgccgtcctcaggcctgggtcatcacagagcgttgtgatgtcctgggggagtatcagggattcagggacaaaagtctccccaataatcccccaccagaagttccag

SEQ ID NO: 126109 - DNA, 433 bp, Zea Mays
cggagctttgcgttctccgaatccatggtctacataaaacatatggttctgttaatatatgtacgtcaaaattttatgtataccgtggcctagttcataaattataatggtaaatgtagtccgtaccagctactattgagtgtgtaaaaatggattgtgaataccagtcgatatgtttttgtcaatacacatcgcaatgaaatgttgtgactgtcaaaatcaataatgaagacacaacctagtggtcatcattctgtgtgtgaaaaccattcgccaactcattatgaatacacaacgtttcctagaacaacatagtttctagcagaatgaaatttggttaatgagaacatcaattatgaagacaaaacctagtgatgatgatttagtttgtcaaaacctgtcgccaagtatttgtgaatacacatccattcgt

SEQ ID NO: 126110 - DNA, 521 bp, Zea Mays
gatggcaagtccttgtagtgaggcatttgtcctcaccacaaaacaaacagaatggcttccttggaggtgcaccaaatctaccactaaagcttagccctgcccttcccctcggagcaaaaagagctcgttgatagtcattggtcgaagtgacgagtaccaagtatcgaagacacttcaaactgccatgatgaaggattttgcgatgagtgctgagtttccaccatacgatgatatggtggcttcgtagttcatgaggaaccacttcgggtctattaggccatcgtagataggtagtgtgggaggcttgcacagtgctggccatggtgtagcttgcagctctagtgttagtgggaggattttgcgatgagtgctgagtttccaccaaacgatgatatggtggcttcgtagttcatgaggaaccacttcgggtctattaggccatcgtagataggtagtgtgggaggcctgcacagtgctggccatggtgtagcttgcagctctagtgttagtggggaagcttc

SEQ ID NO: 126111 - DNA, 572 bp, Zea Mays
ctgtgatatagttcccgatgcatctagtctctacaaatatattgagacaaataagttagcaaagacaagataattacaatgtacgagcaaaaccaacatgtctttttctcactcacttgcactcagacgaccagcaagattcctcaacatctgtttattggctctagccgcctctatttcccttgcctcctatgctctcttcttgtttgccaccttcaatctcctcggcttagcatgcatcgggctgtcataacccattgattctgtgaacctacgcatgtcctggctccgatctttaatgttggaattgacgagctgagatccacagtgtatcttctctcccatgagtctctttgactttatggtatgcatcacctcttctttgtcgacgtatctcctcaactgcatttcctcgtctcctacacaaaaaaacaataggtaagtatggatgcaacagtacaactcatgcaatcaaaaacaaatatcaaccttatcgtaatctaccaaatgtccacaaaaatagcccacaccaagctcaaaaggaactactccatacttagcttcaataccac

SEQ ID NO: 126112 - DNA, 731 bp, Zea Mays
gtctgatgcatatgtttgaattagtggcatatttgaatttgagccagccaagccttcagccgagcctccagccgagccttcagccgagccttcggtcgagccctcaaccgcgctcagtcgcgcaccttcccttctctctgccccatgggcccaccccatcagcacgccaccctcgggcgcacgctctccatcttttctctaaccacccaaccccgcttgtcctccccgtcctcttcccctcaaccgtctgctccatagaggctgcgctggtcacgcccgcctcgctcgttctgtgtgaataactaccacccacattgtacagcccccatctagtgcgcctttcttggccttcatataaataccctggacctcgtagtgtcgctaccatcacaaagttatttcgccgtcgccgtcgagctcctgttgtctcccttgcctcggtgagcttcgccttggtgccagccgctctagactcaccccccccccaattcccattgcttcctttggttcaatttatccgcactcactgtcattactcgtgcagtcctggagccaccgtcatcgacccaagtcgtcgttgtgccgttgttgtctctttggagatcccgagtctcgtattgaggtatggaatctcccctgccctctccattccctcccttactctctgtcatgcatgagtgcttgtcggagttccccacgccgctgccgagccacccctttgtgaaccctca

SEQ ID NO: 126113 - DNA, 518 bp, Zea Mays
acccaagattgggtctgcctcaaatttgtatggctactccagaaatgtgcttgcaagaatccaagccaatggtgagcccttttcaatatctcattttctttgggctaagattcagcttacttctgaggacacctggaagtccttgccctgtgctccatatatcatgttcatcattgagcagataattggatatttcttcacccataatggtcttgatgagtcgtttagggttgagaggtcccacttcacagcctttgttgctcaggcgcatactttagttggtgagcgccctagggcctcgtttggtggagagcatgcctgacacttagttgctggtgataggcctgagtcttcttgcccttcttcttcatttaagaagaggtcaaggaagctcactaggtgtcttcgcaagattttgggacatgctcctatgcggctaacactgcatatgaggcttgtcttgagattcatgagcttcgtgagcatgcaggcctccctcccattcctgctcctcagcc

SEQ ID NO: 126114 - DNA, 598 bp, Zea Mays
cccagatgtagacactaagcctaatgatggcgttaggagttagctgacgaagataaatcccaaacttcttcaaaacatcagcaatcatcctattcaaaggaaaccttaatcctgctttaaagaagcttttgaagactaccacctcatccttttccggcttcggagtaatttcctctccgccaaaacgaaccagctccttttttgcttcactgaaatagcctaacttcatcagcttagacatatcaccttcggtaatggtggatttcccaaactccaggtggctgggtttagatggcacggcgctgtaatcatcttcagattcaatttcctcaacatcaacctgctcagtttcagcggcaggtgcatcctccggtactaccagccctgaccgtttcatcacttcagagattggagcggttttggcaccttcggcttcctcttcgtcgcgagtaaccctagctgttgagcgtgccgtagccatctatcgattgaatttcttgatttttgatgaagttgaaaaatttttaactttgctgaagctctttcttgttacgaagcttgagcaaaatgaatagcttccgttgaggatgcagtaagc

SEQ ID NO: 126115 - DNA, 340 bp, Zea Mays
aaatgacgtggaattgagccgatacttcacgaataggtttatatgggtaaatatgagtgaagtgtgcgcttggtttgatttgaggcgaagagaatgaaatttgggcactcggctcggaatcgatcgctagaaatggggaattgtgtgaaattgaagcctggtatatcggattggtgtgaaattcggcaaatatgttactggaggtattgtgaaggtgccagaaaaatttgggttcaattggagcatttttggctggtttgggcatttcactgagcacgtgacgtgcagagttctagggttttggagaaatgccaattttaggtggtgaaaccctccctaa

SEQ ID NO: 126116 - DNA, 406 bp, Zea Mays
tatgtgcaaaggaaatctcaaagaaactgatgcaaaagcttgagaaagaaattgttgtccttgtttgcaagatgggaaaagagtttccacctggatttatgaattgtatgcaacatttgctggtgcatctcccttagaaagctttggtaggaggacctacacagttcaggtggatgtatagctaggaaagagagctaaaaaacttaacgcgacagtgtgaaacaaggcaagggtagagggtgcattgcagaggcatttgcagtgaaggagattacaatcttttcaatgaagtatttctcatgcaaaaacaacattaatgctcacacaacgtggtgtcaattcgaatagcaagccccggtaatcgaacttagtgctttctagtggtagggtaaaggggtcggagctt

SEQ ID NO: 126117 - DNA, 758 bp, Zea Mays
cggagccatgtaatatacctgcaaaaatcccacgcaaaaactcagacgcaacatgtcgaaaaagaccgcatcgacggtcttcggcattcgaccactccgaagtcacccgtgagaggcagcgcagactaccctcacgtgcgacactccacgcaaaagtcgcctaagggtgcagccggaatagcacaacaagtgcgttaatcgaagtcttttatttaaaagacactccgagcaaaagttgcctaagggtgcagctggaatagcacaacaagtgcgttaatcaaagtcttttatttaaaagacactccgatcaaaagtcgcctaagggtgcagctggaatagcacaacaagtgcgttaatcgaagtcttttatttaaaagacactacgagcaaaagtcgcctaagggtgcagccgaaatagcacaacaagtgcgttaatcaaagtcttttatttaaaagacactccacgcaaaagtcgcctaagggtgcagccggaatagcacaccaagtgcgttaatcgaagtctcttattaaaaagacactccgcgcaaattcgcccatgggcgcagccggaccaacacaggcgtacgaatacgacaaacatgccacattaccatacaaattacaattacatacacacggcgtgggcatcacatattacatcggctcaaccttcgggatgatacccatctccctgtaattaaacagcattatcctcaattcctcaccctcaaaaagcttccaaagatccccctcgccta

SEQ ID NO: 126118 - DNA, 289 bp, Zea Mays
ggatttcaccaagtgaggcgaccaaagcactaacctcttcgggagaggatcgcactctaaggcccaaaccgctatcaccagcaggaggatttgacacaaaactggtaaaagccttggaaggaggcagattccaggctgagtatgcaataggagcaccgatgtttgacaccttgcctctgagtatcatctcgagccggctgaccaaacccacagcaggaattcttctgttggtaacccgggtcgaatcagcgaggcctcgatacagataagccgggtacgctctgtcttt

SEQ ID NO: 126119 - DNA, 739 bp, Zea Mays
tttaaacttgtttctacaaactgtttgtcgtcctctattttacacactctaccaggcagtctcatgagaaatctttttaagtgaaacacataaatgatacattataataggcacttatacagtgataaggggcctaatgtttctaagggagaaagtaaaaaacaggaagaaaaaatgggtcgtatagttgaatgcatgtttcaagcaatgtaaagccctcactagtttgccaatgcagcagcagtgtcactcctccgagcgttcagagccttcgtcgctgtcgttgcaagggaccgtgtagtggatcacgacacaggctccggacgatagcctgcacgaagggttcaaagcacagccctcaataccagccctcgatgccactgcgtcaagacgacgacgaggcaaaaaacaagaaagcatcgatcgagtgcattaccgagcactgacaaagagttcacagtaggttcaggtaaagaaaggccacgggtgacacttaactttccttgatcttgacgagcttctcctccttcctgaacgactcggcccctgtggtcgcggatgcgacagaggcgtcgacgaacctcttgctcccgtcctcagaggccgtgtcgcagtcctgccgggtcgaggagctccgaggaatatgggtgttgctgattttcccaagtcaagtgaataggttttcttgaaatctttctggtccccaccaagtccagagaaggctggtagaagtttctag

SEQ ID NO: 126120 - DNA, 370 bp, Zea Mays
cacgagcgccgaaggcagttgtcatagcatcgtcttctgccttcgaatacgttccaagaatctaatcaattgttgcttctacgacatccaaccaatcatcatttggctcgtcatactagttcctaaaccaaaaagtgtacttcagataaaccaaaccatcctggctggagccaatggcggcctccttcggcatttcccactcgcttgcaagaggccatactttgtaagaaatatgctcttgaactaagtctattgtgccaatataggtgcacactgtgttgaaagccacctggcacgcttgcacatcattcccaattgtagtgggtggcctcctaatgccgaagtgagaccatatagggcgttgaataat

SEQ ID NO: 126121 - DNA, 553 bp, Zea Mays
cccaaatcgtgagatatcaactgatggctcggtgaaggatcaccacctggggcaacttgcaacaaatcagcaggaaccaattcagtgtcatcagcagaacccaaaactctgtcgtcgggaacgctggcctctaaagcgactccttgaccaaaggcttgggctatcaccatgcaactagagtgtggaggagaagatcctacgtgaacatccatggaagtgcaagagggagaacccgctcggacaccctcgggggctgggtcatagcttgcgctacccattcgagccggatcatctccggcaacaccctcgggggctgggtcgcagcttgcgctacccatccgagccgaatcatccccggcaacaccctcgggggctgggtaagcgccagcaccatccttgagggtcgagttctctgcagcagccacctctaaggctgaaggcccctcagtcacttccatgggagcagggcaatcaaaccagcttcctgaccctcaagaccgcgctccaaggtcgatgaggcacgggaagctgcccgggatgaccccaacccggc

SEQ ID NO: 126122 - DNA, 626 bp, Zea Mays
agcaaactgtttatgtagagaatgagggaaacaccacacacccattgtgtggggtgacttttgattatatatgtcgtatgtcttggtgtacaggtaagtccatatgtcttggtgtaccgaggcggtgaggatgatgtcgtcgacgtacaagaggtaggatgtggcaaccccctccttgtagatagagggaggtgtcgggcatggcagagacgaagccaaggcgtcaaatgtaggtggcgaaccatgggtaccacacacaaggtgtctgctttagcgtgcatcccggtggcgctcgtgtccaacgtgttgcggcctaacaaatgacaggaccaatccatccccacttatccctcaaacaaaacaaaaaacaagggtcgccttatccctccaaccaaacaataccagggatcatttcacccctcaaacggtcaaaccaggggcgatcctatcccgtcctagtctgtcccgcaaccaaacacatgctaagtgttccaaaggagatgtgcaaaggagttaattccatggtcatccttgttggttgggaagttgggagctttggaagcactgaaacgcttgtgattttgaaggagcttgccccgatgttcagaccctcctatacaatgtgg

SEQ ID NO: 126123 - DNA, 606 bp, Zea Mays
gacccctcccacccagctagtacatatgtgaacttcaaatcaaaatcaactgcagctaatacattctgtgtaggataatgcttcctccccctgaatgcagattgcatgctctctggaacactagcataaatgtgagttccatctattgccctaatgcagtcctatgtgttaacaaataaggtgagatcattgtatcatgaatgcatgtctatgtgttaacagaatcctaagaaattaccttaaaatatgggtaccatcttggactgtttctgattttaagtggggtttcaccagtgggtgccttaatcatgtcatcccttaattcaccaatggcatacaaaacttctttaaaatacctgctaactgtctccgcagacctcctccaactttggtgtatgaccctaaaacgctggttgtggccaactacatgaaggaacatggctacttgttcctccacattgttgtggatactatctctaagcaggttcctactcttaagcaactcatagagctagaaaaagggggttcttctcatgtgcaacatgttaacacactccacatcattgaagttgtaaattctattcaagtttctgtgcctctcttcac

SEQ ID NO: 126124 - DNA, 2011 bp, Zea Mays
ggcagggacctggttctcaaatagtcgaatcattggccttacttacaggtaagaaatgggtacaaaaaaatatagtttcaaatgaagaaaaacaagttatttggaggttaaagctagcaagactggatgccaagctaagaaggaatcccatcaggagtggaagaaacataatagaatgaaataaacagacagcattaatagagcaattttctcaagggcatctccaacaggaaacaaagattcgactcacattttccaagtgatagaccaagctgatccaaggggtcattcttgtcaatgacatgtcgccagactgcaccacataaaatacagagatattaaggacaaaaaagtgagtaaaatgtaagaaactgcactctcgatttgctaatctgtaaatatgaaagctcacatatatctccagaacgtagatcaagagacgagatcacattttcctctgtcaagaccacaactcgtctccttccactcttctggctgtggtaaactgcttgctttactttgccaatgtacttctgatgcctgtgaagaacatcaacatattaaaatggtgctgttggattactccaaatgactgcatgtaggtaggtacaactcaattgatgttaagaggtgcagcagctagcaataacagattgcctgattccatatcaaaatagcgaactccacagcagtttaccaaagattgattttctcatacatagaactaacacaacacggcaggacacatcatgaaacaaagataggcttcttaatgggttagcacagcttgtgagcaattgaagagtagatgtcaaggcagccacaaaccttattaagagagggggaatcatggagactgaagcaattcagcaaatcagataatgacatgttgtgatgtattctcagacttcaggtggataataacaggataactactgtacaacgaggtacaagctggcacagcctaaatactagaggttttaaggagttcgaggattcaaggaagaacaagggagaccatgaactgagaggaaggcatttacgaaaaaagagaaatgcattcttccatcgtgataattattaagaaattttatctctaaagtaagaaacttaaatccgatacactaaatatatttagaagaaaatatacaaaagtaatacattaactaaaggtaaagtttaagtcctaatttaatcttaattatcttatgcaatacatgaaccaagaattgactacttgcactgcatgcatacataggtgaaccatgttgcgatactcagactggactaatcagaagccatacttgccaaaagggactccacatcgaacatggaatgcagttcactaatatccatggtacaaaacataaccttagacctcatccataaaacacaaactaactctagctcctgcagactgcgctttatttcaatgatgaagcacatgcccatccatctgtatactcgctaaatagctaaaaaaacagagaatttcgaactaggatgcaatcactgcatagtcgctaaatagctaaaagaacttttctaccagcacgacaggactaatgcacaacacccaccgctactactgcagaattcagttgtacgctcgtaaaaccacaccctgattcggtgaaacctaacaaatctgtagtaacaccgcacacagctcctcacaacacaaccctaatagtgatctcaactaggagctcgaagtcccgatacgtcgcgctggccttaagctaagggcagatcggatctaggcgagcgagttgacgtaccagtccgcgaggccgacctggtcctcgtagatggctgtggtgagggcaacaagggaggcgaagactaggagcccggagagaaggacaaggagggagcggcgcggtggcgccgccatcgcggcggagaagcggggcacggagtcgagctccgatctgacggcggcggagggaagcgtcgtttactgtttggtgttggggcgagtcaccgaggagtttatttgggacttgga

SEQ ID NO: 126125 - DNA, 305 bp, Zea Mays
ttggcgcatgtgcgtcgactatactgatctcaacaagcattatccgaaggatcccttcgggctccctagaatagatcagttagttgactcgaccgctggctgttctatgttgtccttcctagactgctattctagataccatcaaatcagttcagcaaaagaagatgaggagaagactgctttcatcaccccgtttggagctttctgctatacctccatgtcgttcggcctcaagaacgcgggagcgacttaccagagagccatccagacatgcttagccgatcactggggcaagcgagtggaag

SEQ ID NO: 126126 - DNA, 335 bp, Zea Mays
tgataacccaacaaccaccagaattgcttctatttacggagtaaaatttaaaattaaagacaagaataaataaagtgtttgagatagcctaagagcttgtttgggacaagggtaatggagggattactattcaattttgaatagtaaaggattttgacccctccctcaaatctccttcattaaacttgctcccaaacaagatctaatgatagcacgataaccgaacaagcagcaatgaagctaaattctatttgttattttctgaaacctgatattgttattgttaagggaccctacaaagggttacatgggctaattcaaaacgtactcttaag

SEQ ID NO: 126127 - DNA, 330 bp, Zea Mays
aagatttagtcatggtcattttaatgcattatttcatactccatattccacaaagtttttaacatacatacaaacgagaaagataacgtttaaacaatggttgtactcataatagttgttttgcaactatccgggaggggttacataggaactacccttgtgcaaacagcctaaaatgcttaaataatgcctctttgttgtcggggaaagggaaaatctcaagcagagtggtgccaacaagatgctctttgttggtggtagggtatcattcgcaaggttcacttgaagctttctaggatgcatgaaagcaagggatggataggatatgtc

SEQ ID NO: 126128 - DNA, 575 bp, Zea Mays
gaaggaagtaacaacaggaataaatcattaaacataggaggaatgagttactcatcttgacattttattactttgcttcattccttacagtataacaaatgattacaaaaataccttcgctttacgttcaataatgcgaaggtgaagagaaagaccgtagcttcgtaggcagagagagacgattcactccgactccgaccaaaaagcgtgtccaatgcatggtactattcttctatttataatcacgagatacagcttcagcaaaattacaatcataccctcaagcatatacatataagctataaatttgaacaagggcatcaacgtcttttccttccgtagtcttattgagcaagtcgaggactttggtttgctatcgctgattccttcctcatgtacatgctctgttgaaccgatgcttgctgcttcgaccttgtaaccacgacagccacacatcatcccctagacgaaggtatccttcagcattttaccccattgctcttaaaacatactcagaaataattggaattaatattttgaggaccttcgaccaaagaggacacccaacattagcc

SEQ ID NO: 126129 - DNA, 592 bp, Zea Mays
tagttttagttgtcctttaagatgttttaatgattcatggtctgaatgtatcacaaattccttaggaaaaagatagtgttgccaagtttccaaactccaaacaagagcatataattctttatcgtaaactgaataatttagagtggcaccacttagcttttcactgaattaggcaacgggtcttcgttcttgcatgagcatgcctccgatcccaattccactggcatcacattctatttcaaatgtcttaccgaagtctgtgagtgcaagaattggggatgttgttaacttcgtcttcaattcttcaaatgtcttttgttgtgcttctctccatttgcaagaattggggttgttgttaacttcgtcttcaattcttcaaatgccttttgttgtgcttctccccatttgaaaggtacttcttttttggtcaattcgttgatgggagaagcaacattactaaagtcttttacaaaccgccggtagaacccagcgagcccaaggaagcttctcacttggctcacattctgtggaggcatccagttgcataaaactttgatattttcttcatctacctcccatgcattaatatgtc

SEQ ID NO: 126130 - DNA, 344 bp, Zea Mays
agaaccgacacgggggcgccagagaacgcagaccgcagtgggaaaggttccaccgacggcgcagctagctccggtgagcaattgtgtgggctctggggcaacacttggcgaaataaaggcatgggaagggtgctcacctcgagtgtgaaatctgggacgcttggagaacggcgaaggtgcgatggagcttcgggtcgacagcggtggggctccggctacgcaagaaatgctctggtgagtgcggaccgggcgaaccagagggtttaggggcgaaccgggaggcgttccaggtggtgggtgatagggcgaagcttaccagggcaacagatgtagcggggagttcc

SEQ ID NO: 126131 - DNA, 403 bp, Zea Mays
gaatcttatgcgtcatatcacttcttactacaaggatctctttggtccacctgaaacctctcatatcactctggatgattctattagaggggatatctctcaggtttcggtggaagaaaaccaaaggctcgctagtaggttctctgaagaggaagttaaggcagctctcttccagatggacaataacagagctccgggccctgatggattcccagctgagttttggcaggtgttctgggatgttattaagaaggatttgatggctatgttcgatagcttttatgagggcttgcttcctattcatagtattaactttgggactatcatcttaatccccaaatgttcggacgcgatttccatccaacagtatagacctatctgtttgcttaacgtgagcttcaag

SEQ ID NO: 126132 - DNA, 786 bp, Zea Mays
ctgaccacgtgtaagtcggtcccaacaacgagacacatgaatcagtgtatgcgctgcgtagtctaacactctaagccagttatttactacaaagatcacattagagctgaaactaaatattatatatgcacacacgctattgatatagcctagtgaaggtgggggccctacggaactcaccccccctcccctccaagaacggctctgctacgacgtttgccctcttgcttgtgggctgacatttgccgacttgcaccatcacaagttttaggttgtcagcagtcgtcacagcgcacaacatatatgaagatttacaatagtcttattaatccaaaataagcatagttgttaagctgagatcaccaagtctatgtttatattgaactgaacctaccttctgactaagactgggcaaaaaacccgttacccgaacccaaaatatccgaacccgaacccgtaataccgggtacccgaaatttatttggtaacttcgggtactaacttgtgaaacccgaaataattctgggtaattcgggtagcgccaaccggtacccgaacaacccgtacccgaaattcctacagcccaatctgccacggttagtctgttagtctgttacacggccggcccaggcccaccaggcaaaccgcacacgcacaccccacagccgcaggctcgcacgccctgacctgacgcacaccgcagccagcactcagcagtcccgcacgcacgcacaccgcagtcagcagccccgcacaccgcgcacgcccgtcggccgtcgccttcgc

SEQ ID NO: 126133 - DNA, 409 bp, Zea Mays
gtattgacgagagagattgggcctatcgggtgggccagtgtcacgacgatgatgagcggggtagggcgctagaaagggagtggggtcaaacaacgtcacatgtcaggaaggggtggcatcgaacggcgtggcaaacagggtgtcgaggcagactgcctcgagcggcattgggaataatggagctggacatatagatgtgaggattggaccaaggaggggatgagagtcgagaggactcagctgatctaacgaggaggctcaggacgggattgttttggcccacctaaaactttagttttttctatgcttaacattaggtataagaggttttaaaaaatttagaacatggcctactttgccccctagtgcatccgcccctggtgggagagagagatgaaggagacaaatg

SEQ ID NO: 126134 - DNA, 514 bp, Zea Mays
gtgttcccaaaggacttactaggtatgccacctgagcgaaaagttgagtttgccatagagcttcttcctggaaccgcccccatctttaagagagcttacagagtatctggaccagagttagttgaactcaagaagcagatcgatgagctatcagagaaaggttacatctggccaagcaccttgccttgggccgcccctgtcctgttcgtggagaagaaagacgacaccagaaggatgtgcatcgattatcgagctctgaatgaagtcacaatcaagaacaagtaccccttgcctggaatagaagatatgtttgactagttgagaggagccagtgtgttttcaaagatagatctgaggtcaggttatcaccagctcaggatctgaccttcagacattccgaagacggcattcattaccaagtatgggttgtatgagttcactgtgatgtcttttggcctaacaaatgcaccagccttcttcatgaatctgatgaacagtgtattcatggattatc

SEQ ID NO: 126135 - DNA, 468 bp, Zea Mays
ctgtgacacaaagctgttgtagtatttctggtcgtccttgtaatctttccaatgagttaggatagacatggtttaccgaataatgatgccagcctctgatgcaaacttggcagcttgaacaggttcatgtggccttttttgccttcctcaacagctatgggcagtctcctttgcataactttagtcatcctgtccagttgttttcccttagttgctgccctgggtctccttggtgctcactgtaattcgcatttattgaataatgaaattgttttgtttcatgcaaatcagcaaaagagatgccatatttgactgaaaaaactagaacttgccttccgtttcttcatctctagctacattgccttgagcatcacatgtactgtcatgagcagcagataccatgtcttcctcttcagctctgctgaaatgatcagcaagtccaggtgtagtacagttgttgccttcagc

SEQ ID NO: 126136 - DNA, 1939 bp, Zea Mays
cggccaactcccaggctgctgtcgccgcagcttcctctagccctggcgcgtcggcttccatcccctccttgtctcctcctgtgtcccatgcaaccaaggggcgctccaagtccgttcggtggggtgatctcagtccggcttcttcggatggcgcgacgtcgttcgactcccggccttccttcaaggatgtgctggtgagaacagcgaacccttcgctgcccggccgtgtggcagcccaagggtctgtcccggcagctggaaagtcctcggcgctgggaatggtgtaccgtcagccgcaccccctgtctacaaaacggcggagccccaggcaggccactcaacccacaccggcaatccgcccagctccaggattatctgaccatggatggacgacggtggagtccaagaagggtagaagtcgccggctgaaggctctgtggctcccgggccgggtcccggctgatcttgttgggcgttgcttcaactgcttgggctgcgatcaccgggctgcagactgcggcagcgaacctcggtgtttcctctgttctgcgcttggccacaagtcctcatcctgccccaaggcttcggtgtggaggaggctcgggtgtcctagacctgtgaagtcggtctgggagcggctttcaccggcggtacagggaagggtccaacgaccggcagggcgtcgtccggtttggcagcgtattgctccaccagaagccattccggtcgtcccttctgtcccggtgggcaacatgctgggcgtctcggctgcacagggtaatggcggccctgccagctccaggcgcaaacggtggaggaagaagaagcgcaaggagcgtgaagataagccggctttggagatttcggctccacctcctcccgagcagacgcttccggcgagtgatgagactgcttgtgttattgattggtcggttcagatgtctattgcggaagataatctcaagacggctgtggtgatcacagtggttagctctagagacgtcagcgctgacgagatcgcgttggttttggccccacggctggaaatggaggtgggaggattggttctccgtcagttctcccagtccagcttcttggctgtcttacccaaccatgtgcagctcgacacgctggtggatcgcttccatatcatcagagaagaaaacttcatgctctcctctaggcgttggacgaggttcgggggtgctgttggtaattccttgaagcatctcgtggaacttgagatcagaggtctgccgttgcacgcgtgggagacttcggtggtgcaacatttgatcaacccccatgcttgcatttcccaggttctgcccgacacgctggaaatcaggaatctggaagtctttcgatgccttgcttggtgttgtgatcctgaacatatcccatctaagaaggacctctggatcactgaaccagaccaggcttctgctgctgaagggaagaaggctctggtgtatccggtgcaaattcgttggggccctgttgatttgaatctcatacctggcgctccacagccgccagttggtgctggtgatcaggacaaacctgatacccccccttcacttagaagatgtggtgacaaccctccacccactcaacatgctgcagcctttgaagaccccgacataatgacccacaatcagcggcggccggtgcatgaccgattgggacctttgaggcgctcggattcccccagggaattgagccagccttgggttctggttgatacagaggcccggagcagccagccctgtgacctgcttgatgcagtggtgtgcagcagagtagggattcctccggctcctgcgccggatggggctctctgtctagcggctggggatgtgctgctgcggcgcgaggggggctgcgatgaagtaatccccatgaccccgttggccgcttccagcacgtgccattccac

SEQ ID NO: 126137 - DNA, 333 bp, Zea Mays
tacaagagcaaatagtcatggcacagattggagacaagggtgttcaagtcattaaggaaatggtcgaacaaaaggtggataaatacaaatgtttctatcaggacagcaaaggaatcctatggtttggagatcgattggttgttcccaagaaccccgagcttagaaagaaaatattggatgaagctcacctttcaaaattctccatgcaccccggcagtaataagatgtatcatgaccttagatccttatactggtggaccagaatgaagagggaaattgctaagtatatatctgaatgcgacacctgccagagagtcaaggccagtcatttga

SEQ ID NO: 126138 - DNA, 387 bp, Zea Mays
cggccgggcagcgccgccgcgcccccacgcgacgaagattcaccgaatcggcggaacgatgctccccgccctagtcccccattagacaggcgttatacgagggttggggaaaggcaaacatgataagcgcgcatatcgataaccgaggatgacggggtgagctgaccacggtgcttggcgacttggtgggggatctccgccacggcgagcaattcactgacaatagacgaccctccatggaagaagatgtcacacacacgtttgggatgcctcggtgagcatcaaaatccgcatcccgaggaccaccgcaggtgtactcccgaatcaaaatccgcgaccactcttcttctgcgtcaaggatggcgcatggtgccaggaagcgccgac

SEQ ID NO: 126139 - DNA, 608 bp, Zea Mays
gttcgtcgacactggcagcgggaccctatcgtcaggtgcgtctccttccccttgcgtttaggagtttgttgcagcgaacgccgagtccaccggagtctgttcgattcggtgggtccgtgatgggggattgactgggggcggaatcttcagcgcgcataaagggcgaacccatcccctctaatctagaccctattcctccacttgaaccccaccgttggcgtgaacaccgagcgaagaaccaaaagaaagtcgccgccaccgctgtacttcctcctcaccgtcgttcaatgcgccgacattagctgttgggcttcgcgatgtcaacggggcgggaatcagagcctcgccaggggagattgggaagcggggttgaggtttcgctctcgaaattaagactcatgaccgattcgaccgagtcctagaccatcagcgtcgctgcttcctccgccgttgaggtaaccttcatcatgtccactctcgtctccgccttctctaggtcctgttaggacgcgtgattaggtacggttgggagcttaattgctcgccggtggcgggcagagtcaccgtgtcaccttgttcgggcgcagggggggtttgagcgggcagat

SEQ ID NO: 126140 - DNA, 854 bp, Zea Mays
tacaacgtcggctagctctaagggcatgtacaacggcattaactttgtcgtctgtatactgccatctcagcaaaataatctgacgtggaagggattaaatgaagggacagatcgctcccgtcgtctcgcaaggcgacggtgacggctcgtgctcccatgctttatcgtcggtaaaatcgccgttgtacgatgcggctgcgactcatcgacaagcgaaggtgatttggtgtggctgggtgttttggcgcgatttttttcctcaccacacggtaattccgcgctaattcctccaatctttggttcataaatcccctcccatctagtgccttctccaaaccaaactccgatggatccattggatgtgcaggggaggaaggcatccgcggcgccgtcatttgtgctggatgcggcggggatgcaggaacttctagatgcggcggcggcgcggaagcagactggcgatgcagcaccgtcggtggctaagaggaccggcatggggaaggcggcagcagcagggtcgacacgcttgcaacgtgctatggaggcggactttcaaggagcaggcacagcggagggccgccagcggccaggcacagctttgggattgaagcggaaggtggccgccatggcagctgctccatccgtggtggctccacctgttcatgatttcacgaccttctgtagcacagcttcatccatcgctgggagccaagccttcagcagcatcccaaacttcacgagtggacatgcaatttcttcaccgacaactcctccatgggtacgaagtgaagcaacggatccagcagcctggtacgtagcaaggcaagtagcagcttcctccttggttgtgttct

SEQ ID NO: 126141 - DNA, 377 bp, Zea Mays
gagttaagtaagtatgccaattgacagcgaacaatctgagtgcctttgaagcctttttattgatgatatatttctcgatttacagaatacatcatcgtcccaatagcttctgggatgtagctaggggtaagacttcctgaggtgttctatgttccatgagttcccaatttccgtgtcgtccatctgagtgagacgatatgatcccggccgagtgacttctgctactatgaatggtccttcccatagaggtgacaatttatgccgtccctcccccattagaattcggcggaggacgagatctcccactgtgaaggatcgacgctgtatggccttatcatgatagcgcctcagagtttgctgataccgtgctgattgaa

SEQ ID NO: 126142 - DNA, 919 bp, Zea Mays
taaccacaaaaggaagtttcaaggtcagtctagcaggaacacacgcccgaacaactcgcagggttctcagtttcgctctgtaaatcagggtggaaacaactatcagatgcaacgctctggacaacaaggccagagaagcaatcaaactcagaaccagtagaggaacaactcttagaccaatcaaaggtctagtgggaattcgcagactcgtcaaggtggcgccgtgaacacataggccaaaagcaacaacaacgcaccagtccaacccaatggatatttcaagtgcggcgaacttggccattatgctaacaactgcccaaggcgcaaccaacagacaccccaaaagaacagtaatcagagaactgaccagaacacccccgatcgtggatctgagcagaacaaaacgccgtagaactagaatagaggaagggttaatcacgtcacaacagaatcagttcctgaggacgccgacgtggtgtatggtctgtttcttatcaactccatacctgcttcagttttatttgactctggagcattgcattcatttataactgagtcattcatggcaaaacataacataccaaagtaccctcttaagatgatgttacatattagttcatcgggaggtgacatgaaggccacacattcatgcctccatgttaatctcaatattcaaggaatagattttccagtcaacctagtggtcttaggatccaacaatattgatgtgattcttggatgcaactggttgaaaagttgtgatggagtgatacaatgtgccaaaggaacaattatgttgacaagtccacaaggtgaaagaatccaagttagcacagacatgtcaacaaatgcaaaaggagagacaatggtaaatcacttggaagaaaagcccctggaaaatatcaaggtagtgtgtgaa

SEQ ID NO: 126143 - DNA, 899 bp, Zea Mays
ggtgaggtcaccagggaggatgtccggcgagaactccgaattgtgaagacggtgtgctggcgaggatctttggcgaagtgggtgatgtcgtgagtcttcgcgagacaacaagcagagaacgcgcggggattccagttaactcgacaaggagtagcaggagtcacgacggaggagcgaagcctcgacactggacggagtcatggcgcagagattcggcgtcggcatacgacagtcacgcacaaacaggcaagcagcgcatcaactgcggatgggcggtgctcaaggcgagtggcgagctgcgagtcacaagcgtttcgcacgacaagaagcgaggcgactgatagagtagcgtagactgctttagcgagggaagcacgggaggccagagcaacgacaacgagtggcatggcaggacgcggggctccgagcgatttcagcacgacaggagtactctggcgggcgacgacgtcgtgaacagagaagccgatgcgagctccaacggagatcgacgacgctcagcgaaagcaggctacgatggagaggaaaatgagcacaaggatcgagcaggtgaagagggggaacatgggcgtggcttaaatagccaggaacgagggagaattcaagccgcggactcgacggcatgaacgtggccattaatggaggtcgtgtaacgcagtgagtaaatcacattgattaaatcatggggataaaatgcgttgtgggatgcagctgcgcgcggctggcgaggcggttcagcgtggctaggcgttggggaggcgagacggtgtagaccaagcgatgacatcgagcatccgatcggcggcgactggcttcctgttcgtgcagcatgacgtagggcaactagggctggaaacgagccgaaccaggctcgactcggc

SEQ ID NO: 126144 - DNA, 1669 bp, Zea Mays
cattttttccttatttctgtcagcaaataagctgacaacattctaagacctggctgtgtggtggcaaaggccagaattttttccattttctaaaaaagagcaaagcatcttaataaataaaagaaacaaaacacttcagaattcagatgtaatttaatgtttcttaagaactatttttaccctcaaacaatgcaggagaattgtgtcatttcattaataactaggtatgtgtccgtgcgttgccacgaagcaggggagcggcgcctagactacaaatataattattgtttatttctaaacactaagttacgtgtggtctaatagttagcctcaattttctagagcatgggttgtgggttcgagtgctcactttgcactattttttgcacgcgctgagcgtggggagggtgaagccgtggtagcaccaggtgtccacattatgttcttaatagagtagtatagatgagaaagggaccatacaaaatgtacagaaaacaggggaggcgtcaagaggtctcccctacaaaaacccaatacacaccctaagcctttgagcaagggagacgactggcgactgtcatcacagttaatgtttcttgggaactgatgtcccaataaatataatgtggccattaatgactcaaggcaaccttaaaatcttcgctgataaccaagatatgtttaggatctcaacatcttttgtccaaataatagagtaaagaatataagatgaatacaacattaccatcaaaagctttccaatgttatcctcagatccagtccaaggctttatagaaaatggcaacttcattttcactgttgcaggaggaaattgacttaccatgcctggaacaaagagaataaaaaataaaaatttgtaaatcctaaatatgcagttaggcttccaatgtcagaagtaccatgtaaaaccaaaacaagctatcatattgtcacatgtctgttcctttggtaataatgccttaaataacagtacatgtcatggtcttaaagtcggccgactaatcgcaattagtcggccttatcgcctggcagagcacgatcagcagggccgactcgatcagggcgactagtcgtcctagtcgccactaatcgcgattagtcggccgataggtgccatgtccgactagcttgtgccaggtttgggcctccaaaataatgcgtcctctactcctctgttatatgggctggcggcccactatctccacagtagaaagaagctctactgccactgtgccgcacagtagaaagttagaaaccctaaatacctaagcctccgcctctgccccctctcacactctgctccattgctgccctgccctctgctccggtggtcctcagctctagcgaacatctgctccgtcacgctcgcctctgctcagctccggcgctcgcctctgctccagtgttgcaccagtctgttctgaactctgttcagtgctcacttcagagttcagtgctcacttcactagtctgttctgaacttaaccgacatgagcacctcttcagatggtaatctctgtgttcttttggttcttcaatcgttcatttgatgttgcacctcttgagttgttattcacactacagatgagactaggaggcggcataataatgttcaagttctcttcccaaaatctgtgttgcccgaggc

SEQ ID NO: 126145 - DNA, 399 bp, Zea Mays
cttaagttcttgcttgtcactaagcaataggtgtcataaaacaagatctgaccacatgaaaatcatcccaagttttagagtccatcgacacccaaaccatttgatcaacacttgagtgacaacgacgttccctttttttaccggcctatgatccaagatctcctttggctgcaggccatcctaggtaagatccaccaatcgaggtaaaaattggacaccactgtagatctcgatacaaaaggctttaactgagacacatggaccaccaggtgaatgtgagcaccatcaggaagatccaacttgtaggccacaacactaatcctttccatcacccgataacgcctaaaatatttgaaagcgagctttggttagggtcagttacatactaagtgttgcacg

SEQ ID NO: 126146 - DNA, 410 bp, Zea Mays
gtccggccgcggcattggtggcgcaagatcttgcaggatcctggtggtgctccacggaaacttcaatcggacaagaaaggctctagtcttttcaaattgaagctcaggggtaaatgctacaactgcctctcttctgcacatctcgcgttccgctgctcgacccctacgtgctgttggcactgtttgaaatccgggcaccgggcgagatcttgcagccaaaaaggataccagggaccattcaatgctacgctcgtcaactctgaaccaaccaagcagtcatcaaggagttccaactaccaggagttactgccaatgcccagcatcccccataagtaccaggtcccttcccaggagtcttctcacggtcaactgcacccaattctcaagaagtcctaccttcaagctgtcca

SEQ ID NO: 126147 - DNA, 355 bp, Zea Mays
gggcgatgggtgttttcttttattcatgaggcatcacatgttttggctgtctccattgttggtatgccctgctgatagggaatttgacccccagctatttcttatctgttgtcatactcaataggaaaattagatgctaaatgacaagcgcacatcagcaggtaattttgatgagatatctggatgtttgcagaaaatgaatagcgcacatcagcaggtaattttgatggcaccctatttatacgttgcctaactctgcagtagccagtaatctctgtttaacttgacccattggggaagactggacaaggcatttcttcagctttaaaccttaagagattccatttaattttct

SEQ ID NO: 126148 - DNA, 316 bp, Zea Mays
aggcttggcgctacctcgaggacacgttccttggccagaaggaatcccgcgcgctcctcctcgaaacgcagttccgcaacctccgacaggactccatgagcatcactgactactgtcgtcgtcttgagtcgatagccgcttccctcgccgaactgagtgatcccatcggggatcggcagatggtgctcacgcttctccgtggcctcagcggcaagttccatcacatggtgtccatcctcaagctccaccagccgttcctgacgttcgcacaggcccggacacacctcctactggaggaaatggagatcgacaaccg

SEQ ID NO: 126149 - DNA, 787 bp, Zea Mays
gtggattataggaaacctggtatcacaaaatgtcatttgctagcccaatgacgtcttcatccactagttgtactctaataccctcacgtgcaattacaatgcccttgacatctaggaaacgtcttttgtggtataaaaggtgatctattgttttgaattctttatattccaactttttagcaattgtacggtggaaaaaaggtgccttacaaccttaacctatatttggacagttctctcacgcaatttggctaaatttcccatggtctttattttactttgagaaatagtgtggcataatgatgtatggtgttatatttgagtggacataaacaccatctaggtatgccttgaatagaggggattattggaaacctggtatcacaaaagtcattagctagcccaataacgtcttcatccactagttgcactctaataccctctcgtgcgaatatagtgccctcaaaatcatagaaacgtcatttgtggtttaaaaggtgatctattgtttgaattctctatattccaactttttagcaacgatatggtggaaaaaatgtgccttacaaccttaacctatgtttggacagttctctcactcaatttggataaattttccatggtcattattttattttgagaaacgatgtggcatattgatgtgtgttgttttcttgagtggatataaaaaccatctaggtatgccttaaatagaggggattataggaaacctggtatcacaaaaggtcattagctagcccaataacatcttcatccactagttgta

SEQ ID NO: 126150 - DNA, 458 bp, Zea Mays
ctagtctacaaccattttgttccccacgtgtagaagacctttcaagagatgcttccattgagaagccatctaaaacctcccctctatagtccacagatgaatcttttgataaaccagaaccagatggagttatttcaccaatagatccactatgtaaaatgttaccaatatccttattgaagtaaaggccagattccactatttctgtgccctccaacttggaatcaagttgccaatcttttaaatttgatctttctttgacagaggcatcctcaataatatcaattgtccagggtttggaagcaaatcgatcttctttgacatcactgcatccgtcattataaacctgacgtggtacatcagtattgggacccaaaaaaatctcataattatcatcggctggagcatgcagtgcacatctcactacagcatcactaataccatatacattgccatct

SEQ ID NO: 126151 - DNA, 600 bp, Zea Mays
cttctctgttgatatatatatagaaaaaccagataaatagtcacatggttggctattgtcaaggcaacagatgaggcatactcttctgtatatcttacgtatagcacaaatgcatcactactgtttctcattatatttgcgatagtaatcatatacagacatgaacctttaattatctaccatcctctctacgtgtgaaaacttcaatcctacgaccaacgggtgcttcatccatccggcatccgccgagtagctagcaagtagactttgatgttggcaccacacagtagcaaaagcaaaccacggaggcttacttagctcaggcagctggtcatcttctctggaaattcagaaccttgatagaagtcgcgtagacggcgaagaagaaaagggagaagccaatgagcaccgcaaccgtgacaccagccatcccctgttggaaccccaggctttcctcaaggaactcctgcacggtcccatcgaaaccagggccgactatcctggcctgcacatcgcccagctgagatgtaatgatgcctcgcagggtccaggccactggacagatgtaatagaaccagatccaccagccagggatcctct

SEQ ID NO: 126152 - DNA, 834 bp, Zea Mays
cggaagggagagagaaattggggagagtgcttggatggcgactccgtggacgaactgtgcggcaccgttgcggcatggagggcccgccgctcccttttttttcctcggaccacgcccagccgccgccatggatctggctgagccatcttgctcggataggaaggggggaacctcgggtagcatcgtcgggcggacccaaatcctcccagaaccttcgccgtggctcatggagggtgtccctggcctcgccgcgttgatgtagcgactggtggcttcaggattcctcatcggagtttgctgcccgcagctcgccgtgacccgcggtaccggcatcttcattcctggtatggttaccccatgagttttcccttggtccctgcaccgtgatgcaccacttggataggcactttgacgtggggtgcgtggctaccgccgacaatggcgccgccgtgggggaaacctctgcgccactgcgctcggattggctgggggaaggggataagtctttggccgtttgtctgattttgaacggctcggattgatgcattcgtacccgtgcgcgtcagccataggatctgaatccgtgggttaggaatggtccgggcctcataaaatttggggccgtcggatctcgatccaatggtgactgtcacgtaccagtttgtgatctaattccgaccgtcggattcagatcgcgcggctctgaataaacgataccccttcgccatagtctttttccttaagagcccctgctaatttaacaaatcaatgcgccgtccccacgggagtaggctgagtcttgaggatgtttacaaatcaaaccccagattcctc

SEQ ID NO: 126153 - DNA, 745 bp, Zea Mays
ataaatcgcgcgcaaggttaataattcagattgtttgtccagcacgttattttggcgacgaaatcgagtgttcagataggatttaactggtttcaattaaatcaaacacagagagtatggaattaagcaagaattatatgtgaggataatagtttctatgtcctaatcattttcgcctatcccgattttcagcatcgcatatgtctcgtttttttctgaactgtacaaattattttgagtagttcggtgttaaaccgctatctgcaaggtcgaacctgttgccagtttaaaattaatcaattaaggcaaattggaaaggtcacctaagtatttcgctcttgttcgagcgatctccacgaattcggtagagacactactagagaaagactattttaaataaaccgaaccccaaaactaaataagaccaaattagttgctagccgattcagttccctattctagaatccgagaaaaataatatcgtatcctaacagcattttgatccaatctgtttgtatcctgtctagatctgaatccctaaacacggatatgtatgtattctttttagaagaaaaagaaagaaaagaaaaagtgggaaaatagaaaattgtttttctcaaatatttccaccgcatagggcatcttttcctatcctctgcgtacgtacgttcagcttccttttttccatttgatgcgctggctctctggaactctctcactcgcccagcttctagcttctgcaccc

SEQ ID NO: 126154 - DNA, 344 bp, Zea Mays
ctcaagttccctgcagttcatgcaagcccaaaggagtgcctcaaggactgatgcatctggcttaggtcccatctggtgaatgaattgttttgcctcagttagaaggcctgctcgcccaaacatgtcaagttgtcaacaatgcacgcatagtgctcattttgtggtgtgatcttatgaacttgagtcatcgaatcgaagtacctgtgtccttgctcaacaagtccgttgtggctacagcaagagagaacactcacaaatgtgatgtggtccggaggaatgccattctctcgtattctcaaatacatcaattgcctgcatgccatgtccaagcagctatatttgga

SEQ ID NO: 126155 - DNA, 578 bp, Zea Mays
taagtacgcgggtatgtagcaagaaataagctagaatatggctcaaggactgtctaacattgtgttacttagtgggttcgcccactaagagcatattaccccaccaaccctagttatacaatttctccctctagccttcccacactttcgcccttgcctgacgctattctagcacccctcttagatctcccttctcgccatccattgtccctcactgactcattgtcttcctctctttttatatccccttcatcgtgtaccgcaaggccccactctcgtcctctcatttcccttcatctcctcttctataggcatggtcacatgagatagacgttgaggatgacgactatgttatgcaccatgccactcactatcaagctctgtagacttcatggctctataactacttgatatctgaggcttaaagccgaagacatgctccatccgtccaacgccatccctctctaagatccaaactgctaaagctacgagccacatagatctagtcctcacctccgcaactctatgcagatttagtctactgttactacaacggtgaaccattgacgtcctccaca

SEQ ID NO: 126156 - DNA, 481 bp, Zea Mays
ggaaccaaatgatccagcctgtgcgttcccttccccactctccccgtctgtcctccaggtgggcccaactcgtcaggagcatcttcaagtttgagcctctgctctgtgtgcgctggccgttcctgcgtgcgccgccaacccagctcccacgccgtcgtccacatcctgctcctgcagtcgtctgcttcttggccccacgccgccagccgaagcgccgcgtcctctcctgtccccttctttactgttcgaatcactaccccattagagccgaccgttttctccattagtgacatttaaatcctccgtttctcatcttcaatcggcatcagttcaaccggcgacctcccggctccctcctccacctataaatggaaccgctcctagagccctttctctccttttctgctccagttcgttggccatatcccgcagccaagcccctgtacagcgccgagaaccccgcgctaccctcggttctcac

SEQ ID NO: 126157 - DNA, 546 bp, Zea Mays
gatgcctgaaccggtaactgttgttttaatcacagccataggtttccccatcgacgaccatggatcagccccttccctctgacacccgcacggcggagcgcacacacctacgagggcgggttcgccgaagacggccaagccagcgccccaagcatgcctccctacaccgataggttctaaacaatgtgggggattaggcgaactccatgggaggtttcttaactcaagtcaggaagagagcggcccacatgcggacttcgaactccagtgagggattccagatgccctgcttgctctcctatcacagcaacaccgcatccatgcttcatacttgaaggcaaagctccctggccaatcccgagggctcaacgtcgaagaaaacacgggtcgacgacagtggctagaagctttcctcccccccactccgctcgcacagtgctcagctctcggtcctcattcggacatgtttatgaatcaaagggtctcgaggctcgcttatatacaccgagaaggcttcaatggtggtgaaattgaatcccgagatca

SEQ ID NO: 126158 - DNA, 364 bp, Zea Mays
gtcaatcgctcaggcaaagtattacacctctccatcatgtcaagttactactttgggacaacgcgatagacaccttttactgggcacacaccctttgggcacacccattgggtgtaccgccaagattcttcaagattttctgaagcgatgatactggcaacatatacgcaatgaatataccgcgacaaaggggaagaccggctaaaatgggaggaagtccaaatgtggttaccaaagcacaagtccaatcagcagaggcattaaagtacgcagccgagtggtgtctagcctagggctccctgttttgactagctggatccccaacttgtcaccgatcaaattgattccagaccaaacaagaaac

SEQ ID NO: 126159 - DNA, 564 bp, Zea Mays
ttcgtatttaatataatgcagcaacttcgtgcacggagccgtttcgtgcacggataagtttccactgtcgtgaaattggattccgcgattcactcgcaaccttccgccctccccctcgctattgtcgcttgtaacccatcctcattccgccgcaaaccctgtcgtcccctccctctgtcacaaccgcctgcaactcgtggcgcctgcaacaactctacgctattgacgacgcccgctccgtgtcccttctacacaacctcatcctgtcctcatctcgctggtcccgactcccgacttatgtgtctccctacctcgacgaatacgctcctcggcggcgcaacagtagggtggaggcgtgcctaagaaaaacccccttcttggaccttgtccctcgtatcggcacgccgtcgcgccccggttgtgcctcctcctcgtttgtgtgtccccacttcggcgaacacgctcctcggtgccgttgttgcggcaggcgggcatggcgtccactgcgcacgagagcgtggtgaccatgaccgtgaaccaaccatcaaggaagacgcacatgag

SEQ ID NO: 126160 - DNA, 584 bp, Zea Mays
tgaggataagggtgttcaggtgatcaaagaaatgatcaagcagaaggcagacagattcaagtgcttccggcaggacatcaagggaattctatggtttggagatcgattagttgttcccaaggaccctgagctcagaaagaagatactagatgaagctcacctttccaaattctccatgcaccctggtagtaacaagatgtaccatgatctcagatctttatattggtggaccaggatgaagagggaaattgccaagtacatatccgagtgcaatacctgccagagaatcaaagccaatcatttgaaggcagcaggccctttgcaaccccttcccataccatcttggaaatgggaggacatttgcatggacttcatagtgggattgcccaatacctccaggcaccatgattctatttgggttattgtggacagattaactaagactgctcatttcttgccagtgcacaccacccacaggacagagaagtatgcagagatctacattgaccagatagttcgtctgcatgggataccaaggactatagtctcagaccgaggagcaccatttgtggcacgattttggg

SEQ ID NO: 126161 - DNA, 572 bp, Zea Mays
cggtggctagggctagcgtggcgtcgacgcggcgccgacgcggctagggatgaaaacgggacggatacagccggatacagggtcatcccgtatcctaccctaatgtatttatctcggatacgagaccggatacgggtacttcagattcgggatggatacaggacgggaccgggtaataatacgggcggataagaaacggataacggatactaatcgggtaggtactggatagttgtcgggtagttcgtaccgatggcattaattgcccaaccatccaacaaacacataaattaagcaatacataatcatgtatatgatagatcaaatgtggaaccaacagcacaatattaaaaaaaattcgacagcgtgtcccctcttttaggcataatccacaagtatataatagatagatagtagataaatgacatcatttaacatgttcaagtgttcaacacttgcacatcacaaaatgaaacaacacaaatcacaatagatagtcatttgatcatgtccagttcagaacaacataacaagtgaagaagtgcaaacaagacaatatagttccacagcat

SEQ ID NO: 126162 - DNA, 399 bp, Zea Mays
aagggaattttatggtttggagatcgattagttgttcccaaggacccagagctcagagggaagatactagatgaagctcacctttccaaattctccatgcacccgggtagcaacaagatgtaccacgatctcagagctttatattggtggaccagaatgaaaagggaaattgccaagtacatatccgagtgtgacacttgccagagaataaaagctagtcacttgaaggcagcaggccctttgcaaccccttcccataccatcttggaaatgggaggacatttgcatggactttatagtgggattgcccaatacctccaggcaccatgattctatttgggtcattgtggacaggttgactaagaccgctcatttcttgccagtgcacaccacccaccgg

SEQ ID NO: 126163 - DNA, 498 bp, Zea Mays
ggctgaggaaattgctgtgcttgagcataccagcatgtgggatcttgttccccattgtcctcatatctgtcctatttcctgtaaatgggtttataaggtcaagacccattctgatggcttgcactcttgttgcggcttctgtttgtaagtggtccatctttcagctggatgccaagaatacctttcttaatggtgagttccgtgtggaggtctatttgcagccatcttctagaagggtatggtttgacgtctttgccactcttggtttcagcgtttttcttctgtgatcaccgttggtggtttttctactgatgttcatgatcctgctcttttttgttcacacatcatctcattggctccctcttcttatgttgatgatatgattatcatcagtgatgatcatcaacctttgtgaaggcacgtctgagtgaacaatttcttatctatgcctctatagtcttggtcctctttgttattttcttgggattgaggtctcca

SEQ ID NO: 126164 - DNA, 585 bp, Zea Mays
gtcgagaattgtggctcttccaacaccaagaaccaaggacaaattaatgtctaatgtagcttcaagctctgttgtgatgtgggatttcacgactatttttctactctttttacttctggtagattagagtaagattatgataagcatgccaaggggtggaatcctatgtagttctgctacaaaaccccagttatatgtccattcaggactgacagttaccatttgacttataatgtataccatactcgtcaagggactatctcgagtcaattcagcgactatgattatttacaattctgagagatgtatgcaacacaagcataaaagtcctagacaggacgagcaaagtggttctacgggaacacataattgttttcacaccaacatagtgaaatttttctcagaataacctctcggtatactcgcaacttacatgtcattcagcaaaaaagagagcaatgtgctaacatctggttgagcaatgtatgactgagatttctagtcataaattatttggtaaggtctttttgcttactaatagaatcccaatttgtgatgtcttctatgccaaaaaggctttcatgc

SEQ ID NO: 126165 - DNA, 286 bp, Zea Mays
tcttataataatagttaccaggccagtttgaagatgtcaccatttgaggctttatatggcaggaagtgcaggactcctctatattgggatcagactggagaaagacagttctttgggcctaaacttatacaagagccagaagaacaagtgcgaatgataagggagaatttgagaattgcacaatcaagacagaagagctatgctgatacccggagaagactactggagtcactagtagaaaaaggctcaaagcctgcaggacgatatatttttacaaacggattcg

SEQ ID NO: 126166 - DNA, 305 bp, Zea Mays
aagaaggcgaagatgaaccaacatggatagaaataccccatgaactactcttgttgccacaaggtgacaaaatcacttgcatagttgataaaatttatgatgatctaaataaaagttatatgcagcttgagtatttgaaagatcgtgccatattgactcctactaatgatatagttgattccataaatgaatacattgtgtctcttatccctgaagagacaaaagagtatttaagctgtgacaaagtcatcaaagctcccaatactcatgaatcttatgaccttttatatcctgttgaatttttg

SEQ ID NO: 126167 - DNA, 534 bp, Zea Mays
attcatccatccacgaaaaagggctccccaatcccccaccctccgaagaccacgacccaaaatctgattccccgatacattaccactaagagacatcgcattcgcatccaccaaaacattattactcataacatcatcagggtttgcttgcgcaagcctgaacgtcgaaacctgcgcagcaaccgatcttaagtatgatacaacaaccaagactatcaatctatcccctattagatactctcaacctgcgccgaagcatctcccaccgcgggacccacaatagcacctcctggaagattcgtttgctcttcggctcccgcctccgccgaagcacccctccggttcaccgagctttcaaggtcggcgaggtcctcctcttcttcctcgttcatcacctgcgaagacaatagaacatgtcaaaaaacgaacacacacaacacctcacgccaaaccaacagcatacctgcgctagagctcggtcctccctttctctgacgatgccacgaccgtggggaccccacattctaatataaa

SEQ ID NO: 126168 - DNA, 309 bp, Zea Mays
cctagactcaatgaataatgaatgtggacggcgggtttattctcaaataccagagggtctcatgtgtaaaactaacccgcgaaggggtatctaaggtttctggccgtccgatcacacgtgcgcgacgcagattagatctaacccgttaagaaacggtacatgatgatctccacccgatcagaaatcgacggcggtggttttaaattctcataactaaatcttgctcgatcgatctgaatcagacatcccgaatcatccctgcgaaccggtatcactacgctctaatcttagccgtcagagatcggatcg

SEQ ID NO: 126169 - DNA, 1097 bp, Zea Mays
cggtgtggttttcaatggcttatcgtgagcggttgagccaatcgtcgttgggccgaaccgtctggcctcgagcctggactgtccgaccgtgcgcaaggacatggattgttcccataaaggcgatggaggatgtggctagtcgtcataggatttcatcgacatcccaaaatagggttgggactaggtatgcccatttacaaccgatgaatcttgtggattttctttggtttcgacctcgcgtgacggaaagttagtaatgacatatttatcaaacgcatgcgctagccttctataatcctcttgtatacccccataatatttgttgcatctgttcttgtatgatcgaagagcaaggatgttgttcgtattacttatagtgggggtagttgtagcaggttggattgatgccaggttggtctcccgtatacggacgcccttctagtgcctgtccaccttaaatttggctaggtacttcgacttggcctccttgatcagctgctctatgtgttcctcgaattcccgctgatcttcagccgacaatgtttctagagtcggctcgatgatattgctggggaaacatcagagtcgacaccttgtcccagcggagtcgccaaaaagtgtgttggcgccgatctaggcgctaatcactacgaggtgtaccggcgacggtgctctctgcggcggcgtggacggtccgtggcctggggtcgggcggtccgtgacctagcgcagaggcaggtcttccttgcagtgaagtcggatggtccgtgcctggtggtcagacggcccgcgcatgcgcagggcggctgcgttcgccaacaccacatgtatctaactcctatgagggatccgtcggggaggagagatcctatgttttgtcttgggatcggtaggccatccaagacgcctccagatgacgtagagtcgaagagaggtgaagattggaggtgaagaagactaattacccctactcctaggacaaaaaagtagaagaattggaaatagattgattggattcgattattgatgtccgcaatcggtcgtatcccttcatatatatagagaaggtctgaactcatttctaggtgtttcccaac

SEQ ID NO: 126170 - DNA, 353 bp, Zea Mays
ggcgtggtcgcatccgttgatctagggatcggcggctaggctcaaacaagctatgggacgttggtctatcagggaacggccacgattagatatgtgagaactttgtcattttaaatcagtgctgcagattgacgaatgggtggatcggatggtgtcgttgcggggggaatttcgggccgtggatctcggatccaagggcaggtatcacataccggttctggttttacgggatctaatgcatgtcgttggttttagatcgggcagctgggaatcaaggacaccctttcagccgtgaaacaaatacaaaagagccctcggttttcttttaaatcaacccgcagtctgggtatgtg

SEQ ID NO: 126171 - DNA, 661 bp, Zea Mays
cagaagtagagaaggttgcgttaataaggattagggcaaagaaagattccattatggatggtagatcttgactcatctagtgattccgttttgcctttcgaagacttgagttggtgcttatcctcctttgatgtggttggtcttctttggcctttattcttcgagttgtcatcctagttaaggacatatggctaaggatatatagttaggatagccagggtacacgaggtaggtaggtttgaacaaagttttacattgcttttaggacaaatggactaagtagcctgtgaggtaggttatgctgtttgttcacggacgagttggtctaaggtattaatttagggtaaggtatgtttatagaattagggcctaattttttttcgccaacattatctaacttatttaagtaactcaatttggattagatcatgttagattgggtgggatgtagatcaaattgaaataagataaaatcttttcaagataagatgaatctattaagataagatggatctattaagataagagagggtcttttaagttatgagggatctatataaaatagatacactttaatggaggataaaccaggttgcttagttatcttatgaattttatttatttatatttatacctatatgtatatgcagatgtaattgtg

SEQ ID NO: 126172 - DNA, 783 bp, Zea Mays
tttgaattgatgcacatgtttgatttggtttgaatttgaaacttggtttgaatttgaattgaaaaccctagagaaaataaaatagaaaagacactagaaattcagattaatagaaaaaggaaaacaacccagctatcccctttccatggccttttggcccacctagcccgcgagcgtgctcgcctctctccttttccctcgctctcgctatcagctgggcctgccttgtcggtgcgtccgcgcccgcgtgcacctccctgttctcgctgccgagtgggacccgcttgtcatctctacccccaaccgttcggccatctcgcggagctccacgctttcccacgtcctatggaagccgtcctcatctcccccatgtccctagtccgaggtgcctcaccccccctttttctccccctctacgcaccttctggcctcactcaactaccaccccgctcgctctctcgccctatcgtgcccgtgcccgagctccgccgcgccactctaagacaagctccgtcgtgccgcgccatgcataagctccgccgcatccgtgccaatgaccgtttccacctcgtccagtgtcgttgttgcgtccacgcccggaacctactgatgccccgaactccacctcgcctgagctccgcccgaggtgaggatcgtcggcaccccttctttccccttatccctatttctctctcaattattgcgcaaatcgccggtgagggtcgatggcggtgcttcgccgtcgtgccatggtctccagccaaccgccgatgtccatgcgcg

SEQ ID NO: 126173 - DNA, 372 bp, Zea Mays
aattgtggcctaaaaagactagaagctgatctaacacccattgctagtatccctcttaatgagaggagtacaattcggtctgcgtgtgaaaaacttgggatgaaaaaaagcacgtttcataaaaggttcaaggaaggtcacctgcgtaggcactctaatagtttgaaaccactactaaaagaagaaaacaagatggatcgactgcgatggtgcatatctatggtacacgagggcactttgcaaaacgaaccaaaattcagttgtatggacaatattattcacgtggacgagaagtggttcaacatgacaaagaaatctagaaatttttatatgctgccagaagaacaggacccctaccgaaccgtgcagaat

SEQ ID NO: 126174 - DNA, 661 bp, Zea Mays
agctagcagtagtcatttgaacgtaaggaacatcttctaacatataaattcagtttcaacagcactgtagaaatattttatgattcctctactacagcttcaatcacataataactgacttatgtgtcatacattgtcattcacctacctactttaattctgttttttacagagcttcagttcacaaatatctatgacctgtgtttcagatgtacacattttcctttctgttcataacaataatctgaattatagaaatggactgaagttttgcttcaacttttatttgctttggtaaatatattgatccctttcacatgttgtctgaatcaatttaattcatgctgcctctgataactatctagagtcaatttgaataaaatggctctgtcgatccattaagggggaaaggttttagaaaacaagagacgaggtccgaggctcaattctactttgaccacaagtaagcatttcttatcacttagcacacgagtttttattgctagctttggtttcataacaatgagttataagaatggactaaagttttgtttcagcttttatttgctttgataaatatattgatccctttcacatgttgtctgaatcaatttaatttttcttacatctgataattgtctaggctcaattctactttgac

SEQ ID NO: 126175 - DNA, 529 bp, Zea Mays
ctgatccagcagttgcagcccaaatgcagataatgcaacagatggctgatactatggcggatatgcacgcgcagatgcggcaggaacgccaagagagagaggagatgcatcaggagaggaggggcaatagcagcaagtcccattgccaccaccgccaccaccacttcaccccgggacaagcaccgggaatttatgagccacaagccgcctaccttcgccagctcaccagatcctctacacgtcgatgactggttgaagtccatggagaaaatgttaaatattgctcagtgctccgaccgggagaaagttctctatgcttctggtcatctgactggtcctgctgctgattggtgggattcttatgttgctgcccatgatgctgctgacactatcacttgggcagaattaaccacacagttcagaatctaccacattcctgttgggctgatgaagattaaaaagaaggagtttctgtcattgaagcaaggcaacatgtctataagcgagtaccgtgacaaattcattcagc

SEQ ID NO: 126176 - DNA, 597 bp, Zea Mays
cccatttgggttctatgctaagtctgaagtcagtgttataagctcaactttggagctttataactttcaaattattaagaatacaccatagggcaccacatcaactttgtagatctattaaaggtgaacaactttgtttaagaggttaagcattgttgttatgaagaattgggagataattaagcccaaagttggactttcaggctgtttgaagtctgaaattggattaccagtggctttgagtcatctttggagctctacagatcatgatcttcaaagaatttgcccgggatcactataacaaagttgtagagctattaaagaggaatagctttgctgcaaatattaagtcttggtaccatatgaaaattggagttactttggtctaatgatgggttgtcagacacagtttttctggattccatggtacagtgcctgaacggatcagagcaagcacgcatctcaccgccgccgcgattcgtgccactgctgttgcgattcgcgccgccgatgacccgataaggttgccaggtaaaagctatgcgcctggagatgactccggtgattcaccgccgtatcccccttgctttgcggcct

SEQ ID NO: 126177 - DNA, 716 bp, Zea Mays
taataggacttggataggttttacggtctatctataaggtaacaactcattgtaggggaagggaaatcaatatacgcgtttcacgcgtgatgcagccgtcaagaaggtgctttatagtagtaaagaagcttcagctaaatatgactctaattcggcttcataaacaatagctatattgtagtaatgagtatagcatttctcttttctcaaaatgaacttgataatgccaatttttgtggcttgactagctccgccttcgtctatgccaggtattaacctagctgccgtgaacggggctaggctagcctcctagtttaacctaatagctcgggtactgctccacagcctctcaaggctcaatcgagtgatcgctcaatcccaaacctcgtccatgacaacgcctcaacctacctcaaatcctcatggcaactggtaagcataaacgaccgggactcaagattcaggaatcatggactcaaatcgatagccgttagatcggtccatcacggccgtccgtttatttgaattagcaacgatccaacaaccaccatccgcagccctgtccgagctctgcacggccgcaccccaatgcccgtccccggcgagccgtctcctccggcctcgcctcgacaatactcgggcctcctcgccgctctccacagctgtatatctggcgggaacgcccccgcggctgtctcccttctgcccaccctcgc

SEQ ID NO: 126178 - DNA, 1785 bp, Zea Mays
gtggaaacaccacaatgattgtgtttctctaatggtgcttcccctaatgctcacagatacgaaggtttatccacgaagagggtgggctctggtgtctagctggagttggggggttttaggcttttagcccaactgggtgtagccgtcccttgaggctgctagctggcttagtggaggctatttttctttgtacatgatgcaaatgtaacttgttgagggttgggtgtgtttgtgtatgtcggggttctgcttattgcgtatttcttaacgcgataaaccaggggatgtcaaagcaatgaacataggataatcaatgtcttggaagctgaaaccattgtttcaatatttagattatgatgatattagaacttactagtaaagagtatggcataacaagtaacaattcacaagataatcagtcaaaaggaacagacgacatgacatgagtcatcacaaactctgtacaagtaattagtattacctgaccacatacgtttgatttgagtttatacaaagatggcagatgaaagtttcccatgtgatattaatggtaccagtaaaaacaagtacatcggataaaggactatgcaaatacttatgataaaagtttaaaaaccgtgtagtctaattgtaagatctccatttatcttagaagttagcacttcatttggaacatttagtttttacttcaaactgcattgacagacctaattgatatgtgaaacatgaaatgagaaactatgcctatcatgacaacattatacattagggtgtcgaaattgccaaggaatgcagtatttgacccacttccatagtatatgataaggagaaaattttggaagctaattatttcaagcatcggattactcggctctaatcatgtagcaaacgttgaggaatgatgctgaaagtaagtacctgcttgttcatgcgatttgctacttcgctgagaaccagacagaccaagccttgcatcgtgtaaatctctggcctcatgtttgagtttcttcagctcaggtagaggagcaattccaatcatacttcctggcatcaatgaggtgcctctacattcctcgtctaatctaatattaaagggcagaggtactggctcatagcgtgatttactaattatccttgtaccgtctgtcacaacgaatggcctagtagaagctggggagggagctggagcaaacgtgcattcttccatttcgaagttctcactgtaaagctgtggaacgtaggagttttccattggcacaagtggcttcatcaaattcctacgagatcttctgctcctaagagctccacagcctcttccaggcccagaaccaagacaagggctccttggagagatttcgacagcttgaccctctccaaggacatcgaccagattcttgcctttaccactcgcgcgcacactttccctgtagttctgtgagccgtttcttctaaaaatccacggttgtaaactcagtagggatccaggatccctgacatactcgcctgggctcaccgaatcagtattgaagctgccgctagtagaagcaactgtcctgccaccaaacgcggagtgaacggagtttcttggagtattgcaaggcacgttctcctcattgagacataagtccccagcaatatgatcaagaatcattctgcaaaacacattgttccccacttccccattcttggtgttcctctgtttatccatcgggagagtggcactaattcttcaacagcaccacagaagtctgttcaggtccacagttgcttgggcaatctacatga

SEQ ID NO: 126179 - DNA, 435 bp, Zea Mays
cgcatagacagggaaagtggcggctgcgtttatatccaggcgcccgaggagatcgtgcggcgcgaacgagtccgttgagcagagcagacccggtcccagcgacgagcatctcgcacgggtggccgagcgacgcggtaatcgcgcgaaggtaggtgatgacggcgtgggcccgcatgtcggccagctacctcaactgagtgcgggtgagcgcggtagggagatgggcccacggagcagtgactaaggtgagcagcaagcggtattgagccgagcggcaataacgggctgcgcgtgagtgccagatgaatgggccaaaactcatttcagggccgacgtgcaattttccccatttattctttttttcttttatattttccaccttcttttcttccttttcaaattcagtttgaattcaaaattaattcaaccttctat

SEQ ID NO: 126180 - DNA, 368 bp, Zea Mays
tcctgtttactaagcttcgaaggcttcttatggttttattcagcttcttcaagtatgcacacatggtgattgcccgaaacttctgccttcgagtagatgcatatcaacagtttcgatcgaagcctaccttcagcattagtcctgcaacatatagaacaaggtagaaaacaattattgaattagtgttttgaggaccttcgtgagaagaaggcccccaacagtagccccttcgcggtgctaattcgttttttataacgagctcagtccacgaaatatacgaacacttttatgccgaaggtccgaaaacaccctccttgagcgcgttattgaaaagcatggtaaaaaatgttttgcgccggtctaccgat

SEQ ID NO: 126181 - DNA, 502 bp, Zea Mays
aaaattcaaaaaaatcgggaagataattaaaaaaattgtttaagtgttttcacgaatttcagagatcctttgtgaatttctctaggccacaatacaactctgtttcaagtgaaattttgtgtgcttccatcctttgtgtttttggatcagtggtaaaaaattcagaatatttcgagctcttttgatggtactccttttgaaacgcgcctttgatttctactagtgctgaaaaatctgtcatatttacagaactgccattcccactagatacttgtacctcctttcttgtgctttggtccaactgttctattacattttctaggccagcaactaggacgagtacttgaaacacttattcagcattgctatctgttactgacttgtgtgccacatatatatttttagttagcctttccatagctccaattttctctcgagcagaacaggtactcttttgcaatcacacccacgctcgttggatagtcacaccggtcaccgtttg

SEQ ID NO: 126182 - DNA, 1066 bp, Zea Mays
gcgtcgccggcggcggtagttccgagtcgcgatccgacggcggatttggcatcattccagagaggcgctgcacacggaagatcgaggaagtatctccagcggctacgccatcggtacggaccagcagcatctcaaccagtcctcgagtatttaaacatgccgtgctcttcacctcttctagcggttatgagatgcttttggcattttattctgaccaaactgatcagtccaaaaaacaagccagctctactttccacctcaaacaacgaaaaaagttcaccttttttttgttttccacatctgtgtcaagaccaatagtaaggtattcagttctgcttcgtgtctgaattctgcagtgtttgaacctctagctgttttcaggcataatctgaaacagtctgtcggatcctgcgacaaaactgttctggtcgtgccctgtcgcattgtgcgtgacccttctctgaaactggcacgattccatgacgagcctgtagctaaaacgagccatggcctcttgggggaagggactggcagttgtgaaacactgaatgttcagtgcacgattgctttcgctcgcattggttgcgttcagtttttggtttcttccaaccgcggtcaaaagtttgcctagagagtcttggaccaagcacttgaggaatgtggtccagccgtccacgcatgggtgggttttctttggtcgttcctcgaatggcatctgaggatttattttgatctccagttacaaaagctgagttagttagagagagcatggcatctataccaatggactgtggcttctgtagattagtacactgttttgcatctgtgtagtcaaaggggaccatgaactcattagggtcaaaacaatcttgctttactttgctttcaccttttttacggaaaagtttgcttgtatcctagcttttgttcttttgagaaagtgacggtggctgggacatgaacctgggaatagacttgacatgtgcgcatggaaatcccatgctgctaatcttttgtttctttcttaggcatgctgttcaggaacaaaaagaaattttacgatgcc

SEQ ID NO: 126183 - DNA, 538 bp, Zea Mays
ggcatggcggtgtggattgggggaaagttcgccgccgccattgctgcgctcagaaattcgccgtgatcgtgacctcgtgaccagccgccggagttcgccgttgcgcaccgtgcagttttgtactgggtgtggggcgcagattcggtgcatcaggcgtcaattcctcgccgacatcggggcaagtcttcgttcgggatcctaggtatgagctcccgctcgatttgcgatcatctagaagccacgtagcatctaccggccaagtaattgatgggattaggcgccggccaccactccggccgcttaggggtagtgtcgtggccgcccgccatcgtggacattgtgccctatttcgtcgcatgcgaattaggatagaagggggtgttcactgtcgtcccttcggcatgaatcgtggtgcgggaggaagaattaggggttgtaggcgccggcccgcgatccacggccatggcaccgccgtgcgccggcgcggtcccgccgctcgtattcgtgggtatgccagggcctagctaccgttggattc

SEQ ID NO: 126184 - DNA, 647 bp, Zea Mays
cacaagggaacaaacctccctggtataagcaataggtaagcgctagatgatgaaacaaggaggggctgcaatgcaatgcggcttgcaatctaatctagggctagcatggcgagaattcacacaagacggctagcgagggcaaatcgagtaatgtggtgtctcgacttgtaatctgggtaaggtggatgggatagcggcggaaacaaataacagcgatggagcggttgaactacgattacgacacgacctaaaccagcaacaagactcgacacggacacaaactcaacaaagcaatctgaaacgaaattgcaaggctaaacaaggtttctaggacagcggaatattttttgtatggcaattatctggagttataggatgaaaaaaactaaactaaactagggtaagcctgatggtaatacctgggtctttgaataccacttgataggaatgggggtgcctgatcttccgtcaggtgaagataactatcaatttggtggagatgtcacacagacgatccgacttccaatcaacacgactagaaccccgcaatcgcagcaccacttctcctctggttatcaaccgtgcgctgcgcgattgacctcgccacgaaggctaatccttgcctgcgaatcaaagacacaagcaag

SEQ ID NO: 126185 - DNA, 312 bp, Zea Mays
cttgataatcgatacacatccttctggtgaaatctttcttctccacgaataggacaggggcggcccaaggcgaggtgcttggtcggatgtaacctttctctgacaactcatcgatctgcttcttaagttcaacaactccggtcctgatactctgtaagctctcttaaagatgggggcggttccaggaagaagctctatagcaaattcaacttttcgctctggtggcatacctggcaagtcctttggaaacacatctggaaactcagacacaaccttgatactcttaattgggtctgcttcactactatcgat

SEQ ID NO: 126186 - DNA, 480 bp, Zea Mays
gccaacaacaattaacaataaaatacatatctacgttgcagcatagattaactatagcctatttacaattaaagctaacagggtaacaggtatgtgttacaaattgcaatagaaatcttggaaattgagggttagagattgctgttgtagcgttggagatgagccaacatgtaatctcaacaggctgaggcactgcgctatagctaggcgaggcgtggtcacgtggggcgccctagtgcagggctgggcacgacgttggcgattctcgatgacgggcgctagctgcaagggttaggaatggcagctacgtgccctaggcctaggagcggcgagagtgctatgcaaggcgtaggcttcacagcgacacagccacaatggcaagcactcgctcggggggcagaggtagacttagccggaagaaacgctcgagctcctgaaagaaatagggtctacatgggtcttggtgggcctgggttaggg

SEQ ID NO: 126187 - DNA, 709 bp, Zea Mays
ctttactctaaggtttatttttgcttgtatctaggtgcaataataagaccatatgccaaattttatccaaagatacctagtggttaatttatggtgattttctaaagtttgggggcttagtggtgctttccactactactataattgaaaaatgtcaaacaacaaatttcctattttttctatcttcttctttgcacaagagcaatcattctccaaattggttaattttgcttatagggaaggggttgtaaaatttcttggaatatatggtctttttcatggggcagggggcgaggtgtatttcatcacatttttgccttagtcttatatttttctctggtagtttacatcctaagtacttaggtaaaaatagggttgctcactgtttcccatttttagtctttcttttgatttatttgaagtattggccaaatccaagttctatttgtttaactcacttattgtgatggtttggggtgtttaccatttttgcagtggtatgttagtggtcaggggtctactaaatttttcttgccattattgcatgtgccctcatatttttaatcatggcctttattaacttcttaatgcttaaataaaattataaccttagatcagtactagaccagggttccatatatttttcctatgatctacattacttaggcatactagaaaaaatgtggtcaccctctggtttccattttct

SEQ ID NO: 126188 - DNA, 1942 bp, Zea Mays
cgcgaggaggtacctcgtgctgctcatggaggtatcgcggcccgcggctttcgattctgttctcgctagtccttggagtccatcgcactagtgcagtgcagtagtgctggactaccctggtgctaatccaaatgattcctgtaccagttggttacgcttgcaagccgtgtggggttttcagttaattgttcggaattagccccaaactttgtgggctcgccatatacaggcttagaaaattaaacaaatttgcggtgaaccattatttacgaattacgatgatagatagtattttttgttatttattatgtacgttgtataaatagcaccacgccaatttacctggtttagaaatcttcagtgtcgtctcactgtccttaagatttaaccacattttttaggccgtataatttactttacgttccaaattcagaatgtggattactgttggtcatattattcatatatagtaaagaaacgagtgaagtataatacaagtatttgtcacaagttccagaaaacatttgctaacgtgagtatcaaattaatacgttacctgctgccttggttgtttcatgtcgcagatgaaggagatgaatgcaagaacggaaaacacagagccaaactcaaacgtgccaaatgaccaacacgttcactatacgacaatcgaaatggaatcttctaataccagccaagcaagaaaaaattccaaagagaaggtcagcgcaagagacatctcgcttcttgcaggtacgttgggcttgggttcaggttttcatgctatggtctatggaaggtggattatttaatttcgttaaaaaagaagtgtgaaatgtttaatctgtttctgtgcccaataaagtgccctgttcgggtttatacatgagaaattagtaaattaattcgtcctcaaatatcgttttaaagtaaatccaggatatgatattattactcatagtagtactgaagtgctgaaaaacctaatgataatacttccaatagacgagccaaatgttgttatgaatatgtaagatggagcgaattggctggtgatgtcaaatgtagttccttttctatcttatcttaccataccagttccttaccattaggatataaatctgtcgtccctttttgtcacaggagaaggagatattacaaggaagttagtcgaacctataaaggttttctctgagaaggacctactaagggagataggaaaagtagtatctactttgcagccagataatgagtggtcaatccggataactgcaatgcaaagagtggagggtttagtgcttggaggttcctgaatgcttctttttttatgttggctttattgtacgcataaatatttatatttctcagttgaagaagtgtaggatttcttctgagggccttttctatttcatctttgtgccaggtgctgcggactattcggccttccccatgctcctaaaacagctcatgactcctctaataactcagcttctggataggagatctagcgttgtaaaacaggttcagtcactcgtagttcatgtttgcaattcaactttctttcgttgttggaggaaagataattcttcttacacaattacatgtactgcaatctgatctgcaaatcaacaaaattgcgacaatagtaccttgttagatttgtttcacccgaaaacagacactctgtgtggctgctaaatatcctactaaatagaacatgtcatatttcatcctttctaggcacttgctgaactgtatttttgtatttggatactaataggcatgccatttattaaacttcctatcaaaagagctactacgtgactttgagccatacgcagagctgcttattccggtatggtgttcctttatctctatgcatcctctgctaacagctttcagtgtcagactgatgtatctgaatcgaccttgtttttacttaaaa

SEQ ID NO: 126189 - DNA, 367 bp, Zea Mays
gataaattggtggggataggggcttaagttggtgaaggatatggctatggtggatgaataagtagtgtcgtccatggtatcagtggtgtgggtggaactagctggagtatcttttgggctgttttatttgcctgtgtttattttgctttcttgtctaatattggtgaatgaggttgctttgttggtcgatcctttggagcagccttcttgttgacatgtttagaaagaagttgatcaaaagtagagttgacactaatgagacgaccagatgtttggatgtattttgctacaacgtatctatctttggacgttgtgtatgaaggtatgggggtcgctagtgtctctggtcatccacggtctgtccttt

SEQ ID NO: 126190 - DNA, 303 bp, Zea Mays
cttaaccacaactcgatgaagaggaatcccaaagatgtcagcacaacagggttaccatacgtggctctcatgaaccacctccacccaagttcatagacacaactcaaaacattgaacttgggtgagctcactgttaaaatatcccacctattcactggatataggcagaagcagaagcaaataaaacttcactgtgggcagactcaaacaaacttaacttgatatttttgaaggggtgagactaccaaaattcagcacacagctcacccccaaaatatccagccagttcactggatatggaca

SEQ ID NO: 126191 - DNA, 413 bp, Zea Mays
tgtgttttgatgaagacggcgacataggcacaaatctctggtggccgcttgatcataattaccttcttcatcgaacacagcatcatcgggaagacatggaagaggaggtggtggtggtggtgcttgttgttgcgtctccaacatagcaagtctgtcgacgatctgggacaatcgtcgatccagcctctcgtaagtcttgccaaggttcatgttaatgaaggaatcatgcactaacttgtggaccgtctcctccatttgctccttcaggagcttgttgtttgcctcaagatcttgatgtctaacacattcatcgaagtctgtagggatccttgcttcttcgtcgcctaccatcgaaacacaaaaacaggaaacaaatggtgaaggttatccctaataatttgactacacgctcc

SEQ ID NO: 126192 - DNA, 385 bp, Zea Mays
cggtccatacacagaagggatggtgttgtccccttttactgttgggactacactggggagaggatggatgggcaggcatcgcccgattgttaagacctacaaaaaatccacagaaaaggtgaggaaggcgccagcgacgaccaccacgagcaagaaccagtgtagaagaccttacctgacttgtgggcgacgacgacatcccatcccagtgggtcacctttgggcatcggtgtccctctccacgtggtggctgtcgtcaccgtcagccgcctctgcctgtgcagcggtaaaaatcatcgtcacggcgagcagagcatcgtgcacccgaaccgcagcttcctcacccgccatcgtctccaccttctgcctcggcttccacgtccgc

SEQ ID NO: 126193 - DNA, 435 bp, Zea Mays
cggacggtagccggtgggttcgtcatcgaggtgttcgaggcggcggtgcgtctgctgccctacgcgctgccgttcgagtacgtgctagtgggctccatgcgctacgacactctagtcgagagggtcggcaaaggggtaagtgcaatatcaaatctccaagctgttaatttctctacatactgctattctgttactactacttattactactcctatatgttttacattgcaagattgatattttatgatttctataacaacgtcaaccaaacattcgtgttgaaatctagacataggagttcatttccttcgcatgtcacagcatgctaaggttttaaatttgcttttatatatgtataaaataaccaccatcgattttgtcaattggaaaataagatcaacacaacaaacaaatcatatctgatgtaatgtcgc

SEQ ID NO: 126194 - DNA, 365 bp, Zea Mays
gatacatcttagtgcttccgggatgaatagaatagcgactaagatgggcttcatctaaaatttgctggcggatctcattattcttaggcacaagtatgcggttgttaaaccatacaacaccttgatcatctcttctgaagcagttggctttaccggcctctattttctcatgaatgtgtttcattccctcatcatttctttgggcatcaattattctttgcaggaggagtgactcaagcttcaagtggtttgaagttccttgttgattcattcctaggtttaactttcccatttcttggcataacgtaatgtcagaagtcttcatcgtcaaacaatggcaggaagccttgcgacttaacgcatct

SEQ ID NO: 126195 - DNA, 346 bp, Zea Mays
tgaatttgttatttctaagtttcagtttagccctgccagttgtcttgtgttaccaacttctaatgttaagtactgagtgtactaatatcaagcactaacactatcggattgttcaacacagttatcttagcctagactagatcacatggatgccatgtggctttacctgtgcttacaataaaaaacgacagccatttagtctaaagcctagagcaagttggggtaggctaggcctactatgtaattgatgtaaacaaatgctagatgagctaaactagctgttaatcaatggatttcctgaaatttattttcaccagttacttacaattcctgaaaaagaagtaag

SEQ ID NO: 126196 - DNA, 424 bp, Zea Mays
cgagtgctgggcgtaggcggcgaagggcggtggcgaagcgtagagtgagtgaagtggatggcggtcggcttcgtgtgggcagggctggtaagcgtgaattgttgtcctcgccggttggggcgagtgtaggtgagggggagttgcgaagtctttttgagggtgaggagcttaggataatgctatttaactatagggagatgggaatcattccgaaggttgaacctatgtaaggtgtgatgccctcgctgtacatatgtaactatagtttgtatgatgaggctgtgcgccttcgcgcatcccggctatgtccataggggcgttgcgcacttggtctagcacgtttattatgtcggtccggctgcgcctgtagtcggtctttgcgcggacagtttcttggtgtagacttttgcacggatagtctttt

SEQ ID NO: 126197 - DNA, 716 bp, Zea Mays
ctcatgtggagaaacaaagcagctttgatttcctcattagtgcctatcagtgttatatctttgaatttacattgtccaagtactaaatactcagttgatcaccacctcaaaagaaaaagtagttatctttcatcaccaccttaaaagcaaagcaacaactttgattttcctcattagtgcccatcagtgatacatctttgaatttgcaccgtgcaataatcagctcatcaccacctcattttttttcatatcactttgaaactattcaaattttaaggatgatgcatgcaaccttgttttgcacagtgcaatataatggccttctacatccggcaacacaacttccctgcgtacagaactatagatatattacaaagtaataacattagtaaaagtgattgtgatgtggggactaaattatgataggcgcaagaagaggaaggattattgcaaggttgtgccagatgcaagcaaagtggctaaagcaaggtatatttaaataaaatctggatttcaatttcatctgagaagttcagagttagccattagttggtcattaggagattgatttagcttcagtttagatggataaataaaatatagataaactaaaaaaattagttgtgaacatatatttagatgagttaaaatagattgagtctatattgtggttcctcgtgctgttcataactactacctctcctagttgcagtgag

SEQ ID NO: 126198 - DNA, 588 bp, Zea Mays
gcgacgtcctaccgaagcctgccggcgcactccagtacctgaccttctctaggtctgacgttgcatatgccgtccagcaagtgtgcctgcatatgcacactccgcgtgagccccatctcattgctctcaagcggatcctatggtacctctgcggctctctcgacaacagccttctactccgaccctcctcaacgtcgaagctcgtggtctacaccgacgctgactgggctagttgtcccaacacgcgccagtccacttcttgttacgttgtgttcctaggcgtcaacctcgtctctaggccaccatgcaccagcctatcgtctctcgctccagagctgaggtcgagtaccacgatgaggccaacggcgtaaccgaggctcctccagcgtgttgccctcgtctactgtgacaacatcagcgcggtctgcatctccaccaatccgcatcaacgcacaaagcatgtgaagatcgatttgcacttcgtctacgagcgtgtcgccaccagtgacgttcgagttctcagcgtccccacctcgctgcaattcgcagacatcttcaccaaggggtgttgtcgagtgttttcgtcaa

SEQ ID NO: 126199 - DNA, 354 bp, Zea Mays
ccaatatatgccattcgaatgggtcacacacataatcatgtattacagccaaatcggtccaacaagcctaaactcaagcttcaaatatccagcacgccagccaccagaactactctgcattctcctgttgttcttcagtcacaattgtgacaggaccccccatcgaagaaccatctgcccccaagatcgatactgcagaaaccatgccttcaggacattgaaatcctcccatgatgccatctctggtggtagcctagtccatttgactaaaatttgaacaatagcagaattgcccttcttaacaagttgacgctgcaatatctgcggtgatacaactgcatgctcttcgaagac

SEQ ID NO: 126200 - DNA, 403 bp, Zea Mays
gggatgcttgacacgatgctaggagctccgggcagacgacgcggtggcgcgcttctccggcgagcttgagcggcggcggctaagcgcgagagaggttgagagtgggtgaaattaggaaggggagggagagcgggtgtaggcggggctcaaaagggagctgggggcgtgggtaggcaacgtggtcggcttcctcggcgtgagtgcgtgtgcgggtcagcagcggttgcggggaagatgagactgacaaggcgggcccacagagtagaggcacgagcacgtgtgaggaggaaatgattcagcgctgatgggctgggcccactgcacagagggagagcgggggcgtgcgcgcgagggtgagcggcaccaataggtcgggcccacctggcagatggagagagagggc

SEQ ID NO: 126201 - DNA, 821 bp, Zea Mays
aattagtgggctgattccttcctattatgagctcctacattggggggctgttccttcctattattagttaccaaagtagtaggtccttcctattatcacccactaaattagtgggctgaaggctatatattcttgtaaaccacatatggaggaggcacgcaataaactatttcctaaccccttctctctcaagcctgcggttgaggagtttatcctcacccgagaagacagacgtcggctacgagctacgtagtcgtggtccggccagtcaggggtttgatgcccttaacaaccctaaaaccctaaacccaccgaccatccgatcctatgagtcgggagacacacgggtggtggtcgttgccaagaacatggaagaacgctaggaatttctcgctgacatccgcgctcgtctcgagcaagctcaggcatttcagaagcatcactttaacaagacccatcatgttgtttcgtacaaggtcgatgattgggtgctgctacgacttcgtcaacgcccggttgcgtcgctgccctaggccacctctggcaagctcaagccacgctacttcgggccctaccacatcaccgagatgatcaacgaggttgccatctgcctcgctctcccacctcaggctcgcctacacgacatgttccatgtgagcctcctgaagaagttccattgcgttccaccagaggctcccccgccacttccactggtccacaacgacgtcattactctagagccggaacgtgctgtccgtcgacgagtcgctcgtggcatcgagaaggtcctggtccactcgaagggctagtctgctgcatcg

SEQ ID NO: 126202 - DNA, 626 bp, Zea Mays
ttccgaccgaccgtcaatcgttttcatatagacgatatcatttccgcaacaagtagattaattatgaaattgggtagattaattaggagaaatggagaattataggcagtcataggagttatgagttatgactgcagtgattaggaggatcgtggcaggtgtgttagctatgtggaaaaaagttcttgacaacataacatgcttggataggaaattcagcccaaggcctatgaggttcagtcttctgtaaccagagccacctgacccttgagtcccaaccaagatttttaacatcatgaataccaaaaccttccaactcctttggtctagtgacctttggccaagccaaaagacagtgtccacccttgacatcttttccacccttccacagaaaccctcatgcagcttgtcaatagctttaatgacccaacctggaaggtccaatgccatagccgagtaaataatcctagctgttactacaaactgaacatgagtggcacagcctagacatcaactccgccttccaacccagcatcaagtcagccacacggtcaacagtagcctacaggctgcagctgggctgtccgtctgtgttcaattttcccaaggacaggggaagacctaaa

SEQ ID NO: 126203 - DNA, 506 bp, Zea Mays
gtttcgaccactttctttgtcgtgtgatctttgttcttcttggaggaatcttgttcatttgagatcaaggcatgagtgtctcttgtcttgataggggcttcttcagactcatgttgttgaatctttgcaaatagttgggtgaggtgttatttcctcatagtcatcacggtcccttatcattcttgctagactcttgtccttttctttgtatgctctcataaatagtctagtgaccttggagtcactccaatcttcacttccaagcactcttattttgttgaccaacaccattagccggtaaaagagtgattgaagtgactcacccttagtccaatcatatcgtgcaagctcactctccaaagcatcaattctatgtctcttagctttggggtctccttcatgtgacattttgagaatattccaaatgtcacgagcatcctctcttccttggactttctggtactcttccggacaaaggcttccttttattatgctcaccgcatgag

SEQ ID NO: 126204 - DNA, 520 bp, Zea Mays
aaatggaaataggaggaatcctacctacgctcattcttaacccaagtagactatatgttctattttttgtttttttattcactagccgctcatgatgtcgtgaggacaccatcaacatgcaaataagacgtgaggaagcaaactcaattagtgacgttggtgagtggggcctaggtgtcagcaccgtcatgtcctcatccatggatagcggaaggtagagtccgcctgggaattaatctcagatcgggcaccgccaggcaatttggctctcttcttgatggatgattggtggagccatggcacttggatcgtctcccagccgtgaactcgtgtccgaagcccaagtttggtgcgcaatgtccgccttcttcctctgtaacaaacgtcatatctctcgtaactgaattcagttggcacgatcccgggtggatcctggtaatggccgtggattcctggggatataaatagcaggcgtgcccttcctcttgaccataatccggttagaagctagccaaggcac

SEQ ID NO: 126205 - DNA, 378 bp, Zea Mays
tttcttccctcacctgtggcggctatggtggtttaggggttagcgacgcgagaggcctaggagctgtcgcagcgaagaacgatcgtggcccgagtcttatcaccctgcacggtcacccgcgtcgtgcgtgcgagaatcgcgccagcggcacgtctgccatagtcgcgttccattgagaggaaggcgctgaccaaacgggtccacggtccagcgtgattactcagtgtgggcgtgcgtagagcacacgagaccaactggtgggcccgatcagcagctgtgagcgcgcggcgaagggaacacttgggctggcgcgcgcggtaaaatggggagatgggccgaactgaggttgagccggcccaagcggcattttaacctttt

SEQ ID NO: 126206 - DNA, 698 bp, Zea Mays
ctacggtggcttagatctcggtgcatgttgttccccttacagggagtgactggaagcgcgataaccctacagagaagcgcccctcgcggggaggttttttcttctatttttcatccttctgcggattggtattctaggggcttagaaactgatcgtatgcatcttaggatttaacaatgggaagaatcaagcggcggtgaaaagagagctaggaactatggtgattgaggaactcccggagagtttaatgattgtttagtccgcacgatcgtgttcgtgtctgtggcgctctatgatgatgagggttcatgtggccgcagggctaaataaaggccacatccggcaccgcggcgggcgcggatgcatgcatccatgatgcgtgcccgtgcaggtgttgcagcgcgcccatccgcgtgcacccacccggtgtggcatgccgccgcatgcacctgacatgacacaggccggtgagccatatgcggaaggagagggagagggagagggagagggaggagcgagccggtcccactcgagattgccgccgagacacgaggccaggccaccaggcggacaagcgatctgatgcgtgcgttgcgttgtgtgctagacgcgcgcgccctagctaattgccatgctaatcgccacctactacctacacgcatgcatcattatagatggatggaatgaactgggtgggg

SEQ ID NO: 126207 - DNA, 706 bp, Zea Mays
cattatcctgcttagcatccctccccctcttcggttgagaagatggttgaatggtttttcttggtacctccactcgactaggcgcattaatagcatgattcaaggattttgtgtacaccattatagtcagtaaatgcatcaggcagattattagcaaaatgttgcaattctataattttgtgaacttgaagtttagattcctgggttcgaggatctgtggacaggatggatttgtcatcccaattgatttcctggtgttcattaggatacttgaattctccccctaatgtcgggaatggtcctcgttagatgcaatcagcgaaacgagctgtgtacaaatcccctgtaaggggctctaggtatttgatgatcgatggggattgatacccacatagatgcccaatttcctatgaggtcccatagctgttcgctgaggcggtgatacaggggtgtaacccacacatccaaatttgcgtagatgggatatatttggaggatttcctcgtactaggtgcaacggggatgtggtatgatatgcagttgggcgaagttgaataagatcagcagcgtgtaaaacggcatgaccccaacaagaagtaggtaaattgcattcatgaagtaaaggtcttgcgatgagtttgatcctcttaataagagatttagctaaaccattttgagtatgtacataaggcacataatgttcaat

SEQ ID NO: 126208 - DNA, 291 bp, Zea Mays
ggtagaagcgcataatcttccaataaccaccatgtaaacactaattcaaattgattcagttggtggaaaagtctgagtcgatagtgtatgcttgaatgtaagtgtggaaataagggggatagagtttcccgctaacctcatagtgatgggtactcagagaatagatgttatccaagggataaattggctagataagtaccaagaagttattagctgtgataagaggacagtgaagttcgtgtccccactaggagaggaagtggtgactaagctagtctcacccaagccaaa

SEQ ID NO: 126209 - DNA, 364 bp, Zea Mays
tcaaagtggggatctttatatgggccatgaggagccaaggactagaaccagatgcaagatgcttttgcaacattcatgagtagtcttatgagacgaaggctaccggaaaggagcaatatcacaacaactttggttgttatggttttgtgcctcggtctgaagtgaactatccagttcccacattttggaagaggtggctgggctcctggttgcaggaatgggtttacatgaaaaatgacctaagtcaaagggaggatgtgagagggattattcaacgccctatatggtctcgcttcggcactaggaggccagccactgcccttgggaatgataaacaagcatgccagacgactttcaatacaat

SEQ ID NO: 126210 - DNA, 426 bp, Zea Mays
tggcaatttctctcagcttgtagtgattaataaattcattgaacatgttcatgaggttctgatcgatgctctaggaattcttctttcttattccttattagattaaaatcacccccaacacacaggaaggatctccctttcacatatcttcgacggctctttcaaaaaactcgcagactggtggtgctgagcaggaccataaacacacaccaccacccatcggtaattgctgcatttatttctgatcgtagccttaatagcaaaattgaaggattcccaatttttcacctccagggagtcttccttgacccccagtaaaataccaccaaaatgccctctcgctgaaatccaattccattggaaacaacaattagaagagagccagttaagctctctaactgaaaattcttgcctaatggtttgttg

SEQ ID NO: 126211 - DNA, 428 bp, Zea Mays
gaaaagttctgaaagactggcagaggtcgctgccaaaaattgacataacggtgaagaacatcaagttgctaattgaacttattgacaacatggaagagcatcgggatctatctattgaggaatggaatttcagagaaattctgcaacaaaaggtggcagattttcttaatattcagaaaatctattggaagcagcgtgcggctattaggtgggttactgatggagacatttgctctcgcttctttcacgcccatgtcaccattaagcacaggaaaaattcaatttctacattgactgatgacaatgggatcacgttccttgagcatgaacataagtctgatcttctctgggaggctttcaaatgcagattgggttcgtctgacttttcaggcattggttttgatctctcagaacttttaaccagtaat

SEQ ID NO: 126212 - DNA, 415 bp, Zea Mays
ccatccgtggccagtgcaattcgagttagctcgtgtcttccacttcctcgtttgagtattctcaggtacccgtgaagcttcccgacctatccaattgaattataccgtcattaatcgctcggtacatgcagttcctttaagatcctccgctgttgacgtgggcagagagttgtagagctccaattctgaaattgagtgaggggaaatgcgcgggtagagtccgatttggggtccgctactcgggagcaccggtcctgactccctccggccagtccagctcgccggagctcggtccccatgtttggtgcgcggtcgtggagctccttggagaagagatagaaatcgaggggcttatctgcaagttgtcagcgacacggtagaatagtaatcaaacccatctccagttagttaaaac

SEQ ID NO: 126213 - DNA, 877 bp, Zea Mays
gaggaactattgcagccgggggagccccagtatatttctttagtaaagagacatgaaacacattatggatgcgggcgtgagatggcagggcaagcctgtaaggtactgtcccaatttcctctagaacctgatagggaccatagaagcgaggcccaagcttagagtaggcggctggtgtgattcctaaagctgtacgctgttgcagtcgaacccacacccaatccccggtagtgaactgcacttcccttcgagacttatcctgggattgtttcattgtgagttgagcctgtatgaggcgttccttgatctgagctaaaaagtcatcccgatcttgtaaccgagtgtcaatagcagctacaggggaaagtcccggttggtaagagataatagctggagggtctcgtccatacacaacccgaaatggtgaacagcgaaggttgtttgaaatgaagtcttataacagtactccacctaggacaaccactgtaaccatgtgcggggtcgatccccagctaagcatcgcaagtacatcaagatgatctagttagtaactttagattggccaccagactgtgggtggaacgctgaactcatctgcaacttgacatctgtcctggtgaacagctcagtccaaaatgtactagtgaaaaatggatcacgatcactgacgatggagcaaggaataccatggtgacgaacaatatgatcaaagaaaaccttagctaccgaagatgttgtatagggatggctgagaggcacgaaatgagcatactttgagaagcggtccaccacggtaagaataactgatttgcctccaacctttggaaacccctccacgaaatccatggctatatcgctccaaacccctgaaggaacc

SEQ ID NO: 126214 - DNA, 511 bp, Zea Mays
gtgacctccgactgaaggacgtctgccctttatagacgggtcaccatagtcctttgattcgatctgctaaattctaggaaccggcccctggtatatctctacgtgcaaccgtccggagatctcacacattgtccattactcttagttgatgtgacagtctaggtgtgatatttgataaccaaataaacaaaaggcaaaaactaaagtgacgtttaggatggcagggcagagaagcggcggtgcagggaattgagaagaagaggatgagtcagttgatgttcgcctgtgacctccgactcaaggacgtctgccctttatagacgggtcaccataatcctttgattcgatctactaaattctaggaaccggcccctgtaatatctctacgtgcaaccgtccggagatctcacacgttgtccattactcctagttgatgtgacagtgtaggtgtgatatttgataaccaaataaacaaaaggcaaaaattaaagtgtcgtttaggatggcaggg

SEQ ID NO: 126215 - DNA, 715 bp, Zea Mays
cacgattattctggcttagattgtgctgcataaggtctaacacaagcaaaagccaatggaagcaatcaatcaattacaccctatgttgaggatttctttcgcgtgcatgttagattaatcgggtctctcacagtagttatggatggggaccagctttcctagtgtgcggaatgctgcatcattgtcaatttataaacacagtgatgctcttacatgcgtgccgatgaatgaatgatgtatctagcatcactaggtttggttagatccagcttgataatagttagcaactaagaattaggcagagtgaaccataagataccgatgcataatggtgtgctatctatattagtaaaagttatagttattaagacaggttggcaatagcatgttgaaattagcgtatgttgcgaacgttgcgaccaatgcaaagttccagctttactcgttgaccaagagaacataggctgcttagtgcatccttccttctgtttccgtccatccacatgcgttggccctcttttcatggactgcgattgatgatatgcatgtgctctcttattgccagccacgccacgagttctacttctatgccctccagtcatctaccacttcgttcaaatggcctcgctcggctctgctatggttaccatattgatgtagccatgtaggaagcgagcggcacacttcttcagttatctgagttccagtccagtgc

SEQ ID NO: 126216 - DNA, 484 bp, Zea Mays
ccttactaagttcaaccatctctctcaatatgccatagaacaagtcaatacaaacttaaagaagaagaactgtttcatgagaggtctgaatgataggctgcagtggaaaatggccacctgtttagatctcactttcaacaggcccatgagtacaacaatctcagtggaggcaaagaactcgggggcaagtgaagacaaaaaggtttggacgtgaaggaggtgagggatcctctcagggatccgaaaagcgatcaagtctagtgattcgttccttcaatccaaatcgttcttttttctcgcccatcctcctatccttttaagcagccgatcttcattcatccaactgtcgcccctactcaaaccattcagccgggtgcccctggtactcgttttccagccttacccagctcatctaacatttgcttcaactgtggaaagcctagacatttcatcaaagattgtccttaccctaagcaaaacaagc

SEQ ID NO: 126217 - DNA, 348 bp, Zea Mays
gctgaagttgtggtcgctgattttgtcttcagaaatattcagcctttgaaggacacagcgtatccagcttatctgtacagtggtattaatgactctacctgggtcacaaacaagagaatttccactgaaaatttggtgagccggctggatatgatttcgaggggtagagtgtcaaatgttggtgctcttgttgcctattctgcgtggaatctgtcaccttataagtcattttctgaatttgtgtccaaccctcctgctagtgatggcggtctgggtcttagagtgcgaccctctcccgaggacattgaggctctaattgactctcttcgaaatcttcccaatgatgag

SEQ ID NO: 126218 - DNA, 301 bp, Zea Mays
aaattcttgggtcacactatctctcaagcgggcatagctattgatccggataaagtgcaagaggtgatgaactggaaaccgctaataactgtccgtcagattcgaagttttctgggattggccggttattatcgaagattcattccggacttctctcgaattgcgaagcccatgactgaattgttgaagaaaggagccaagtttgattagggtcataagtgcaaagatgctttccacaccttgaggcagcatctgaccacagcaccagtgttagcgcaacctgacaacagcaagccatttg

SEQ ID NO: 126219 - DNA, 381 bp, Zea Mays
caagagcatgtcatccaagaagaagagggccgccatagatctctccctggaggcggagaggagtggtgaaggccacagcggcggcggaggcaagggcgatcggcaccggggcaaggataatggtgaggtggacaagaaagaagagcagttcaaagagcaaagagaggcaccggaagagggaactggagaggagaaggtggtagttgaagtggttgtagaccaaggaagggacgacaccagggagatcaaatataggactcaacaagaagaggagatggggaacgacaagcaaccggcagaggacgcgcacggtgacgatgagagcgatggcggcgaaacccgtgcccaagacaagcacgtggtagaggccgccggcaacgg

SEQ ID NO: 126220 - DNA, 980 bp, Zea Mays
atgaagaagggggtgggcattgaacttgttgtcctggaggtctcttggctgctctttttaaagctttctttcctcctttgaatcatatgagtgtgaagcctaacatcactacacctttaaagtgggagtttcatcgtgcgttgggccaggccatggcactattaaatgggtcgtgccttgggcccgctaggcacaacccatttggccatctatagtcaatagtctagtactcctccctcatcatcgtacctgatctcgtgagtgtggaaaaagatgagagaaaacacttcatcttgtttgaccccacaccacacagtcacatacctcgccatccgcactcacctaatctatgtgtttggatcgtgtttgaataactatcccatttaagcaatgtctacctatatgatatatagaaaccgtagcgatgcactggcaactaactatgaattagtcatgcaggagctcattcagcaaatggcgaatgtgcagtacaccgagaacatgacagaggaacaggttgatgctatggcaggaagtgagactttgcggcagcaagcttcactgttcggagcaacaagaaactataaggttgaagggacattcatctatctcagcagcatatttggatcaaacaattgtcttaccaaaaaatgtaattcttacgcaggtgttgagtaagtccacaaacaggctaagggattcgttgcttccaaaagatgagcccaaacttgcagttcctatgttactgcttattgcccagcatcgatccaagtaagatttttattaacttggtggggccattatcaggcatcttgcctttgttccatgtgtttgttccaaaccatgcaaatggcgatgcagaaatataaatggcgtgattgctaatgatttaccatcaaaggaagtacgtactggagtaggataggtgtcaagccttggctgacattatttattaaattattttttatctggcaaattgt

SEQ ID NO: 126221 - DNA, 279 bp, Zea Mays
attagcttgccctagacatgtctagttaagtgtggtctatatttgtgaaaactagtggtagataaacccaagagagctcgtaaaaaattgaaacaaaatccaattcaaaaagggatctaaacgagtgagtttgttgtgctacagtagcatcagccgtgacagttgtttcatcggataaagcatcagacaaaagtgtgtcctgttgtattcgagagaaacaatgtatgttcggtgtgctctggatgtggtgcactagacatgatgaacctgcaaaactag

SEQ ID NO: 126222 - DNA, 441 bp, Zea Mays
gcttttgtagatgaagtggagcagcacttgtagttttgtaaggtttatgtatataactgtgtggattgcaatagccctaataccatgtatatacctctcgctgtggttacgtacaacacctaatgtaggcttggatcatgtcatcttattttggatcagtttcctgctgtattaggcctgctcattacactatgctacatcttattttggatcagtttcctgctgtattaggcctgctcattacactatgctacatctctatgtatgataacttgtgttgagtctgaacattgctatattgctctgtctttattgtactaaccagttttgtgggaaattccatctttgaagcaataattgtgctaaatgattcattaacaaatgtttgctattgatttttcccttgtgatggatagggcgcccgaaggggcgccacctgat

SEQ ID NO: 126223 - DNA, 348 bp, Zea Mays
acgggtgcgggttgtggaggctcggtcgctcggcctaacgaccgcggttagagagaagagagaggagagaggggtagatgctcaacctcgatgacaagcacagcggagcttggatgcggacgtcggtagggtggttctcagctgggtggcgtgcatggctcggtgctccgatgacagatgtcggggtgcggtcattggtggtgctccgagcatggaggggcgagccctagcggtgacttagcggggtaagtgcagggcgacagttctgagcgggcgagggcaggtgtgagaaatgaggtgagggggtgagaacgagcgcttctaggggttcaaaaggggacgtcatgc

SEQ ID NO: 126224 - DNA, 461 bp, Zea Mays
aagaatgttgccgaggcactgtgggcaacaattatggacattcctgataagtcaaaggataacgtgaaggcaagagtggatctggcagcgttatgtgatagaccacacctagagatgaagccgccaagtggcggaaagacgtggagaaggccaaaggccgatttcgtcctaagcagggcccagaggaagaaaagtacttcggtggatcaagatgttgatgttccctgatgggtatgcagctaacctgagtagggggggtgaacgtatctagtatgcgagtcttagggatgaagagtcttgacttccacatatggattgaacggattcttcctgcgatggttcgaggctatgtccctgagcatgtctggctagcgctttcagagttgagttatttcttccgtcagctttgtgcaaaagagttatctcggaccgtggttgcagacttggaaagattggcaccc

SEQ ID NO: 126225 - DNA, 440 bp, Zea Mays
gcatgggagctgtcgggaacgatggccgctggccgttggatggccagggtatggccgtgatctgattcgcaaacaacccatcgtctgaagaaaatcctagccttagatttatgatcggacggatcatcgctgtatgaagtaagaggtgatcggcaccgtcggtttctggtctggtggctactattgtataccgattcgccagataatagatctaatccttaccgtccgtttttaatccaacgtctgaaagcatcccatacccgttccaccgtgcgcttatgcaaaagagccctcgggcttccagagaatcaacccgccatccgaatgcatagtgcgctgagtcttggtactcttctgtattaccccctggtcttttattaatttgacgcccagtccagtgccatggcaaactgaataaaggaattagaaaatatgttttt

SEQ ID NO: 126226 - DNA, 490 bp, Zea Mays
gagactttggtgaggtcgcggcgcacagcaaactctagcgagcagattggcgatgaatcggagggagacaccaacgagcaggcacacatgaacctaggcgcagaggagaacgtcggtgaggtctctgactaactgggcgcgacttcgatggcacagcgcgctaatgacgagcagcacgacacgacgacgatggtgagctaaacaacacagacgacgtcatgacgtgaggaatgtcataggcgagatcgtgcatgctgcaggggctccagcacgatgtcgccggtgaattctagagcggggtatgaaggtgacgttggtgaggcactggtgacgaaagggcggagctccagcgaggtgctgcgcagcacgatagcgagcagcagtagcagtgcgcgtcaagcgtgggcacggtgcggcatgattcactggcagtgaagcgagcgggtggacaacacaacacggaatcagcaagcggcggtgacatggcaat

SEQ ID NO: 126227 - DNA, 607 bp, Zea Mays
cccgaatcgttgcccaaacgcataatacacgaatcaaagaggtgctacgcaaggagaaggtgagtgcaaacactaggcatgatttattaccgtctaatgatgcgctagaattcccgtccgcggtgacccatggatccgcgatggtgatggagctacgacgagtaattgctgctcctcccgtcgcccatagctccaggaatcgaaacacgcgcgtcaggtactcctcgccgacctccccggcggcggaaccttcaacccgcccggctatggcgaggaaaggtgcagcggatgagacggccgatggtggtgcacatgcttctaggatctccaattcagcgcgcacaagaccccagaattgattctgggcacagaatagaggagggaaagggccacaccggcggcagccgcaattttacacctcgcccaccactggctcacttagctctcaattgctcccgacggcggcggtgcttcctgagccctttttttcttttgcgcagtacgattcaaggaaaaaggatgccaaggctatccgtgcccgcgctttatggggccagagaactccgtgcgtggtggagtctgttgcgcggacaacggggtcttcacg

SEQ ID NO: 126228 - DNA, 583 bp, Zea Mays
aatttggatcacaaactcaacaccattcatggacatgatcttatgtgtaattggtcaatctatttctagatgtacacaagacatgagaagctcacgagcagcataatatacaaattatttggctttaattttttcttcacaagaagctggttattacaagtgaatatgcatggtcacaacatggccaataacaacgtggtagagtggcatggcatatggatcgcaggcatgatattggtaacttttcgtagtttgtttctgatggcaccaagtccaccaacggatgttggcacgatgacgaggcgctggtctcagtgactgcttgaggtagtaatggctctaacagacaaaaacaatatatttacgactttgatgacatttttagagaagagaagaaggtacaaatacacaatacattgcatatgatgatctagaattctaaatttataagaggtaaacaatttgtacttaatttggacaagagttgaccaagacatggagctcattaagaggattctaaaacgatttgacctaaatagaaatatcatggatatgattaggagtggcaatgaatcacgatcca

SEQ ID NO: 126229 - DNA, 292 bp, Zea Mays
tatcgggatattgattttaagacgtaatgattctcgagtatgaatcattccatcttcttcccatacttcgaaattgtctatttgggaccgtgggattcgagtatgaatcattccaaaattgggatattacaatgttgcaaattttgctgcctacaccgctcctcgctggctccacttgatccattttggtttcaaattgaacagtagttcctaccaaacagagattcgataatatgctataaacaacaattatatgcacatacggtcaaattgtatacattctagttgtgta

SEQ ID NO: 126230 - DNA, 441 bp, Zea Mays
aggtgtgcttcaagcgccgccatccatttttctcgcccttcggccatgcttgggttgggcttggggcagatgccccgtgtgcctggtagacgccgtgacccacgcacaccacgtcaccgtctgggacacgcgaccacgcaatcgtcacaccgggggtgcatgactagtgtccaaaactcgcatgggcacaggcgatgtaacccgcctactcttccttgcacatgagcgtgcacggagtcgcatgacacgacgtgcacgacgaggcacccacgcagggtctagctgccgcggagggtgacgaacgctcaacaggcatggtacacgtgctccaaggctaggaggagcacgtttgattggcgagcaggggagcagccacaccaccaagagttcgctcacgcgcgtgcgcgtcgcgtgcctgtgcaccaccaagctggcgtctac

SEQ ID NO: 126231 - DNA, 467 bp, Zea Mays
cctagaaactaagcatgtcacacactaagatttgtccttcatgaaattgcattaggtccttaatatttcaaaaattaaacctagctagtagaacacactaaggtgccaaccggagcaagggatggagtgtggatcaggggtggtcggtgtagttgttgaagctatgctcgtggtggcagggacgagggggcagcgttggggacgacagtgttggggaggatggcgtcaggaatgacgcatgggtcggggatgaggcagtggcagtggcggaggggcgaggtgcgtggcggcggcgacttgacctagcgacgatgacttgacccgatgacgatgactagtttgtgaaaactgaaaacgcaagtgagaagagggaagacgggcccatgatagctaggtttagtccaatcgctttgtcgagtgccagatatctggcactcagcaaagattatttttattttaaaaaaaca

SEQ ID NO: 126232 - DNA, 625 bp, Zea Mays
gcgagtgacgcgaacagtcgtccaaggatggcttcccaccccgtcgctggcctggtaaggaaaggttcgacgacggtgaggtagcagcgggagaacgagaactcgggtatcagtcacccgagagggacctcaaggacgtcttcaccgaagattccgactctggggatgacaacgaccaccgcaagaagttgtacgtcatgtatggtgggagctgggagctcacctcccgcaggaatgtcaattccctgtgccgcgaggttctatcggcgactccgggggtcccaaaggctgctccacatcaacggtggaggagcaccaccatctccttcagggcatccgactgccctgacaacatggcaggggccagtgtgctaccacttttcaccgcccctatcatcgccaatatgcggctgcatcatgtgttgattgacggcggggcaggcctcaacgtcatcagccatgctgcattcaaatagttgcagatcctgaggtcccgtctgggaccctctcgcccattctccggagtgggcccacagtcggtgtatcccattgggagcatcgctctcccgattacattcgggaccaaggagaacttccgcatgaagaacttcgtgttcaacgttgt

SEQ ID NO: 126233 - DNA, 492 bp, Zea Mays
cacaagtttatggacatctcgacatagtaatgaaccactaattaaattctttcttatcaagtagacatgttgcacgttctttagttgtatggtatttctcgaagtaagattcagatcgaccataccaacaccacgaacattcgcatgcgcccctttccccatcgacaaggaggaatttctcttgacccgataagaagaaaacaaggaaatatcaacacatatgaatattggccccccttgtcaacccaccatttaggtgaatgacaaatggaaaaatagtaggtaatacattaccatacctcaaagtttttctgccaacctcaatcacatttgcatatttcttattcaacttccacttggcatccggacactcccttgaataatgttgatcttgccatagtcaaatagttgccttttattgttctttttcttcttaaaaggtgtggtattcttttggttgagctcttacttaaacttcttgtggggttttgg

SEQ ID NO: 126234 - DNA, 394 bp, Zea Mays
aaaacgcgccctggattccagagccggccaaaccgcaccatctctaggaacgtcatacggctcgcctctataaaacccaccgtccgcctggagttcttcgtgggcgctacgagaagcaggcatgagctccacccgcggtcggagaagggaagagggagtggagaactcccctctgctctttccctacctccactttccccttgcgcgtccaccagaacgatctagtgccaccattgccgtgagcagagagaaaagggaggagagaggcggccgcacgaccatcttggcgtccgggccgcgtgtgagctgaagttgggtcggtgatcgtcgcgggttcgcggtggagctttccgcgggtgagccaagtggagtcggtcggggaagcggcccaaat

SEQ ID NO: 126235 - DNA, 446 bp, Zea Mays
gccgccagtagtgccgcggtagcgacaggaagtgccacaagcaagcacagcttccatgtcggcaggtgtaggcctgctgcttgtcgtcgttgtcccggatcgttccgggcagcacagagcctgcacggcagcaggatcagcattagaagctggggtatatgcgacatcgctttggctttcgggatgtgctgtggggcgacaggatggatcgtatagtgggttgcttagttgcttaatgatcatacatgcagccaagttaagccttcaacctgagtactagtatctactaatccagtcggtcaacgcgcgtttgttgggttctttaactcagtgttgtcgttttcattccaagcgtcagaattacctacccacgcaccgtgtaaagagggcaagcaataatagacgaatgaatatatataaacctactaacatttaagagaacaaaa

SEQ ID NO: 126236 - DNA, 710 bp, Zea Mays
tcgggttatttccgtcggtgttggtatggcgaggctgccgccgcgggcggtagaacagcctcagcttgggataattagtgacgagtagatttcttctcgatcccgttgtagactctacgattccggggaacatcgatcgaacgcgggtcgccggtggggaagggagaatcactcaactccggtgagctcatcggagtttgggcggagctttgccgcctgggcactcggttaggaagagacattgtgggcggtcgatggacagatcgacggtccagggcatgacacggtgtagaagtaatctgggccactggattgatcatagttggtgcatctggtcgtctgttccgcagtgatcgcgtaggattaggtctgggtagcgttttgcccgcgaccattagatatcgatcggacggtgcgggatggatcaagcttcataaaattagggtcgtcggtttccgatcctgtggcttcccttgcgtaccggttcgcaagatggccgatctattctgatccgtggatgtatgatccaacggcccaaatccctccttaccccttcggtcgtgacctttttactaaagagaccccaaactttcgcagaatcaacccgcagtacccctcgggtgtggctgtgtctgggcgattttgcaagttaaaccccgagctccctggttattgtgtgcgcagtccagagctcagagaaaataggaaaa

SEQ ID NO: 126237 - DNA, 1125 bp, Zea Mays
ctcacacaaaataaagaaagttcttctatccatacaaagctcagtaatacattttctatcactctcacgaatgagttcatttaaattctccatcctacactctctatttcttaaccttctttctaatctcaaacattttcttctatatgctaatcccatgagcaaccagacataacagtacgtgacaaggagagaactcaagatacccctaaatgtcatattccttcgtcgagttcttaaggataaatctggaggtcaacaaatgagtttcatataaatctggatatcattgtgcacatcaaataaattaaatagagcatagaggactcaaaaaatgacattcggagtggccacggtagtaccaccagctaaatccgaagcaaaacaagctacacaagttttagatcctgttataaagtacatgatcaaatggattggtccatcttaactaaaacaaagtttgtgttaggattattatcatcgaatagtgaaattgtcctaaatagaagaatttacgtttcaggtgaaacactttgattgcttcttcgctgataccagatcttagaagcaaaccgctttggcttcccgcagactaataaattaagaacaaaactttcctctgctgaacaaacccccttgtgccaggatttcattcttatgtgttcccacataaaaaatccaaccaacaagtttatagtttacagtagtagattacgaataaataaagtcaaacataatttatataacaaaatattcagatctaagatatgtatgaaactaatgaagagaatataaaatagacagaaacaattgccaaatactcccttcattagtttacgacgaggaatagcaatgcttggctacaacaaaagtctagcgtacaaaataaggagcaaccaacgacaggattcacaaatgattgaaaatgctgaccagaaccttggaagcgatcatggtgcaaactggctggaaattatttctgctggaccacggaaaaataaagctagcaaatgcacaacgggatacatattccagtgaggaagaaggcagtccaactcaacccacacctggctagggctgccgcgctgaagaaaacagtgcaggtctaggtccattcccccgtgc

SEQ ID NO: 126238 - DNA, 366 bp, Zea Mays
cgccacagctggtatcggagcaaattccaccacagagaaggacaataaaccatgaataccaattttcaaaatctaaaacttgcctagaaactgctacggatcgtcaggactagaccgctagacctaggacgaaaggccttaggcatagagggagaaataggtggctaactaattaggccccgtgggccagtacttatatttctaaggatgcccaaaaaatcaccctatttttggagaggcaacgttactcccagcatgcatgcattataaacacaaagaggaatttaaaaacttgagctaacccactttcttagaaccatccgggctctctttttctttttccttccaccataatctttacctttg

SEQ ID NO: 126239 - DNA, 399 bp, Zea Mays
tatcctttcctatagatgtaggtgcatgatttctccgtgataacaacagagtacgaccaattaaaccccaaatctaaccaaacctatttatcatatttaccttatttgcaatgttattttcattccttagaagtaggagtaatctagccctagtctagcctttatcgacttatttttttcgccgccattcgactctacgttgactagaggtgtcttgggtggtataccaacctcaagacaatccttgaactcttatccctgcacggagttcctcccgggagacaagatccatgttcttcgtggagaagaagaccctctccgcacgcgcggaccgtccgatctagagcgcggaccgtctggcaagaacgtagggagaagccgctcgtgcagcgagatcac

SEQ ID NO: 126240 - DNA, 824 bp, Zea Mays
cggcaggggcgcccgcgccagtccacgcagctctcgggcggcgcctgggatctctctgcatcgtccatggcctctctctctatctctcgtattctatctctgtctgctagacacacacacactccctccctccctggaggagcgacgagccggcgagcgagttgactagacaggcagcctgcaaccgcactcgagtcgaagctggcaccggagctttggccagctactagccgcccgagcaggtgcaggactggattggattggcaggcaaaggcaaggcaaggcaagcagcaagctctgcgctcgggtcggcaagagctggcgcgggctttataatatgcagcgcagccgcgagcagccagccgagccaaggcccaaggcggcgtgtgcagtgcagtgcttcgcttccttctcatctgtttggacgtaggactcgtacagtacacaccggcggccaagggagcagagcagagagcgcacgtcacgtgcaaaggcggcagcgtcgcacagcccgtgccggtgccggtgccggtgccggtcaggtagcagttgggctgggcatagtgcgcgcgtgttccggccccgccgcgccccgcgcgctctgctccgcctggcgcctggtctccgacccgccccaaggaaagggaaaaacgcttccctttcatactgtggctgcttactttttgacagcatcgggtcctggtccggacaaactggttcgaatgaatagtgagtggccttctctgtctctggctgcccttgcgactttctactacttcgtcaatgcgaagaagggcattccccgccccccaaggcccccccca

SEQ ID NO: 126241 - DNA, 589 bp, Zea Mays
aagctacaaaaactactagaaaagtttggccaaaataattgttcaaaatccccaaaaaggccatgcatgtgggagctctctatagaaatctaaaaattcagattactaaatttcagccctcaccaagaactcgagcgcgttcaccttgatccctaactcaaaaccttaagctcccattgacaaagttgtgctaagttaacccctgtacaacgtgtgtgaagatggcatcgagatttgtgccctagacacgtcaagtcaaggattttatctcggatttccgcagtgagacaaacctgatttgagcaccccatatcttcggctccagtcaacaaaatctataagccaccacacacaaacgacaaaggaaggtccggtaaagagttcttacaaacggatcatggccttaatcgtgaagatttggggccaatgagcgcttgaacatgaccactctcagcgctgcctcctgctcgacgtcgtgcccaggcggcaaagcgtgcactggcgttctcccactcatgcccgagcgcgtgtcagagcagcccgcagccgagcttgcccgcgcccttaaaaaccaccctcggacgcgcca

SEQ ID NO: 126242 - DNA, 303 bp, Zea Mays
gcttagttacgcagctaataaataaaataattgccgtctatagaaaaaaatatccatgttcagctgtggtgtaggccccgtttcccagagggtagcagggccttccaaaaattggcgcgcgagcccaccctaaagtaggggcaggacatcgctcgcacctttggcaacgtgttcagtcgggtgtcggcacggcacgtcagtctctatacgatcatcaacgggccgcctttcacccctgacagggtcaggtaagagttccgcatccctcacgcgtcgttcttatagcgcccaggcaacactcac

SEQ ID NO: 126243 - DNA, 1978 bp, Zea Mays
gaccgcatgaaaaactcttcaccaccaacagtgatgagcaggtacgtgtacaactatgtgtactcgtttggcttcaaagctgctcccgtagtttgttgaatttatactgaaatatacaagaaggtacaggtttgaaaacaaggtgccgggctagagttctggatatctcataaataatcatagtccgtgcagtgtgatgaataaatgaataaagtttggcggtgctcatttaattgctcaaatagctacgatcgagtgctgtggctgacgcccatataaaaaatcgtccataccagagatgtactcaagcatgcacccgccagcaaggaaaaaacaataaattaaacaactaccaatgcttcaggcatcatcttctcaacaactcaatatttatttaattttttctcgagtttaatcattgccgtgagtattttgtcattcatgaaaggattatatgagcttttgatcaactataagggccttttaggtaagtggctaaattatagattatctgtataacaccgactccctttgtccacaagacattgtcatggtaatattttgtcctaagtcaaataaacttaaggttgactaataaatttgtccatatttttctccgaaatagtgtactgcaaaaatatgttccaggataatctaataatgtttatttggtaatatagatatatgtatttttttacatacatatacataagtttagacaaaaacttgaatgttttgctcttttaaacatggaatatacaaataactacggtgatttgatacccggtgtcatcgctagcgattttcataatggatggtcaacctaatagtgagcgatcatgcgaataaaaggccatgttgggtggctaacaaggtggcaactaccaatctaatcttgcaaagctaatgtcaccttgtaccatctgctacatggattcccaaccctacaaagactatttggctgtcaagtgtcaaatgtactctccacgaatcattaaccagacaaggactctctaagatacatctccaagactctcaaggcgttgaaatctttgatcacatgggttttcatttctcctgtggttgaggttgagaggttaagggagagaatgagggaggggaagatgcatgtggacagtggactccatgctggattttgccaacgactcagtatgcatgtgagatggatgctaacctaagtgtactatgcagtttaataaagggcgtttgacatgtataattcaatcacattttatgatgatataaaaacatgaaggcactactagtgccccttttttcattctttttccaaagtaaaccaaggtagctcaggtctactggttaagtgagggagctgaggtttcattctggtgaccactagcggtgtcgacacggcgggatggccccacgtgggcgccagcggtgtcagtgacggagagctcctcagatctgaactccagtgggcggcgacccttcaccgcggaggttgacccccaaaccgccgtctcgcactctcccgcctccctataactaatctcctcctttccactccccgccgcgcgaaaccacacgcggcggccgcctcctccaccacgccgatggcgacccctcactcacccagacccagctgaacaactccctccaccaagcacacgcaagcaggagaaggagcaggagcaggagcaggagccgagggcggcgacagagaatagaggtagaggaaggcgatcgacgaggagctcggtctcacctgctagcggcggcgaccatggaccggatgctgctcgaccagctggccggcgaggccctgcgggaggtgctgcacgcggtgcagggcaccctgttctgccgctccaccgccgagcgcctgcgccggagcgtcgagccgctgctgccgctcgtccagggcctcggcccgcacagcacccagcgctccgcgggggagctcggcgagctcgcggcgcgggtcagggaggcg

SEQ ID NO: 126244 - DNA, 581 bp, Zea Mays
gcgcggcgggagcttctggtgcgcgcgggcaggaccaagaggcgggactcggcaattttctgtaccacgcaggggcgatttcggtcggggccggcgcatcgccatcgaaccgcgagactaccgtcgctccatccgggggcaacctgttcgtgtctgggcgctggtatgttcctagctgagtagatcgacgttatcttcacgttaggcgaattcgatccgtgcttcgtcgtggctgtatgcgcggcgttcgtcggggctgtgcgctaatggagttgcgacgccgcgtagtcgtcgaggtgaagaagaaggttcgtggccgttggatcagtggggaggctgcggtgtttgtgcctcgggccgttgatgttaggaggagcggccaggattaacttaaggaaacaccatgccctaatttctatccggaccattggatcacagggggggaatcagtgtcgtcggatgaatagcgggcgatccagattagaatggtcatacccccttcttgtaatgagatctggaccgtcgatcgcagatcggatggttgcaaacacgcgttagcttataaggatgagatctaatcc

SEQ ID NO: 126245 - DNA, 367 bp, Zea Mays
gtcctcccaagtagttgctcctactggcaaacctgaccatttaatcaacacttgtgtaatggccgcccctcccttcatgactagacgtttgtccagaatatccattggttgaacatcttcctgtcccaaatccaacacctttggtaattctgagaacactgacacataactgggagtaaatggtttgagttgtgacacatggaaaacagggtgtatctgtgcatcctaaggcaactgaatcttgtaggccacttcaccaatcttctctaagacagtatagggaccaaagaacttaaaagccaatttaggacaggacctatttaccactgaatgttgcacataaggttggagattaagcaacacttgc

SEQ ID NO: 126246 - DNA, 350 bp, Zea Mays
cgaaacgtggggctagtttcccttttacttggaacctcctgacaccacgcattggagaaaccttgaggtagacgaagtctccttcctcaaatcggagttccctccgcctgttgtctgcataactcttctgccgactctgagcttcaagtaaccttctgtggatcagtgcaactttctcttccgcctctttgacaaaggcaggtccttctagtgcttttcccccacgttggaccacatgagaggggtctggcatttccgtccatacagtgcttcgaatggcgacatcttgatgctggcctgatagctattgttgtatgagaactctgcgtagggtagactggattcccaac

SEQ ID NO: 126247 - DNA, 318 bp, Zea Mays
cttggaaaggaaaaggaatgcccaattctacaggatctgggccaactactttgctcctgctggtaatcctgagctctctgtgcagatccccaagaaatgggctccttttttcatgtctaacctgctgcataaagattctttcagttggtcgaaatctttcttgtcttcagatattccctctgctttgctggagcctgagtctgagacccacccttttgccatccctatgaaatgccctgatggcaagttccttgaatctgttctcccggaagaatctactggcaacgtctctgctacctcagactcggcctcactcac

SEQ ID NO: 126248 - DNA, 513 bp, Zea Mays
tacaacacgacgcttacaccaagtattgaacaataaaacagtcaactctatgcccaaggatactgctcattttttgctgctcaaaagcggcatcctgtgttttttttactcaaatttgaagtttctgcacgttcgatggtggagccaaacggaccgtatgccgtgttatttgggtattatttttttgcgaaacaaatgcgcaagggatgcaaaactgtgcgccaagtaaatggacaaatggtccatgtgttgatgtgaaagtgggaagcaacaagaggtagctaacatgcatgcccatcagcagacagagtggaactgttactgtactgctgtagtggaaaatccatatcaactgaaaagggcatccgtggacttcataattgcccacaagagaagagcatctatcgttgaggtgattcattctagaagtttgcatgtatagacgcagaaagtcacaagcaaaagggtacatataatgactgatggaaaactgaacatgctgtcgttttacac

SEQ ID NO: 126249 - DNA, 447 bp, Zea Mays
ttgccggttcaccttcgaatccagaatgacattcgttctgcggcgttggaaggcaagcagcagcacgatgatcccgtcaacaagatgctacgagagctggacttgctcccaaaaagctatcgtctcaacgtcatggatctgggaggctccatgggaatactgaagaagagccacctggcaaacatctgcaagttacggacactcaagtacctcagcctccggtatacggatgttcgtagcctacccagtcaactccaggagctccgtctgctggagacgctggacattcggcacaccaatataccacgtggctcccgcaacactcaagcacttcttccacccagcctcaagcatcttctagccggcaacgtcgactctcagggtgacgcccccaacgccacagtgagaatgcctgacagtatccaggaaatgccatgcctggaggtt

SEQ ID NO: 126250 - DNA, 785 bp, Zea Mays
taacccatttgatggaggcccgctgcttccaataaattttttgaagctgaagcagctcagcagccttgtgctgcaatagctcgcggaaattccattcttcaatcaaaagatcacgatgctcttcaataagatcaatgaattcaataatcaacttaatttgtctcacagttttgtcaatttttggtagagaccgctgccactcttttagaatctttctggtgaacttgaactttgctgttaaattcttcgctttgtccacaaggcttggcatacccatccacgaattttgaaaaattgtcatgaactcgtcaaactgcaaccagaaattttcaaatctaaagatcttgggcttaggaatctttgacttaaaggaaatcaagcagggtacatgatctgaaatatcccttggcggcgttgtagcgagagtatcagggtagcagaccgaccattcttgcgacgtgaaaaaccaatcgagtctctgaagaaggggttccctttgtttattcgaccaagtaaaggagaggccatggagagggatttccaccaggtctagctggttgattgcctcgttaaagctcagcatcaggttaatgtctcccccagcagtgtttctattttcagtcctacgcatcaggttaaagtccccaacaatcaaccagcgcttatcgtggggcatgttaatattggagaaccagtggaggaaatcaatcttcccagatggggaacagggcgcatagacgttggtgataatccaagattcctccgacgaaatagcaaaaaattca

SEQ ID NO: 126251 - DNA, 293 bp, Zea Mays
ttggccatacgctccgcctcgtagggttgctcgatagagacttggtcgtatgctacgcctcgcagggttgctcggcaaacacttggttggccgctgcgcctcgtagggttgctcaacaatggtttgatcgacaaatgggtcgttaagacgcttgggcccatattggacacctagttcctaggtatgcaacaattgacttcgcatagcttgaaccaaagctattctacttgggattagcttaaccgaaattgtattgtagttttgcaattctacaaaaattgcttgatatgtat

SEQ ID NO: 126252 - DNA, 360 bp, Zea Mays
ggaaaagggacacctaagttacaattgtcctaatcctagaggaaatggtggccgaggaggatctcgtggaggtcgatgaggtactcgtgggagttatggaagaggtcgtggtagtcgtggaggaggttgaggtcgtggtggttctagggccaacatagctaccactgaagagagtccctctgttactctaactggggaacaagttgaacagtgggagcaatggcagaagggcaagtcttctgagtgcctcactgtacctgttgaacaagccaccaacaactttggtaacttttccaactatgcccacatgggcgaaggtactcaggcacaagtttttgcatcctcatgtaggcatcgcat

SEQ ID NO: 126253 - DNA, 279 bp, Zea Mays
gtctctaggttcctaacacacagctgacagaagtggtcgtttggccacccctgcagctgcaaaagcgcagttgtccatattctgttctgaagcatgagccaagcgaagaatctgcacttcatatgcagactttgccatgtactgaccatcaggcgaatgtagccaagtgaccgtgccttattgtgattgcagcaggtgtatatcctgtaggcgcacccataaggccacaaattccgtgatgatctgctggctcatattgtgatccacatccatcaccca

SEQ ID NO: 126254 - DNA, 658 bp, Zea Mays
gcgagctgggctggagatcatggtttggagtcttggacatggagatggttaatacttaatagagccatgaagatggttaatagagccataaagatggctggtggatagtgtgcacatagcacggtacaaaggaggagggaaggaaggcaaaactgtaagacactatggagagttgcgagttgtgtcttctatcgaagcttgttcgaatggacggagactctagccaaggtaggtatatgtatatataaccttatccactttaagtgtaacctctgttttggtactctccatggtataattttaattcttgtttcacatgtaccggaccttttctggcactaggatagatttaccagagtagacgatgcttctccagtgttgttgtgattgctttttgtgtcctgatctgtaaccagcacacacgtaatttaactgaagctttctactaaatcaccaccgactgtaaacttaatttcacaaacacggattatatttttcattcatagttactgatgtagtgatgtgtgttgtctcttgagtagggtggtgcggggccattattagttggtatgtactgtgtttggtggattgacctgttggttctgaatttttgataaatacactggccatgtgttaccttatttggcctgcatcacaa

SEQ ID NO: 126255 - DNA, 360 bp, Zea Mays
cgaccgtggttgctgaaaatgattcggatgattccgtgtctaagttttttgagtctgatgattctgggagttcggttgtgtggacggaagagtcttcggatgaggacttggattattttacggccttggatgtggctacggcggaggcttctccacgtgtgatggatgctgaagttcttcctggtccgagtgctgggcgtaggcggcgaagggcggtggcgaagcggagagtgagtgaggtggagggtggtcgtcttcatgtggatggggctagcaagcgagaattgttgtcctcgccggttggggcgagtgtaggtgagggggagttgcgaagtctttttgagggtgaggagttgagga

SEQ ID NO: 126256 - DNA, 345 bp, Zea Mays
ggatggtctgattggtgaccaaagcactatccacaaaaatgaatccgccgctgttgttgcttttgtcagaccgctgttgtggcctctagccatagaaatatgtgtagtagctgagtttaccctgattcaatattttgaggaacatggtgttgatgccaaatttcaaatctccatctgccaaattgttttgtttttaatttcatgatgtgccgcatttgataattggtaatagcacacatttgcatttggtacaaaaaagtgcagttttgatatgcatgcttctgcgttagattcttcaaaagatatataggaaaaatgcatggtctctaatatagaataatatag

SEQ ID NO: 126257 - DNA, 687 bp, Zea Mays
ggttcccacatcttttgcgaagttgtgcgcttcgcatgggaatccgcaagaagccggaatacgtctggaaggagtatctcgaaagcgggatggaaaaatgctctatggcagtctacctgggagaaagccgaaactatccgaatcacccttccttccaagtaacttttaccggataccgctttctagacacttgccagaatgttgcccgaacagccctccgacaactatgccagaactacaacaaggtgatctttgaaaccccccttcgctactttccacccagcaacaagaatacccccacctggaggaaaagacttcaggccctgtcaggaggagatcctattgaggatgatcccaccatcgtctacatggctggataccttcacacccttgataaccaatatgatgacctcaccctccactgcacccacctaacctcccgggtggaaagcctggagcaaaaagttagggaactttcaagggaaaaggcgtccctccaagaaagcctcgcaatagcagaaggcgaggaaaccaatacccgtgaggcctaccacaccctaaagatggattacgacaagaaactgaagaagctcgcccccacaagaaaaatccgcaagaagaccaaaagccaaggatgtcagactgagcagaaggaagaagcccctccaaccctaccccctgccgggt

SEQ ID NO: 126258 - DNA, 499 bp, Zea Mays
ttggtcttggtatgctcgtaccattggaatcttgcatactcttatttttatatatgcttacctttatgtcccaatatttgtttgtaatatttcagttaacatgcccttgaccacccttgtttcctaatgatccatgagtgatcattttattttgcacatctgtagtaatctcgttgtttccttgtaactccactcggtaatgaatctttacttcaacccttttgttggaaccttacctaccttacccgtgattgttttctccatctcgccatttcgtgagtcttgccttagctccattctttactatgttctttgttagtatcacccttacccttgacccttctatatatcacattgatgttcatctcatacctgccctttaaaatcgcccctcttccatctcataccttctttctcttggtcgtatccccttctttggcttgcgagtttgtaacctcatcctttgttgtgcttttgtttcttagtgcctttacccttc

SEQ ID NO: 126259 - DNA, 716 bp, Zea Mays
gtgctgacaagcgggacccgcttgctagagagagagagcggttgggagggagcgagggcgagtgcagctgacgggtggggctgggctggcagcgggagagggggcgcgggagagagttgggccggaaacggcccaaccgagggggggaggatttttcctttttccttttctatttatatttctatttcttatttctatttcttttgtctccttttcttttgaacaaataattagctaaataatcttaggtgctaaaaaaatattctatgtgaggtgcttctaacaatcatagtgtatgcatatgatgagatgtcctatgaggtggagtcgagggaaaaatcaaggaggggggttagaagattaggatttctaaccttggggttaaattttgggatgttacaatgtgcatgtttaccattttatgtcttatgcacttggtattggttactatttgaactttatgtcttatgcatattggtgaactttgtcttatgcctgtggacaactatctgtaatattctgtgggttgaactatgtgtgttaaatcttatgtttaaattagttcgaattattctgtgaatggttgatcgaggagtgattaaatttgatgtgcttactttacatattacttcttgtatgcctcgataaccatgactataggaagatctccatcaaaactccgatcgattatgtgtgttgtatcttcaactagaaat

SEQ ID NO: 126260 - DNA, 1753 bp, Zea Mays
ctggcatggaagctcctgtatattgattcaacaccataatgcaataagatgaaatttgaagaaaaggcgtgactaacctcgtcctctaacaacatcaattcctgcagtgccctgctcatggttggggttttgtctaagatccccaagttactagatccatcagtacaaggactgatcctttgatctttaccaatggtagatgaagtgcttctagagaggtgttcttgtaaagactgtgaccaattatgatgtgtagatgggggactatccagattcccatcgagcgagttggatctggaaattatggaaggtgtaatatctgcatgggatgaaaaggataaatttctaggactggtttgtgcctgaaccaaatgacacccaattctttcctattgaaacccaaagagccaacaatacaccatttagaattttagatcacaaaaaggaaactacgagctccaaacttcacaagtacaaacatagcaaacaagctccctatatgactataccagcttcacaaatacaaggaggctccacacaactactctggtggtaactataacaaaaatcaagttgtagtaatttattgttctatcctcacaacgcaatataaattccatagactttacctgatactgatgacttatctgaataaagttcactgttagaactctcgttgacctggagtatcttagaactgttgtcactttctgatccaagagaataaaccatggacaacccaccttttgaaatagcatacaccatacaaaagcttggaacacacttgcatattcgagagaacatcctagtgcccttgaacttcctaagccatttcaccaaattagcaacttttcgtgtatgcagttcataattaattagtactggacaagttttgagtaccttataaagttgctatgagaagagacaccaacaaaaagcttgtgaatttggcatgctaagacaacacctgaaatagtttctgccacatcatcacccttgacaaccaatacttcagcttcaacctgaacaaggtatcgcaaatgtaaagcaggccattcaaacttcatagtattattgtttgctaatgccccttaacaagatatcacaaatgtaaagcaggttgttcaaatttcatagtattattgcttgctaacgccacttcctgctttcataaatttatgcttgaaattactattgatcaattcataaagcatgcctaattattgttgcccattcttgttattcacgctatatctttttggtttgactgtacacttgagaatgtgaaattttcaaaagaagaaaatatgtctaaaaaaggaggctcaaaccttgccatcacacatgttcttgtacataaggagcatattttgggcctcacattcgacttctttttcatatgcactggcaatgtcatccctcacttgatcaacaggaacatagttgcccactacaaagaaacaagaaattttgtttgccaactagatttgcagctgcaagaaaatgtacacatttgaactgaagaatgcctacttactcggggttggaacgagtgtgaccttttgccggacatgaatgagcatgaaccttatcctctgtctggtaccgaagtttttcagagcccaattcactgcatacttgctggacttggagctgctcacggccaacccaatagtgatagatgaatcactagagggtgatgattcagttaccatggtttcttcttgggtagccatggcttcgcaagttttgt

SEQ ID NO: 126261 - DNA, 382 bp, Zea Mays
ccgatagcttttgaaatcttgctaagggtaaaacttcctgagatgctctatattccatgaattccctatttccgtgttgtccatttgagtaagcctatatgatcctggccgagtgacctctgctactacaaatggcccttcccatagtggtgataatttgtgccgtccttcccccgttagaattcggcgaaggaccaagtctcccactacaaaggatcgatgtcgtatggccttgtcatgatagcgcctcaaggtttgctggtatctagctgactgaattactgtattcaatcgctcttcctccaatacatcaatgtcctctaatctggtagcctctgcttcagctatgctttcgaagaccaaccttggtgccccaaacctg

SEQ ID NO: 126262 - DNA, 476 bp, Zea Mays
gcggccgccgcaaacccagcttgaacgaggattgttgtcgcgcccatccataaaaccctagccgcgggaccgcctcgcccttcaatacgccacaacgaaaccctagagccttgaaccaggaaaggaccgagagtgcgtgagtgttacactgcccgcgccatcgtgagatcctcggtctacaccgtcgtgtaggcgaggacgacggtactggggctttgtcattgcgtgggggatctacacgtagcataatgaccggagcctcgaccaaatccgaccagaattgctcaccggagcggttcgggcgccgcgcatctgcccttcatcgtggcgggagcgcgtcactgcatggattttggtaataccacctccatgtcattcgcgtcgttgtgtagtacgagtaggtgttttcaatatagctagaagggctctggcgcgactactagtatgttcgctggggagcctccgccgtgggcggg

SEQ ID NO: 126263 - DNA, 420 bp, Zea Mays
aaggttggtcgcgctgcacgcccgcgaccctatttcaatgcctagacaactatggattcgtcctcccatcgtgagagagcttgtgggagccatgggagatcggaccgcgctgccggggaagcgtggaaggccaaatttgttgctccgatcgtcgtgagtcccctcttgagtctacctctgttcattcttttccgttcgcgcctagaattactcaacaatagttgttttgccgccggcaatcgctcgtcggagcagagcctccgccacggtgcgatgacctacgcgggcacgggaccctaagcctctaatgccggcgtgtgctcagctaggtgattcggggtgctccaagcattgtgtagcatcatcggaattaggtagttgggcgctcgggcgctggttagtagttcgccggcgggcgcc

SEQ ID NO: 126264 - DNA, 496 bp, Zea Mays
attttttctgcattaataattattttccgtagtaaataatagcagaaaattattaaaatgcatgtgaaggttatattgtgtatactcaaatcgctctaaatatttgtgttgcgttgagcttttgaactcacgccgagcgattaaattgtatagtgggtactcagacacgtcgatcagactacgttattaatcgaccgagttatggcattggctgagcactggttacgccctggcaacacgacgcagtatttgtgtcgttcgaacttggctgtgtcatgtgattgcgatgtcgcgctctccattaatcggatcgctcctgttgagtcagaccgccatcgctgagtcgcgtatttttcgcatgccctataggcattgtctgtctgcctcgagccacaattgtgcctattgcgcacgttgcgtggacttgtcttgtaccccgactatcgagtcacaactgcgcctgttgcgtttgttatgaaggcttattgtgttgtcg

SEQ ID NO: 126265 - DNA, 2163 bp, Zea Mays
acggatcacacgcatcacgggtgaactggcggtgcttggtgatgaatacaccgaggaggaagttgttaggaagtttctgcaggccctgccatctcggtttgatcagatagcggcttcaattgagacgctacttgacttgagcgagatgtctgttgatgagctaatcgggcgtttgaaggcagctgaggaacgactcgcccaggagcgcgcagtggccctgccccgactaaatctcacagaggatgaattaattgccaagataacttcacgtctgaagattgcaggtgataaaccatcaggttttggtgggagctcgtctgtgtcaggaaattttcgtggccgaggacgcgggcgcggaagaaacggtgggagacgcggtggccgcaacggcggccgtggaggaaagacggtcgcgaacgacgaatgtcgttattgcggaaatactggacactgggcgcgggactgcaggaagaagaagcgcgatgagcaatcccatgccgtgcatactgaagaggtggacgaagccttgttactggcgagaaccagcgtcatcgacttacaagagaaccttgacgacgcaccggcttcgctgggtccgcaccaagtcattcatctcagggaggacaagttgtacgttcagcttggtgacaaagtgaaggaagaggcgcggtggatcctagatacgggagccacaaatcacatgacaggtgagcgctctgcgttctcctcgctgaatgagaaggtgcaaggtacagtgcgattcggcgatggttcagtcacggccatttgtggtcgcggatccattcttctccactgccggaatggtgaccacaagactctgacgggagtttactacattccgaggctcaccacgaatatcgtgagccttggacaattggaagaaggtggacacaagattctaatgctgaacgggcgtctgaagatctgggatactcagcgtcagctactggcaagtgtgccgcggtcggtgaaccggctgtacgagctggatcttgacgttgcaaagccagtctgcctcgctgcgcaaggaggcagcgcagcatggaggtggcacgcacgccttggacaccttaattttcgaagcttgagacgtctagccgaagaagaaatggtgcgtgggctgccacggattgatcacgctgatcatgtctgtgatagctgtctcgccgggaagcagcgtcgactttccttcccaggagaggcaggctatcgtgcgacgagcaagcttgagctgatccatggggatctttgcgggcctctgaccccatcgacaccgagcggtaacaggtttttctttcttttggtggatgacctgagtaggtacatgtgggtgtctcttctgcgttccaaggatggagcgatgtcggcgttcaagtcctttcaggcaagagctgaggtggaagctggaagaaaggtgggaactttccgtacggaccgaggcggagagttcacagcacaagccttcatcgagcattgttgcagtgaagggatcaagcgacacttgacagcaccgtacacgccggagcagaatggagtggtggaacggagaaaccaaaccatcatgggaatggcgcggagcatgctaaaagccatgaatctccctaactggttctggggggaggctgtggcaacggctgtatacatactgaacagatcacccactcaaggaaatgaagggagcactccatatgaggtatggcatggaacaaaacctaccgtcagtcatcttcgtacattcggctgtgttgcacatgttaagcaaggcaacaagcgtctaacaaaacttgaagatagaagtacacaaatggtgttcattgggtatgaaagtggcagcaaggcctggcgtttttataatccagtcacaaaacgcgtacatgtgtcgcgtgacgtcgtgtttgaagaggatcgtgcctgggactggaatgaggaggagaagactgggacagatgtcccatttggtgctgagttcgtgcctgtcgagagctccattcgtttgatggacaagccgggttcttcgtcctcgtcaccaagcatgtcaagtagtggtcgttctgggcctcccactcatcctggtggccagtgggatgttcaggatgaacagcaggtgcccacacctgagataatgggtaccgagtatgccac

SEQ ID NO: 126266 - DNA, 705 bp, Zea Mays
gcgcgccctccgtccgtccacgccgctctcgttcccccgcggtgagcctccccgtctcccttcttccacgcctgcaattttgtgttttctttcctatgcgttattaagcattcgtaattagtctactgtaaactatatatgttatgtgacttatatatgtttccttctcttaattctgtaaagtgatagtactgtaagaactcctggttgctattttttgttattcataattgtcggtttagcctgtgctagttaatagcaacttgtgcttttctcaaggtcatgagcttaagtaattaagggctatagactgaaaaaagtaaatcactttgttgcattaaaggcaaaacctttcatgagcaagctctatttgccttaagttatgctagtccaggtcagttgtcacttaggaaagcgagatattcttgagaccaaaggcttctgtggctgctatttgtattcgtgttatagttctttctcgggatccatccccatcatatgcatgcatgtgtacttgcagctgctctaaccatcagtgcatgcttcatgtccatgtatgttcttttggttctttcgttgctctctgataataattttcttgccccaacccaagagcagtgcaaagagtattctcgtatatacttagtttgattgttttaattcaaattcatatttgtctccgagttattttttaatgtttagagt

SEQ ID NO: 126267 - DNA, 558 bp, Zea Mays
cgtgacatcgtgtcaaacaggggcgataggactgcagtcccgtccactttcaccaactacgatgacgcatgcccgagaataacgactactgctcccccatgtcgtttgccaactctgaatgggaccctcgtacgtcaaagcatggtctggccctcgagaggaaattacgcttcacccgaagccggcctcagcctcggagcaaactctgcctcgcctcgaagcaaactctgcctcagccacctaccaccaccaccaccccccatgaataccgcagaaggccgctccttcaactgttccctgcgtgactgcaagccccagagtaggctcgaacatggcctcgggaagacttccgcctcgcccaagcgtggcttcggccttgataatatagacaaaaggatacccaacgtcaccaaaaaactatagagctgacgccagataccctacgtattgccaagagctttttgccatacttaccactgctccaaccactacgactcggatagctcctccatcggacaggttcgggtacgtgtccgagccccggaccttggcctcggc

SEQ ID NO: 126268 - DNA, 440 bp, Zea Mays
tttagatgcacagctagcatctttgctgctaatgattgagccttgtttaatgcccaccatttcacaaagtcaactgaccatattgaaatatcaggggttagaatataatttggctgaaggaatggcttccccaaggtagacagggataatgaagtgaacaaggcatagcagatccatgcaacaggtgccaagaccaaagaactaagatagctcagtagtgatgatttcactagactgactgaagatatcatgctcttgtacatcgagcttgcgagatatgctggaagtaacaggataaaacatacataagtaagagccaggagttggaggatcccagtagcaaacacgctaagatctaaatcagtggcatctgtgataactagattctcatcttcagcggagtgagatacatcaggttttaactgtggttgtgacttgag

SEQ ID NO: 126269 - DNA, 425 bp, Zea Mays
ccaggatccgagccgtccaatcaaacgctaacgaatcagattagaatcccaacaccacaagtctgtacgcgcctgctgctaatggatcacgatcccacagtccctgatccatcccgaggcgggacgccaggccctgatctcagtcgtagcttcacagatccacactccggaactcatcaccgaagtggaacgctcctatctaatcctatgcgtccaccgcggatccaatgacctgccagtgccacccccaatcctcacccgcagcatgaccctgcccggtgacgcaaggacatcatgacggcaccatggccgaaaaaccctcctagaggtttggctacaccatccccatccaatcggtgctagtagaaattcaaagcttgactaaccagctgaacaagccctcaccggcagatgtacaacaaaat

SEQ ID NO: 126270 - DNA, 413 bp, Zea Mays
cgggctggcaacgacacgaatcacggcggaattggtcgttggcggtgggtttgctggcgaccttatctatttcagctgtacactgtaccatggtgaacaccccattcagagcgactgacagagcacaatggagcttcattttctcccaaattcctgtggtaacgtgatccacattctgcaacaaatttgtagagcaatataccatctacaaatttgttatgggaatcatacccaaacttgcattggatcatgtttaaatccaagtccaaagttagctcgatttcactgaagttctgaatttcagaattccaccagcctgacagtccaactttgggctcaattatctctaaatttttcttaacaactgagctcacactctttagcaaagttgttctcctataattgggctacaa

SEQ ID NO: 126271 - DNA, 420 bp, Zea Mays
ctttgtgacagcagaccgagagctctgtgcctcgacgtcacgagctagggaccaaccgatgcaccacatctatgccaatgacaaatgatgtcacatcatggcaacactcggaggtcaaagaaagcgtagctgggtcccacgtcaatgatgcctaaggctgggccgaagcacacggagcatgcccggccgtgggactagagaggagggacctgatgggacgggcgacacccatgacaaacactgcataggattcgagaggaggtactccaggctcagcaagcatccacgaccttccctaattggtccgaccacgccattacctacgacatttctgaccacctaaagcacatccctcgacccgaccaatacccactcattgtcagtcccattgtcgggtcgatgtgactgacgaaggtgttg

SEQ ID NO: 126272 - DNA, 506 bp, Zea Mays
attttctaattacttttactggattttctaattctctagactgggcgcataaatatcataaactacaggggcaagagcgcaaaagtgtctgagactcagccacctccgcgcaggacggcgggtttatatcaataaaacccagggactcttttgtaagttgggacagcgaaggggtatgggtgaatatctgtcgttcgatcagattcaacgacagagatatgaagttacccataccgaaccggtatgcaatccgagtcacccaacgagcgattgacgtcctagacttaaaacaacccagaaacgatctcaacgaatcatttttccctgctaatcacaaccgttcaaactacatctagcggccacaacatctccaacatcggacctaatctaaaccgtcgatagctgactgaacggccaggggccatcttcttcctttgccccggccggacactgcgccgtggcaagctagcccacgacggtgcccatggtcgtggttttcgatccgg

SEQ ID NO: 126273 - DNA, 365 bp, Zea Mays
cctaaaatcaattaaaaagatataaactgaaatgacaactttttacttacaaattcaaaagtgctccaattgcgctcacatccggaagcggaacaacaaaggctaacgatgcgctttgcaaaggattgaatctcaaatgcaaggccaccatatgcatcccaccaacgaactaaaaaaagagaagagaagttgaattattgttgccaaccatacaaaacttaaatgattaatgaggtaatggaacttactggggctctttttttgtatttctctaattgctaatggtgatgagaaggcagggccagccatattcatatactcatcagcttgtttactgattataacttgaaggtcataatcttcaa

SEQ ID NO: 126274 - DNA, 517 bp, Zea Mays
ccaaggtccaaacacgacatggtgatcgagtcagaggaacatggacttggtggacaagggggtatgctcgagccaggttaaatcatgtcaggtcacgtaaggaccccgctaccactatcctcgaaagttgttcgagacttttagctgcttacactagtggtgtcgtgacgacaatgcagagatgagtggaggaaggggcaactacggctaaagtttgatgtcgcccgagccacctcgcgaaaaacgatgcatgattagaattatggtttatcacttgtcatatgaaatacatttatatatgttatatggtagatacgttaagatcgaacacaacaaccaattcattataaaggggttggcacgtgttgaacaactatcctgttaaaacaagatttacatgtgtgatatatagaaaccctagcaattatgagagtataggatagacactagactatcttaatgttgcctccacggctgggaaaatctgaaaacctaacccgaaccgagaataccccaa

SEQ ID NO: 126275 - DNA, 282 bp, Zea Mays
tgcagcgcgccatgaacctggcaagggcctatgagagaagggaactggaagcaagaaaaaggggaggatacaaagttgctgagaagagtttggtattcaaggaagctggcaacaacgcgccatctaaggtagctgctgcgccccggcctcgattcaaacggctatcaccggaagaactagcagcgaagcgtgcaaaaggggaatgctatcattgcacagagaagtactcactggaccacaaatgtgctgctcgaggggttttcttgctggaattagaagatg

SEQ ID NO: 126276 - DNA, 614 bp, Zea Mays
ccgagcgccacgtcgttgcctcctctgatccgtctctccccgagatctgctgcggtaatgccgcttgctccccaccccttctcctcttctctgactggtacacgttccgcttcagccgctcaaggtctcggtcgagccgtccgcctcgccctgcagctgctggtcaagccagtcgctcgtcaccttgatctccttctgcatttgtgtccccctgctcatgttgctagccaagcacacctaccggccttcctcgtagctccacatgatactgctaattttaagacttttttaatagaagatgaacctacggagagcttagcttagcatcaggccgtcagcttgatatttctgagatcgtgcgcacgagaagctaagccatccaagcagcttcatgcaccatcgtctgtgtctttcgggcaggtgctgtgcctcggcttgtcgccccattccctcaccgccagcgcccagcagtgagcacctcgtttgggtttggatccagcactgcacgattccctgacagctcagaaagggtacagagcctgcggttggggataaaaatagtggtgaaccaaaaggttgggtagctcgttcaaccagcggaactagtatttttt

SEQ ID NO: 126277 - DNA, 283 bp, Zea Mays
tggagtcggtacgccactggtccaaatctttcaggaataggaaacagactaatgtatcggggtgcaagctttccttttacaccgaaacgagatacacccttcattggtgatactttcaggtaaacataatcttcaacatgaaagtacaagagttggcgtcgtttgtccgcataaatcttttgtcgagcttgtgcttctttcaaattatgtataattcgttgaactttttgttccatttctttaaccatatcaggcctgaaaaaccacctttcccttggttcag

SEQ ID NO: 126278 - DNA, 340 bp, Zea Mays
aggaaatatagtacgaggatgctaaacaaagtaataagcatggaaaaataagcaagcaacagcctagagaatcgctctactagtcttgattctaaataaaaaaactaccttactcctcaagcgggagagaccagtcgtggagcaactcgccgtcgatcttcactactccccttgtagcctgcgcagtcccggttgtcggccgagcaagcccctcctcgcctctgctgagcgcaccctcggtccactgcaggcgcgctcggacactgtagaggcccggcgcggcggcgtggtacaggaacccgactctggtgaaaacgcgtgctcggacgagatagagtcc

SEQ ID NO: 126279 - DNA, 640 bp, Zea Mays
atttactcacctcatgtgatttcacttccatattcaggtccggggattcttccctctgttccaacctgcctttcctctgaaactaaaataaataaatgtacaggtgcagagaacgaatttcagcagcagtgacatggaattattagattctcaaatcaaacttttggcagcgcatggaggctgctagagccagggaaccacaaccacaggaaccaaaaaataataataataaattagaacaaaaataatcttgtccattgaccaagaaacatccaacttgcaggctgcaccagaaggttagtacagaaaagaaaaggtccatacaaaaaacatgcacattgaccagctcacatgaccccatttctctcaagaattccactaacaaccgttgaatatttcaactgcacaaggctttatgcagagttgactcagctcaagggcaatcaaatgtcatgtaacaaactgaagtattgtggcaacaatacaaatcacaactccatctaaacaaccccatcacacatgttggagcacctccaagagttaccacaaccaacccccaatctagatttgtttagcaagatttgaagagagaaaaaaactgttctccaacaagtttctatctgaactcttaatctttccg

SEQ ID NO: 126280 - DNA, 294 bp, Zea Mays
gtgaatatcaagatagacatgtcttggctatgatagaacgaggagttgcaagtgtgatgggcatgtagatgctcggggataatggactgttgagatgatgaagcacgagtagagaatttggcactggtggatcaaggcaaccataaagagcaagcgaagttacaatcgatagaccaataagacaaaacgatgacatgaagtagaccatgtcatttacgaggtatcgagtatcatagacgactcacgttcattacaagtggctcggtgaaggtggatgtttgtgtggcatcacca

SEQ ID NO: 126281 - DNA, 312 bp, Zea Mays
cgtttgagacagagaattatactggttgaggcttgcgtcctagtccagtgtagcattgattgtagtattgcttgaggactgtgttgcagctggtgcgtgcgtgagaaggagggggtcctgcccttttatagctcaagagtagtaccttacagtggggacttgtattatattgatgagagcatggctcgttgtccttgggtggcatagttcttttgacgtcgtccgtagagtcgtgcgtagccatactctcggtatggtgtatcgcttcatccgtccagtatacgggtccctgtagtgagtttgatgttgacg

SEQ ID NO: 126282 - DNA, 272 bp, Zea Mays
gggagattatgtctatttgaaggtgtcaccacttcggggtatgagaagattcaaggtgaaaggaaagttgtcccctcgctttattggacccttcttaatcttaaagcgagtgggtgaggttgcatatcaattggagttaccggatcatcttgcagatgttcatgatgtatttcatgtatctcagctgaagaaatgtctcagggtacctgaggaacagttacccatggaagagctcagtgttcaaggtgatttgacctacacggagtacccga

SEQ ID NO: 126283 - DNA, 311 bp, Zea Mays
cggggtctctaccttcaccccctggttgcgtgctttccagtggttgtctaacttcaaggtctccaacatcgacaaatacgaggccaagctgggcatcaggggctggctggctactcaacgatgacctaggccactacagcgttggaggacatcatagcggcgtatctcccaattgtgctagggcaagacgtgctctagtggctccatcatctccctcgccactgcatttatcactaagccgacttctgcgaccggttcgtcgccagctatcaatcgctttctgacaagcctgtagagtcgtgggacctcaa

SEQ ID NO: 126284 - DNA, 469 bp, Zea Mays
gcctaaaccagccaaaatgctccaattgaacccaaatttttcaggcactttcacaacacctccagtaacatattcgccaaatttcacgcccatccgatattccaggctttaatttcaccaaattccccgtttcgagcgatcgtttccgagccgagtgcccaaatctcattttcttcgcctaaattcaaaccaaacacacacttcactcatattcacctatataaacctattcatgaagtatcggctcaattccacgtcattttgtgcctcaattcgaattccaaacctccgatggcacttttttatcgttcaaacgccgttttcacgtcgtttgacctctcgatcgcctcatctcttgttttctgtgccatatttctctatgtatgtatttattcacatttcatatacttatgactatgtgactaatacgtgctcacctcttctgtcatttcattgaccttgcctgccc

SEQ ID NO: 126285 - DNA, 279 bp, Zea Mays
taagtacttcactatacttgcgactaatagtttccaaggagtgaccaaacttattccttatctgcctaaatgattgtggatccccacatgcccacaagaaaatacctagagcttccatagtactgacaccacggcttggaagcagaccataactttccaccaacgtctcatgcaatcgtctaaaaacagtacgtcgcatgcgaaacatgtcaaagcagtcgttactattctccaaagttcgctcaacccattgaatacctgtttcaaccattgttcttc

SEQ ID NO: 126286 - DNA, 472 bp, Zea Mays
gccgcggccgtgtggattttgctcaccctgaaaagatctcaccgtggataaacttggagcactgtggccactcggtcactcctccacttaccggcgacgtggccgcacggccatcaccggcgtgccaccgttctttgctgttatgccacgccgtcggtcatcttaccacgtcacagttgattaccatataccgtccttctattacctaaggccttgccatgacgttcgccacctatcgcacgcaccagtgaactctctcccctccggccgccagctcgccgtgagcaaattgtgagccaccgcccccggagactataaattgagtgcaccatcagcttcgttatgtattcgagcatctagcgcacccttctgcacctcaaatcctccaccagaaagcttcaatttgagatttcccccaaaacgctcaggaacaccgcacagcttgacctcgccgtggtcagcccgattcagg

SEQ ID NO: 126287 - DNA, 732 bp, Zea Mays
agcgcaagtctcgaggcttgcacctttggccgggcttgatagccatggaatttcgaggttgggttgtgggttgggggcttggggctgcttcttaccgtgagtcaggagccgacgcgtgcagttttctttacagcctgcggtgcgggcagttcgtgtgaaccagggcagggttgctaaaaaaacccgatcattttcacaaagtttctaatgcctactccttacggtctgactcagtttgctttcgactttaacgcctgtaggctgcagctagttgttctgagctcgggattgccgaaaaaatcgacgtcgtgccgaaaaaaatcgtgtgactgtggaatgtgtgggagggcggggttagtgcctttagtggaaatgccaatatatctttttaagtgtcaatttctttcgagtctttcttcggttcttcctaattcttcctaaaactatggcgcgctgaagttgttgcggttgcctgtagaccgtaggggctgggtaaatgaacgtgtgctccatttgggtgatcgatttaatgccggtttaaccaatttgaccttgtcccaatcgctatcagtaagatggtccatgcctcgtgtttattgcaggacggtgtaagtacatgtcaggatcagtcatgcaagtgaatcctgttctgtcactgttggaactgtgtacaaattcaccaagtatactcatctatcagcttgttgccagctgatcgatccaattaatata

SEQ ID NO: 126288 - DNA, 820 bp, Zea Mays
gcctcgtggtccctcctccccatctcccccttgttgcacgataccgcgccaccgcaccgattgcaccgccgccggctaaatccgtcccgcgggacaatccggccgtggcaaggtgtcctgcgtggtcgggggcaactactgaaaccgtccgtggacgtatctgggagagctgatcacggtggcggcctgaattcctcgccgtacttcgtacctccgccactgtccgccgcgcgtcgcgaccggcgtcaccgaggcgtcgatctctggtaaccagcccatccctgccttcattatgtaatgcgcaatgtgtagctgcgatgaattggaaaatggggtaggggttcaccgttgggcgggtggccggacttctccaccgcgcggtgggtgcgcgccgccgcccagggcagacggaggtaggcgatgggatcctggccgtcggatctggactgtgcggctaggattagaagccagatacctcttcgtcgtattaaaccctcggccgcaggattgtgatcggagcgttgcggtcagatctcgggattgtaggatgtgggccgttggatcaagatccaatagctctcggttcgtaacgattcattaagatgtacatctaatcaccaccgtcggttctcgatcggacggccgagatctgagaataccccttcgccgtgtcccttttcttaaaaagcccctcgggttccgttgaatcaacccgcagtccagggattagttttctgagtcttaggaacttttgcggattagcccctgtgcttctgtttaattgaggcccagtccagagaattataaaatcaggaaaatg

SEQ ID NO: 126289 - DNA, 878 bp, Zea Mays
gcccttgctactgtgtcttcactgatttgtttcatttgtcttgacaatacacttttttctttccacctgtctggatgctttttcctgtgtcaggaatgtgttatttctgtctaatgctgtatgcctcaaaatatagcacatcatctagccactactggtgatgttggcaatgctgctggtaaaagaatggcagtacataggagtacaaaatggaaaaatgccagcacatgatatactgcatttgggtttatgcttgtttgaggggtaatcctgaatcaaataaagatatactgcaacttttggtgtgtccttgattggaacccagagtctaggcataggggccattgtacagtgtagtagtcctccctggtcgtatagttaaatttacaccaatcatatcttatgatcatttcatatttctgtgaccattttggaatgattcttgatattttagtagaatattttcggaactttagtgtcagctttatttccatgtcatgcattggaattgtcagtgttatggccaggttcactgcagaaagggtccactgctgtttcattctacctttcagagacttggtgcagttttgattgtgaaggttcattgaaacaatacaattgcattcacattgtgtaatggccaaattgtcatatggattgttacaatccagatatagatgcttctccatgttatggttactgtgatgaactagttgtcccagtcacagattcatcgtatgttgtgttccggtaactagagttattatgaattttgagtttcgatatataaggtcctttgcaatgtaaagtcattacacatatccatccacctactttttctaggacgttgtagaaataatatgatatgtcattgatgc

SEQ ID NO: 126290 - DNA, 463 bp, Zea Mays
ggagaactgctcctctgagaagtcagagataccgaagtcctccgacggaggtgttggatgacgctttcgcttcccgccttggtccttcctgtcgtacttgcccttgccacctttgcccccaaccattgtggttttattttagtgaaggagtcaaagcgagaagagaaactagagtgagtgaagaagatgatcacatgcaggccgtttatttaaagaagccaaggggcgacccgtcgtctcccgtacgtacaacaaatagtcacaaagacttcaagagtcgtgtaaatttccaagaaggtgagcaagtcactgaaaacaattggcgtaacataacaccgaggaagagtaataccaaccgctcatgcacattactacaccctgtcgcgtgaggttactattttgagacaagtcaacatacacacccattgggtgtacagaccagattttttgggatttgtggaag

SEQ ID NO: 126291 - DNA, 800 bp, Zea Mays
attaattttaatgccaaaataaacgcgagggacttctctgcaaattcagaggactgatctgtaatttcaaattttgtttccgaggttactgctgtgaaaaacaggacggcgggttagttattaaaaagtctagggtcccatttgtaagtctggctcggcaaaggggtatcgtctattatggaccgctcgattatatttgaatggccattgtctagatatgaagcggtattcggcgatgtccgcacgatcagaaatcgacggctcgcgagatcaacggtcacagtttaatgaaacacagatcaaatccggaccatgcgttggacgatcaacggtccagaatcaaccatggaacgatctacttctagttcgatgaagatcctacggtgactgtgtgtcttctacctcatgctgctatacccctttctatacgtatgcgagaccccagtaacagtaggtacattaacccaacaccaccggcatggaagaggagtctcaccgtcgatggtggtgaggctggccgacgatggagcgcggatttcgcggcgagccgcagacccagtgctcgattccctcccctgcggtcgcccagaccatcgttcggctggacggtgatgacggcgcagcgagctccggcccggtgaggagccgaccacgcagccgtcgtgtactcggtacgcccgcccaagctctatcgaagcgcgccgccagctttgtgagcccgagacgcgacaccagccgccctcggatgcctgctacacggcgctctccctctctcggtgcgctgggaacgttaggcaagc

SEQ ID NO: 126292 - DNA, 588 bp, Zea Mays
ggctattctgcgtctggtgtgttcacggtaagttcccatacccggtttgcaaggaagctcttaggttcatttggttgaaaaagggtggcaaatattcaaatgtcattggtttgaccctcaagtgacgagacatacacattctaatcttgggatagtcgaaattcgacaagattccaccttaccaggagacgatgtctatatcgtggcccaacaggccacataagtgtattatctctcacatgcgtgccaaacgaaagaacatcttaagggttgggatgttgtgtataatgtatcgttgcacggtaaattacctattcctaacgataaaaattataacttagccccggacacatatggtggagagttcttccaagaagatgggctagaagggcgatttgagatagacttaaccgaagctatcggaatggaagtagatattgaaatggttgttgatgaggaggatgatgaggtgcaaaatgagaatgacttagtaatacttgaaggcaatgacattaatgacgaacttgcgcctttagatggtgttgactatgaaatggttcatagtgatgatgagagttatgatctggc

SEQ ID NO: 126293 - DNA, 581 bp, Zea Mays
ttccgacacaaataaaatgcccaagactgtgattaaaatgacagggtcatcaaggcaagctaaatgcaatgaatgaaaataaaattttgaatcagtgcatgttgttcacccaggttcactaagcttgttttagtaggcctgctaaacaaaaaatgaaggtttgctttcatccaacatctgtaaggaggatacaaactaaagtaaaaaaataattgaatagcagcgttagccattagacctccctctaccaggcaaccaaatttgctcagttcaggtgccggacagcttttcagttgatgattgtgtttcactgttgttgcctgctattgcctaacatgtttgaagagttcagctaccatgttccacgcctcccagatcttgtgtttcagctggtgatcataaactgttcagtcggtgatcttaattttcacacctaccatgttcagccggtgatcatgtgtttcagctgccaatcttcagtaacatgtttgaacagtttaattgctgaatagtttgaagaacactgcacaccaacaaacagtcagttgttgcctgctggagaaggtgacactgagatttgc

SEQ ID NO: 126294 - DNA, 372 bp, Zea Mays
atcacggctatactgtcgtgttcccggcgaccagaggacctctagcttaattaaatgggttgtcgagcatcatagagctatgaaaaggcttaaacgagagagagaagaagatgagctgaccggagtacggctggccgcggtgaggttgagtttcgggtggcggagaatggatttgggggaaatcttaaattcgagctctcggaggcacggttgctaacgattgctggtgactgggtgggtgatgatgttacgcagctaggggagggctcaatttataggcggcttcgtcggtggcgcacaatttggtcgagcaacgcggcggccggaggtgaagaggattactggcgcgcgtgaatcgctgtctcatgccgt

SEQ ID NO: 126295 - DNA, 355 bp, Zea Mays
atttacacaaccagcgcgcatgatggccgcaggatctgcgatctaaggccctgatttaatgcatcccgcgatcctacttctaccgtttatcgcaagatcaacggttccgaattcgtggaacccgatcgctgcactcactctaatccgttcgcccatcaacgatccaacggccatcgctcttctctctcacctcgacccgagacgacgacggcgcccaccggagaccccagaacctacaacgcacgaccctaattccctaatacagcgaagctacacgatcctgggtgctcggcgaacatggcaaaggacataccagaggcagatacggtctctgcgacggcacccacgacgtgag

SEQ ID NO: 126296 - DNA, 461 bp, Zea Mays
cttcaccgagggagcttgtctgttttgccacttctcatgtttcaaggacaattgtgctgccatcgaaactgtcttaggagactgagtttccaccacaagcttcaactcatgtttgaggcccagcataaactgagttactagtaatgtctcactaaccgctttgtcaaatagtttgatgtagtaaaccaacttctcaaactgaattttgtatcccagcactgatccaatctgtcacaaggttagtaactctagcatcttatcagaatgtgtggatactcaaactcatccaatatcgacatcttgaagtgaaagcactccataaattcgactgaatcacgtaaagcctggtaccagtgagcagccctacctctcaaatgaagagatgtagcactaactatgaactcctcaggaatctggtataacaaaaaataagcttcacaattatcgatccaaactctagc

SEQ ID NO: 126297 - DNA, 779 bp, Zea Mays
tacatggctttggagaatgtgtggtgtgtcctgctcatgttcaccaattgtcctcatcggtatccgctgagttgttcccaccaaacttggttgaactgtgttggtgtcttcaagaattcctggcgccggtaacgcagcccggggagttacagtatgccggccatcggttgtacagggtgtcgtcgtcgctgtagcttctccacagttctccgatcccctggccgtctccattgtgtatgccctaactctcccagagctctaaccaaaaacgtttgcggctgtgtgtagcctgtttttccccagctaatctcctatactcgcctaaaccgctctgacctatattcatggcatcatctaatatcctccgcgattttctgcgcagtctgcatgtcgcgagatttacgtgaatgacacgttatgattacctgcctattgtgttacatttccataaacatggctcaccccaacgtgcgaccgccccacgttcccggatgacgcgtgcatcaccctcactacccgatctgaccacacacgtcgcgtcagatgattatttatttgttattagtaatttaaacaaacataaaagtcgaaccacctcccaatcacgtccaactaagccaatttacgcagccaataacggcaaaatacgcaagcataaacgcgcgacccacgtctccgtacccgagccccccacgttaccatttatgcatctgtttgattcaaattctgtatgcataaactccccacctttgactcggtgcatgcacgctgtaatccca

SEQ ID NO: 126298 - DNA, 324 bp, Zea Mays
ggaggttggtggatgctgaaacaaggtacacttttattgagaagttatgcttatgtttgttttatacatgcaccaagtgtaggtgttatttactgtctagtcattgcattgtttctggtcaagccgatgtaattaaatacatgttgcataacccaattatgagtggtagaattggtaagtgggcttatgcactcatagaatatgacttggcctatgaaccattgaaatctatgagaggccaggtcgtagcagattttattgtagaacatcggattaatgatactcataaactagacatgtcatacctcactattactccttgga

SEQ ID NO: 126299 - DNA, 338 bp, Zea Mays
gaacacggcatataagagcgtcgccattgcgatgacccaaccaacaaaggccagatcaaaggttttcacctaagagaaaatgaccctcggtacttcagacaatgccttcatcaaggtcgatgcccggcataaccaactaagattaggcctagagatttcactccaaagtcgacgagcccaacacccatatgttccaccaaatcaaagaacatcagtcttgtctccaccttctttccatgctcatgctgacataccaccaaatcttggctaatatcaaacggccataaactctgaaacaacatctaattttagatagacattcctatgaagacagagtc

SEQ ID NO: 126300 - DNA, 407 bp, Zea Mays
gaaaaagagctatgctgataatagaagaaggccactagagtttgaggaaggtgatcatgtgtacctcaaggtgtcaccacttcggggaatgaggagattcaaagttaagggcaaattgtcccctcgctatattggaccattcttgatctttaggagagttggagagatggcataccaactcgaactacctactactctatcggatgtgcataacgtgttccacgtgtctcaacttaagaagtgtctccgtgtccccgaggaacagttaccaatggaagagctcagtgttcagggtgatttgacttacacggagtacccgatcaagattttggataccctgactcgagttacaaggaataaggtgataaagatgtgcaaagtgcaatggagtcaccacggtgaagatg

SEQ ID NO: 126301 - DNA, 624 bp, Zea Mays
cattgctcaacttaaagttgttaatacacaggtcacttaaaatggcacatttttgggatctaacatagaggcaattacacatggcgtaaaactccataaaactacatttgctactgaaggacctaaagcacttatgtgcatatcttatcggattgttcttcaattttaacaaggatcgacttacgaacgctactcgcctccaataattattgggctgcgattacgttcatataggactcctactcgatcaactagacatttctttatcccgtgggcatggaatgtgacgattgacaaagcgaagcatcacattgccatacaacaaaaatcatgacaataccgatagatgttatccactaatcgtttaacaatattaaacctacttctcgctttgccactacaacaccctttagtcacatgaccatcgggagcatccttcacacggttatacgacagcaacctaaacgttgtgttacacaatacatatattttgcttcattgcgagtataaccatattacggcatatacccgcacacctcaatcaaatatcttacgccaccactactaaaatacaccacgacaccacacacatacgtgcactaattcaatcctcacctcccttgt

SEQ ID NO: 126302 - DNA, 391 bp, Zea Mays
ctcattttctttaagccttgggctgcggacactatttaccagaagcttggggtatgttctgtaaaaacccgagggcttggattaaactactttatacatagtgtgggtcgcgggttcattcatataaagagcaggggttcttatgcaattgttacctggccgaaagtgtatcggcgaagatcagccgttggatccaaaatcgatggaacagattagatcctctcttaagtgaaccggtacgcgttcgcgaacccttggatctagatctaacggaccacagccgatcaggacaccagccattcgatccgatccaacggtcccgatccaataaacaaaaaggtattctctgtctaatctcgatcgttcgttagtggatcaacggccaaaggaa

SEQ ID NO: 126303 - DNA, 371 bp, Zea Mays
ttttggtgtgcgcacgtatcgcggcatccgggcccacgaaaagatcgtgttcccgcaatctaggcagtttacgtaatccgggcccacgaatcaaggaactgagccgtcgttttctcagctcagctctcccgtaactatcgttcccgccgaaccctagccaaatccgccgccgtatgctgcttctcctcggcgcccggcgaaccctagactaaccgccgccgtcgccctaagattctcccccgcagttcccccgccgtcgcattctccttcacccccgcagagacccgccttctccgtcgcacgccctcgccttctccgccgcaaacaggccgtggccttgtttttcgtctccggcaagggccccggaatcg

SEQ ID NO: 126304 - DNA, 536 bp, Zea Mays
gttgaatatagacataaaaatcaagagttaaaacaaatactattttggaacgaagtgaatattagataagtaattgagacattagtttaacaatctaaacgaaactgatcgatagtgcatcgctcttgaatattagataagtaattgagacattagtgaaatttgagcctgggatcttggattggcgtgaaatttggcaagtaggttactggaagtgtggtgaaggtgcctgaaaaatttgggttcaattggagcaagtttggctggtttgggcatttcaccgagcacgtggcgtgcggggagctagggttttagggaaatgaccatttgaggtgggaatgccctcccgaaggagctaaaagtttgcagggatacacaagggaggtacatgaactcattccatcaattggattcacaggaattcacagatttggaagatttgcaaagggggtggtgaatgaatgccacagagaccttcaaactgagagcaaggagattgagggaaggagagagctgctcaccgaggggaagggcac

SEQ ID NO: 126305 - DNA, 698 bp, Zea Mays
aagacaaagaggtacaaaagtgtcgaaggggacctacccccagtggcattgtgctctcacgaaagctccatatttgtcctctttaggtggccgttggcctcaccaagttatgaatcggcctcgctgactcagagacttgcctcacaaagggccatctggagttggtctcctcttcctagaggcgattggctttaatctggacaccctcgccctcagaatgaagtggggcctcctcgctctcaagagactcggccctagagcagagctcggccatcgtgctgcatggccacagaatgggcagcccccacatggagctactccacctcccactagatggagaacaatttctccgccctggcccttgatcgcgcgaagatacgctgcgaaaggataacccgatgatcaccttaggcgaggataaaaggcaagaaacaaggagtaatcgataagcggtgtctacctacccaaaggggatgaaatcctatgtcatcgacgcccgagcaatcgataccacgtcccgaaagctaccgagcatcacctcaatagtgccaggctgggattgccctaagacgaagccgatttgactcgcctctaatcctccatgtctgcccacgacatcttagggggaggagaagggcatcctgtcggtggcgaagggaccgagaccctttcaaaagaagaagaggccgtagccaaag

SEQ ID NO: 126306 - DNA, 306 bp, Zea Mays
cgaattgaggcatgaaatgacgtggaattgagccgatacttcacgaataggtttatatgggtaaatatgagtgaagtgtgtgcttggtttgaatttaggcgaagaaaatggaatttgggcactcggctcggaaacgatcgctcgaaacagagaaatgtgtgaaattgaagcctagtatatcggattggcgtgaaatttggcgaacatgttactggaggtattgtgaaggtgcctgaaaaatttgggttcaattggagcatttttggctggtttgggcatttcaccgaacacgtggtatgcggtgag

SEQ ID NO: 126307 - DNA, 442 bp, Zea Mays
tgaaggttcttacccaccgaccgcgttacattgaaccggccgtggtacctgaatttgacgaagggacctcctcggctgtcaaaataaaagaaaccattgctcctgtgcagaggactgaatagctggctataataccgaaggtgccttcagtcaaagtagttgaaatgaaggttgataaggctgataagccagaaactgaagaaacaacaaagatgcaagaggttttgagccctccagaaaaagccacagtaccaaaggtataaatgggttccgtcgtaactcctaagaggaggagaatggtaaatgtactggatgcactagaaacaaccgaaactttgaatcccgcttctacagggaaagttgtcgaagttcctagggtgcaaactgaagctgatactaagcagatagaagttgaagctgcaggaattgaagctggaaccga

SEQ ID NO: 126308 - DNA, 362 bp, Zea Mays
aatttttatagagggtgaattttagaggacgttgctgaagacagcattagagaacagtactgcagatgggtgggcgggggagagagaacttgatctgcagtgtatgatggttctcctttcaacctcctccagctcaagttgcataaaaaactcgatcagtgcaagttgcttccctgacgatccgatatgatgatcatgtggtggttgtttgctgcactcttcgcatcgccagcgccatgttagcagtgcaagttacagtcccttgtgtggtttcatgacatgcattcgagagggaaaaagtatggattttttttaataatgaacacgacatattgctccaggtaggcgactactgctcgagg

SEQ ID NO: 126309 - DNA, 794 bp, Zea Mays
acactgactggaattcatttgtggccaggtccatgcgtggttattgtgtggaaattttcatgacaagaaagctaatataaaggggatttacttgcctagtccagatctgccagctttccttgatatggtttactgaaagatctgacgtgccttgtcaaacatggtcccaacttttccttgcgaaatttacgagttggcattgtatcaattggaaatcctttttgtatagagggcatcacaatgaaactaatctgtgtcttggacttggcatgttcctttattttggtgaacttagagctaggaatattttctgtgcgaaccgggacactgtttaaggtcatttcaattagttttttgtagcccgctttagatttacttagtttgttattgtttcctttgttagaagatagaattcctctaattttaattactagattttacatttatttttagaattttagaaatttgtatggctaactaacacctatgtagcaagtgttacagagatgttagtaacccattttttgttgccgctagcttgtagtctttttgatactccaaaagttatttttacctctaccatgttagttgctggtattttatctgtcaaagcttagctcgggtttcaattgtatgtagtcctgtaatttgcaaccaattacaaaccctggcaaaaaggatgttcatgtaacactacttatttatttcataatatgtcttctagttgcatactagacttatttgtgtttctagttgtatactagataaatcaaacagattttttgaataaatct

SEQ ID NO: 126310 - DNA, 313 bp, Zea Mays
gctggattggggcaggagccttaggccattggatcacgatcggtcggctagaattagagcttgggtaacgcttcggtgcggggtcatctcggaccgctgatcggataggggagggccaggattagatctatatgatggggtgcatctggccgtagatcaaggatcctgcggctgttggcgcgtaccggttcgggcgcggctgatttgatctgtgtggttggatcatgattgaacgactcagcccgtccgataccccttcaaacagtaatttttataaagagcccctgctctttttcagatttaacccgccgtc

SEQ ID NO: 126311 - DNA, 415 bp, Zea Mays
agccgagtggtactatgccctggaacgtgatcatggcattctgtcatgggtccgatttgttgactacatccacatgagatttggagcacccatccgatccaatggcctggcagaactgaaagccctttataggacaggcactgtggatgcatatcagcgacagtttttagtcttgctttgtcactatgatgacttgtctcctatgcagcaggtgaacatgtttacagcaggtctcggagatcccctccacaccgatgtcgagctactggccccgacaaacctgcaaaccacaatgagtctggcccgtgcttatgagcacaaggaggagaacattgcagtgctcagagattgacaaagtcatcggaactcgtccgccatcaaagggactggttcaggaccgggggccaggccggct

SEQ ID NO: 126312 - DNA, 358 bp, Zea Mays
gaacccttgtgggttatatggcataaagtaccatctgcggtctgaatagaggcattttctgtgacaggtgtagaagagactaattgtgtctgatcagatgtcacatgaaaggaggcccctgagtcaagagcccaagacgatggcgaggctgtagctggtgaagtagatgcaatagcaactgaacctctaggtgcagaacctttgccacgaccacgagctgcctgcctgtcgtgtacggaaatcggccaacttctctggaaatttaacaaaacaattttcagaccgatgagtgtgcttcttgcaatgctcacaaggtactgaggaatatctccttgccacataggacttctgagtagca

SEQ ID NO: 126313 - DNA, 463 bp, Zea Mays
ggagcgggagatgcattgcgtgaaggggacaaggtatggaaggaggtgggccgctggaggtttgtttcccaagaagatgttgggcgtcaccaagctggtcgtgtgcatggtggtcatgaacgtggtcgttttgcgtggcgtggtaggggaagtcgctttggaggccgctttaacaaagggcttgcaagggagtccagggagtccagtcggtgtggtgctcatggcagagaagaaaatgctaacaaacatgttgcagatgagggacaatcggcggatgctaatggtaagaaacacaaagctgagctctgttgtgagatctatgaagaaaataatgtgcctatggattgtctcgtattcaatggtcccaaaccaagtgcaattctttgcggaatcgcggggggtgagtcgggtttttttccagattccagtctttggggccaaaggtacgaccccttcgaaagac

SEQ ID NO: 126314 - DNA, 785 bp, Zea Mays
ttgacatgctcgtaagcctacattcttcaatacccttgtttcaaatacttacatctgaatttctcccgcctacttaaacactctagtttatatgtccatgaccttttgtattctgagatccctttctattccactgttaagtcatcatcctttgcctctttctattcccttgtcttggtatgcttggcataccctaatgactattcaagacatttcagttaatatgtccttgaccacccttgtttcttgatgatccatgagcggtcattttatttttgcacatccgtggtaacctcgttgtttccttgtaacttccttcagttatggatttttacttcaactcttctatcggaaccctacctatcttacccttgattgtttcctctactccgccattctgcgagtcttaccctaattctatcctttgtcatgctttcattgatatcatctttaccttggtcatctctacatctcaccctgttgcttatcttatatctgccctctaaaatcttatcccgtctgtctcgatttgaaagttctatcttacccatttttcttcggatgtatcctattctttgctgcttgcgaactttcaacttcattgtttaatgtgttttgttcgctatcgcctttacccttgtgatcctaccttgatgcttgtcgtatgtctgccacttaaaacctcccttctcccctctcaattcgagagtggtgctctacttatcctgcctttggtcgtaacctcatctttgccacgtgccagtcttaccttagctctattattt

SEQ ID NO: 126315 - DNA, 340 bp, Zea Mays
aaatcctggaggcagtgtcctcatccggcaggaaaagcagaaaatcctctggtgaggaatgttggatggacatgttatcaatgcataccccaaaactgcgagccacctcatccaacacctctgatccctgtaccacaggtctagtacctgcgatggtgacgaacagggcttttcgtaaattgatctcttcccttgccatctcatcagtgaacgtaagaacacgtaaagcttcaacagttgggggagatgcggtatggaattccatcctcgtctgggagaaatgagcttcaggagatgagggaggggaatctgaacacccaccagaacccgcagcttcagc

SEQ ID NO: 126316 - DNA, 411 bp, Zea Mays
caaaactgcagtgccgaaggggtatcggaagaattggaccatccgatcaaaattggacgccccagattagatctggatcacgccgaaccggtatgcagcgcgatccgtccactccgcgatcaacggctcggatttaattctcttcgatctcactggtgtcgtacgatcacgatctaatggcacccaaccaatgtggcgaaagggtacgccaactctaatcccgaccgttctttaagaatccgacggcgcacgttttctgccccaacagggcacccacggcggtgcgccatggccggcgaggctaaacccccttgcccacacccccatttcctaattaaactcagctacacaatgcggaaggcttaaggaaggtgggggtaggtttattaccgtgaattgttgactcgacgg

SEQ ID NO: 126317 - DNA, 618 bp, Zea Mays
gggaattcggagcggacctggcgagccagaaactccgctcggatcctgatattctccctctgcgcagggattggcccccaccccccagcattcgcagactgaacccacaatgcagccttaaatctcagcaggcacatcatcaaaacaggacggattacctttcctctcgctctatctctctttctctcataaaaaaaaacgaaaccaggcagcgagtccaatactcgactcggaagcacggattttgcggcgaaaggttactggaagaaaacggaagaaaagaattaaggaagatggcggggagagagaaagggagaggaaaatgagcgaacgagtaacaggctgaattcggacggaggagctgacctgcggcggagagggccgcagcattcgcagaccggggcgcgacgcggcgtgaggttggtgtggaaggggggcatcgatcgatcgatcttagcccagctcttgtgaactgttccttgttgtttcttgcccgctcgccagctttgcgtttcgttcttccgcttgcttggctaggctttgggtgtccagtcacagtgtcacacacctcggggcccccgtgcgtgcgggaaaataccaaaccaaactcgaaaagtg

SEQ ID NO: 126318 - DNA, 472 bp, Zea Mays
gggagatagtaggaccatacgagtggagaggggtcctgactgaagtgcgggaacgacagcagcctgaagagccagaggaggagcagactgcactggtggaagctaaacaccggtgtgctgaagaatatgcgtcatgaatgcccggtgctctaccctgtctgctaagagctactgctgaagggtgtcctggcggtcctgaatagtctgaaacattaagagcatccgctcgaacatctgctgctgaatagctgcctaccgggcatgctctgatgccaaatgagcctgctgctgagtgagtgactgaagaatagcggccagagcagggtcaatggcaggaggggtaacaggagcagcactggaactaccagcctcgtgatcatgtgagcgaggtggcacaggaggcagtggcaagatccccaggtcctcatcatcatcagaggaagagtatgcaatggcaccctgagtctcgaac

SEQ ID NO: 126319 - DNA, 375 bp, Zea Mays
gcccagcatggacaccatttcaatcaagattccctccaattgtcttcttccccccagtcaggacacccctgctgagccacagtcccctccccagtcaaaggcaactttcagaaaaaggcagcctatcctagttgacacgacagttaggagtgccaggcttagggcaaaggccaagggctttaaaattgcactgggattggtaaaaagaattgttcttgctgcgctcaaagcattcctcctacccttcaacttgacatcatcaagaaactgggagctgagttttgtaagatgatcccttccaagcttaatccggaggatctgagtagatccaagaccactggtattgccattcagaggcctattgttccccccagc

SEQ ID NO: 126320 - DNA, 454 bp, Zea Mays
gtagaggagtgggaaatgccaaaggagactgtcaccaagtctggcgaaggtgagctggttcggttgagatacaccttcagatatgaaggtaagtttgatgagccgaatgatgactggttgaaatgtatcgaagctacaagtgatgaacttcttgggccgtattccaaagcagaagataacgcattatctgtagccttcgggagccgaaagaagaaaaggctaaatagagtttttgatgctattggatttatgtaccctaactaccgctacccaccacgggggcagaagagaaaaaatgcaccttccgggaaggatgttgcctcagccgccttaagcgagcccgcgccgaagaggaaaatgatgaaggtccttactcaccgaccgcgctacattgaaccggccacagtgcctgaatttggcggtgaaacctcttcggctattaaagccaaagagc

SEQ ID NO: 126321 - DNA, 658 bp, Zea Mays
ctgagaccttctaagagatataaccaatatcttaattatgttatattcatccacttaaaaacataattcatccacttaaaaaacataataccaaacaattaaataaattatacttgtaaggataaatcttcagttctcacatgtgattatacaaacagttatataatatatatcgagctgttgatcaacctcaatcctttcctgcctctcgactgtaaaaaacttaagaacccaccataaagttgtttgttcgtctcgtcattttcgcgaggcgacacccaacaatctagtctctagcggcatttcggagtcatgtcaattgaagaatccgagtgatcgagcgttggattatcgattttatgatcgtattgtctgtctaacatactatctcaaaaaattgttaggtagatcttgaggccataagcctaaacacacacaaaaaaacaaaatctacaaaactattagcgcaacatcctttttatggtaaatattttatatatatactacgcacacgtcagatacacatacccctagctttgcccctgctcgcaagcgacgcttcttccacgctggcaggtcaccatggccacggttcctttccccctagccgagttattgagcgcagaccgcatattcttaagcaattctttccatcatg

SEQ ID NO: 126322 - DNA, 527 bp, Zea Mays
gtgattttcaattttttcagccaaatcttcgatgacagctttgtttttctcttcctccagatcttgctgcatttttagaaccttgcttaataatatgctctgtcaaaatgatcttcgttagaacacgacccaaaagataataataataacaataaaataacaaaaacattcgttaccttgaagttagcataaagcaagcttccagcgatgtggtgtcgttgataacgacacaggtccgcttccagcttcggcaagccaatgcttttggaaagggttctgacaattttggcctcggtacggttccgaaggcaccttaatttcccttcgttcaccccaccaaatagcatagcccctgatttgttccgcaagatacgacatatttcttcaactcctctttctcagcgtctgttaaatcttctccaagcaagtcttgaaagttaaaatcttcttccgaaatttcatcaatttgctctttccccttttcagttgccatgctcactgtagccacggtagtttcctcttcagcc

SEQ ID NO: 126323 - DNA, 436 bp, Zea Mays
cgggagtccactggaatctatccaccttcttgagcagtttgtaaaatggcatgcctctctcgccgagctgtgagatgatgcaaattagtgttgccatgtagccagtaagcttctagaccttcttttgcgattgtggtggttccgtccttaggctggcttcgattttctccgggttggttttgattcctcggtgactgacaatgaacccaagtagattctcggtcgataccccaaacacgcacttgtccaagttaagcttctagcggtagcgcctcaagctattgaagacctgttggaggtcatcgatgaagttctctgggtctgttattttgattaccacatcatcaacataggcctccacccgctttccctagtggtcagctaagcatgtttgcatggcccgttgataagtcgctccagcatttttaggccaaac

SEQ ID NO: 126324 - DNA, 331 bp, Zea Mays
acgattggcttgatgatgaacttgcccacggagcggggcggctttacggcgggaggtaagggacggcgagcaattcccctcacaccgcgggtccacgcacccgattccccccgacacacgatccacacccccgtcgggctgtccgggagcgcaccacgggtgttaaaacggggacggcggcggcagacggctatggcggcctccggcggcgttcccaaatccaaaggcgagctcatgggtcgtaactactagggcgaaggacaggtggatgaaaccggaggttggcgcagggtttaatatggcggccgggcacagactcaaggggttgaag

SEQ ID NO: 126325 - DNA, 284 bp, Zea Mays
ctcagccactaagcgcccgactcaagatcaccggaaaacctacgtagcctccaaatcccttgctcccttgttcttaactccgccgcgaagaacatctccgtggccagccttcctcgagtgagtacttacccaattgtttcatgttcttgcttgctattagccccctattgctcccagtaccaaccaatcgaacttaagtcgaaagctttcaccggaacgtgtgcttgctctgaagaacaccgccgtgacccccctcaccgtcgacctactcctcgggccttgtt

SEQ ID NO: 126326 - DNA, 448 bp, Zea Mays
caaatgatagtgcaaaattgtaaatggctccattacttggtcgcccagcaaccatgttggccacccggacatgttcaacacatgcatcaatggaaaccgacctccagaagacatcctaaatgttggagaaggaagacggcacatcagagttgaatgaccttgggaggtacgcccaacctcaaacttggtcgttcgtccctctagatggctgactagcttaccacgtggttagtcgaccaattgacttaaccatttttccaacctaactcctataaatagatgggcactctctaaactccaaaaatatatcatttaccatgtaactctctcttcctcatggaggcgcccctcagttggtgctcttctaaaatcaatgttttagttaggagttagattcagagccctatcattcccgagtcgtcagcagaagttctgtatgagttctctt

SEQ ID NO: 126327 - DNA, 390 bp, Zea Mays
gaaatccggaataaaccgccgatataccctgccaatcccagaaaactccgaatctgccataccgtggtagaaggcttccaattcattacttcttgtactttctcatattcaactgacaccccctcctaagaaatggtgtgacccaaaaacttgatttccttcaaccagaaatcacatttggacaacttagcatatagatgatgatagcgcagtctctgaagtactgtatgcaagtgcatagtatgctccggttcatttattgaatataccagaatgtcatcaatgaaaaccaccacaaacttatccagttctggcataaatactgagttcatcaaatacatgaaatttgccggggcattggtcagcccgaatgacatcaccaagtactca

SEQ ID NO: 126328 - DNA, 737 bp, Zea Mays
gcggctccaggccgtggcgagggcagaaggctcagcactgagatggccgaacgccatcgcctcggattatgtttcaattgcaatgacaagtattccaggggtcacaataggttctgcaagcgcatcttcttcgtcgaaggcgtcgagatcatggacgaagacgacaccgaccaccccgacggccccgatgctgaggcgccgtgcttctcgttgcaggctgtctcgggctgccccgtggccgacaccatgcaggtggccgtcatgctaggggccaccccgttcgtcgccctccacgactcgggcagcacacacaatttcatattcgaggcagcggcgcggtgttccggccttccccagcaacagcgcccgcgcctatcggccatggtggccaacggcgaacgcatcacttgcgtgggcgtcatccgcaacgcacccctcaccgtcggcagcgacgcattcccggccgatctcttcgtcatgccgttggtcgggtacgacgtcgtcctcgacactcgctggctgggcgggctagggcccatcgtgtgggatctcgcgtgccggcgcatgtcgttccaacaccaggaccgtacggtctgctggaccggcgtgcccacatcctcggcttcggtgctgggcgccaccaccgcggctgagcctcttctcgcgactcttctggacaccttcgtgaccgtcttcgagagccggtcggtctgctctcgttgcgcgcccatgaccac

SEQ ID NO: 126329 - DNA, 347 bp, Zea Mays
gcagttgcaagactggggcagaggacagtgctgtcttgagtgtacgaaaagcatgatcatggtcttgagtccatacaaaatgtgtgttcttcttcagtaactgagttaggggtttagagatcaccgcgaagtgtcatacaaatttccggtaatatcccgcgaggccgagaaatccccgcaactctcgacagtttgcaggtactggccatgaggtaacggcgtccacttttgagggatctgttgccacccctcgcgctgaaatgacgtggcccaaatatgcaatttcttgttgtgcaaaggagcatttggacaacttaatctgccactgatcggctcgaagaagactg

SEQ ID NO: 126330 - DNA, 466 bp, Zea Mays
tcttgcttcctctcatcttcagcaacttcatccggtgcatatctggagagctgaatgaacttatcgcggtactcgcttactgacatgcttccctgcttcagcgacagaaattccttcttcttaatcttcatcagtccagcgggaatatggtagtttctgaactgagtagaaaattctgcccatgtgatagtatcagcagcatcgtgggcagcagtgtatgaatcccaccaatcaccaacaggacctgtcagacgaccagaagcatatagaaccttctcccggtcagagcactgagcaatattcagcatcttctctatggacttcagccaatcatccgcgtccagtggatcaggagagttagcaaatgtcgatggctcatggctcatgaactctcggtgcttgtcccggggtggaactggtggtggtggaggcagtggtgcttgttgctgttgctgttgctgttgcg

SEQ ID NO: 126331 - DNA, 532 bp, Zea Mays
accagggagccacgccgtcgcgtcgtcggactcgtccttgcgacgaaaggccggtatgaccgctctggtgagttcgcctccctctccccttttcctcgatgtagtttcgctctgtttatgttggtaagccgccgattcgccgtgtccggccatgccgccactgcatgcgagaacgctgccgtgtctgttcgccaggaagagtaggtgttggggaacgacgcgttagaagccgtcgatcttaggattagcgattaagattagatcactgcttaccccttcgcgcaatcaatcctgaccatagatctcatatccagtggctgcagttatatcttagtatttaaaatctatgtcgttagatccaaatctgagggccatggttgcgtaccggttcacggtgggacggatctaatccgggccatccgcgcttgatcggacggccgtcaacgcttcatacccctttggcgttcgtagtttgcagaaaggaccttataattttaacgaatcaacccgccatccacatggactatatgct

SEQ ID NO: 126332 - DNA, 572 bp, Zea Mays
tcttaagctggatcgagatgatgctgaggggtgccactacaaatgccgatgctcctcgatcttactctgcctggaaccttccttcattggtaagttctgaccacttgatttctggctcgacgtttgccgagttattgtatgcttcgtgctgatcgtgctatttcattgttgcaaaatccttttgctgagtttgtgtctaacccactcatccgtgaagagggtagaagttctagccatagagtgcagctttctccagatgagatagagaccattgttgctgcgtaccgatatcttcttgagaaggataagcagattcacatgttgatacggtggcctgccagtgactttgagattgaggctgttttcgacatgctggctggggagtcttcttagtcggtgcgacttgagtcagggcgtggagcccttgagcagtcaagtgctagcgggaagagagtgaataatctcgcgagcccacgacgtaagaggtcctgtcagctagatgccctggctgaggccacagaggttaagaagaagaggaaactccggcattcgtcggacatgcatccagtgac

SEQ ID NO: 126333 - DNA, 1520 bp, Zea Mays
  misc_feature (1478)..(1520): n is a, c, g, or t
gaagaataaataatgacattttaaacaatgaaagctatattcacattagtaaaactttggacacgtggaaatttgaagatcaaacatggatatgaaaagagttgagaaagataattatgataattatccaatccttttagagctaaatggtgagggagaatataaataaaaaacataataacaataataataataataaatatgatgatgggatttctgtccacattagaattgtgtttgaaattcaaatttgaattaggtttgaatttgaaatagaaatcattaaaaaaaagaaagtagaaaggaaaagaaaagagaaaaaaacgcctgggccgattctccctcagctggcccaactcccttccactctcggcccaacgtcttcccccgtgccgcgcctgatcacgctgacgagtgggccgatgctgtcagtcacagtattgcgcgcccgtcgtcacttgcgggcgggccccagtctccagtgcttgtgcgcgggcggctaccctgccctgcgccactaccgcatgggcccgctcggccagtggctcgctcgtgtgcgcccgcagcttgagccgctgtttcgcgggttccacctggtcagcccctctgttgccccagcgcctgttcttcatctccacggaagatctccgccgaatccgtgctttcgaccgtgaatctcagcggcaacaaactccgcaacgatctccggttgctcggccatcgttggaccctcctggtgtatatatatatcggccggcgtcctgtggtttcgttcacccgtagatcagcgaatcgcgagcgccgccgcggaccagaaaactcacgtcgccgccgggaaaaaaatttggtctactctcaaattggggaggtgtagctgggcttggagcttcggatcacgatgcaccttctcaggacctcgacgggtggagattggatcggttgggtggtggattgctcgctggtaagtagctcggcgcagacgtcctcatcgccgtgtggcccacatcacgcaatcaccgattgaaggttaggaggccgccgttgaattcacctaagtcatccctacgcgtaggcgagtcatgggcagggtaggatcctcgggtggtcacgatgggcgcatcgccggcatggctccgccaaggcttgcggcggcgctgcctcgggttggcaagggaagaagaagcccctgcaccgtccgtcctgggattagtggttgggattcaatctggcgtgcctgctcgcgtgatgagatgtgcgccgttggatcgaatcttgacgaataaaaacgaaccgtgtcacgtattgaaatcctaagcgtagatctctaatcccacggctggggatgcgtaccggttagatttataaaacaatctaatctggaccgtatccttttaatccaatggctctgtttgcttcttaccccttcggccatgccattatgcaaaagagaccccatataactctataaacaacccgcnnnnnnnnnnnnnnnnnnnnnnnnnnnnnnnnnnnnnnnnnnn

SEQ ID NO: 126334 - DNA, 760 bp, Zea Mays
cgctgatgaatgccttcgagaggttgaacacgccccacagtcggcacgctagctgcctgcgcagcgccgtctgggaccatccagttccaaataatggatgggggagggggaggcgcgcgagaaacaaggcaaggaaccctaatgcacaagaacttgcggtctgagcaatcgtgacgaaggagaactgtttttgcctcgaccacgaccacttcgttgccggccgtcgccagcgcggggccgcgagcatgacgatgcccgcttcgaccaccacgggagatttagaccccagtaaaagagggctccatgaacaggctttaccttcgttcttggtgatgatgcgaccggatccagccagttgacggaggagatagagcacgccaatgacctaccttcagatctgcgcctccacggtgtactccgccggttcttggaggtggcggatggtgtcgcgggcggctgaggcgagggcccggcatcgggaggaagcgcgaggaggacggaggttggagagggagggcaacaaatgagagaggaagttgtgggaagagggcggttgctgagcgtcgtaggaggcggcgtcgggaggcaggatcaagggagcgggcgcgaggttgaggatgggaaatgagaaaggtacaatgggcagaatcgagaatgatagaacagactattctttactgttttaataaagtaacagatatttgtataggtgtagccagagccggtcctgaacaggtgccgacggtgcggccgcaccggg

SEQ ID NO: 126335 - DNA, 1292 bp, Zea Mays
aaatgccgttttgaattgcatattttcgaccatgactatctaatcaatggaccgtctgtctgccaggacatttttggtgctaagactgggaacttcggttgatgttccgaggaatctcatctcattcacattcttgggtccttgcaggaatcgacgggattgggttaggacttgtgcggcaccacgagagattggcaaagtaaagaaaaaactttacatggccttgttttccccttgcttggatgtggttgatgactcttctttctgaaaggacaggatgttcgatctgtggtgcttgcacataccagtcgaagaccgaacgcccttcgcaggtacgcccttcgcaggtacattccttcttttttttcctctgacaattggaggagacacacacgtgtacctgcaagtttagttccacacactgacagatccactctggaaccgctgatggagcacagggctggtcgagtatgtggagagggcagtaaagtcggagagctcaagagcgcctgacagaccaatctaccttgttggagagtcagtaggagcgtgcgtcgctctagccgtggctgcgcgaaacccaggcatagacctggtactgatcctagtaaacccaggtcagcattgtgtttctctggactttcgagtgaatgatatgactcctcgtttctgactcctgctggagtcttgggccggcctcgtcttgcaggaacgtcgttccacaggtcgcagttgcaaactctctcggccttcttggatctggtccctgaacccttccatttgaccactccacagctgctaaattttctgacaggttttcttttcctttttttttacttctctacattactttcttagggtttgtacaccaaaaactattttttgaggaattcttctttgatttacttgggaggcaagtacttttgcccaaaaaaaaagatggatgagactcaggcattgtctgtttcttcagtgtataagacgcattcgtccctttgctgtcagatatgcttcttataattcttcgcttcctttcaaaaaaaacatatacaattgtttactttacgtagcacaatgtctagggatagtgttgaaaatagcatcaaaagtgtaatcctttgatatgcatcttccgagttagttcttaccatagtttaacaactttattagggaacttgatgaagatgccagaagcttttgttggacgtggcctctctctacaagaagctggtccgagattatcagagaccacatccagtatgttggattcccttacggtgagctaaaaaggt

SEQ ID NO: 126336 - DNA, 369 bp, Zea Mays
agcaggcccgtcaggcaacagagcaggccagacaggccgctatccagcaacagttgtccaagcggatgctttcgatgtttcagaccattcaggatcgacaggacaccctacaacagcagctcctagcagacagggtcaagcaccgggcattcatgacacatattctccagcataccaacgttcagcttccaccaatgcagtctgctcctcctctggctctttagtatgttgttgttcccgctcttcagtcgggacccccgctccactcttttggtccttctgtctctccgcttaggccagttaccctggatttctcgacccaagtcattggacccgtcagcgctcagccaccagtgccaccagtgtctg

SEQ ID NO: 126337 - DNA, 331 bp, Zea Mays
agagtacgctcaactgcaagggtgacccgtgaaggagaagaggctgaagccaccgagacacctccgatctccgaagtcatgagataatcgggattagttgtgacggaggggcccattgacgagggtgcacctactgctggagctgatatcgaggaagaaaatgttgatgaagaagaggaagactataacactctgatcccatcaaaacccagccacttggattttgaaaaatctactgtgtcggaggctgacgtgcccatgatgatgaagctgggttacttcggagaagctgagaagaagcttatttgttttgccggagaagaaaccactc

SEQ ID NO: 126338 - DNA, 437 bp, Zea Mays
tgcatcgtttttcacgacctgcaagaaaacatgggggttctgtccccggacatctagtcaagtatcgagacagagaaggagggcacttaaaaatgtatcaagattacttagctgaggattctacattcagtccagccgatttcagacgaaggtttgtatatagttgtttgttagtttactttatgataaaaattatagggtccatatcttatcattcctggttgtgtagatatcgaatgaggcgtgaactatttatacgcataatggatgcgatagaagattatgatgattaattcaagctaaagagaaatgcagccaatacagttggattaagttgttttcaaaaggtcacatcagtatttcgtgtgcttacttatggaataccagctgacgccacagatgagtatgttcgaattggagaatcgactatttttgag

SEQ ID NO: 126339 - DNA, 366 bp, Zea Mays
aaaaatttgagaaatgagctcctcaaatcgctctgtcaggcgcactgaagatcacatggtacaataactgaagaagatcccaggtgcagtgcacccgccaccggtgaacccgcgtcgcgatccatgctggcgttgtgattcgtgctccgtggcgcgtggataaccgcttgaggtaaaagatcttggcgtcgggatgagctcgggtcctgttcagttcaccatacccacttgcccgacgacgtggccgggcgatcatcgcagtggtggccgctgtccttcgcggttgcgccacgccgtgaccctttcactatgtagctataaccatggcaagcctagagttactgcccttgagccgttgtaccggcg

SEQ ID NO: 126340 - DNA, 406 bp, Zea Mays
cccgggtggaaagcctagagcagcaagtcaaagagcttaagaaggagaaggcatctctccaagagtgtctcgacatagcggaaggcgaggaggccaacaaccatgaagcctatcgaaccttaaagatggactatgataagaagcttaagaagctcgcccccacaaagaaattccggaagaaaaccacgagccaaggatgccaaacggaaaggaggaagaaagctcccccagcaccagcccccgccaggatagagaatttgtccgatatcgaggatatgtccctcgctagcctcgatgatcttctcaaggaatttggggacactctagaaaaggaattcggtagtacttcagggaacgctcgcgtgtagtacaacttctagtagccatatgcttgtaatgtattggt

SEQ ID NO: 126341 - DNA, 618 bp, Zea Mays
tgttgacagaagtatgatacatacatcaatacattatgccataaaacatattgctgttcaatttgggccagctcacacgaaataaccaggttatacattaattggatgtcgcatatgagcagattttttttatcaagttagtctcacaagtttatgcaatttacaatattgtgttatgctgctttgttgatagaattatgcaatttacaatttagtagtgatgttgcacgatatgttgggatctaatggaatacatggtcatgaactgaactgaattgacttgcgcttatctttttttttatcctttatgtattttatgtatatgtgttgtttcatttggcaggaacatcagacatgaagaacgtagaccgacctccttccaatccaaaacggatcataatccagtctactcaggagtgcttcagcgttgacataccccgtgcttcggcggggactgttagacctgaaacaaggcaggctgctgatgaggatgatgactttatgccattatccaagaagcgtaacttgaacgacagtcctgggaaagttttgaaaaaggtagtcactaagcggaggaaagcagtgccccccgacaggttagagatttatgtctatggc

SEQ ID NO: 126342 - DNA, 413 bp, Zea Mays
taagaagagagatggtcaaagtgaggttagctgatggtaagaagaacttggtaagggaagactccatcgaaggtggtaaatcttgaatcatctcgagatctgatttgactcctattcttccatgtcgaggttgatctactccttcttgctctttggtgtctccatccgggtttgggacaagaggctaagatagatctgttatgtaagtcaagttgttgggtatggccttatcttttgtaccagcattaagtaacttactctagattagatcataatagattagctaaaagctagattagattggatatgactagattagactagttaaaatctaactattttttttggattagcttatggttgttattctagagtgggataaatatgctgattagggcaagatggatccataa

SEQ ID NO: 126343 - DNA, 291 bp, Zea Mays
ggaagtcacatttggaccgggagctggctctaattcctcgggatcctctcctccctcacttcctgcctcatttgcctccatatcctggtggtgcatctccaggtggttgttggcttcctcaagttcctcctgcacatcatggagctggatctccaggatatcgatggtgttatcccggatttccacctactgctctagagtcgcgatgcgctggctcaactgttccacctataggtctttttccaccaattctgaagacaagtcgaccacaaagtcctctcgactgtcgag

SEQ ID NO: 126344 - DNA, 373 bp, Zea Mays
gagaaactacgcgctcgctcgcgcccgacgctatggctgctcctgctcggaatgaaacggcgtgcgtgctggtctcatcgatcgagatgttggctacccatgctgccgtggggcgttgccgccccgccattggtgctaccggccacggacgccacgtacggcttggccgtctggtacccccattcgatccggtggtggtctctgttaaactagggacaaggacccgaaactatgctccattccattaagccggccgttttcattaatgcaggagccgggttgcttttccgctgcgatcaagcggaagagcctacagaaaacgaagatgcatgtagcagtagtagcccctccagaaaacgattgtgctgctctg

SEQ ID NO: 126345 - DNA, 347 bp, Zea Mays
tttcaccaagttacttggtctgcaatacaaagttcaataccgtcctggttctgagaatcgtgttgccgatgccttgtctcgttgtgtgcctgctgacatgcattatccatggtggtaccttaatggttattggacgttcaggcaagctatgatcacgacgccgaggctcagtctctcctgtccaaactagcggttgaccctgctgctgtcccaaacttcactctgaaggctggtctgctccggtataagggtcgggtcgtatatggcttggggaggatgaaccattgcagcgcaaaattgtatcagccctacattgctcggcgattggtggtcattccggcgtccca

SEQ ID NO: 126346 - DNA, 489 bp, Zea Mays
taactgaaatgtcttaaacagacattagggtataaagacaagcgaatataaaaaggataagagtatgcaatattccaaggatacgggcataccaagacaaagagaatagaaattgccgaaggataacgacttaacaatagaatagggaagggtcacaaaagacacgaaggtcatggatatataaactgaaatgcttaaataggcagcagagtttttattaaaggtaggtattgaaacaagggtgttaaagaatccatggatacgagcatgtaaataccaagggaatagagattgccaaatggtagcaatttaatgacgaaagaggaaagaatcccaaaaagacaagaaggttatggtcagggggcatctacaaagatgtcacaagcacaagagtaagatcagatctagtagattgagaaaggttagaccataatagaataaaatacttttggtaagggggcatatataagcaaaacatagaattagtcg

SEQ ID NO: 126347 - DNA, 717 bp, Zea Mays
gacatctcgggggctgggccgttgtccacctccccgactcgctacttcgacagctcaggggctccgccgttgttcgcctcgccgactcgctacttcgacagctcgggggctgggtcgttgcccgcctcgctgactcgctacttcgtcagctcgggtgcttctgcccacctcaccaagaccactcggaggagtaagttgcttgatccttgaatggagaataccatcagaaaaacttttgaagactacaaagaaaaatcttcagaaatcagaatttggatcttcaagctgattgtttctcaagtcaacttgaagctcgagggcttgtgggggatggatatcccctgggtccaaatgagacgtattatctacatgggccgaccgaccgactcgggcccgaggccaatgggctaaacaaacttggcgcacaaaacaaggactatattgtaatctaaaccgtctaggagatatataaggaaactgacttgtaacccaagccacgccggattatataaggcgagctagggatccctcccaaggcagatcttaggggatctaatctcatacacgccccccgcccctcatcaaacatcaaaaccctagccctcattgtaacctctagatatcaaagcaatacaattcaccgcaaacaggatgtagggtattacgcatctcgcggcccgaacctgtatagatcgtgtgtcatgtcgcatctcgaag

SEQ ID NO: 126348 - DNA, 729 bp, Zea Mays
taaaaagcgtgtaagagctttgacatttttttctttattttcctgattttttttgacaattttatcaaaaccaaacaggctgaaggtacctcagaatggtgtcaacaagctcctataaaaatttcagattttttggacacccgagcgaaaagttatgcccggtttaaggaaggtacctcaagttatgtttttggaggcacgactagaaaacgacggttagggcaaacattccctatctgcaatcacagtgattaattggtcggatcgacttgtgatctgtgtaatggtggatgggatagcggcgtatttgcaatggatcgacttgtaatggatagcggcgtatctgcaatggatgggatagtggcgtatctgcaatggatcgacttgtaatggatagcggcgtatctgcaatggatgggatagtggcgtatctggcgcggcggcggctagcgagggcagttgatctacgacgaaaatacaccctaaaccagcaacacgactcgaccacggacacgaactgaacaaagccaaactaaaaacgaaattgcaaaggctaaacaatggttctaggatagcggaaatttttttgtatggcaattatctggagttataggatgaaaaacctaaactaaactagggtaagcctgacagtaatacctgagttttgataccacttgataggaacgggggtgctcgatcttccgtcaggtgaaggttgtaacaccccag

SEQ ID NO: 126349 - DNA, 533 bp, Zea Mays
ctcaacagttaaccagaagaaggcatcttctaccacgggaactcactgtgggaaggaaaaagtcaaggcggaatactgttcagaggttcgaaagttaggccctcggcagggtttggcaaaaccgcctcaggacgccatggttccgatcccattactgatcaggggttcgaaggttggcccctcagaagggctccataatcgccctagaacacagagtcagggatgactgtgggtgcgcccgtacatggccatagctcgggttgcgacctgaggtaccctaagacatatccgagacccctgggagcgattcgtgacggtatcccatcgtagggagccatcgagctttcgaaccctatgaaacgggtttgggaccaggcgagtcactcgcaggtacttgttgtggcgtgtctccggactgctagctgacccctatcgaaaggagctcggaccccgctcggattacacgataacaactcaacagaaacatcatgctcgttgcccatcgagggtagcatgacacattccccccttcc

SEQ ID NO: 126350 - DNA, 711 bp, Zea Mays
attatataggacatttatggatgcaacctatgtttctttctagctctaggcctttgtcccaagttgaaatcgcttagtgttttggctacactgtttatggatctagtgacactgtttttttacgaggatctatctacctcacaactgggtgttttgaacggttcaacatttaaatttttcataggatggagattgaatagtcgttatcattttcttataccttagggttcttgttgcctctcatcttttctacctctcgtcactcatggcatttccatgaaacacctccgtcttgcccacctgcctcgtctcctatggttccccaccaccaccgtgctaactcaacttcgctagggcatcactgtgactccccatttccctgtccaactgtcttcctccattgcccccatcaaggacatcgccgcctcctcacccctattgcgcccacaccatgctgcaccatcgtcggtatgaacttctttcctagatttttcttctagacccttcagaattggagaaggaaggtcacttgacctcaaaccctaaccaagctaatcacatggcaagggcttgaatcgagacacccataaaatcgagtgttgcattgccccagaaaaatgtgtcatttagtatttctcttttacaactcttatataacacaacaacatcaaacaataaataaaatttgtagggattacattgttgattgct

SEQ ID NO: 126351 - DNA, 495 bp, Zea Mays
gttcgtgcatgttacagaagcactttgcgcttggttctagcccttggcttctcacggcccaaacaaaaatacccattctaattatagcttcaggagtaatttgatgaagaaagatctcaaatgtcttcaaaacttcaaccaaaaaatttgctcaatgggaaccgaagacatgcttttcataaagcttctgtaaacaacaacttcatcttccttaggtgcacgggcggcgcagtccccccaactctcacaatggacatgtcacgaaaatatcttcccttcatggcatcaatctgactctgtttgatggacgactttccgaagatggtatgacttggccgccagggccgatcttcggcatcttcattcccgctttccacatcaaagttatcactatcatcagaatactcagaaaaccagctaatatttcatttgtaatcttttctgtgtttgtttttccatagcttcgtaaaacccagctagagcagggtccacaat

SEQ ID NO: 126352 - DNA, 359 bp, Zea Mays
tcatcccgccgggcatgatgtcatcatgaggtcatccctaatgtcacctataggaaccgctcgttcacttacagatgggcccaggggaagctccaccatataccagccgtagctattggttgactccacgcaagcactcgcgtatgatggcactgacgagtgggtctcttgccagctgacctcgctacagtcttctagaagcaagccatgcacatctataacaaacttccaactgcttccgcagttcgcgggagtcactagattttcctagccgtgtataaagaaaggagagaagaacggccacgagagcctgtgccgctgcaccaggatttctagtcgtaacccctgaactaagagag

SEQ ID NO: 126353 - DNA, 985 bp, Zea Mays
atcctagtactcatttatataataaaaacctattttctaattcctttattcaatttatcatggcactggactgggcctcaaattcagagaaacccagggggctcggagtaagactctgcagacacagagcacagctcccgtggatggcgggttctatttcaaggaaaccgaggggttcatatgaaagagtgcacccgcgaaggggtacggtgcattatgggccgttcgattagatatcaacacgccagattggatcgacttcaactaaataggtacgcaaagatagccgcacgatcgaccctcaatgttccagatttaaatacaaaagaaccatcgagatccatctgatccctgctcaatgccctatatcatcccaacccgaaacgatactcagatctaatctagaccgtatatgagtagatcaacggatccgggacgttaaactaaacgagtgcgcccggtatgatctgcaccatccaataaccatctaatggtgaaggcgatcgtcttcttccccggaacatgccacatataggatagcgacggcgcgcgtatcacactagtgaaatggaccgacgtgaccctgtccgtggactcgcccgacactacgcgcacattgaaggtttagcagggaccgagcaggggaactcaccgctaatggagagaactggccgacaacgccacaagggagtggacaatttgatggcggcgcacgatgatgcccggccgaattcctcccccgcgtggtatagcaggtcgccgaggtctgccccgaggctctacccgcacgcaccactgctctgttgaccgcaccagacctctacgccccttccttcctcctctcttcttcttctcgttccgcggcaatggcaagcagacgctctcacggagatgctggtggattaagtgcgcaaggggagggcgaggtcaaggatgttcatataggcgcgagaaccgggctggggttagctgatccctcggtcag

SEQ ID NO: 126354 - DNA, 712 bp, Zea Mays
ttccgtccaggaacatggcttaatgttaaaaaaaaaactactccgcattttaaatttccccgcggcgtcctagcacgtgcatggacagacgaaacacatacttgtagctgtaccaaggagtgatgatcacagtggagtggagtggagtacgtgcctctgctgacttggaaaggtcactgagctcattttgctcgtgtcttttggtacaagtacaatacatacaggccgtggtcaccttgacggccattagactccagctccagcgctgctgacgtttctttattcttgtgtgacactgggcgggataacacgtcaagtgcaaaataatattgtagcaccagtacttcttttatacactactttctccccctcgaaacaggccgggaccgtttctatatcttaaggctgcccgcctgcccggcacaaacgccgcgtcccaaccggggtcaggccaaaccaccagagtccacatgatctagaacgggttggttggttcgcgccctcagcgtcaatatccccagattgccggcttgatcagtacgcgggtcactcacgtatacggtatacaaatcagcacaatacgacacagcagcatcctctcactgctgacctcaaacgggcggatcggtcattctctgccacaccgtcaaaatcaggttataaacaaaggcagacaacacgagaacttttacaattgtcacttggaacaacc

SEQ ID NO: 126355 - DNA, 509 bp, Zea Mays
gcaacaaacatgacataacccccctcgtcatcaagattacccctcgcaagaaggccgcggtggaaacgcgaccaggggtagaggcagggactgaggacctcaacaacaacgaagattctactatcttttccacagtgaaaactcaacacacccaaccagggactgcctagagactaaagcaacgaaggattgaatggccagaaccctgccagccaataaccaaagagtcatcgctcacacctaccaaccccaacaatataaccagcatcaatttcaaaacgaacaccactattacccccaacagtagaaccacaacccatttccacatcaacaacgccttcaacaacaagaaatcctagtgctatcgcctccaccgtcctagcatccaaaccaacccctaccacctcccccaccactactaaagcaagaagacttcatagatccacccttcaggggattaatccacatgatctccgaagggtccaactcttagtttgaaacaaaatgac

SEQ ID NO: 126356 - DNA, 319 bp, Zea Mays
gctgctgctaccagcagcaggaggaggaagagggggcaggcagtggaaaggggacggagagcgaccgagcagagagtgggaacttggaagggttggtgaggaggggaagcgacggtgtttatgcgaagggggccgccgtcccgatcagcgaagcttttgggcgatgagcgagtagtttaatgcggaatcggcatcgggcgtcgcggtgggggctggactggacttctctgcccgctgccaggaggaagaagaaaccgaggagtgagacgtgctgcgggtgcggggcgggaggccggaggcgtctgcgtctgcgtctgcg

SEQ ID NO: 126357 - DNA, 360 bp, Zea Mays
tgtacagtgcagccgccgggcatcataatagtttcacagtttggctcagggctatcaaagtatgcccatggcaaaataacaaatggcaattcacttgagatgacagagaacaatagtaccaaggtttccttggaactcacgcaagaaaaaagtattttaccttaatcagtaattggctccttgagatgttaatcggtcatttatgtctacaaaaacattataaattggtagactggtacctatgtgatttgcttcgcattatttatgagaaaaaataacactaaaattgaaaatttctatgaccgcattaaggaatccatagagatacacagtccaataaatgcaaaacatatggatgtg

SEQ ID NO: 126358 - DNA, 828 bp, Zea Mays
ggcgtggttttatccgaagccatctgccagggggagagaattactactatgcatatgccaatttttttcaaccaagttattttattcatcacataagttcattacaagcatacagttaccataagccgcactacacgcgagcgctttctaaggtacttccaaagtccctttctaaagtgtccccaaattccttgagaaggtcgtcaaggctagctagggacatatcctcgacgtcggacaagttctctatcctggagggaggtagtgttggaggggcttccttcttccgctcagtctggcatccttggctcttggtcttctttcggattttcttcgtgggggcgagcttctttagcttcttatcataatccatcttcaggttcggttggcttcacgagtttggcctcttcaccttctgctatttcgagactctcttggagggacgccttctccttttaagttccttgacctgttgctctaagctttccacccgggagtttaggtgggtgtagtgggaggaaaggtcatcatagtggttatcgagagtgtggagatatccggccatgtagacgatggtggggtcatcctcagtaggatctcttcctgagagggcctaaagtcttttcctccaggcaggggtatttttgttgctaggtgggaagtaacgaaggggggtttcaaagaccactctgctgtagttttggcatagctgtcggagggcttttcgggcaacattttggcaagtgtctgggaagcggtgtccggtgaaggtgacttggaaaggagggtggttcgagtagcttcggctttctcccaggtagactgcca

SEQ ID NO: 126359 - DNA, 517 bp, Zea Mays
gattggtaagctatcacgccctgtccacgtgaaccgcgaacgatgaggacaatggtacgtgttcccggtgatccctggcggtccggttcaattaaagggttcgaggggtttgcggggtacctaaggaggctagaacaagcggcagagggacttgagctcacctgaatcgagctggccacggtgaggtcttcttcgcggtggcggaaaccgaattgagggaagtgagcgattctccggctatgggggctaatcggagacgggagtggtggctatggcttcggtatgacctagcgcagctggtcggggctcaatttataggaggcttcgacagcggcgcttaatttggccggacagagctggcggccggagataaaggagaacgcgggtgcggtgaattcgtggctaacgccgtggcaacctcaccggcgttgataagacagtggtagggagtcgcggtgacgcggtgtaaagatagagccacgcggcgcacggccgggaggcggcggtcacaggcgag

SEQ ID NO: 126360 - DNA, 814 bp, Zea Mays
cggatcaacacaggcgcgcgaatacggccaacaggccacatcatacaaattacagttacatacactcggtgagggcatcatatattacatcggctcaaccttcgggatgatacccatctccctgtaattgaacaacattatcctcaattcctcaccctcaaaaagatttcgcagatccccttcacctatgctcgccccaatcggcgaggataacaattcttgtttaccaatccggtccactcgaagacgaccacactccatccccatacgacggcgcctaccacttcgcgaaaattcacccacactatgtttcgccaccacccttcgccgcctatacccagtactcgcactaggaagatccccggcaccctacacacgcggcgaagtgtccgccgcagccacatccaacgcagcaaaataatacaagccttcatccgaggactcctccgtccaagaaaacgaactcccagattcaccatcagactcaaaacactcagacacagagccaaacaaattatcatcagcaggcactacggttgtggccgccacaaaattagtattgccagcagcggttgcttgcgtaggcccaaacgtcggaacctgcacagcaaccgaggttcagtatcacagatacaaaagtttacacttaaatccctaacccctattccgccacctgcgaaggccctgggtcttcgacagctggttcggccaccaccttcgaggcgtccgcacccgtcagcgcagtggctggcatggggtcttcaccagctccagttgacgcgggggtcaccgaggggccctcgcctgcatcgga

SEQ ID NO: 126361 - DNA, 478 bp, Zea Mays
gcgaggtgggagctctaggcggtaggcgacgtcgttgatgatggtggtgatgcggtacagttcgtagaaccgtggcttgagcttccctgacgtgggcatgtgaggcaacacggtggtgcagacggagccacacccaatcgcccacgacatagtggacatctcggtgatggttgtcgtagaagcgcttgtagacggcctgggcctgctcaagacggtgacgtatgtcagccaagaactcatcccattccaccatgtgtttggccattgcagctaccctcgtttcgtcgggctcatacacgcggatggagggtgggtctcggccataaaccacccggaacggagtatcgctgagcgccgactggtaggcaatgttgtagatgtactctgcccagggaagctagcctagccactggcaaggtcgatcccctgtgaagcagcgcaagtacatggtgatgactttattggcggcctccgtctg

SEQ ID NO: 126362 - DNA, 428 bp, Zea Mays
ccaccacctctaaggatcgacatacaacaaggatctcgtgttgaggttgttctttctgcaacaatctccagaatctgagccagtatgttgccctgaaaagaacctgcataattgatggttttggtttaaaagtaaaaacaacattattgcgacaaagccaaataggccaaaacattgccgccactccaattagaagtttttttctatgtgttgttcccttgttagcaatccaggacccaattatatgattaatattgttcggtctctctatatttaaggcaaagtaaataattctccaaatatttctagcaaggtaacaatcaaaaaacagatgttgaatagactcattttgattacaaaatctgcattttaaacaacctttccaacctcgcttagctaaattgtctttggtgagagtaactcccctg

SEQ ID NO: 126363 - DNA, 337 bp, Zea Mays
tggcgagtcatcgaatttgtcgtgagatagcgttggtgagacgacgataagtaggaggagtgagtgcaggaggcaaggtagcgatagatgatggtgacggcaagcgacacccattgtcgtgttgcaatggcgcggtgggactctaatgagttagcgagggacaagtgatgccatggtcccaccaataacttgcccatgtgctggtgcatactaggaggcaaaatatcaatgttgtgtgtaggatcccgacgagtcgacgagctgatgagtgatgagaaggcaaagtgcgcagcagcgggcgggttaggtcaccgacttactggtcagaactttcaat

SEQ ID NO: 126364 - DNA, 743 bp, Zea Mays
agccgactggaaatgatccttagaggcaaagtatgaaatagtggtgctcctgttgcatattctgcttggaatctgccaccttccaagtccttttttgattttgtgtccaaccctcctgctagtgacagtggtttgggtcttagagtgcgaccctctctcgaagaagttgaggttctggttgcttcacttggtgatcttcccaatgatgagaggcaagttcactttgagatgcctatgagttcgggtgatgcagagataagtgctatgctggacatgttggctgaggattcttctgactcggtccctgctgaaacaatagctattgcaactatcccagagccttgaatactcaaaagcctgatggtactcgcccgaaaggcctccgccaggacagtcatccaactgcacctgccgaggggaagaaaaagaaaaagagacggctttggcgagtgtcgtgtttggaccaggatgctggcccttctgctcctgctgctgaagaagtaccggtggaactctttactggagctgatcccaatgggtgtggccctgctgatgctgatcccaatgggtgtgaccctactagagttgatcccaatgggtgtgaccctgccagagctgaacccaatgggtgtgaccctgccagagttgatcccaatgggtgtgaccctgccagagctgaacccaatgggtgtgaccctgccaaagttgatcccaatgggtgtgacccttgccgtttattgtct

SEQ ID NO: 126365 - DNA, 910 bp, Zea Mays
tttcagtggggaccttctcaatagcaagcctttgaatagttaaaggattacctcataaagctaacaacactctccccaccttcacgaggggctcgtctatttctctatgtgtcagcttcacaatcaaccatgagtgctgcttcggtctaagaggcggtagacaaaggtgtaaaaaggcaaatgcatgtctattttatgtccaaagttctcggtccatctaaaagaaattatacagagatggaaaaagttttgtgtgtcatcttgatggctttgagaaagcttcaacactattttcaatatcacaacgttattgtgccatcgattcatctcaaccactcaaggatatcataacaaacagagaggcttcgggccaaattgaaaatgggcagcagagctcaatgagtttgtcatcgactttgttcatagatcatccatccaatcccaagcattagtggatttcattgccaattggattcttggcccacgggatgaagctacctcgttatacgatgttatcgggacagttttctgtgatggatcatggagatccttcggagccggtgttgcagcaattattgtttcaccatctaaagtgagaatctcatatgctgccaagctacaatttcaatgcacaaataatatagcagaatacgaaactctattcctggggctaaggaagccaaaagcaatgggcgtaagaagggcagtactgaaatcagactctcaagtcatcataggccaggtagacaagtcaagcaaagtaaaaaaacccaggcctagagaagtaccttaacatggtccaaaggatggaatcttccttcgagggatttcagtaaaaaacatcccaagactggacaatgagcatgctaatatgttggccaaatctaccgctaaagggctccccttgcac

SEQ ID NO: 126366 - DNA, 1235 bp, Zea Mays
tttttgtttttggtgtgccgtcgcttcttatcccttctcctttttccccagcatctcctctcaacttgatgcttccatgtcgcacatgaggaaagcgatttcaaagaagaggagagtgatgcctaccatcggtgagggcggaggagcgaccagaccgtcaagttccttcctaacgacacttgcgcagggtaacaccagggggatgtcctgggttcgtttgacgttttcgagcggtcctttcatggatctggcgggggcgactgatgctctctctttttctcttattttttgtttttgtggttagctcgggagctacgttcgtcggcatggtggaggttgcggctccaagggggacaacatccctccttgtttatggggagccccagaccctacgttcgtccagctcgctccatactgctctacagacggcgacgaccccctggccctatgtagggagctgaatgaagagaacgatgtgactgagaaggtgttgcggtgcagcctcgatcgactttcgactacgcgccaaaaggtaatggtaagtcgcacatggatggcttggcgagggaaatgatcctcttgctaatcgacttgttgtatgattttcgtgttttcagtcgctcatagggacgctggcgggcaggtctcgccttcttctcgaccaaagggaggtgtaggagtgttccaccagcaatctgctggtggtgaaaaatgaggccgctgaagcccgcatccgcgtagtttctattcaaaacacctacgatgtcttggttggggtggtgaggagggatgcagaattgatggcccttcctcgtctcaagatagtaaaggactcctacctccgtaccctagagcgagggaaggaggtcgtcgatggccgagtcacgaccttggaggaagagctaggtgatcagaccaagaaggaggagatactcctggcctctctgtaaggtgatacctctgaatgatttcccctagagctaggagttcgctgcccacccccttttcacggcccatgttttgtctggtcatccattcaggggaaattcgacgccatcgtggggaactttgtcgaggtgcaaagccacctcgaggagtcggagaatgagaagcatctcctattggaggtgttgagagctatgtgtgggcgcttcggagcaccccttcgccccgggtcggagttgctcgtttcccatctttagggccttgctaactggttccaagagatctaccag

SEQ ID NO: 126367 - DNA, 531 bp, Zea Mays
ctcctcggcgcgcagagcggcgtgatccactccctcacccatctgctctccatggaattctcgtgtcgcgttctcctcctcgccgcgatccacggtcgtgctagacgcgcttcttccatagacgtctgtggcgctctgctcccctcccaggatggcgctcacattccatcgacgggcctcaccttccatcgacgggcctcaccttccatcgacgtcgaggaagttcctgttcctgcatcgcgtggcgcgtggcgccgtttctgcacggacgccatgtcgggtgtcggcccacctctgtgaagtggtttttgtcgccggctatggaaggagatctgggttcattcccattcctccattcccctcccagatcacgtgttgattccagtcggtcccgcaatcaatgccattgcccctgcaacccccttccaccgacggcgcggaccttccaacgacgaagcggatcttcctcggcgtcctctccctacctacagctattaaagaaatgcaaagggatgagacatgcaaggccgc

SEQ ID NO: 126368 - DNA, 416 bp, Zea Mays
gagcgattaaatggtatagtgggtacacatatgtggcggtcaggttacattattaatcggctgaattaagacattggctaagcattgactgcaccctggcaacacgtcacaatatttatgtcgttcgaacttggttgtgtcatgtgattgctatgtcgcactcttgcttagtcggatcgctcccgttgagtcggactgccattgccgagtcgcgtatttttcgcatgccctgcaggcactgtccatctctcgtgatcatcgagtcacaatagcgcctgttgcgcacattacgtggacttattgtgtaccccgattactgagccataattgtgcttgttgcgttaattaagaaggctggctgtgttgtcgtagccttgatggccacacacgtgttgacaccagacactagagcttgt

SEQ ID NO: 126369 - DNA, 1632 bp, Zea Mays
agcaaactctgccaatgcaagatgatcttcccagctaccctttcaagacagaacacaagcgtgcaacatatcttccaaggtttggatcgttcgctccgactgaccatcagtctgaggatgaaaagcgacactaagagaaagcttggtgcctaatgcactgtgaagactctcccagaatttggatacaaatttggagtctcgatcagaaacaatggacttaggtaccccgtgaagcctgattacttccttcatatacaaggggaccaaatctgaagctgaatttgtggtcttcatgggaataaaatgcgcagacttagtcaagggatccactaccacccatatagcatctctgccccgaggagaatgaggtaaacccaccacaaaatccatggtgatatgctcccatttccactccggaatttccaatggcttcagtaaacctgcaggccgcttatgctcgaccttcacgcgctgacatacttcacaggcggccacatacttagaaacgtcaaccttcatccgcttccaccagaagttttgctttagatcttggtacatcttggtttcgctagggtgaacggtttaaggcgttttatgagcttctctcaatatacccatcttcacctctgatttctgaggcacacaaaggcgacccctgaaatgaaccaaatcattctcatcgatggagaattcccggggtttaccatcgccaaccctctttcgagcttcctacattaaacgatcctgctgctgagtcgcacgcactctctccatgaggggagattgaataagcatacgagtctcctcactagcggtgctgacatagcacaaggcgatccccaaacggtccagatcagcaatcaactgcaaggccacttttggaaccccggacctgctaagggcatcagccaccttatttgccttcctcgggtgataatgaatagacaaatcataatctttaatcaattcgagccaccgacgctgcctcaaattcagctccttctgagtaaaaatatacttgagacttttatgatcggtgtaaatgtcacaagcctcgccataaagataatgcctccacaactttagagcaaaaaccaccacggccaattcaagatcatgagttgggtaattcccctcatgcttcctcaactgccttgaaccataagcaatcactctaccttcctgcatcaacacacagccaagaccaatacatgaagcatccgtataaactgtgaaacgcttaccgctctcaggcaaagctaggatagggccgtccaccaacttgctctttaatgtttgataactgacctcgcaatcgctggaccagatgaaaagaacacccttctccaagagtctagtcaagggcttagcaatgctggaaaaatttggtacgaaacaccgataatatccagcgagccccaagaaacttcgaattttggagacactagagggtctcttccactccaccacagccgcaacattcttgggatcaaccgcaatgccctactgattaatcacatgccccaggaaagccacttcggacagccaaaatgcacacttcttcaacttgccatagaactgattctcccttagggcacccagaacgagacggagatgctgctcatgctcagc

SEQ ID NO: 126370 - DNA, 1560 bp, Zea Mays
gcttacacatgggccccaggtggcagtgggagagttggcgggtggtgatttgtcaaattggtgctggccattgcgctattgtcagcgactcggcgacctagggcccacctgtcggtgaccgagtacgtgctcggtgccgcattcatgactgcgacgggaaagccagtgccgtgcgcgagcgatccgagcaagagcaaccgagcgggacggtgggagactgggaggtgctccatctcgcgcgccttccatcacaaggatctccacgcgtcgaccatccgaggtgctcgaggatcggggtccacgtgaacccaccggcaccttctgcagtttctgcttcctagccctaggtcgaagtcttctttgatcaatcgagtcaatcagagaagttgcattttgttgtcgtctcatcaggcaggcgatctgatcggcgacatgtctgaatgtcgtatcggactttatcgatcatctccacaggtattatatactctacttcccattgaactctagaggtgttagtgattttttttcagatttgccgtcgaacagtttggtgtagtaaaatcggacggcgttgttggctttgttttctggactttgagttttttacttcagtttggttgttctccccgatgtagaaatttctgctttgcatccatttttttggggagggtttgtgtgtttatgatactagtaacctcatcttattgatgttggtcttatgcctttcccttgtctagtgccatgccttcctcttctctagtgcctgagccctgaagtgaccaatattgtcggtggtttaaccatgggaggaggaaacgaattcttggtggggatgaccggctctgctcctgattctgcccgccagaagcggtgtcacgacactgccaacggtgaggtgcgggacggcgacactgtggtaaagaacgggaagacgtccgatgctgcctccgtagagaagagggagaaaaaggaacatctgtttaaatgcagtgcctaccatgggaaggatacggacatgtggagtggcgaccagaggataaacaagagcagggtgcctgccgcattatgtgagcagggaagggaaatggatgatgacctgaacaaaaccaacagcaaggagaggatgatgggtgttgaactggacaaggaaaagacgattacatcggatgactgcagtaaggttgagggtaagaaaaagttcaacaccgcatcccctgaggaggagaggaagaagaaacctcacaatgccagcactgggaagaatatgcaaagggatgatgacaaggaggtggtaaggattatgagtaactctgatactaaggtgaagatcaagaaggtgtccaccccattacctaagaaggagaagaataaggaaaagctaaacaaaacctaccgagagaagaagatgcaggctgctgacagcaagatgcggagttgttacagtggagtgaagaaggggaaggtgcccacagcattttgtgataaagaaaagaaaaggaaaatgcctgacaataccagtagtgagaaggagactgcaccaatcacacctgctgttaaaga

SEQ ID NO: 126371 - DNA, 439 bp, Zea Mays
tagcaggagggagcatgctaactcataatgccttgtaattactgaatactgatgaaccagcggagccatacctcattgacatcctcaagtagctctgacaaacaaattaggggacatgacaaacaaattagggggcactacctctgcgtatctgcaaaagggtccaagagaggtggggcccggccataggaacggagctctcagctcccgcaccgtgcaccagtgaatgcgagcaactggtctggccttccagtaatccgatctgcatgcagtgtgatccagaattcacgtggataaggatgaaatcaagagagcgctagctaggatcacacaccaatagcacaaggaaggaaggaatgagcgagcgaaccttgaggaaaacatcgccgacaggcttctttgtgtggctctccgtcattggttgcaacccccgccaccg

SEQ ID NO: 126372 - DNA, 683 bp, Zea Mays
ccggaaacctgaaggcgcccgcccaaagcatccacgccgagtgagtcggccgactgcacatgttgtggaaaaaaggaagaggaggcgacttcgacgactgtcatgcttggactagggcgcaggtccttctgctctggttccagatgaaatgccagcagaggcccttcccaaggttaatgccgagggttgtgatcgtgcacaagctgctatttttatatttgatgaagatgaagaggaggaggaagaagaagtcccggtgatccgaaagaatagcaggcattatagaggtagcgagggggtagtgacatcccttctccagctctgttggctcttgtcagtcttgagggactttccatatcagattttgaacaagcactagaggaagtcgtcccgaagatatgatgtcagagccaactgctaatgatgccccggctgtctgttcagaggtcccagacggtgggctttccttgcttgactctgctgggcaagaggtaacccaagcggtgtctcgctcatcgtcgactttggagggtagtcttcaatgccgagacgctggtctgagtcacccaactcccatggaggtgactgaggagccttcagccttagaggtggctactgcagaagatctagcccccaagggtgttgccggcagtgatccggctctagtgggtagcgcaagctgc

SEQ ID NO: 126373 - DNA, 417 bp, Zea Mays
cgtccttcgtcatggcacaaaggccagcttcgagcttcgaaaaacccatacttctggccatctcccgacagacggataattctttgttgtccgggaggcagtacaagaagtcatcttcatccgtaccgttaaacactaaggcccccttcaggtacttcagttctcgggcatagtgtttagcttcaaaaacttcttcttcggataatctctttcccgaagcatgtcgaatgatataatcaagatcttcagagagtgcttcaggggcaagggattcggcctctttggccgcactcttctcaaaacctatattaatgtctggagttattccttcggccttctgctcggcggcggcaagcttcgtctcagtaggcactgtgggctctgcctcgggtttcagcctgggttattgtagtctcg

SEQ ID NO: 126374 - DNA, 502 bp, Zea Mays
ggatgtcctgcacccgcaaggcagcctcaccctccaccaccatggagaaaaagattcccgacttccttgaccggcgatccggaagcaattgcaccaacaaggataatgtgaactttggggaacttcccaagaataccaccttcttacccgacggcgcctacaataacactgtcttccagaaacaggatataactgcgcgatactaagataaccaatccatacccaagaaacatcgaatgcccccaaggaaatcacaaccagattggccgaaaagacctcatcagcaagaatgacgaaacacccctgacaaactgaacagctactaatggagccattagcagaactaaccaaaattgggtgacccaacctctacaccgaaagaccagcccgcgacacaaaatcctccgaaacaaacgaatagctagcaccagagtcaaaaagaacatgggtcacaaatgaatcaactgaaatcgtacctgtcaccacgtctccttgcactctg

SEQ ID NO: 126375 - DNA, 1163 bp, Zea Mays
ctagtttctctgtgatctggactgcgcgtcatttactaagaagcttgaggtttaattcgcaaaatctaccagactcagccctgacccgaggtggacggcgggttgatactgaggaaatggaggggctcttttgtaaagatgacggtcgaaggggtatcggggcatgtgagctgctggattaaattcggacggccacgattagatctacagctatccgaacagttaggtatctgcagccgttcgatcagaaacagacgcgcctgattagatccaggcaagttacccatccgcgttcacccccgaccgtccgatcagatcctacgatcaggatccaaccacccgaaccggtgcgcgagatcaaatccgaagcgttcaagcgaagagcaacggccgagagccagctgagcaaaaggggcaccctattccaatccacgctgttccttcattatccaacggccgaacccacttctacccccaacaccactccacacagcggcggcgtcgccgcgagcggcggcgaagttcaccagagaccctgattcaggtgccccgagccccaaactatggtccacacaaccataccggaagcccggtatcatccgaagtcaacactctcccacgcaacaccggatttctgcgcccgcgcacgtcttctccgatccgcaacaggccacgacggcgcgactctgcccgcgacgcaccctcaccggcgaggtacccaacccgcggacaagagcacaaaacccccaacctgaaagccccaacgcgataaagagaggacgacgaacttcatggacggtttcttacatggaatccctgcggcaccgacgctctcctcggcccgcgacggacacggcaacagcgaggcgaggcaacaatgatggcagcggcaatcaaggtcaatcccccagcccagagagcactgccagcacgacggagcccccatgagcacccaaccgggacggcgaattcccccaatggctcccaaagcaccgaacgtggcaccatgccctcggcggcgatcctcgcccgaggtagccccagcccccaacagccacgagcctgattccaaccaccggtcgccagaacagcacaaataatataggagggggctcaccggttaatcgtgttgcgtcgaccccccgtgacttagctcgcggcga

SEQ ID NO: 126376 - DNA, 565 bp, Zea Mays
aaattacggtgcccctgagtatcctccgcgcccaccagacgcaaggacagctccaccgtcggtaggacacatcggtgttgacaaggggatcacagacggcttgtgaatcgcggaattgacctccaatgcccacggcggcgcgctcccctcctcactcggtgctacaatggcgcaaggcttaacttggggtggcttggtcgggaacggagattaggtggtgcggctcgtcttttatgggcgcgagacggtgcccaggtttatgcaacggagcccgagtctgtgccccggaattccgcggtgtctggtcagagcgggtccgagtttttcgcgaggaggaagaaccggtcgtagtggatggcagaagggccccaccaggcagggtgacagcgtacgccaggaagtggccaggtcgcgcgggcccgcgaggcagtgaatacggcgtggcgaagaagggggaagagatagagctgacggatgggtcccacgattcagtgattcagggtcgcgcatgagagagactgagcagtggggcccggttgtcggcgccgcagagcgggagcgcagg

SEQ ID NO: 126377 - DNA, 357 bp, Zea Mays
tccagtaccgagaagtaaactgtgatccctagtctgacacaatcttctttggcacaccatgtaagcatacaatctgtgccatgtacaactctgctagcttggctcctgaatatgtggtcttcactagaataaagtgggctactttagttagcctgtccacaatcgcctaaatacagtcttacccagcagatgtgcggggtaatcccacaatgaagtccatgccaatctcttcccatttccactcaggtatcataagcgggtgcagtaaaccagcaggtctttgatgttccgctttcaccctctagcaaacatcacatagtgcaacatgtgaagcaacatccttctttagtccatatc

SEQ ID NO: 126378 - DNA, 430 bp, Zea Mays
gatggcgttgttaacctgtacacactgggggacgccttcgtcttgacgatgaatggaccctcccactttggctccaacttgccccgtgactccgtccgggttgttcggacgagtacgaggcccccttcgtcgaattctcttgggacgactgcatggtcgcgctaggccttcgtttgagcttggtatttgttgagggcctatagggcgaagacacggtctccgtcgatgaggtatttggaggttggttcgtctatgtcggggacggctaaagcgcttgtccgtggtgacccatgtttttatttcctgcggggtcatggcctccgatccgtatagtaggcaaaagggagcgaatccagtcgcccggaactcggtcgtgttcagcgcctagactgcttcaggtagtaggtcagcccatttacccttcttgtcg

SEQ ID NO: 126379 - DNA, 599 bp, Zea Mays
aaccatcagctcccgttgaaaaagccatgtctgcaagtcagtttgaactgaagcatcagccaaggacaaacccaaatgacgcggttgatgcccataaagcacctcaaagggggatctgcccaaggaagaatgaaatgctgtattataccaatattcagtcaatgacaaccactgaatccattttgacgggcaagcatggacaaaactccgaaggaaggtctccaaacattgattaacgcgttcagtctgcccatccgtttgagggtggtaagatgaactcatccgtagagtagtaccagccaaccgaaacagctcttgccaaagtttacttgtaaaaatctgatccctgtccgaaacaatagaatgtggcagtccatggagccgataaactgaatccacaaataattgagccaccttaagagcagtgaatgggtgcgacaagggaataaaatgagcatatttgaagaacaaatcaaccaccaccagcacagtattagcaccaccagatcgaggaagaccctctataaaatccatactgacaatctgccaggcatgttcaggtaccggcaaaggctgcaaaagccctgggtagcgattcc

SEQ ID NO: 126380 - DNA, 539 bp, Zea Mays
gttagatggggatgctagcgcgaacttactccgaatggtgactcgctgggactcgaatgtgggaattgagacaaagggtttatactagttcaggcttgcgccctagtccagtgtagtgctgattgtagtattgatctagagcgtgttacaactggtgtgtctatgtgggaaggaagggtccctgggtttttatatctcaagggtaggaccttatagtgggacttgtattctactaaagagggatagaaagatattggctccacgggatggcatggtgggcccttcgtagggttgcgtgtagtcgtactcccggtaaggcttcgctcgtcccctcgctcttatagcgagtctattactgacgtcctcataatggccggttcctcagatcagtctcacggcgcagtcgtacgtggcatggcttctctagtcgtcatgagcccttcgtcacgtgtcagtgtgtgtaggcgtacactcggtatggcacgttgtcctgtccttctgatgtatgtgtcactatagagaccttggtgtcgaggccc

SEQ ID NO: 126381 - DNA, 350 bp, Zea Mays
gggacaatggggtgctcaatggacctatccattttgatcaaggctcaggtaaggtgaaaggggaccaccttgtctgaggcctttcttgcacgagaaccatgggctacgacatacatttaggacagcgaggtctttgaagtggataggagggagtgaacccaaccgcaccaacgtttagagaagtccctaacccttaggatggtgaggagagctgaccaattcatggtatcaaacacttttgtgaagtccagcttcacaactagagtgggcagcttcctcttatgacatcactgcacaagtttccatggcatggaaaaatgtttctaaactagtctgaccttttacaaatc

SEQ ID NO: 126382 - DNA, 491 bp, Zea Mays
cagggcagatgaccttcatgaaaattttggctgttacaattttgcgtatcgaaaggatacaaaggcaccagttcttagctaccacacgaagtggccaactggttggaagagtgagtggttctatatgaaggttgacgagaaaaagagggagaagctgatgaccatggttatgagtccactgtctttgagcttcggaatgactaggcccttatgtaatatgcaaatggggtcaccctgttagttggctgaaatagaatttagagtggtagttgagcagatcagtactagggacttggtgcaagaatacttggcaaacagaacatatccgacatcaagtggctggggaatgccgaagaggaaagaagtggggaagaagcatgaacttgttcgacttgcttaccgttttaagtttgaaaaacaattcaagaagccttgcaaagaatggctagacatgattgagaccatgtgcaatgagatacttgggaattata

SEQ ID NO: 126383 - DNA, 331 bp, Zea Mays
atgcttgaactaaggtgggagattggaggttttagataacgaacatagcgtaatcaccaaggtaagattgagagatgagaagggtaaaggcaataagaaacaaaagcacaacaaaggatgaggttacaaactcgcgagccaaagaagaggatacggccaagagaaagaaggtatgagacgaaagaggggcgattttaaagggcaggtatgagacaaacatcaatgtaggatatagaggtgtcaagggtgcatatgataataattaaaagcataacaaaggatatagttaaggcaagactcgcaaaacgacaaagtggagaaaacaatcaag

SEQ ID NO: 126384 - DNA, 341 bp, Zea Mays
cggccaagttacgggtatggtttgtagttgctgcgctggtagatgttgctatttcgacaagtactggcaagcttcgcacctctggactaactcggctgcatcactcttcgctgttggccagtagaaacccgacctgaagaccttcccaaccatggtcctggatgctgcatgtatcccacattgcccagcatgaacctcttctagcagttgctttccggtggctgagagaatgcatttcatgaggactcctgatgcgccccttctgtatagcgtttctccaatgagagtataatgagccgactgtcttgcaatacgttctgctgcatttttgtcatctggtt

SEQ ID NO: 126385 - DNA, 276 bp, Zea Mays
ccagacatcggaataaaatttcatgcctattaaagtggcttcgaccgaggggtccttcatgtcgtctgcggagaagacggcttcggcctgggccgcaactttaacatggtcacaaccagcattctccaaaattgctgcaacccctcgagcgccagggaaggcaaaaatatcaccacaatcactaaggatctcttcaaaggcttcggcttcttcacctatccaatcaatgactccctcggggtcacctcgaatgaacttttcttcggaagaatatgc

SEQ ID NO: 126386 - DNA, 306 bp, Zea Mays
aattgctcaagaaggtggacaagttccagtggacctcagaagctcaggaagctcttgatgcactgaagaagttcttgaccacaccgccagtgctaaagccgccacgccaagccatgccaaaccagccagcggaagatctgttgttatacatctcctgcacgactcatgtggtgagcaccgcgttattagtcgagcgggcagaagaagggcatgcatatccagtacaccatcccgtctatttcatcagtgaagttctgggaccctctaaaaagaagtatcctccagttcaaaaactattgtacgcag

SEQ ID NO: 126387 - DNA, 338 bp, Zea Mays
catatttttatgtatgctcatcttcataccccaatatttgtttaagacatttcaatttacatgaccttgaccacccttgtttcttaatggtccatgagcgataattttattttgcacatccttgatgatctcgttgtttccttataacttccctcgataatgaatttttacttcaactcttctgtcggaacctcgcttatcttatccttgattgttttcttcatttcgacactttgcgagtcttgccttaactctatccatggattatgcttttcatcattatcacctttacccttatcacctctatatcttaccttgatgtttatcttatatcgacc

SEQ ID NO: 126388 - DNA, 335 bp, Zea Mays
caaaagacacacctttctttgtgagtttgtgcaaaggggcagcgatggagctaaaatcacgcacaaaacgacggtaaaatcctgcaagtccaagaaaactccgaatttgggtgaccgtcgttggtgtaggccaatcctgaatggcttcaaccttgcttctatccacctcaatgccctgcggagtaaccacataaccaagaaacgagacacgttgcgtgcaaaatgtgcacttttccatgttaccaaacaagcgagcagcacacaaagcatcaaaaacagcacgcaaatgttctaaatgctcctctatagacttgttgtaaataaggatatcatcg

SEQ ID NO: 126389 - DNA, 350 bp, Zea Mays
gggcaacgacagatgcgcaactctctatcgatctccttgacgagatatgagatgaggtcgtgatacgctccgcgaaataccagcaagatctactgtggtaccacgatagacaagtgtgaggtaggtcattcaacgtcgacgacctagttttgaggagagtgatggccaccaaggacaagcataagctctcatcaccttgggagggtcctttcattattgcctaggctctacgatcgagggcttactgactcaaggatggcgatgagaatctcctgaacaacgcatggaacatcgaaaacctgaggaaattctatccctaagcgattttccctcctttcctcacatgcaat

SEQ ID NO: 126390 - DNA, 495 bp, Zea Mays
gcctagcccatgcagtgaagtaccgtagtgcttcatatccctcacccagccaatgtcaatctatgaccaaccaaattcataggtctcccccccacatcgctttgccttctcgaggcacccataaccgacaacaacatggaagagggcatatggactatgaggacaacgtgatagccgctagaatagtgttagatcatggtggtagatccaccattgtgccactaacacgtggcgatgaggaactgctagaacttgatgaggaaaaggcggcatcacgtattgacaattaggtcgaagagtctgcttcacacgcgcaagtgtaggcaaagcttgatgatgctctcgggcataaaaacatcggcgagctcaagcagcaaggaagaaggagtaaacaaatggcacatccctaaatagacaacaccttatatagaatccaaaatcaatcaacaatctgaaaaatgtcaccctccaaaactgctcaatcgatgatcaagg

SEQ ID NO: 126391 - DNA, 464 bp, Zea Mays
cgcctttcgaggccagtgccttcgctgtagcctctttgggtcttacaactgtagctatcgtatcagcctctccgcaaactttctcacgtgccatcagagttgattctacaattattctttcaattgcggccaaggtggttccaaaaggacccctgttgtcttggcctctagacatgcttcggtagtcgaggccactctagtactttttctggcactttccctcgtcacgattagaggagtcttcataacagccttcataatcctcccaatccaacgttttttcttagggatatctttggcaggtgattttgtcgtttactttgtagccaccaccgtagggcttctagttgccttgcctttggcatttttgtccttcatcaatatgctagtcagatctgatcctagcggacttaacatatgaaaaggtagggggcgagtcattacctctaggatttccatcatcc

SEQ ID NO: 126392 - DNA, 391 bp, Zea Mays
cggccgtgtgacctctgctacgatgaatgactcttcccatggtggtgacaacttgtgtcgcccctccctcgttagaactcagcggaggaccaagtctcccaactgcaaaggatcggtgccgcacagctttgtcgtggtagcgcctcaaggtctgctggtacctggccgactgaattaccgtgttcaatcgttcctcctccagtacatcaatgtcttccagcctggttgcctctgcctcagctatgctttcaaaggtcagcctaggcgccccgaagattagatcggcaggcagcactgcctctgacccgtacaccatgaagaacgtggtattcccatgcagagctcgactgggctgagttcacaagctccagaccacgtatggcagctctct

SEQ ID NO: 126393 - DNA, 638 bp, Zea Mays
ggcaacttcggcgaggaatcacagccgaggagagggggtttatggcgcgctaaggcctggactagttacgatagggtaaggggaaaactacgaaccaaagcgggggcacagggtagggctgaatcggccagtcaccgcgccggtgtggcgaaccagcgcggccgaactttggagaggccaaattgattaagacaaggcgaaattgagagcaactgaacacgggaacgagttcctcacctcaggacgatgctcagggtggcttggcacgacttctggcggcgtggccacagaactccggcgagtgcgagcggcgagagcagagcgcgagagagggtgagcttgcacgaaatgaggcaggggagcgagtgcgggtgcgggcggtgctcaaaagggatctagggtgcatgggaaggtggtcggggatcttggcgtgcgtgcgtgctggtccacgacggttcacggggaaggcagaatagacagggcggcgccacgacacagtgaggaaaacgagcgcgtggaggaaatggttcatcgtgcttatgaaacacgcctgcgagccagagacggaagaggggcacatgggcgagcaagcgaccagcagcgacaacctagccccactgggcagagggagggcgagg

SEQ ID NO: 126394 - DNA, 297 bp, Zea Mays
gacgaaccaggcttccttcccttctctcaatcagtagaacctccaacctctgtagcagcaccacctccactaatcgtagcagcagcccactcccccggcagcagcacttcttcttccaccgccggatgaacaaacactgcagggctgaaccagggaggacctgcctgacgtcctcgccctccgctgtgctgtaccgcagccggtgtggctgaagtaagctaccctccacctctccccgcggtcgtacactcccgagctcgacccgtcgcaccccgaccgagctcaggccacggcgat

SEQ ID NO: 126395 - DNA, 651 bp, Zea Mays
caattggaacaaaccaatttggtgttaaatcacaaaagttatggactaaggaagttttagagctatttaatattaattttatactgagatataagttctaggggtttatctgttagttctagggacttaagtgcgaagtctccctacggtggagggacaacaggtttaatatgcgaaagtgcatagtctcttttaaaaacaaactcagcgaaggggtattagctcattctagccgatggatcaccaacagacggttcatattagatcttaggttatacccaaccgatatgcactcaacgccactggatcagggatccacggcctgcgaggccaccacgccagcagctaccgccagacgtccgatcgaatctgacgtgtaggatttaattacatgaaggggtattcgggtttctaatccaatccgtttgctacaagatcaacgacaccggtcgcatctccttccatctccttcctctcaacgaacagtgccgccggcgcctcctgcccgtgacgacgctcttgccggtggagccaagctcgaatctactcgatgcaagagaaataggacaggaaagcaaatgttatggcacacttcttaatgaagaatatggcgatgaccatgctgcccacgaactgaagcggtcccatggc

SEQ ID NO: 126396 - DNA, 271 bp, Zea Mays
gcttgccttgtcaaatagttatgttaatgtatcaaacaactttttgacagaattattatggcaatttggaaattgcggtcatcaggtctggaacaaaaaggtgaggtgattgataaagaacctgaactgaaagagaacccttatgaagaaggttctctattggccaacgaagatgtaaaaatgtcagaagtctactcggccgttctttctgtcgacgtgagtcttgtgccttgccaatgaacacacatctagaatgtcataaatgcactct

SEQ ID NO: 126397 - DNA, 644 bp, Zea Mays
gctttcccaactttcagactttgcttaacaaggtaattggccttgaaagcaaaaggaaagagttgtcggatcacaagagaaagtaccaagggtagaccaacaggaatacccgtcaaaacaactcccaaggttctcagttccgctctgggaatcagagtgggaataacaactaccaagcacagcgctctggacaacaaggtcagaggagcaaccaataccagaaccaacagaggaacaacactcagaccggtcaaaggtctagtggtcaacaacagaatcatcaaggaagtgtcgtggacacaccggccaagaacaacaacacaaccaccctagtccaacctaatggttgtttcaagtgtggtgaacttggccactatgctaacaattgcccaaggcgtaatcaacagacaccccaaaagaacagcaaccaaaggactgaccagaacacacctgctcgtggatctgcacagaacaagactccgcagaaccagagtacgggaagagttaatcacgtgatagtagaatcagttcctgaggatgccgatgtggtggatggtatgtttcttattaactccatacctgcattagttttatttgattctagagcatctcactccttcgtaacaaagtcatttgtggaaaac

SEQ ID NO: 126398 - DNA, 319 bp, Zea Mays
attgccacgcaactggccaatctcttcccttgcacgtcgtccttggagcactagtagacgttctcctctgcggtcgccatgcactagagtttcccctctgggatgctgaggtatagggcaacgatgtcctgtccttctccgttgccaccgttgtgctgtcctccaacaccttggccaccacgtcgcttaccaccctcatgtaaaaccgcaacgaccgccgctgccctgtccgcccccttcctatccaccaaatcaactctctctttgccatccttgctgccaacgtttttgcaagggttgcctttctcatctacggggc

SEQ ID NO: 126399 - DNA, 297 bp, Zea Mays
ctcgccggagctccgccgccgccaccgggaagcgcacgtctccatcgtcatcctcttcgtccgtaccttcccgaagcgccccaaggtgagagcgcaccccccatcaatcaagcgagtcttcgccgtgaatgtcgtcaagcatgcccccgccggtcgaccgagcctcctcgccccactctcctctctcaccgcagatcccgtccgcgtacatgctctctcaccgcaatccctgctctctcctcgccaacgcctctcgatccactccatggaaggtttgcccagacgcgctctgattcc

SEQ ID NO: 126400 - DNA, 403 bp, Zea Mays
gctagacgtcgtccgatctggatccaacgctcccaatctaaataccctaaatcaaatctaagccggtcatcgacagatcgacgacgcccatcggctatgacgaaacggtatgcgatcttctaatctgagccgtccgctatggatctaatggcccgaacaccgtcttctccccacggtcatccgaacggccaggagcagagctccacggcgtgctcaccggcgagcacccgttgacggcccagtaccccgaaagccaccccgagcggtgctacatagagaaagagatggcggagatgatgaggtactactcaccggcggtcgagtggtgaagaggcccgcccacgatgtagtgcggcccgacggtaaaattgatgcgccggcgagcaattcaacggcgaggaag

SEQ ID NO: 126401 - DNA, 304 bp, Zea Mays
gtgagccctagttgggcatgatggttagtcagttcaagaggggaactagcgaacggggtttaggcttttctgctaaggatgggagtgtcgtttgttttggtaaggtcggtgagtgcagtggcctgaaaccctcaaagaaacctttagccacccacaaacttgtcaagctcactccacctaaattggcaacccctgctataacccccctcagaaacaagtgtattgtccaaaacctaaccatctcaggaactaacttgacaccctttctgacatctctagtgttccccctccaagagctcctcag

SEQ ID NO: 126402 - DNA, 601 bp, Zea Mays
tgcctgggaggaaggggtatggacatatgaccgagctacgaagacaaacttcagaatgcatgtttggtaccagtactccatgcatgacttaccgacgtatgggctattctgcgcctggtgtgttcacggtaagttcccatgcccagtttgcaaggaagctctcaggttcatttggttgaaaagggtggcaaatattcgtccttcgataaacatcgacaatttctccatcctaaccatccattccgcctagacatcaagaactttacaaaaggtgtcgtagtgacagaccgcccacctgcaatgatgactggtgccgaaattcgtcaacagatagatgggctcgtggccaatacagaaggtggttttgtgggaagtggtgagcagcatatgtgacacataagtctggcttgactcggctcccctattatgacgacctgctccttccacacaacattgacgtgatgcacattgagaagaatgttgttgaggcactgtgggcaacaattatggacattcctgataagtcaaaggataacgtaaaggcaaagtggatctggcaacgttatgttatagaccaaacctagagatgaagccgccaagt

SEQ ID NO: 126403 - DNA, 396 bp, Zea Mays
ggtgaccactatgccctactaacggagcaatcggcttaagtcggcaatgacttaagacggtgcgacatgctcacgcatacttagctcgggttgaccactatgccctactaacggagcaatcgacttaagtcggcaatgacttaagacggtgcgacatgatcacgcttatctaaactcggggtgaccactacgccctactagcggagtagtcggtttaaattgacgctaatttaaatgggcactgcacgtttggcacattcgcaatcacccatcttagggcaacttctgtgccccttgatgaaatttcaaaaaccatcacactgcattttacttctacaaatgtagatactgttgaattctaaacaatggaaaagcaatagtagcattcagtactaa

SEQ ID NO: 126404 - DNA, 287 bp, Zea Mays
gatgaaggaactttatggatgaccaatgaggtttttgatgtgggtgcaaaggtggtgggtgacaaatcctccacccaagcaaacccatcaacctcaagtcatccaaatcttgaagaaaatcatcaaccccaaaggatgccaacggtggtagaagatgaacatgaaagtattgatggtgtagtggctcttgatcaagtagatgatgaggaggaacaaattcaaagacaaccatcagtgcctcatcctcgagttcatcacactattcaaagagatcatccggtggacaa

SEQ ID NO: 126405 - DNA, 396 bp, Zea Mays
cagggtgaatagattgcctcatctggcacaaaccaccagaagacggataggaaagtctgctccagacagactgcaagatcccaggaggttgctgattttgaagacgggactagacagaggcgcttcctggggcgacaccgccaagacgtgaccacactgtctgcttggaaacagctgtggaaaactgagcacgatctggagcctccgggcagcgggacgccctatgcccaagcccacagcacttgaagcatcttgtccttgaacggcagtcacggaccaggtgatttggtgagaaacagttgaagcacctgccggaaagattggtaggtgcagggcgctggaaattggcagccttcaggcgcaaccgcctggaacgccgggactcaacagtcttcc

SEQ ID NO: 126406 - DNA, 552 bp, Zea Mays
aatttgcatcaaacatacaatttatacatgttgagtattaaaatagagtaaaacttaccactcgatccaagatgggtgccacctccacttgggttcctagtctagtggactggtcgtactccgtgtcttcatcgtcagaagaatcaatgtcggcgtagtcatccgttgtccactgctggcgaagcttataatgagtcgcaccctggtaccaagcttggtaccgcatgtagtcactgttgttgtgcaactcatcgttgtcatgcacattcttcgtagccaaatcccattcatcaataaatgccagatgatgttgacgaaagtctgttatcttcttttgcttccgccggtcaaatctgcacacaaacaatatcatataaagaacacaaagttgcgaatgattgatgttgcgaagtcaattggaataattgaatttgtagattgcaaacttacttgtgtagctccttagaagttggaatatcttcaaccggccatatctggttcctaccaaactacctctgaaccctgtgaggtaggtgccactcaacacaccag

SEQ ID NO: 126407 - DNA, 563 bp, Zea Mays
gattaggtggcttccaaattccaatgccttggtccgttccacgacctcgtggttgcatgctaagagggctgagctaaaaataagattgatcgcctccgaatcgagtataccaatgttgtgcgggagaatcggcagccgagctgaagagtcgatgcctggcggataagtcaagcactcttgaagaagaaaatgatgaactgagccacctgctggacgaggctagggagacagtggcgaagatgcgcagggcatgcaagatcacattactgcgctggagctagaattgacaactatgaagacttgtcatgagaagttaaatgtggatacgggggctggtgtggagcgggtgtattcgttgtttgtcgagacctatcgtgatcttaatgctaagatagccccttcgataggtccggcgatgacttgggcacccacttcctcactagatgtaagaggagctagcgagcctcccgtcgataatgatagggctgatgtcttatgcctccctcgtcacttgtgatggtgccgccaacgcacggtcccgcaaagggtgtcaccattttgag

SEQ ID NO: 126408 - DNA, 302 bp, Zea Mays
gtgcgacaaatccgcgcagaagtcgcctaagggtgcagccggaccaagcacaacaagtgcgaaaaaatccgatgtctatcgcgaagactatccgcgcagaagtcgcctaagggtgcagccggactaagcacaacaagtgcaaaaaaacccgaagtctatcgcaaagactccgcgcagaagccgcctaagggcacagccgaactagcacaacaaaagcagaaacgatagcatcaaaccatccctgctaagaacgactataatcacaacagcacagcataaccaaccataccaaacaagggcac

SEQ ID NO: 126409 - DNA, 303 bp, Zea Mays
gaaaagtaataggaaaatcacagtagtgccagtgtaatgagtcacttaaaatatttagtgctaatgctatgaatacattgcatgaacaaaattagtgctgatctgaatataactcactacaatgtattattttaagtgtgtgatttaagtttgtgtaccacagatctcagtataccactaaccaagaaaaacatgtgtgctaccggtatgagttcgaatgatgagacgagaaaattacctcggagagcgccaggaatgatctagggggttgttgtggcatccacgcttgacattttatcggac

SEQ ID NO: 126410 - DNA, 504 bp, Zea Mays
aaggccaaaacaagtttcatcacgcccttcggcacatattgctttgtgcgaatgcccgaaggactcaagaatgtcaggtcaacattttcatggctcaccaaaatcattcacgaagatcagatgggctgcaacgttttcacatatgttgatgacatagtcattgcgatcaaaaacaaagaagatcatctatctgacctcgcggaaacattcgccaacatgcgtgaagccagatttcgcttgaaccaggagaagtgcatatttggagtctgataaggcaagatacttggttaccttgtatcgtacagagggatcgaagcaaacccaagcaaaatccaggctataatagacatggcctgccacaatcaaccaaagatatccaatgtctaacaggaagactagctgcactaaatagattcatctcacgatctaccaagcgaagccttcctttcctaaaaacgctgcatggagccaaggacttcacctggggcctagagcaagttgtgg

SEQ ID NO: 126411 - DNA, 496 bp, Zea Mays
cttaatatcttctctttcgaccaggtcattttcatataaaaccactcttgcatcgaggcccctggatacctcttccgaaacattggaactggataattcacaccagagtgaggcacgaagctgtagcaaccaaaatttttgtgattttattctttcccagtggcctttgcctcgtacgacagttcgtgaatattgcagaaacatcttgcatttggttctaacccctggctcctcatggcccaaataaaaatccccattctgatgatagcctcggggtgagttgatgaaggaatatttcaaaagtcttcaaaacttcaactagcaacttatctaaagggaaccgaagtcccgctttcatgaagcttctgtaaacgactacttcgtcagcttcaggcaaaggggcattgctatctcccccagccctcacaatagaaatatcgtggaagtaccttcccttcattgcatcaatttgactttgtttgatagttgatctccc

SEQ ID NO: 126412 - DNA, 955 bp, Zea Mays
aatgagaactccgcaatggcttgcatgtcgttgggttcttgaaacccagctgcgactatcaatcactctgctagcgactctgtctttctgccggagcaggactctgtgctctctccttcctgcctcgttgaggatatgatgctagcctttgctgttcaggcttcagtggtagtgtcgtagcacagtaaagtcactccatccttcaccgcatttcgacagacagtctccatctccacacgttcagtgtccgttgttccactgcacacatcgagggagaagaggaagagagagatgctggagcctggctgctggtttgatctccttggattctcaaaagggacccggtcgctttttgccctcccagtccggcttttagcgtaaaggtgagaagtccagcccctgttactgttagtggcttagtgccaatccgccaaacaactccagtgcagggagcaagtttgcttccctgtctgtctgtctgtctctctttctttctactgtagtatcttttaacttgctctgatgatcctggagatgagaatctgtgagctacacattattgttcttgtccacatgcaaatcaatggcagtaacttgttggcaagaccaagagactgaatctgctggtagcagacaccgggcacgcatgcagcgcctgtagcctgtttcttgcgccgctctatgcaatgcaatgcaatgctatgctattgcagccacttgtttgttgcgccgttctcggccacagctgatgagctgttattagctgttggctgttgccgggagagagctcgagctgcttgtctggcggccaggagcccataacgaaggtgaaagtgaaaccgtctgtctttgaccggtgagcatgccaggcagtagacgaataggctaaggcacgagcaggttcactgtacaggcagccgccatgcctgatgaatgctcctcgtttataaccccc

SEQ ID NO: 126413 - DNA, 725 bp, Zea Mays
agcctggtgatggatcttggttctccatagtggatcctcttacggggaggggataacgccatggcagggacttgaacttcagggggattcttccatctagttgagcttccagggctgcgatccttgcgtgtgcatcctccagctccaagtgcaccctagagaggtccagggtagcactatccaggtcggtgttaagacctgccaccacaccagctagggtgttgaggcgatctgcatcagctccacctagaacaatgctggtctggctttctccacgaatatgcagaggaagatgcctatacttcgtgttgtgcacctgctgctagtaagtgtggattagggaccatagagtttgcctagcagcattgctgaccaaagaagcgtaggtggatagatgcgtcagagactcatgagctaacagagtcctgaaccctctatcacctgcatccatcaccctgacatgaatgcgagtgatgttgtagcaagcccgaggaggctcgtacactctccttatctcatactggggttggacgtaggttcccaacacatgcagaatatcctacagcaaattagggaagtgccctgtctcgaacatttatgtataatgttcagtgacatgccataaccccacttagtggtcctgctgttcatcattggcttcttcgttgatgttctcctcctcttcttcttcttcgtcgtcttcatcatcatcaccagagtcgtcc

SEQ ID NO: 126414 - DNA, 388 bp, Zea Mays
tgaagctgtaacaaccaaaattattgtggtattgttcctttccagttgccttcgtctcataagacaactcatgaatattgcaaaagcatcttgcatccggttccagtccttggctcctcatggcccagataaaaacccccactttaataagagcttcatgggtaatctgatgaaggtatatctcaaatgtcttcaaaacatcgactagcatcttatgaagcgggaagctaagcccaaccttcatgaagctcctgaagactaccacttcatcgctttctggcagcggaacagtgtcctctcccccaaccctcactatagacacatcatgaaaatatttccccttcatcgattcaatttgtccttgcttgatggtggatttcccaaaaac

SEQ ID NO: 126415 - DNA, 420 bp, Zea Mays
gaccattggcgtgggaactaaacagacactgacgcacaactgcacaggtatatttgagctggaccaaagcaattcaccaaactcaaacatcggctttaatctccaagtggttgctgtatttgacacctctgaagtttcaaacgactcacaaaatttggccgtagccaaatgaggatatcctgcccatgtgaccatcagatctgagcagtgacctcccttctggttgggttaaaacgccattcttcaatgctatcatggttttactgcaaaggttccccatggtttcacaaaaggtaccatcacctaaagcacacacttgagtgagactgtccttacagaccaaacacaaagcgaccaaaatgtcacagtgccagtcagaagtccagttcacctgaatatgctgcttagttactggtgcac

SEQ ID NO: 126416 - DNA, 598 bp, Zea Mays
gtgctctggcacaaaatatactaagactcaggctaaccctgagtggaccgcgggttggaatccagaaagcccgagggctcttttgtaaagctgtcagccgaatggttatcgggcgacctgagctgcacgatctgctgtcaatgctccagattagatctatattaaatcgaaccggtatgcgatctggctcattggatcgacgataaagggctatgattcaatctacgcccgatccgatcacgccccctcatcaataatccaacggctgggatgagcccaagccgaagcggtaccctatctctaatctacaccatccatcaaaatctgacggcgctcgttcacccccccatcagaaaacaggcgcacggcggcgtcgcccgcctacacggtggtggccatggccggggatggccagattagtattccgggccacaagctttgatccaattcgtgttgtgcgatgcgtgaacgaaggcgagagcgggtgactagttcataccggcgattgaggggcgagcgaggtaggtccacggcgcgggcggagtcgcggcgggttgcgtactccgacgaggaattggctcaccaccgcaggtctccc

SEQ ID NO: 126417 - DNA, 321 bp, Zea Mays
gtcattgtgggcaccgaaggcctagcttcggtttcagcttgaacttgtgtagcttcggtttctgtttgcccactttcggtttcggtctgcgatttggcttcattcggagtgactttctttgcaggaccatggcttagtgcctttgtagtctctagtacagcatctagcacgttagccattctgctcctcttgggagttgcggcagaagttttttgcacctttggcaaacctgccattctcaatggactcaggatttctggtatttttgtcactttttccacctgtggctctttggccttattatcttcagccttggctggc

SEQ ID NO: 126418 - DNA, 412 bp, Zea Mays
gacgcggagaacaagttcaagccaaagatcaagctggtgttggacgtggttgcctgataacacaagcaggacctttttggtgagaggctggtccatactttcatggatcgtcgtctccatccgctcgcggcccgctagaggaccatgtggcagtacaccggggataacgactctgaccgccattcggtcaaaaatctgacgagggaggagcttatggcccacatccttgctatcacaacggggttacattggacttctttgatgagagtgtcccacaaccgttcaaccaagcatggttgagtgacctggtaagttccctttaacctgcttcctctcctcttttgtttggatctcaccaatgagtgcctttgtcaggggctttgtagcatcaagctttcctgcctccctcttc

SEQ ID NO: 126419 - DNA, 603 bp, Zea Mays
ctagggttacacgtgacggagaagaagccgaaactgctgaaaccgctccgatttccgaagtgatgaaacagtcggggctgatagtgccggaggatgtttttgacgaaggtgcatctaccgctgaagctgagcaggttggtgaggttggtgctgaggaagatgaatctgaagatgattatagtgtcgtgccatctaaacccagtcacctggagtttgggaggtcctccgttaccgaagatcatatgcctaagttggtgaagttaggctatttcagtgaggccaaaaaggagctaattcgttttggcggagaggaaattactccgaagccggaaaaggatgaggtggtagtctttaaaagcttctttaaggcaggattaagatttcctttgaatgagatgattgctgatgttttgaagaagtttgggatttatcttcatcaactaactcctaacgccatcgttaggcttagcgtctacatccgggccctccgaagccagggggtagaaccgtttgccgaaggcttctgccgagtacataagcttcattatcaaacaaaagctagaggagataggttgcacgaaaacttcggctgctacaattttg

SEQ ID NO: 126420 - DNA, 374 bp, Zea Mays
cgatatcccttatggtcgggggagtatctgaggaagacacaacgagtggagtgggtgctagcttatgaggagtggaggccagattagggtagcaagcgcacccgaagacacaaagatggtcatatgaggggtggatgtcgaaaagggcgaagtaaggagtggggtgggaaaccgccttggcgggaagacggttgaggaggtaggtggcggtgccgacgacctcaacccagtaatgagcgggaaaggaatcctgaaaaagtagagagtgcacgccatcattcatcatctgaatcatatgctcagccctgccgttctgaggagatgtgtagggaaatgacatgcggaggtggatgccgcgagagaggaagaagtga

SEQ ID NO: 126421 - DNA, 354 bp, Zea Mays
aggttggggctacacggtcgcaaagtgctactgattcatcgtgcactgctaatttgggaagagatggaaaggatttcgcgaatttgggcttcaaccgagttcactagtgaggtggtgagtacctcgtcgtgggtagcggagctatttaaaggcgcggtggtccggctaacgatccacggccgcggattacatcgttcgtgcatggttaccacgtaaagaagaggcacagtgagggaggagcgaggcatgagtgacaccacgacggaaatgaccgagccacggcgaccgccggtggaatatctctagccacgctcggctaggttcgtgggatggtgccacgtctgaagttatctc

SEQ ID NO: 126422 - DNA, 283 bp, Zea Mays
ataaaagcatcaccgagacacatacagtatgccagctgactaactgggttggagcctagcttcgagctgagcatacccaccaccagttggagctttcttgagagagcatttgagagttcgagcactagctagcttgtaggggatgaagcaagcaaggcgtgggagtaacaagctgaagcaatggagcagagcggcgccggcgctgtggctcctgctgcctcttctagttttgatggtgctcaagacaaatctcctgccagtgcttgcacgatgtaagtctcac

SEQ ID NO: 126423 - DNA, 283 bp, Zea Mays
tgctagccacttttctgattaatttccttgcttgcttctgctgctccttgggctggatctgggcgccgtcgcctctggtattggcagcccacaaaagcatcagtaacatttctcccctccacaagaaacagctcgtctgtgagcttaacaaaagggtacttctgtgtgaaatcttccaattgttcccaagaggcatctgatgctggtcgacctacccattggactaatagttcccaaattcctctattcagccgagccttgaggaccttgtctggtgtaggga

SEQ ID NO: 126424 - DNA, 493 bp, Zea Mays
aagatcgaaaccacttctctacttcctcgacatcctcgtcattaatggcagggcagacgatgactttgcctccgatgacaaacccacctaagcgagagaagacccccaacaacgcgatgcgcgtgaatgctagaatcgttgtcacaacatccagtgccaccacatcaccgacaaacgagactcgactcaactagtctcccgtgacaaagaatccaaggctggtgagaccccaaatgacaaggagtttcgccgatgaaggaatgtctggcgataggaccactgcaacattcaagagtctgtacgcggacaagaggtcgccgagcatggccacgggtacacgcatggacaacaacccatcctacacaacttgatgcttgtctttgctcggctcttgcagaccccaagccaagctagaggcatgctcgctcatattgccaatggcatcaccaactcgccagaaggggacgtttatcgacaaatccttactcaggcg

SEQ ID NO: 126425 - DNA, 523 bp, Zea Mays
ccttcaattttggagagttacctcttgaagacactgccttccttcaagaagctggatgagtacaaatcaataaatttctgttccctgacccatcatattgtctctgcatttttgctgcatttaaatttcaatcacattcatgcatatcaacaatagtgtattcaatatttggctttttcgttttgtacatgcagataatggtacccatgctacgcgtaggacattggaccttgtatgttgttaatttttagattggacacatacatgtgttagattcccacccatataggccagaacttggtgggactacctggaagacttaccattgtacacctatggatatgggtgacatgaagatttcatgagccaggttaataatgagtaggctcaatctagccatacaaaatgttcgaccaagatcatccctccctgccttttggaagtaatctattgaactccccatgaactgcctaacaatgaaagtcgggtctaatgattgtggatttttttgttatgagatata

SEQ ID NO: 126426 - DNA, 376 bp, Zea Mays
cgcacccggaggtagaatccatgatttgatctatacgtggaagtggatacgggtccttgggacaggccttattcaggctggtgtagtcgatgcacatccgaagcttcccattcgccttggggacgatgactgggttggccagccacactgggtgatgaacctcttcgatgaagccagcgtctaacatcttccgaacctccttttggatgacgtcctgccgttcgacagactgccggcgaggtttctgactcaccggcctagcgtcggggttgatcttcagatggtgctcgatcacctccctggggatcccaggcatctgcgacggctcccatgcgaacacgtcggcatttgcctggaggaaggcgacgagcgcgag

SEQ ID NO: 126427 - DNA, 384 bp, Zea Mays
gaggacctcaaggaagacctggagaaggtgctcgaccgggagcgggaggtgactcgggaggagaagaggctggtcaagaagaaagagcacttggaccagaaggaggcggttaccacggaattccatgagtagctgaaagcttataatgcgatgctggagaagcagcaggatgagcagaccgcgaccgaggcagctctgcaaaaactacggcaggagcttgatgacagtgctagcaacctttcttttgccgaggaaaacctgaaggcaaaggatgcctccctggaggagcgggcgacgaatctcgttcggcaggagaaggacctcgcctggagggaggagatgtgggaaaggcgggaaaagttgctggccgagcacgagctcgag

SEQ ID NO: 126428 - DNA, 604 bp, Zea Mays
gtccttttgcacttgcttctgcgagtcctatattcagacacattcgacctctagacgatctcaaatgactctggatcttaaggacgggcatgttttgtttggtccaacgagatagcctcatcgtctcatctcacctcacgcaatgtttttcctcttccttttgttttgttccattaattcattgttgttggagaatggagacggcgagacgacgtggtcacctatgctgacatgcatgcatgtgcggctcccgtgctcatgcctgagcccaacaacgcggcagccatagctagcaagcacgcacacgccggcgggccggggcagcacctcgtcgtctgcctttcaactcgtcatcctcgtcgcagcactacctcctgcctcccgcaaacacacagggatctgcggcgatgcatgccagcagctccaatcgacgacgatcgtcgtcgtcgtcgccttccattccaaccaccgaagcgacactatagagtgcacttttcgtggtgcgccatcgtcagcctccaacgcgtctagcgatcgcagaaaatggagggttcagatttcagaacagcagaaaccacatgacctgtgcatgcgtctagatctg

SEQ ID NO: 126429 - DNA, 572 bp, Zea Mays
cggagaaccaaatataggttgccaaaagattacaatatttctctcagaccattgttgtttatgtaagaagtgatagaaacaatagtaacttacttatcaaagcatggtgatgcttaatcacaaagtttctaatcatgctttcatatcagaataatatagagcaacatcagcgttaaaatccaatattaacatgacattgcttaatcacacttaaataggtagaaaatattggaggaaactaaattaaggtaaatatgtggcactgaataaatggtatctggttaacaaggatgaattggcaatatctaacgtatcaatgcaaaattcaattagtggtgtagtatgatggtcaaggaacaaaatgaggataacatcccgaatgcaatagggtaaattggggttatgtcgaagcaagccaaagaagagaagctatcttcatacactctaatggttggtacctgcaaaatcagtttcataaagacagccatcaattacagaaatatggtatcaatttcagcacaatagactatacattttgtttttagaggaacctggtatgcattctcctattt

SEQ ID NO: 126430 - DNA, 1014 bp, Zea Mays
caaatacaggaacaatgaggaacaccaaacggtggcaaaacagtaaataaactacacaacaacctccataggcgatagactgataaaagaataggagagaaagactcttggcccctgccatctcccacaactccaatttcttctccagctttcctaatggtcgaagcaacatcaggaatgagcatctcagaaacgcagtcgttcttgtggttccaaagtgtccagaaccccacaatgataagggaattgagcccttccacaacaatgccctgcaactgatcagatatctttttccaccaatccatagtgctcctatcgccaggcttaggagtgaggccctgcatattgacgtgcccaagccacctccaccataattgtctaaaaaacacaccccactaacaagtgatcaatatcttcaaattcttggtcacaaagagggcaacattcagggtgtgggagtccccgtttctgcagcctctcaacaatccaacaccttttgtgagccacaagccacatgaaaaatttacatttcggaggagctcacgaatgacaaattctgtcacaaggctcaaactgagtagatcccaaaaggagtgattatcctctttttccagctgtagcaccactgaactcagggcatcccaaagagtgaggaactctgcaataactccaacagataaactatcccgggtatctgaaatccatctcttgtccatgagggcctcttgcacatttttgctaatggcaatgtgtttaggaaccacctcaaacaacctaggagccaggtccttcacacataacccatgcagccaacagttcatccaaaataaggttgaagcaccatttccaatttctgtcatcatagccacaaagaagaatgccctaactttatcacaaaactacagaggaagagaggactaaggtctcatagggtcactcttggccaaccataaccatctcattcgaagggctcagcctaacttctttaaactaaaaatgcacagccctccaaac

SEQ ID NO: 126431 - DNA, 643 bp, Zea Mays
ctgggcggtctcatccggcgggattcgggggtggagctctgcctcgccgtcgtgcgcagactgcctgtggtgagggaggaaagccgggaccgttgactcctcaatctacggtggagattggtctggggtaccgcttctggttgcggtgatctttaccgtcgatcgaccgatggagggattagggccgatcgtggtatggcttatcgtgggccatgggatcttgggtgtgtggccaagattgggagtgggcaatgtagatcgtggttgttggatcgcttatgtgctgtgcagatgagatcctagtgtaaccctgcatctcttctaatcggcgccatcggatccgtatcgtgcggtcctgattagaagccacatagtgtgtcctcctctgttgatctcggccataaatctagcatcgggtggctgatatggaataccggttcatttaaaggccaaacagatctgtgccatccggatctaatctaacgaccagaacggatcgataccccttcgctacgtcacatttgctaaagagtccctgtgcttaattgaaataaacatgcggtccacatagctgagtcctgagtcttagaattgtttatgaaatagaccctgcatttcctgaattttgacacgctgtccaaaa

SEQ ID NO: 126432 - DNA, 396 bp, Zea Mays
aggttgtgctagctgccaccgttgttgttgttcttgctgtttgtcggcaccttctgtattgcgtggtgagaatttgtaagaacttgcttaaccagtttgaaaatgagagattacaacaatgattcctagtagtttataggagcaaagatatttttattgttttcttgtctttactaaacatggcaagtgatatggagatttttgagccagccgaacattatattcaaggcatcattcgacacttgccttaatataccggtaaattcgatcctcatgcatacattgattgggagctaaaggtggataaggaatttgataagcatgatctatctcaaaaacaaaagatttatattgcctctaatttgttaactgagcacgcattgatggaatggaaat

SEQ ID NO: 126433 - DNA, 506 bp, Zea Mays
ggaggagctccggcgagcacttacgctggccgattggggctatgactggcgctctccgtcgactaacacctaattcataccttaatcaatgtttcccctaacctaatttcaccagtcgcgcactaaaactctctggccacggcggccgtgatcatggcggctatactgtcgtgttcccggcgaccagaggacccctagtccaattggacggtccagtaagcatcgcagacatgtgagagagcttaaacgaggaaaagggagggttggactgaccggaaaaaggctggcgacggtgaagctcgtttcacggtggcggagaatgattttgggggaaattggaaattcgcgcgtgctggtggacgattgagggtgggagcgggtgctacagcttcacaactacatggcgcagctacgggcgaggtcaatttatagtgctagcgggcggtggccgcgaatttcgagcaagacgcgcggcggccggataggaagaacactggtgcagcggc

SEQ ID NO: 126434 - DNA, 420 bp, Zea Mays
gggtttcgtgtcagggactccaagttatctctggcccaagttgggtctgtcagagagggtagaaccgaggcagaacttgtgttttttcttgtccaaatgtggagtcccaatgccatcttctgataggggttaggttagttaatttgacacaactttgtcaattggagtgactggatttaaggtcaatttcgtgatggaacacggggatgttctaattcgggtttgttttttcagaaaatagtgtgatgaacttgatcattgtttctcttacttctgtagcttgtttagggaaacttgaacgaacatttttggtgatgttttgtagactaacttgtaggcataaatcagtgtgttacctatttatgtcactagttcagataaggatagtcagctcaatttgtttttaccatttgattttcc

SEQ ID NO: 126435 - DNA, 607 bp, Zea Mays
gtaaatttctgataggacaagtgaagatttcagcgtataaattcttcatatctacggctttgccaaaacacagaatctcactcttgtgaaagttaattttgaggcccgacatctgctcaaaaaggaccaaaacaaatttcaaattccttgcatacatcgggttatcctgaagaaggaagatagtgtcatctgcatattgtaaacaagcacaaccattttcaatgatgtgaggaacaaggcccaccaaaagaccaacctcctgggcccttttaatcatgcaagaaagaccatccgcaacaatgttgaagagcaacggagataagggatctccctgtcttacccccttatgagtagagaagaaggggccagttagattgttagtcctaatggccaccttgcccccactaactgttttcatcacccaatctccccatttctcgccaaatccttttatctcaagcattttatataagaaatgccaattgactttgtcatacgccttttcaaaatcaattttcagaatgatcccatcttgctttttcttttttacttcatgaataatctcatgaagggccacaactccatccagaatatatcttcctttaat

SEQ ID NO: 126436 - DNA, 650 bp, Zea Mays
ttggaaagtatgggttatggccttcagtagttgctctaggtggcccctcgttgtcctcttagcctcaagtctctctttggcttctttggtggtgcggcaatctctagttggatggtcaacgtcctcgccgtgaaaacgcagtaggacctatgttcacgcatggggtcgcggtcacgtcccctgcctctaggtgctctaccacctctactcagttgttgattgtggttgtagttgtgagggggtcctcaaattgttgctgttggttgatgttgtggacttgctggtttggaagtggaggcagctaacctcgggaccatggtttcgagtttattgtgtgtgagggctccattggtttgcattgtgcctcaaccttatggtaatggaggtctttggatcttgcatatttctcaaatagacgatatagctcttggagggttgtgggggtttttgggtgcaatgactatacaaatggcccatgtggaggccactaatggcatagtggatatggcgattctgtctttgaatgatggcaactatgatttgagtgacaagaatttgttgtagtactcatggaggcattccttttccaactgttgacacaatggcggctctgcgagagcatctatttgcagcatgtacccatggaagtt

SEQ ID NO: 126437 - DNA, 940 bp, Zea Mays
tccgcggtgaccggcgtggcacccttgggagcgttatccatgtgctgtacaccggtgaccgccacggttacagccaccgtgctcttctccgtctccggccgccagcgcatccggctcgaattgaccgtcgccgctgtcgctccctataaattgagcccgcgaatagcttcgcaatatcatcactcgctcagtcaccgctaaccgctagccgcccctcgccagagcttgcgaattttggattcgccccaaatctctttccgccgccgcgaatcacaccctgtcgtggccagcttttcccaggtccgctcattccctccttgtccctgttctagcatccttacttgatgatgatgctccccgatcccttcaattgaaccgaaccgccagggatcgccgggaacacgcaccattttcttcctcatccgcggttcacgtgggcagaaccggatagttgacttaatgagaaattaggttgggggaaacagttgggaagggttcaatccggggtacgtcgctcgggagcgtcggtccttgcgtaaatcgaccggtgcgtgggctcgccggagctctgcaacgccgctcgacgtcgtggacttttccctgcgaagaaataggaatcggaggtcttttctgcaaacagtcagcgacccagaacaacagtgaccaaactcacttctatttagtccaaaccccgagtccctttgcgcaaaacagccagcgcgcgggcgcgggcgcgcgcttgggcgcacttctgccctaactgggccgacgcaggcttgtttgagcccaagactgtttaaagtttttctttttctttttcagcagaactttgaaaaagtgtagaaaatggtaggaaaatcctaaaaatatgagaccaattttcttagaaccctaatttcctgtagtaattaataaaaataatttcatgatttttaggtta

SEQ ID NO: 126438 - DNA, 533 bp, Zea Mays
gtggtcgtatggtcgagccgacggcaggcctcgaggctcctcgaatgtggaggcatgctaaagaagaagccggtccagcatgggttgctggtcacttgcggctaccaccgctgctacggaggctcgagggtcaggagggtcggcacccccgatgccccgccacaatacacggtggtcgtcgcgctggaatgccatcgtcatggcctctaggtcccaagtgatgggccctaaggtccgcaggtagtcgacgccgaggatgaagtcgaagcaacccaagtcgaggccgacgcacgtgatggagaagtgctcgttctcgatggagatgggcacatcgcgggccaccccggcgcagcgaaggttgtcaccatttgcgacagtgaccctgaggtgctcccctgcggtgggtaccagccccaaacgacgcatggtggcactctggaggaagttatgcgtggagccggtgtccagcagagccataagtcgctcccccttgaccatcaccggaagcaccatggagctctctgtgcaaatgc

SEQ ID NO: 126439 - DNA, 570 bp, Zea Mays
gcggacagcttcttgcagtcacgttcctctcccttctttttctctcttacttgtggaccccacacgtcaaggctattttcttctccatcgttgcttccagaatccagaccacacgaacgcgccgccgctcgcatggactcgtcaagcaccacgctggctcatccctgcgtctcctcgactgctcgccttacgtggagcgccttcggctaccgtttctcctcttctctccccactcacgtcctcattcaagcgaccgttcctctgcagtaacaccgccaccgcgccattattggccaatgaagctctaccggcgtctgttacaccttcccacacctctacaaaactcgaccgtgcccccatagagccagtccccatccgtcccaagcccactccgagctccccagccgcacctccatcgaactccctcctctgtggcttggtcctcgccgttcaccgctgaccagagccgctcgccgctagagccgttcaccgtcgaccggaactccgaagccgacactgcgtcccaacgaccttcccccgacacccgactacctgccccattcgtcctcg

SEQ ID NO: 126440 - DNA, 482 bp, Zea Mays
gcctatacaaaagttaccataatggatcagatcttaacggaaaatgtttgtgaatatctatctagcttctagagttctgttaagccttcatttatcttctaactaggcagaggattgtctcatttaccctttagctgagagcatgtccatttcaccttcatcgcttggagcatgtccatttcaccttcatcacattagtaatcatgtactatcaggacataatcccttctctacaaaggaaaggcttggcacaccattgttttagttattatgatctgaacaaaccattttatatatggagctcatggcaatggcagccccgcaacacgacgatggagcccgtagtgcactcaggctcgcgcttctttgcaacaatgcattgttctccataagggctcccgtcactattgcgttcacgttgtccatcgcaattggaggctcgttaatttgtgtttcgtcgcaacgcacgggcacatacctag

SEQ ID NO: 126441 - DNA, 602 bp, Zea Mays
aaagaaaatacatgtacggtggtggttatactgcagaggttttggcctcggcgggaccgggaacatggagaatcaccggcacgccgccactgggttgtgtgacctgcaacagtacttctgacaagaggacaggtcaatgctttgggaggaggccaaccggcaagcgccccagccatgaatgaatcccatgacctggcctcggggctggagctcgccccggaacagcacgagcggccagcacgggagcctcacgtgcccgactgcgtgcctgcgcgcctctttctttctgatgaatttcgccttatccgatcgttggttgcccatgcccggtttgaacatttgctgtacccccacgtcgtctacctgggtcctgggttcattcacagcatgcatgctgctccattgctctggtgcttagagacacccacatgtcagtgatgaagaaaataagcgggcctgtttttgccggatctgacgttgctgaagcagtcgactcgatgtttattttgtgcagttccgtactttcctgttaatcatgacgcacggacggcgcagctcttcagtcaagcctagtgtaccagtcacaccgtcccattctccgc

SEQ ID NO: 126442 - DNA, 345 bp, Zea Mays
ctgtaagctctcttaaagatgggggcggttctaggaagaagctctatggcaaactcaacttttcgctcgggtggcatgcctggtaagtcctttgggaacacatctgggaactcgtacaccactttgataatcttgagtggatctgcttcactgctatcgatagtcatctgataacaactccctttccttggctcgggtgggactaactcggtcaccacttcctctcctattgggtacataaacttaattgtcctcttatcataactgataactgcccgatacttatctagccagtttatccctgagtactcattactatgaggttagcgggaaactctatccccc

SEQ ID NO: 126443 - DNA, 499 bp, Zea Mays
gcgacggctgtggacaacagttcggcggcggctgaggaccgagacacaccagcggtagaggagcggggaacagcggcgcaggggagcgggccaagccagcggtagaggagcaggccacgccgtcgcagggagcgcgcctcgtcggttgcgtggagagctggtcacgccgtcgggggtgtgtgtgcggactgaggggcaccggcgggtggtggcgaggcttgccgtagggatcgggcacaacggcgtgtgggacgagatatctgggaagtggggagcgaggtgggtgtgggatgcaggcgcgagatgaagaaaggttgttggcgagggagaatacgtccgctgtgggaaggacatatatttacgtcctgtgtgttgcactcctatacgaatttcatttaaatttataaaatactaactctcttggaagctatattatagccttaactcctatatttaaaaataggacctagtttaagctctctcttggagttgctcttag

SEQ ID NO: 126444 - DNA, 336 bp, Zea Mays
ggcaatctttaatgaaatgccctgcttttccacagttatagcaaggatatttggtgtcagtgggagcaggcaaacggggagcttggttatttgtaggtaatgattggcgttgcatattggtgggacgaatgtagataggagttttagcagggtaagtggctgaacggtaaggagtgttggtagagccagctgttctgatgattaccttttgatgcttggctggatcttgggaagatccagttccagatcctttccacaaccttttagcattttgatgcacccgccccttatcttctactgcaattgccacactgactgctctattaaatgtcaagt

SEQ ID NO: 126445 - DNA, 607 bp, Zea Mays
aaagaaatatactagaagtttaagaatcagctatagttctaacttctaagtagtcatagtatctttatttttctttatttgtaatataaacggaatatgtgatatgaaatgggtaacttgatcatgaaatgggaacttgatctaggtgaatctagttagatatggcgatgcacatttgtaaaatatagtgcgtcgaaccttacctttgccacgattctcgtgcctccctaccgtgtgcgctttcccttcacaccgaccatcttctctgagacacctttgtggctcttgatcatgtcatgaacccggacagtttgtgttttccagcaccgtaattgtctccatgaagatcgaggccttgtctccctccccatccaggatctctgtcagcatgctcaccactatcgaccccagcacctctgcgggtgccatcgctggctctctcatcctttcacatatcaccgccaccggcccccttctactgactaggttgccgactctgacgcctcgttccataccacccgtgagcctagagttgtctctttcctcatcctcctagccccacctttctgtcctccatcattaccagtaatggattgactctacatgt

SEQ ID NO: 126446 - DNA, 822 bp, Zea Mays
caatgtgtggtattttcatgctccttccagaacaacatgcaattgttctcgcaagcatcaatcttttggtagttcatgccaagaccagctacgagcttcttgcaatggtacaagttcttcggcatgttatgattcggtgggctgatatcaataatcagtttcacaatatcgttgaaacaattgttggagaaggtgtactttgacttcatcgccataagacgtgttaccacctgcagtatgctcacactggttccttcatgcactttagcctctgaggcttcaagaagcttgtagaactctctcacatcctctggaaaagcttgattattctatagttctgggtactcatttctaatatcttccaacatctctttcattcggtctacatcctggtccccatccgactcaatagtatggtccacctctccatgatcatgccataccagatagttcggcataaagccatgtttgaaaacatgatacaagatctccacttttttcaaccgaaccaagttctgacattttatacatgggcacttcgctaaacgagcatcaccagcaaatgcaagtgccacgaattcatctgcaactctcacccatgcatcagagtgaccatgagtgacattgtcgaatccatcatacatcgcccttcttcgatcgtcactcatattcaaagctaaatatacaacacatatttaacaatatatatacacgtattcaaagctaaagaatgtaacaataacagcaagtcgacaaggtatatgcatgaaattaaactctcaactatattccaagtagtatcaacaggatacaaggtaacga

SEQ ID NO: 126447 - DNA, 604 bp, Zea Mays
gagaaatataccatcagctcaaaaatagtgtggttagttgacacgagtattctgtattcttctcaactcaaatactgctaattgctcgaccacgtgcacgtaacaaaaaaatcgtgaaacgcgcgcgtgcacaagctcaattaacatatcgagacgacacacagcagcaaacaaacagaaatgtatacaaaacagaggaaaattcgatcgagcatctataaaaaaacgtttgtctctctccgtcatgctcgtgcatgcatgaccgtggtgcgcccgcgaccgaggcgcagggagagaaaaaaaaccaaacgtggattgtactctgctgctcgtaacagcgcaggaaaaccagcacggaatagcaccggcacgtcgacgaccacagtccacagcgtggtgggcggaacggaggtcacacatcgcgtatcatccagcgccgtacgtatagtccggccggcggctgcactgcactgaacgccgccaccccccgcccgcctttttgaccgcagaaaacgcgcacccacatttggccgcacaagtcccgccacgcatggttgggcatgcacgtccgtttgcccagtcccagtcccaggcaagagaagcg

SEQ ID NO: 126448 - DNA, 496 bp, Zea Mays
caaggagggaaagaccaacttcaactgtatggtgatgctttccttcagctaacccattttgttggtgtttgtaaggacacaatacatgatgggcaacgccactacccatctcgctcgaccccaacctcttctaaaagggtccactcctgccttagcatgtaaaatgatggggagaggctcatgctcaagggacaacaaaccttgtaatcaaacactagaacacccattcacacttgtgcaccagatacttgggaactcatccctctctcgccctagtacagactcagacaaggtaacacgagcaacacaaactggacatagggacattctactcaaactagtataaatccttgtgttctattggcatatcattcgcttctaaacacacaaatcatgataatcactagatattggtatgaaacatcacatattgtgttgagcgtatggtgcgactcatcgtcataccagtccaacatccactaaaacctctcgtcac

SEQ ID NO: 126449 - DNA, 585 bp, Zea Mays
ccgccgcgctccggcgagcactgtaccggccaaacggggctacgaccggcgctcctgagcgacatacaccggattaaacccctaaggagtatttcccctcactcaattgcgcgaacgaccaactactgagctctggccacggtgaccaagagcatggcggacggatgagtgtgttcccgtcgattcatggcggtctaattcgatttaacgggtcggtgagcatcaagagcaaacaaggatgttgaaacaaggaaaccgagggcaagattggacctggggagggctggccacggcgaggttgagctgtgcggtgttcctgagcgttttgggagaaatctcgaattgaggctttctggtggaggattggagatgcagaagggtgcgctagatgctcgagtacataacgaagctgacggtgcactggatttatagtctccgggggcggtggccggtgaattttgaggacgcgcggcggccggaaagggagaagaaggcgctggcaagctttccgcgcggcggtttccggtgagggcacggggtcgccgcttaaccagaggtcgccacctcggtaactctttgccacgg

SEQ ID NO: 126450 - DNA, 350 bp, Zea Mays
atgatagctgcacaggcatgcatatgccatgagcatgtgcagtgtttaccgttgcggcatgggcagcatcagtggctcacatgcttgagacggagagatggtccgtgtcatggtatggcttggcttgccactcattcgttggtcggtccgtgcccagttgttaaatggcctggtgctggtgaacccatgtgcaagtcctttctcttggtggctgcaatggccgcctagcatcgttgccttgttgggtatcagcattggaacgctaggacgattcctgcgcaacgtgcccggctagttttgggcctctttggtacagttttttttttcttctgaaaatattttttttttga

SEQ ID NO: 126451 - DNA, 325 bp, Zea Mays
tggaggagggctccttgggggcgggtgctgaggtattcttggggccatccaccgagttggagtaagcagatcctgatggcttcagctggggcagttgttcttgaagtgactgagatctccgcagtaccaacacgcattcgctggtggttggttgcttgcaactgagggggcatgaaaggagctctgactctgctggctaaaccgtgacggagtgggtccaactggcctaatgaagcttggtcccttgggtggaaatccaaaggatcgagttttctggtgccggtcttgctgctgagctaggaggacttggaatttcctcttgaga

SEQ ID NO: 126452 - DNA, 523 bp, Zea Mays
gttgactgtgggggagatggagaaagcttacaggggaagtaaaaggtaggtagcccgaggctgtgtgacgtttcctttagaaacctccattgctggctccccatcctcttcctgcttcatggtttcacctgctgccttctccttcctcgattgccgcagctgctatgggaataccatctttctacaaatgggtcgtcagcaagtacccaagcatcatctcccctgtgaaggacgaaccagaggagtgccctgatggcatcatctacgacaacctctacctcgacatgaattgcatcatccattgctgcttccacccacaggaccagctaacgcatgcagacatagatgtatccacacacctcaatccatgcgaatctggacggtataaatgtatgtgttgactgactgacacaccgttgcaggtgcgccctccgacgacggccaatgaggtgttcgagtccatgttcgagtacatggaccgcttgttccgcatcgtcaggccaacaagtctgctgtacttggc

SEQ ID NO: 126453 - DNA, 638 bp, Zea Mays
ggaagggcaaaaatcccgccgttggcggacgcgtgaattggtgggcgctgggcgttggtgtgccaccgtggtgaggccctgagttgtggggtagctagacgaagcttcgaccagcgcagagggacttctcgaggacaggaattgctcgtcgtcgccagggaaccgccgcgggctgcgcgaccgcctagtcagtgccgccaccgttccaaaccaaggtgttaagtccacccttcagttcgtctttccagtctcgatgtgtagcgcgtttcaattcgtaatccgggaaacaggggcgcgaattggaggtcttggtcatggcgcgccaccgtggcctcactgtttgtcaccggtgttgaccgtgggaggcttaggagagattcagtgcgcgatgtcgaacgtgggccgtcggatgaggcacggacggtcccgattagaagccaggagtaccccttcgcgatagtcgatctgcgacgtccgtttctgatcgggcgagcgcgattcgatctggttactttaaatccaatgcgttcgctgatgatcggacgacggagttcggataccggttcatcatggcttagatctaatctgcagcgtccatttgcgatcgtgcggccgagattacaatataccctttcggc

SEQ ID NO: 126454 - DNA, 359 bp, Zea Mays
agaaggtttccctaatagtttcaattcactccactcaccaacctttcgaaagcaagcaacattcccatccttagcagcaaagcctaacctcggtctgccagtttccctcttaaattggttaaccatcatgcccatctggggctcactgctagatacctagctcaagactaactgaaggtatgtgttttcttccttgatacaggtcttgtcgtgtttgcaggactcaaaagcagaccaccaaccctcacaaagttcacactacgtaggtgtaggggcactcacggagctagcattttcaagcaaggttatcctaacgtctctctctgccagctcagtctacaagccaggataaactgtac

SEQ ID NO: 126455 - DNA, 847 bp, Zea Mays
gcgagcgttccctgaggtactaccgaattccttttctagagtgtccccaaattccttgagaagatcatcaaggctagcgagggacatatcctcgatatcgggcaaattttctatcttggcgggggctggtgatgggggagctttcttccttctttccgtttggcatccttggctcgtggttttctttcggattttctttgtgggggcgatcttcttaagcttcttatcatagtccatctttaaggttcgataagcctcacgggtgttggcctcctcgccttctgctatgtcgagacactcttggagagatgccttttccttcttaagctctttgacttgctgctctaggctttccacccgggagtttaggagggtgcagtgggaggagagatcatcgtagtgggtatcgagggtgtggaggtacccggccatgtagacaatggtggggtcatcctcggtggggtctctccctgagagagcctgaagtcttttcctccaggtgggggtatttttattggtgggtgggaaataacgaagaggggtttcaaagatctctctgctgtagttttggcatagttgtttgagggcctttcgggcaacactttggcaagtgtctgggaagcgatgcccgatgaaggtaacttggaaggggggtggtttgggtagcttcggctttctcccaggtagactgccatagagcatttctccattccattttcgcggtattccttctagacatattcgggcttcttgcggatccccatgcgcagtccgcaactccgtagaaggtgaggaaagccttcctcctctgagcagtatgatgtcctaatgacccaagagttttcca

SEQ ID NO: 126456 - DNA, 719 bp, Zea Mays
caacgataaacaagaggacaactttgttggaatgtggcctgtcacagagcattacacctcaatgttcgagacgggacacttcccaaacttgttgcaggatgtgctgcatgtgctaggaacctatgtttgacctctttatgacaccaggcgggtatctgagccccctcgggattgttactacatcactcgcgtgcatatcagagtgttggatgcaggaggtagaggctttaggactctttcatctcatgagtctctaacgccgctatccacctacgctgctttggtcagcaatgcttctcaaagagctttgtggtccctcaaccacacctatcggcagcagttgcatgacacggcatacaggcaccttcccttacgtcctcatggtgagagccagacaagcgtggttccaggtgaagctagagaagatcacctcaacacccttgtaggtgtggtggcaggtcttaacaccgacctggacagtgcgacccttgatctctcaagtgtacatgagaagcttgaagatgctcgtgcaaggattgcagcactcaaggctcaacttgaaggaatagatccacctgaagctcacgtccctaccatagctgtgtcctcgccccgcaagagaattcgctatggagcccccagatctattacgaggccactctagagttttataagtcataatgtaataagttcgatttcacgttagacgatgaaaatct

SEQ ID NO: 126457 - DNA, 550 bp, Zea Mays
agcaaacccctcatgtgtagcgtatcctatatgccccctccacgatctcgacttgtgtcaccactagtcctcgaccgcccgatcaccaagtcctcctgcacctccgcttgacttgattgatcaccgtctcagcttggtcaacacggtctactccaccatgtacacttgtgcttgtcggtgactccaagtgtcagcctcctgcgattgatcctttggtttttctagtcccttggttcaagtcctagtgaccgtccttcatcgttgccagtccatcggcatgaactgcttgaccttcatcttcgtcattaatcaccgcctacgcacaagttaagaaacatgttgcccatacactcacgccatggttagttaaacaactcaatctaaggcccacgatcatcttcttgataatcactcaacatactctgagcaccgtgggcacatatcaccacatgtttgcaaattcatatgcgtctagccgtctacactgaccaatttgataaaaacattaatgagttcttcagaaaattaagtcataaccattgttagatta

SEQ ID NO: 126458 - DNA, 312 bp, Zea Mays
gcctagatgattcacaatctccccctttttggtaattgatgacaacactacacattttatccaagagaggttttgattttcaaatcttcctcataccttaggtataagaaggattttagagatgagtttcataagacttatcttgatttgaagttccatccgagagatagataagtctcaacaaaactcagagtgtaggaatagctccccctatatgtgtgcatgatatttctagttgaagatataacacacataatcgatcgaagttttgatggagatcttcctacaatcatggttatcgaggcatacaag

SEQ ID NO: 126459 - DNA, 1769 bp, Zea Mays
ctaacctgaggtctgataaactcaagctgtcttcaatcttgcatcagagatttgtttcagcaacgttatagccaaaacatagtaacagtgttaaattcatgatgcgttacaaaaatattgatacaattttttataatccaaaaaaaattgtttaacatgtagcttggccaataaaccacaggtttctctaatctgagatctgataaacccaagctgtcttcaatcttgtatcagagatatgtttcagcaatgttatagccaaaacatggtaacagtattaaattcttgacgagttacaaaaatattgatataatttttataatccaaaaaaatgtttaacatgtagcttggccaataaaccataggtttctctaacctgaggtctgataaactcaagttgtcttcaatcttgcatcagagatttgtttcagcaacattatagccaaaacatagtaacagtattaaattcttgatgcgttacaaaaatactgatacattttttttataatccaaaaaaatgtttaacatgtagcttggccaataaaccacaggtttctctaacctgaggtctgataaactcaagctgtcttcaatcttgcatcagagatttgtttcagcaacgttatagccaaaacatagtaacagtgttaaattcatgatgcgttacaaaaatattgatacaattttttataatccaaaaaaaattgtttaacatgtagcttggccaataaaccataggtttctctaacctgaggtctgataaactcaagctgtcttcaatcttgcatcagagatttgtttcagcaacattatagccaaaacatagtaacagtattaaattcttgatgcgttacaaaaatactgatacatttttttataatccaaaaaaatgtttaacatgtagcttggccaataaaccacaggtttctctaacctgaggtctgataaactcaagttgtcttcaatcttgcatcagagatttgtttcagcaacgttatagccaaaacatagtaacagtgttaaattcatgatgcgttacaaaaatattgatacaatttttttataatccaaaaaaaattgtttaacatgtagcttggccaataaaccacaggtttctctaatctgagatctgataaacccaagttgtcttcaatcttgtatcagagatatgtttcagcaatgttatagccaaaacatggtaacagtgttaaattcttgacgagttacaaaaatattgatataatttttataatccaaaaaaatgtttaacatgtagcttggccaataaaccataggtttctctaacctgaggtctgataaactcaagctgtcttcaatcttgcattagagatttgtttcagcaacattatagccaaaacatagtaacagtattaaattcttgatgcgttacaaaaatactgatacatttttttataatccaaaaaaaatgtttaacatgtagcttggccaataaaccacaggtttctctaacctgaggtctgataaactcaagttgtctttaatcttgcatcagagatttgtttcagcaacgttgtagccaaaacacagtaagtgttaaattcatgatgcgttacaaaaatattgatacattttttataatccaaaaaaatagcatgtagcttggccaataaaccacaggtttctctgatctgagatctgataaactcaagctgtcttcaatcttgcatcagagatatgtttcagcaatgttatagctaaaacatggtaacagtgttaccttcttgatg

SEQ ID NO: 126460 - DNA, 1202 bp, Zea Mays
gttgtgttcaaatttagctgatttcaacaggtttccgtcgaataatcagtaatcggtggtgacctttttgtgggtgtgactaaggactacattttcgatttaattttttcagatagctttttgttgcacaaagttgacacttaaaattttaaattcactgaaaccggatcggtttttattttcctatcagtaacggcaatgggaaatattaccgaaaagcagtcaagaaactcatccctggggtgaccagcttggtgaaccctgtgcacgaccaatcagatgacatccatatcttcaagccacaattagtttgactaagtattatataaatcatcactgtcttgatctcatataagttgtttatgtgaccgcctaagtaacaaggtacatgttcagttacaatatacgttaattcatttgttagatttttatgctaagttattttattaccctttttacaatataaattactcctttaatcatggtaaattactgccagccgatttgcaatgtagactaggctgaaggctggtggagagctgagttctgttcccgaactgtgctcctattcaagagcttaagagttgtccagttatgcgatggaacggggcatgaccgcatgtaccattgaattagactcgtttttagaaatgaacagataattcaaaagattactatcaaattgcagagtaggtactaagaagatcgaaatccaatagagctagacgggtagagcggctgcagatgcgatcagagcctgtcgggatgtatgagaagtcatcactttatgacatcaggggattgacagactttcatacatgcatcatcacctcgcatcgaagatcaactaacaagaacaaatatccgacaagagaacggctacgaaaaccaactcacaaaagagactatgccaacgataaaaccgggtcagttggaagaacacgaggaatgaatctaagagaagaaaagaaataacaagtggctcagaacttcttagagggtttgtgcaaccaacaccggcgtccgagggatgcctccggcacacggatttctttcctcatcgccatcaaactgctcaaaacgatatagtaatcgacaaacagaaacaaagaaaaaatggagaaaacatgaaggcgaaagaaccatcggacacagagagctagcaacggcggcgatgggaaatctttcgctgtgctctgttt

SEQ ID NO: 126461 - DNA, 622 bp, Zea Mays
tgacgtgttagaagagcatttgaatgtcgtcatccaatcagctaggtaccagcagactctgaggtgctaccacgacaaagcagtgtggcaccgatcctttacagtaggagacctggtactctgccgcgtattaataggagaaggacgacacaaactgtcaccgccatgggaaggacctttcattgtcgcaaaagtcacctggcttgagttctactagctaacccagatgggcggaactcatgtaggaaactcgtggaatattgagcatcttaggaaattctacccgtagtaacaccacaaactccagatggcgagctacacgttgtaaaccagagatctgattatcaataaagcttatgtgtttgtccacatacaaacaaaccctcaaatagcgaccgacttaagtcggaaacgccttaagccgacgcagcgcgctcactcatacatgacttagggtgattaatatacccctctaacggagcaatcggcttaagtcggaaacgccttaagtcggtgtgacatgctcacgcatacatgacttagggtgattactataccctgctaatggagcaatcggcttaagtcagaaacgccttaagtgggtgcgacatgatcatgcata

SEQ ID NO: 126462 - DNA, 446 bp, Zea Mays
ctctggattctaggcgctgttccgtgggcccgatgtcctattccactgcgcgcgggaccggcttgtcagatctatctccttgccgtaacagcttgggcgcaatccacgcagtcgtggccgactccttgttaatccgccgtgtagtgagggtgttgtgattccccgccttaccagcgtataagtaggagcctaagaccccctccctcttccccattgccgaaaacttgaccacggtgtgggcgcgactgggagtcaaggagcagttggcggccgccaccatggaattccaccggcgtttgcaattaggagaagaatccaagcagccgagcgcgccatcgctgagcttcatcacgcaccggggaccaacaacgccgcgtgtgagggtgccgccccgccattctcggatcgtggctcgggttccccggaatttctcactgctcgggctt

SEQ ID NO: 126463 - DNA, 426 bp, Zea Mays
aagaggtatagggtttactcaccggagttgagaaccgagcgaagccacccgcgacgcacggcggatctccaaccacgacgaggaattcgcacggcctccggtcacctccttccaattgcgcccacgtatggttcatacgcgagcaacacaagcctccggtgtcccgaatgaggtccaattcacactacaggtggctgttcgcggtggcagcgagggagacgaaggcggcggtgttctcagatatgccagccgcgacaccgatattgggagcagataagacgagcgaggagtaatagcgtccggtatttataccccgaggttcagtacggagttcggcaagccacggacttggcccacgcgtggaatccgcggcccggaggttgttgacgccgcgcgggttccgggaagacgaagacccagcacgcg

SEQ ID NO: 126464 - DNA, 426 bp, Zea Mays
gttttctaaatacgggcacttcatttctttactgcaaccgtatactgctgcaacagtggctcactcgttcatcaacaatgtgtacaaattacacggacttcccgcagtcatcattttagatcgtgacctagtgttcacgagtaagttgtggcagcacctctttaaattgactgacactcagcttcagctcagctcttcttaccacccacaaacagacggacagacggaacgcgtgaaccaatgcttggagaccttccttcgctgtttcgctagcgcctgccctcgcaagtggaaagagtggttgcctgctgctgagttttggtacaatactagtttccattcagctttgggtcggtcaccgtttgaggtgctctacggtcgccagccccgtactctgggtatcacagtggatgacgctactccggc

SEQ ID NO: 126465 - DNA, 431 bp, Zea Mays
catctctcggaattgttaatacttatagtcaatgaattgtctcgggatagtcctttgacaagtttggtatacactgtaaaataaatggtaaaggtcggtcctgaatggacacatacctggggtttatgtagccgaactacactgaattccactctttggcatgcttaccattatctacctccgatctaccagaagcgagaagagtagataaataactatgaaatctcacatcaccacagagcttgaagctaaattagacattaatatgtccttggtccctggagccagaagagccatatgttttgaccactagactactagtgatgataatttgtgatagaaatatgaagatcttgtggagacctattgtatcctctctactcctgatgatttcttcttatgagagcactactatctgttgttgaagcctg

SEQ ID NO: 126466 - DNA, 650 bp, Zea Mays
tcggacaaattctctatcctggagagaggtagtgctagaggggctttcttcttccgctcagtctggcatccttggctcttagtcttctttcggattttcttcgtgggggcgagcttctttagcttcttatcgtaatccatcttcagggttcggtaggcttcacgagtgttggcctcttcgccttctgctatatcgagactctcttggagggacactttctcctttttaagttccttgacctgctgctctaagctttccactcgggagtttaggtgagtgcagtgggaggaaaggtcatcatagtggttatcgagagtgtggagatatccgaccatgtagacgatggtggggtcatcctcagaaggatctcttcctgacagggcctgaagtcttttcctccaggtaggggtattttgttgctaggtgggaagtaacgaaggggggtttgaaaaacctctttgctgtagttttggcatagctgtcggagggcttttcgggcaacattttggcaagtgtctgggaagtggtgtccagtgaaggtgacttggaaaggagagtggtttgggtaacttcggctttctccaggtagactgccatagagcacttctcaattccgttctcgtggtattcattccagacatactccggct

SEQ ID NO: 126467 - DNA, 299 bp, Zea Mays
aggaggagaagatgtatgaggagaagaaggttgcagatccttttattgctgagttttacgaatccatggcaaaaacaaatacagagaaaatcacaaaggagataatggcagatttatctgaagattctgatgacagtgatgaatttgatgtgaaaagtggagatgaagattctgaggaccggccttggcgaccaagccacaccatcttcggaaagtcgactattaagcaaagtcatgttgacgctatgagaggaagatactttcgtgacatgtctattgttggagacttgttctcaaat

SEQ ID NO: 126468 - DNA, 563 bp, Zea Mays
ttcaactgcttggggtgtgatggcgaggaggttctgttgtggatttttacatgttgcctatttgctaccaaaatattgatccctttttattgttatcatcaatagggttcatcgaatgtagtagtcacatgtggacctagaataatatgaactttaaaagctattttggacctaaaatgtgtgtactttgaaaagcatatgtgtgtatttaccaaactttcgtcatctatctctttatctagtttcttcatcattggaattgtggagcaccaaaataagcagactggttcgaagtggcatcactgtcattgcttggggcattgtcgtagctgcaagaggacaaaatagaggagtagcattatataaaggacgaataccatatgtgggaggaacatcgaatgaaagagagaatggaggagaaacattgtatggaggaggatcaccatacaatccatatagaggagcatcatatgaatatccatatgggtaagtgaatggtgttggaggtctagaggaggagtattggtggtacgagcttcaatgggaggaggatgatagtcggc

SEQ ID NO: 126469 - DNA, 518 bp, Zea Mays
gttccgcttcgtcctcgccgccatcgacttcgtggccaagcacggccaccgcttcctcccgctctacagcttcgactgggccaccggcaactgggccttccgccggcgcacgttcaagcaccacgtcatgagggaggagctgctgcgcgagcgcgacacctccaccgacgactcggacgacgacgacgaccagcagcacttcacgaagaagaagaccgccgccgcggaatatcagcagcaggacaagtttcagagctacctggacactgccaccaagatcgcgctctcgctgccggacacgtaccgtgaactcgttgccagcgtgcccaatggactggacccggacattattctctttcgagtgtgattattgattaggaattagtgtcaaaccgatatcgatcgatcgacaaggtgtgctctaatcactatactactgtagtgtgtgtgtatatataacattgagtttgtttttggaaaccaaaactatacaaaactatacagaatttccgacaacg

SEQ ID NO: 126470 - DNA, 423 bp, Zea Mays
aaatgatcaaccacatgagttacatggcgaaaatggaccaattttgttaagtattaagtaaaaatttagaggcaaactacaatagtggaggttgtaaactaaaaagaatgggcttcacttctatagaggcaaaaaagctagtagcaaatacacaagcccgattacaaagggggttgaattttctgctcaataagctgcttcagttcatcctaaaattgaactagtacaatagcaggataaacaagagcatttgttgtagctagtcaaaaaattaaagtgcaagaacatataattaacaatttgttcaatacttaacatttatacaattcaagtgttgtgatgaacccaacgggtagaagggtgcccgatctttcgatgagagatgatggaggtggaaaaacttgttggagaacgacgttggct

SEQ ID NO: 126471 - DNA, 416 bp, Zea Mays
gtcaccaactcaggtcgaaggggtttaactaactcccgtcggctaccgtcggctaagggattggccgacaggggttactaaattatacgagccatgctagccctcgtgacctctccttccacacgctcaatgctcttttttcccatgctcacttagccaccgtcctcacaccacccgcatgcgcttagccatcgctaccgttctcatgagattggtctgctcggaccgccgctgcaccgtcctctgctccgcatggaccaccctgcacagtcatcctattctccctaccacaacgttgcactgccatgcacccggtcacgatgccacacccccgatgccgccctgcaccgtcgtccccagccaagccactaccaagccccgagccctgacgacaccgaacgctaccccatttttgg

SEQ ID NO: 126472 - DNA, 482 bp, Zea Mays
gccattaacaaagtatgtattcttattatagattgataatgacacatacaacaagtaatttataaaaacattacatgcatgtatagcattaacacgaaccaaccatttttattttacatatgttagttatcatacttgcaggatccaattgcatacccttccctatattttaactacttccacctcttgtattttcctccaaagaacccatgacggtgatgcttccaccctagaaggccatgttttcctcctaacccaatgtgtttcccaaattttccatgctttaacttgccatagtgtccattataatgatgtttaaacttgccaaaatgtcctaagtggtgattgtgagggtgatggccatgggttaagtgatgtacaccataggtagcggcggcggcggctgctgctccaccaatgagcgttgcccccatgttatatccattacctatgaacatgcaacattatggtatcaagttata

SEQ ID NO: 126473 - DNA, 311 bp, Zea Mays
agtcttcctcccatggcgcatctccaagctcgcgccccccactagctggtgctgcactccggccatcccaggccgacagtggtacaaatacttccaaaggccaaagtgaggcaaaacaccaaggaaggcttcgcataaatgaacaaaaacagaaacttgcagaatggaattgggattcagatgggtcagattcaagcgatagaaatcaaggagaccgcggaagaaaggagaaatgggaagagcaagtccgcggataagaaaaggaacgtaaatgacggatttgtgggtgtcttctgtcggaacattgaccc

SEQ ID NO: 126474 - DNA, 372 bp, Zea Mays
ttgtggcttttggaatctgctgctttaattaatgccatgtcaggtcgcgtcagtcactttttggaacaccttttcagaaacttgtgcagtactttttcagcttttactgtttgaagaatctgctttttactgcacagatgcatcagaaatttaaattttttggcgttttccctctgaccgtttctggccctctgaccgcgctggtcagatgcggttgaaccggcccttggtgggcggttgaaccggtcctggggaccagctcaacagcctatttatatgtcgctccccttctcttccctcactccaaccattctcgacttagtctctctgcagtgtttagagcctcctctctcactcacctcaaccggatca

SEQ ID NO: 126475 - DNA, 977 bp, Zea Mays
gttgatgcacatgtttgaaatattcaaatttaaagttatggtttggttgggtttgaattcaatagagaaaataaaaagaaaagaaattagaaattcaaatttataaaagaaaagccaaagcagcccaaatcccctctctcttggccttttggcccagtcggcccagctcgcccgtgcccgttgccccatccctctctgctagcccggtcctgcctgtcggcgttgtccgctcgcttatgtgccccctcctgctgacctgtggactccgcctgtaagccctatcctccctgaccgcgcgcacgccgtcgactccacacccatgatgcacgccgatgctgcaaccgccccaaccccggccatttctagcagcccacacccccactcactcccccctccctcattcgcgcacccgcagagctcccgccctcacctcgcaccgtgcgcacgctagagaagcgtcgctgccgtctgtcgtggttgtgcgcccgttccaccgtcgtcgttgagccctcgctatgtccactgcctcagtgagcttcgcctccatgtccatgacccagacacccttcaattcgcccacttcccctctgttctctttgttcatgctcaccagacctccctccacatagccatagcgccaacccgagccctcgccgtgcgtctaccgccgttcaagggtcccaaagtcttccctcgaggtaaccaacctccgccgcccatttatttccccttctttgcactctgttgtgcgcaattgctcaccggagtgaagctgcaccgtggccgagccatcacaccgtggatgactaccttccggtgccactgcgtcggtgccgtacccacgctcatgttcgctgcaatcccctcgacctccctgagccctccccatcgccttagaacccccagcgtgcccacgccctcgtcttcgacgaagctccgccacggacacgggcggcgccactgctggcggccaggga

SEQ ID NO: 126476 - DNA, 443 bp, Zea Mays
tatgtatgaattcaaaaaagttctgcaaaagctatatgattcttatgcctccatgtatcgttcttctacaagtcgccctatgcaacaaactgaagttataactgctagatttgttagaacatctcagtgctatatgaacttgaatgaggagccaaagagaaaaagattaagttcatttttaagggacaatgctgatattggtcaagagtaatctgaaatagatcaatacaataatgatccattgttgagttggaaataaggtaactactttgacattttgagctggtggaagacccatggttcaaattatcctatccttactcgaattgcaagagatgtattggctattcctgcatcaacagtggcctctaaatctgcatttagtgctggaggaagagttgttcacaaatatcgtagccgtttggaccctcaacttgtcgagg

SEQ ID NO: 126477 - DNA, 435 bp, Zea Mays
cttggatgtggctgaggcggaggcttctccatgtgttacggatgctgaaattttgcctggtccaagtgttgggcgtaggcggcgaagggcggtggcgaagcgtagagtgagcgggtttgatggtggtcgtcttcgtgtgggcagggccggtaggcaggaattgttgtcctcgccggttggggcgagtgtgggtgagggggagttgcgaaggctttttgaggtcgaggagctgaggataatgctatttaactatagggagatggggatcattctgaaggttgagcctatgtaaggtgtgatgccctcgctgtacgcgtgtaactgtagtttgtatgataaggttgactgccttcgcgcatctgggtgtgttcgtaaggtgttgcgcacccggtctggtacattattgtgtcggtccggctgcgcctgtagactttc

SEQ ID NO: 126478 - DNA, 300 bp, Zea Mays
ggatcatccgcgtggaggcactggaccgtccacgactacacagagagatccgctcttctctgcatggtagcataccattcgtgtgtagacaacataccatccacgacggcgtagtgggcttcatgtagaacctcaatctcgcctcctaggagggccccgtcggtgaggagagttcgtagggttgcttcatgatctgatcacccaaagtgtctctagacgacgtagagccagagagaggtaaagattgatgttaaggaacataattaaggctaactatggctagactactcctatctctaa

SEQ ID NO: 126479 - DNA, 724 bp, Zea Mays
aaaaaaattgaaactgcattgcctcggaatggcatcattagagcgcactattgcgaggctccgctctcgcattttgtatctacaagagggtgatgcaaatacttctttctttcatcagcaagcccgctaccgcaagaaaaagaactttattgcaaaatttcaggttgaggaacatattgtcacctcataggaagaaaagcagcaagcagccttggatttttatgataacatgctaggtacagctgaacatagggactacaccctggacctgcacaacctgggcattcagcaacatgatttgagggatcttgagcttgttttttctatggaggatgtttggtcggttgtaaaagatctacctttggacaaggctcctgggtcagatggtttcataggtcgtttttataaggtttgctgggatatcatcaaggaggatgtgatgggtgctttgcttactgtgcaatgtgggcatgtctccaaactcaaactcctcaacacgacttttatcaccctcctgcctaagaaggtggatgccctgctggtcaaggattacaggcctataagccttgttcacagctttgataagttggtacccaaagtgctagcagctcggttgacgccccacctgccaagtatggtctctatcaaccaaagtgcctttatcaaaggaaggagtatacaagacaatttcctactggtgcagcaacttaccagatccttacac

SEQ ID NO: 126480 - DNA, 593 bp, Zea Mays
attttgaatctaactgaaaagggggaatcaccattccacacttcagtccagaagctggtggaatttccatttccattttttttgctgttcttgtagaatagctcttgaacttcaagaatccctttccaaaattgcgactgcccttgcttcttttgcagactcatcggtttgtctctcatatatttttttctaaccacagtttgccagagaccctcttgaaaaccacacaacacattttttttgattgtcggattgcgtctttcacttggagggtgattagtatggcgctgaacgtgcacataatgcccaaagatactgaaaatatgtttggagaatggatttataaatttaaaaagaaaagtagggtgagttgcagtgcggttttatggaccatcaggaggattagaaatgatgcttgtttcaatgaaaaaacataatatacactaatgctattttccttatgtgttgcttttggatgaatgcttgtaccctgatccagacaaagatggaaggaaggatcctagaggaagaaagcttgcaaatccgaaaactggttaaaaaaattttcaatagaaattttgaagggagaccgg

SEQ ID NO: 126481 - DNA, 326 bp, Zea Mays
attttgcggcattggatgtggctgcagcggaggcttcaccgcgcgcggagggttccgaggaacttccgggcgcgagtactgggtataagcggcggagggtggtggcgaagcggagagtgagtgaattgtcgtgaagtggtaggcattattgtagcgaggtggagagaggtcgtcttcgcgtggatgggactgggaagcgagaattgttgtccttgacgattggggtgagtgtaggtgagggggagctgcgaaatctgttcgagggtgaggaactgaggataatgttgttcaactacagggagatgggtatcatcccgaaggttgag

SEQ ID NO: 126482 - DNA, 655 bp, Zea Mays
ctcagagttgaaacaaacctgtattcacatatgtagcaccgatgcatttacaaatacctttatcagaaacatgaagatacgtgaatacattattttctcaataaaagtcacgatagaatccatgcaagtttttagaaataaataaatgatgaggcatactacaaaacaaaccattaaggcataaattgtattatttttctcaagtttaagatgtttatgaatctggtaaccagcaaccactaaccagtgagcatgtataatgttgctatatatgggacaagactcctcatctttaagaatgtgatcaaactctttaatcaagctggaaatgtagaattgaaattatttataaaagtttttccaaaggggaaatcttcataacaaatagagaccaggtaatatcatttgcaactcagcttcacccaaataaagggtgtttaaatcagaaatagccataagtaaaaagggagaggatatgggatgaatgggtaacttttgtgcatgcattgaaaacaaacacaacaattttgcaatgagattatatattactgtctaggttgacctaccgcttatttagtactgtctaattatatagtactatccaattatttagtattgtccaggttgacctaccgcttcaagaatttcatgtttc

SEQ ID NO: 126483 - DNA, 553 bp, Zea Mays
gttcctttgtttgccttttagatctgtagtaaaagcttaatttgttttctgaattctgcagggactgcacttattgcaactgacactatttcgctgctataattagcggagttcctcctgttacggaaggtacattcctatttcataaaataggtcatatacggtcttttgatgagctacatattgatttatctgttcatgcagatatcttgctcgattggaagtgcttcttgtccctgatttagagttgccgctgcaatcaatctaacaaagctgctacttacgaggtcgtgctcttctcgtcatacgatctgtctttaaggctcatcaatctgacaacgcacgggtactaattcatgactaagtttaccttcccaccttctttttttatagccttgagtatttaaaggttttcccacatagagttttcatcctcatagttggactttaagaagcctagtctactttagttttttattttagtggtatggctatgagttctacttgccttaatctctacacaggctgatttgttgttcagtctacataattg

SEQ ID NO: 126484 - DNA, 431 bp, Zea Mays
gagcccccccctcgacaccaacaagatggaggaagagcgccaatgcaggatgcgatggcgttggcaaatgtagcgctcatcttaggacaaggtatgatgacatgtgtttcccttccctctcaacctatcagattagaatcaaaacttgttcatccttaaggttgtaatcaggttggcaaattagggacctcaggctgattctaaggtcttagaaattttatcatcctttaccatacttgtatctatattttttgtttattaatatatttcaacttttaatatacatagtttctaaatctaaatcttctaacaagcaccgcacacgtttgtatgtgattcaaccaccccagctagagtttcttagggtggctccaatcttacatgtctatatcaaccgccacgtcatgccataaaccataatatcaactctg

SEQ ID NO: 126485 - DNA, 928 bp, Zea Mays
cttggctatctcctggcaaacggatatctctttgttgtccgagagacagtataggaaatcatcttcgcccgtgccattgaacactaaggaccccttcagatattttagtttctgggcgtagtgtttggcttctaagatttcttcttcggataatcttttccccgaagcatgtcgaataatgtaatcaacatcttcggatggggcttcgggagcatgagatttagctttttctgtcgcgtcctaccccgctgccatgccggtatccagagtttgttgctcagccttatcctcagacacggtaggcttcgtctcaatgggcactgaaggcccagcttcggcttcggtctgggctgttgcagcttcggcaactttcttcgtaggggcaggaatcaaagcttttgtggtctccatgacagcgtctagcacgctggacattctccttctctaattaggagttgtggcgggagcctttgtcaccttcggcaattctgcctctacaggtgggctcagaatttttggcatcatcactgttttttccaattttgactctctggctgcatcatctttggcttcggctggcccgactatatgcaccttcggcactacaatggatcctttagcgctctgagcggcggaagcagcttgttttgcttcggcagcggaggaggtcccgtcaccaaattcaggcactacggccatttcaatatatcgaggccggtgggttaaaacctttattttcttgcccttcggcacagcagtggtggctgaagcgacagttttcctcttttttccttgccttctcaaggggtagcagtaatcaggatatatgaagccaattgcatcaaaaaccctgttcaatcttttgttaccccgacccccgaaggctacggacaaggcatcatcctcggctctggtatatgtcccaagc

SEQ ID NO: 126486 - DNA, 324 bp, Zea Mays
tgctcatttaagtgaatgagactcttttgatctgtgaatatgacaaattcagcatgtaacaaatagtgtctccattgttccacagccactaagatagccaaatattccttttcataagtagatagtccctgggttttaacccctaaaggtttgctgatgaaagccaaagggtgcccttcttgaagcaaaactgctcccactccattcttgcaggcatccgtctccagacagaatgttttgttgaaatcagggagtgctaagacaggtgcagaactcaaggcagctttcaaggagctgaacgccacatcatgatcaggagtccat

SEQ ID NO: 126487 - DNA, 580 bp, Zea Mays
aaagaatcttcggccagcatatcaagcatagcacttatttctgcatcattaggatccaaaggcacctcaaagtggacttgccgttcatcatcgggaatttctccaatcgaagcaaccaaagcactaacttcttctgtagagggtcgtactctaaagcccaaactgccgtcagcaacaggaggattcgacacaaaatgagtaaaagccttggaaggaggcaggttccaggccgagtatgcgataggggcaccaacattggacaccttgcctctaagtatcatttcaagccggctcaccaagtctacagcaagaattcttctattggtgacccgggttgagtcagctaaacctcggtacaagtaggctgggtatgccctatccttcaacggttgaatgttcttaaagacaaaatcggcaaccactgcctctgcagtcagacctctctcttttagcagtccaacttcagctagcaaagcccctgcctcagccacctcctgatccgtgggggactcggtccaactcggagtgcgaacatccggctgtctccccgaccgtggggggagagagtttccatggttct

SEQ ID NO: 126488 - DNA, 475 bp, Zea Mays
gctgtccagaaattttgtgggtgggcgaacagtagtagtattatcagtatgagaatcatgtagagctttgtcatacctttcccacgagtacttgtgcactcgattcggagttatattttaggagatatcgctgtttgaacctgactaggttgctgtccaaaaatagattgcagggtgtatcttatggattgttttgggctaattagatgttggagtttaattatcatttgaatacacaacctgtggggaattttatgttgatgcttttgaagtttttgtttgttaccactactgtcataattttaaagatatgaaattgtcaagcagcgccgctgcagttggtcggtgatggggtgataattcgctcgcgacgggttcggaattgtgcgtaggtgcggcgtcgtttatgagcgtttgttatgtggatttgtgcactaagttgtgtgtcaaaaacaggtggtggacttccggatcg

SEQ ID NO: 126489 - DNA, 429 bp, Zea Mays
aagacatttcggttaacatgcttttgaccacccttatttcttgatgatccatgagtgaccattctatttcgcacacccttgatgatctcatcgtttccttataacttccctcggtaaggaatctttatttcaaccattctgttgggaccttacctatctcacccttgattgtcttatccacttcgccgcttcgagagtctttccttaactgcatccttggttatgctttcacgatcatcatctttacccttgtcgcctctatatcttaccttgatgcttaaattatacccgccctttaaacccttccctcctacatctcaattttatagttgtattctacctattctcccttggtcgtactctcttccttgtcgcttgtgagtttttaactccatcctttgtcatgctccagttgggtattacctttac

SEQ ID NO: 126490 - DNA, 448 bp, Zea Mays
aaggcaaggtgcctagttgttctggcggtactgatgctgttgctgctgagggaaatgcctctgatactgctactgtgctgacgctaatgctgatgctggtgctggtgctggtgtccttgaggatgactttatttgaactactgggttgaattgcctaagaaatggggatggctactgctcctgacctgagatccgtgatattgtgtttcctgtcttccatctcctagcgcttcctctcagtcagatagctctgtcgatcagatgctgaaaggtagggaagatatggttcgtcatctgttagtgaagggggtcaaccaaacctctcaagaaatggtactacatcttggcatctatgttgacatcctcgtggacataacgagacagttgcaaaaatttatccacgtactcactgacagacaggggaccttgcttcaataccagaaattcc

SEQ ID NO: 126491 - DNA, 434 bp, Zea Mays
tgcgttctctgcagtttgcaatgctgtgttggtaccaagcggttcatttgattgtctttgcatgtgttttctgcaactcatgtaaaggcggtgaattgctggccattttgatctgcgttttatgcaactcgtgtttttctgcaatgctgtgctggtaaatacatgattgctttgccatggcatgtaactgatgctgtaattctcatccctgtaagaaagatagtaagtacctatgttggcttggctaggcagaaccatagggttgtgataacaatgcaaacattgtcttagatatggttgtttaattcaaaattgaacaaagccataagagctcataaatttggaaccaaaccattactactgtaactattggtggagggattttctacgcctttcattgttgcagggcgcgctaagcgcgccttctgttctag

SEQ ID NO: 126492 - DNA, 492 bp, Zea Mays
cctagcaggaggtgcatgctgtagggttgcgagtagaggcgaggagggtagcttctgaagaacacggctagctcactcgcgtcaaggatcatagagctcaagttccgaagcgactcttgcagctgcttcagaagaagcggcggtggcgtctttctatcggaagcaccatagatcactcctttaagagaagtacttggcagcagagacggagagtgattcacaacctgcagatgatctccggcggcgtcctcctcagcgtgggactgctggcagctgaaggtgtcgtggacgtagcaggcctggtgcatggcgtctctcagcatgtccagctgctggagcatggctcggtttgtgatgtgccgccccatagcttcatcgacgatgacctgtgctcggaggattgcgctttgcaggctgtctcccacgtccatccccgtcggcctggaccttgtgctgatgagcagatttatggatctagaggcgaggtcgcct

SEQ ID NO: 126493 - DNA, 442 bp, Zea Mays
atttttttatatgatcttatggccatcattccataagaccatggcactcaaacaaagatccaaatcaaacatttcaaccaatcaccatcacatggttgttatttattaatatgataacttaaaatggtgttcatcgtctaacgcgaagactaacttattacatcatagctcaaaatacttaaagcagcctagtgacggatccgggctctccatagcgcagcctcttacggggaggagacaacgccatggcagggacctgagcttcaggtggatccagtccttgcagttgggcttccagggctgcaatcctggcgtgggcattctccagctccaagtgcaccctgtagagatccagggtggcactgtctaggtcggtgttgagaccggccactacactagctagggtgttgaggcgatccttaccagcttcacctgggacgat

SEQ ID NO: 126494 - DNA, 404 bp, Zea Mays
aggtggtcgccgctgctggcgagctactcggagctagctacccacgcgactttactggtgtggaggtagttcatacctgtagagtagagatggagctaggactccacttgaaggcggatgtaatacttttgcttcttgtaaggtacttttgagtactatttatcaaacagtattagcacttatctgtgtaccacttgtccctattgtgtggtgtaacctattcctccttggtacctggcccccctgggatgtaggctcggtttgtcgaggctgtagaccagcatacctaagaaatagttggtaatggcccccaggaggtagcctcgactgggacctaggcctgcacacagcttcagctagggagcattagtagtacacccgcaggacccgccatctaacactag

SEQ ID NO: 126495 - DNA, 931 bp, Zea Mays
ccgaggataggtggtgcctttggagccctttagtctagggatgcatgacccctattgtccttggtcctcgttgtggtccgagggagacgtggtgtgcctaaaccccttatggactcggggccttcggcattctagtggctggggggctataccctagttagtatttacaggagtgggctcgggtccctgctaggaggatcggagtcttctatggcccctacatgacactcctggatatcatgagtcaagtaatggccacgtgttactcccggagcccttccagctagtaaatgatgtttgtgaaagggtgttctttgatggtgcaagcaatggtgagtccctctatgttaccatgtggtgggggccttagctaattatacctctgttttttacatgtcttgtcaccttaaaaccaacttataggtgggggttgtagtctatcttcccgtgtattcttttgttaggagtgccttgggtacctaagggtgcttataattgcgaaaatgaacccacaacaagtcacaacagaatgttgaaaagtttagttatgttaggcttcagttaataaacaactcattgtgcttgccaatatattccttcacaatcttttcttgggttgatgaagtttcccatgatcatacataattaacccgtttagtggcaaatatggagcgcaatagtttttggcgacagtagcgtaattatcactagctagtgatgtttcttagggtttagctaggcaagatttctttgtaagagtaaaatgcaattcagggttcacatactatgacaaataaaattcagtgtaggagatatgccaaagaaaagtaattttggttggttatacatactacacgcaaacttctaatagttatgtttgacctatataatatttattattatgttctcacctatgcgttgcatagttagg

SEQ ID NO: 126496 - DNA, 1959 bp, Zea Mays
tgtgaaacattctgttacaggttggagttttccccgagtttgctggtgtggagtacgagaatttcatggccgtggcagagagaaaacggtcagactacgatttctttcacacgtcggacgcgagcattctgccgcgtggtgatgtagccatcaagggccctgctgttcgtctctttaaaccatttgatgagctctttgttgattcacaggttggtacaatcctttttcatgtatactcaacgccactagtactaaagcaccattctggatctttttcaggattttgatacggatgctcttgaaaaattcattgaagtgtctggtttccctgcagtggttaccttcgatgctgacccaaccaaccataagtttcttgagagatactacagcactcctagcgccaaagtgagtaatacaactgtgattatgttctgtttgctctttcaaaatttgaatatatgagctgtatgtatgttgggtggaggagctaggttttcatcattcatttacctttgcataagtatagataatactttcatatctactgaaatcaaatatggttgggcaggcaatgcttttcttgaacttcagcgacgacagaatcgaggccttcaagagtcagattcaagaagctgccacgaaattcagtgctaataacataagttttttaattggtgacgttgaatctgctgaccgtgccttccaggttgctatttgtggtttctctgagtaattgtttgccaaggataaaggatttctacagctaaatgcctaacaagctctcgtgcaaattgtttcagtactttgggcttaaagaggacgatgtgccgctcctttttgtgattgcacagggtgggaaatatctcaatccgaccatcgaccctgatcaagtcataccctggttgaagcagtatacagttgaggccttctctactttattatgttgcttagttactgagctgtttacagtactttactagtaaataatttcctgcccaatcttgttgttgagttgtgctggttcatgtagtatggaaacttgacaccttatgtgaagtcagcgccaatcccaaaggtgaatgaccaacctgttaaggtcgttgtggctgacagtatcgatgatgttgttttcaactctggcaaaaatggttagttattctcacttctgtcggatttcatttacgcttagcattcaacttgttttactacatcatgcttggcgtgatccttttcttcgcagtactgctcgagttctatgcaccttggtgtggccattgccggaagctggccccaatcctggaggaagttgcagtctcattgcaagacgacgaagacgttgtcattgcaaagatggtgaacaattctgcgactgatgtgcaatcgtttctctttgtttcctttctgtggtatggtatggtatgaccatgctcatacctgaacattactcgtcattcaccccttttggttttcacaggatggcactgcaaatgatatccctaccgactttgcggtggagggataccccacgatctacttctactcaaccaccggtgaactttattcctacaatggcggaagaacggccgaggacatcatcagtttcatcaagaagaacaagggccccagagcgggtgccgtggacgaacagacgggtgatgctagtgctgcagaggaggccgttacaccgccgtcgtcgtcagagcttctgaaagacgaactctgatcacggtgccatatgtaggcatgcagctagctacagcgagagaatcgggcacgtccagagattcagagaaaatattcagttataacttacagtactaaatgcactcaggtcgctagttttatttgtcccgagaattattattaatgatcaaaaccgttactgatttgaataaggctagtgtaatccaccactcaactttttccttgtttctgccaaattcatgtagaaatagttcg

SEQ ID NO: 126497 - DNA, 714 bp, Zea Mays
aagtagacttactaattttatacaagttattttgtgcctagaagttttatacacaattagtaacacatctaccacaataatcttacccggcatacatatatatcgatgcgctcttcacatagtaatttacattttaacttgggcatcacattaacactactaatttttacccgcgaccgtaaccatacatatttagactacaacaagcaaatcatcgtgattacgagcttaaccaacccatctaacacttcggctaactagagcaacggtatagcccgctaaataacatacacgtcggcttgcctattattatcactatctaaggcacaacatacaccacaacatttttataaacatacatattcacatgtatattcatacatcgaccaaatcatacgaactgtaaaccactaatctttaactcgaaaccatcatgcgcttacttcccaaatcatgaacacataacgcgtattgacccgactcaagatatagaagaagcgatgactactttggcatgtcaccacatctctaattaagccaaaacaatttctacttatatcgaccgaacattcgtgtcgagcacaccttatattaccttgtctcgcatacaaccatgttgtggcgtgcactcgagacactaccgattaacttaacgcaattacctctacaatgcacttcgatatacacgttcgacatcacagtgcttcgacagac

SEQ ID NO: 126498 - DNA, 414 bp, Zea Mays
gaaccggcacgcaatcctgaccgcaagattacaatccgatggttcggattttcaaaggaccgcaaccgataccgcccgctggatcacagatcagcgaccgtggttgaacggatgaagggggggtcggtcgtgttgtaatcgcaagcgcacacttctgatccgacggcgcacagtgcccccacgaatcggtacaccaagaactaatctcctccacccgttttgagatcaatggccctagacacatctacctccctcccatggacacagcggcggcgcccgtgctaggcacggcggcgaccccgccggagagccgcaacgtggcccacaagtgctcccaattcacatccaacaagtgttgcgtaatgtggggatgaagttgaaggaaggggactgtgtctttaccaattaggcttt

SEQ ID NO: 126499 - DNA, 313 bp, Zea Mays
ctcctcttcatccacctcgcgcggagttccgcagcggcgcagctcaaaattcctgccctctcgccatcaaatcatgcgaaggatttgctaaacaggccatccatgttttcgtcatctgtcagtgtcaggtacttgcaaattttctagaaaccttctttagagatccgactaatccattccgtcgatcgagtcccgtccgctccatatggaagaaggcggccgccatgaccatgacgcgggcgaccgcatcagcagcctacccgacgacctcctcttctcaatcctcctccgcatcggatccattcgcgccgcc

SEQ ID NO: 126500 - DNA, 710 bp, Zea Mays
gcatattcttcaagatatatgtctcattgttcatctggaataacgagaatggatgaggttgggtgctatcattttctatcttacaccacaatctctactactctataaggaggtaacgtgggcgtccacacggcttcaccacggctccgcccgacatcacagcggcgcgccctcagcaagacggcaagcgctccccctcacccttccccgcggcaatctcggcgtccccgctgcagtctcccaccctcgcggcaagctcgccctcccccgtaatggcgcaccaatgcaatctattgccccacggcgtccacacctcgcccccacccccgcctgcccgcgatgcctcctcctccagtcgattcgccattccggtggtgaatcagcctcggtgccacaccccgccccatcctcggtgtcacaccccgccctcgtccttcattgcccccaccaccagtgtctcgctcctccacgccttcgccactctcactgtctccaacgggcgtgcgcccgttccgcgactgcgacggtcgtatgcgacacttccgctcgcgcctcacagggcagcacagatctatcaccttcgacttggagggctactactccaccgtcgtccggggacctgtgcatggtgggcaccagatccaggagcgcatctccgaccacctccacccgtggagctgcagagctgctccgcacagttttgggtctgc

SEQ ID NO: 126501 - DNA, 502 bp, Zea Mays
ggggtttccagcttatgatcctgctcgtccatcgatgatctaacggccatccaccctcctctagcccccaactctgagcacggcggcagcgcactccggcgagccctccaacccaacgcgccagagcaccaaaaccgaaaccggccattactacatcatgtggacacgaattcaaacaaatgttgaaggttcatacccggatctggtccgcccacaaagcagtgcggcatggcggtggagagattactccgacgagcaattcacgtccatgttgtggcttcccatactcgaaacagcattgaccccgattagcgctccctagtgaagcacccaggccgtcgttgaagccttggcaacggcaaaatcgaagatttgcttgcggcgacggacccatggtcccctctactcacgatgatgaccacaacattctcccaaatctcactgtgacccgaggtcgatggatggagggacaccttggtcctgcttatatactcctgaggcc

SEQ ID NO: 126502 - DNA, 605 bp, Zea Mays
ccctgctaaggtagaagaccgatttatgctaattacattctctctttttttagagagagagaggtcgtgctactggtacaatgcatccatgtgacctgacccgtcggatgcagctactgtatagtagtacccaaaccaaatgatcaatattcatacgctgctgcgtcaggccatcgctttgaccagcgtacaatcctaaatatctcatgcccaactgcacgtcggcacccacacacatctagcaggctgcaggccccattggctggcacccgggcctatgctgctctgcgtccatgatcagacagcagataccagtgtcgcagcctattctctggtcaccactcaccactgctggatcaatcttacaggctgcagctcccaagggggcaatgcacacagtatgtatgtgcctgtctgcacgtcaatggcaatgggattctggccggtgacgcagaaaacttcagatgcagcgggcacaggacagcaggaggaggcagaagggagtttttggtgtcttgtcgtttcaatcttgcggcctttcattctccccgctcccccgttcagtgcagatctcatgcaaaacatgagaccaaacttgttgagag

SEQ ID NO: 126503 - DNA, 1306 bp, Zea Mays
atcctcatcattgccgctatacaccatagatacttgcagatacttcaaatccgtggtgtattgccttatttcggcaatctgctcctccgataattgtttactcgaagcatgtcgaacaataaactccaactcttcggcaggtgcttcaggagcaggagacttggacttcttaggggcaacttctttttccaagattagtggtgcagtttccgaaggtcttgcttcggcaaaataactgagggtccagcctcagaaacagcttgtgcagtgccactttcgtcagaattctttaaaatttcaccttctgaactaggcactttagcagaagtaggagttgatgccttcatagattccatgacagcgtctagcatgctggccattctcctcttccccagagttgttgcagggatccttgatatgccttcggcaattctgtctcgcgcggtggacacagggccttcaactgctctgccgccttcttcagttttggctcttcagtcggtcctgtcttagcttcaacaggcacagagcgacttggctcagatatagaagcagaccctttagttagcttcagcacttcggtcgtttcaatgcgcttgggctggtgcattaaaactttaatctcctttgaccttggcgcactagaagtcgtcaaagtagcagtctttcttttctttccttgctttcgtgaaggataacagtaatctggatatacaaatccaatgacatcaaacaacatgttcaacctctttttgcctcgagccccaaaggccgttgtcatggcatcatcttcagccttcgaaaaggctccaagcaattcatcactggttgcttctatggcatctagccaatcatcatttggctcatgaaactgactcctgtatttgaaggtgtacttcaggtagattaaaccaccttggctagagccagcagaagcctccttcggcatctcccacccatttgcaagtggccatactttataatcaatgtgctcctggactaagtcccttgtgcctatgtaagtgcatactgtattgaaagccgcctggcatgcttgtatatcattcccaagggtagtggatggtctcctaataccgaagcgagaccatataggacgttgaataatcgccttgatatcctccctttcactcaggtcattcttcatgtagaaccattcctgcatccaggccctaggccatctcttccgaaatgtgggaactaggtagctcgcctcaaagcgagacacgaagttgtaacaaccgaagttgttgtgatattgctcttttccagtaaccttcgtctcgta

SEQ ID NO: 126504 - DNA, 547 bp, Zea Mays
cgggcgtagtgtttggcttccataacttcttcagataacgttttcccgaagcatgtcgaataataaagtcaatatcctcggacgatgcttcaggaacaggagatttagcttttttcatcacatcctgctccagagccatgccaacatctagagattcttgctcagccctatcctcagttgtggcaggctttgtcttagtaggcactgagggcccagcttcggttttagtgtgacttatggcagtttcagcatctttcttcataggaggagttggtgtccttgtcgtctccatgacatcgtccagcacactagtcattctccttctcttgggagttgttgcagaagcttttgtaatcttcgacaattctgcttctgccggtggactcaagatttctggcagcactattactttttctagctctggttttttggtttcctcttctttggtttcggctggctcggctatgggcaccttcagcaattaaatcggtcttgcctcggcagtagaagatgctccttcatcaaatttcggcattgtggccgtctc

SEQ ID NO: 126505 - DNA, 383 bp, Zea Mays
cgtgaggcctccgagcaagcagcggagagatcaaactgagagatggagagagaaagccagatgccgctgctgtgttggccaccaccaccgactggggcaagagagaaggagagaaggaagatgccgtggtgaccggcggtacggatcttcttcacgcgcgaggtattgggatggatgcactcggttcgttggtcgacggcgagcttcgatgcttgcgttgtcgtcggggggacggagaaggacctcgtggccaccagaatttctcacccatgccgctgctccgccgcggaaccactagcgccgtggtcggagaatatcagcatcctcaccattggtacgtgaacctatatctgttgttgggatctcgtctccgtgtagcgctc

SEQ ID NO: 126506 - DNA, 555 bp, Zea Mays
gtacgcgccatggtacagtgactcagacagatcagaacgacagcacgacagtccctcaccgacgacgaccgatctccgctgagattcacgccgccgccgttgcgattcacgtcgccggtgaccagatatggccgctcggtaaaagccatgcgctggacggcactccggtgaacctccccagtacttcccctctgctttgcggctggagcgataggctcgccggtgaaccgccgcctcccggccgtgcgccgcgtggctctcactttccaccgcaccgccacgacttaccctcgctccccgttgatcgccggaacaactgccacgccactggacacgaattcaccgcgcccgccttcttctccatttccggctgtcgcgcgtcctccccaaattcaccgaccgccgtcagagcctcctataaattgagcccccggccagctgcactaggtcataccgaagccatagcacccactctcccccctcgattagcccctctagccggagaatcgccgtttttccccaaatcagcttccgccaccgtgaaacaagcttcac

SEQ ID NO: 126507 - DNA, 315 bp, Zea Mays
caagcacccaacgaactaggcttagacttaaccttatcatacacatcaagcaaaaaggcatacttggtttgtagggtggctatgtttgacatgtgcaccatgcaactatcatgcctcgtcccattggtcactatcgatgccctaataaactcaagttctctaagcgcagtctctaattcattcctctcacaaaaacatgcttaaacaatttgtcctagctaagaaaagtggaattcaaagtggcaatctcatcagtgaaaagtgatatcttggggtcagagtcatcctcgctctcatagtcatagccattcccgc

SEQ ID NO: 126508 - DNA, 647 bp, Zea Mays
gcgacattgttatgccaataatgacccgccgcaatcatacgccaatggaacacataatttccataaactttcatgtcagcatttcacaaaaccacctatgaagatacaaaaactaccactagtaaaacctatttctatactagtggtggtcgaaacttgagaaagtttgatggccaagaatcataaagcgacttgtaattacaattagctaacatagataataaattattatagaaacagacggtagttcaaggcttgaagttggatcacaaagatacaaaatttttaatgaggttaaattgacaaacacgaaagagagaaaagtataggagcacattaaaatcattccaatgttgattgtccatctatatttatgcaacataatatttacacctctcttagagcaaaaattaaattaccacctagtttagatgacaaccatctatccatgctaaatttaagcactagagagtcgacactatatacacacacatatatgtggtataacgccggcaacgttctctaacaagaagcacagatagcaacaacaataacaacaatggtcgcgttcgagcgtagttcgagcgtagcaggagcacaaccaccgtggtgctcctcgtccttttgatgccgctactgctgtcatc

SEQ ID NO: 126509 - DNA, 601 bp, Zea Mays
caagggcgtctcgggcgagcactggcaggcttctgaatatccaatgttataccagcttctgggagaggcgccaccaccaatgtctcggcaggagcagcattagaagagtcctcagccagcaagtcaagcatagcacttatttctgcttcactaggatccaaaggcacctcaaagtggacctgccgttcatcatcaggaatttccccgagcgaggcaaccaaagtgttaacttcttcggcagagggtcgcactctaaggcccaaaccgccatcagcgacaggtggatttgacacaaaaagagtgaaggccttgggaggaggcagattccatgctgagtatgccactggggcaccaacatttgataccttgcctctaagaatcatctcaagtcggttcaccaagtctacagaaggaattcttctgttggtaacccgagttgaatcagctaggcctcggtacagataagccgggtatgccctgtctttcaacagctgaatattcttgaaaacaaaatcagcaaccacagcctcagcagtcagacccctctctttcagcagtccaacttcagctagcaaagcccccacctcagttacctcctgat

SEQ ID NO: 126510 - DNA, 663 bp, Zea Mays
atgctaccaggaatataaagtaaagaaaagaaggtaaatcatacattggccggtagagttgaagtgttgggccttgtgcgtaagaaatcatgtaatatttttttccatggactaattaccacctcctctctagccttgataaatgcaatatacttagtatgctgctcctcacgcacttctcgtatcaccacaaaatcagatggagaaagacgacgaggaataatcttgccttctgctagtctttttctatcattataatgtacacgaccacgtgcacaaccacagcgcaagttcgtcaataccgagataaaaggctctgaaaattttctataccaatttatccaatatattgtgcagctgccaatacgagtctcattagggagacaactgaaatcctgatttattgggcgtaaaagatgtgcccagtaagagtaagcgaccccaaaatcatcttctgtatacacgctcttcagtacaagatatgggacgatctgatcaagcctaaactgtcgagttacacgatctggatggtacggctccgcaatgcatatgttatcacgcctaaaaggaagcaagccacgccgaatgcataaacaaaatattttgctgatccaggacgaaggtggtgtgcgtagatggttggcagagtggggtttgtatggg

SEQ ID NO: 126511 - DNA, 695 bp, Zea Mays
cactcgggttactgtaccatcagaagttcagtttcagtttcttgctacatgcctgacagagcaacttcagaattctttttctccagattttctatggcaacgtgatccacactctgcagcaaatttgtagagtaatataccatctacaaatttgttatgggaatcatacccaaacttgcactggatcatgtttaaatccaagtccaaagttagctttgtttcactgaagttctgaatttcagaattccaccagcctgacagtccaactttgggcttacttatctctggatttttcttaacaagtgagcttaccaccttaagcaaagttgttcttctataatcaggttacaattttgatgtggtgacctagggcaaaaaccctagactttgaaagatacaaggccccaaagttgagccttcaacactaaatttcagacttagtatagaactcaaatgaggtccattttgcaattaagtccaaaatccaatatttggctttcaagtccacacatttgtgaaccaaaggacttaagaaacttatttgacttggtttttgcactttagcccaaaagtggactaattttgcacataggtccctagggtttggttttagggtttccagggttccaattagggtttctggtatcccaggggtataaatgtgattcaactttatttttgggggtattttataa

SEQ ID NO: 126512 - DNA, 333 bp, Zea Mays
aaaacagcaattaataaatttcagctcctatacaattcaagaattgccgcgttctagatacttgaattattctaacactttgacaattgttagagttaaaatacccaagtgagaactaacaagtagacttactaatttttatacaagttattttgcgctctagaactaccatacacaattaatcaaagcattcaccacaatcatcaaatccggcatatatgtatatcgaagcgcttttcacccactagttcacattttaacttagacaccacatgagcattactattttttttacccgcgaccataaccatacgcatttagactacaacaagc

SEQ ID NO: 126513 - DNA, 323 bp, Zea Mays
caaaacacaatttcatccctacatttaccaaccttgttgggactcactaaatcaacgttggtactaaatccatcatgaaaataatacttttgccactgttttgcgctgtcccactgtcctgttgaccacaaatccatctctaacgcctagatgtcttgtgccgtcactgttagacaacctcttatgcggaggcgtcgttagagcacatcctgtgatgtcttcgcgtcatcgccacgtccgtatggtcttccatcgataacttcgacatcagggaaggttgttgatattgatttctaccgccgactcaattaaaattagaaagc

SEQ ID NO: 126514 - DNA, 551 bp, Zea Mays
agctgagttgagctttctcaactctagctgaacttcaacttcaactggggtccaagcaagttcaaccggggtccagagaggttcaaccggggtccggggcaagttcaaccggggtccaaggaaagttcagccggggttttttctggacctcactggtcaaaaccggttgaaccggtcctaggggaggttcaaccggtgtcagggtcacctatccggtctgacctcctgactggcagactgactgccagtctgacccctaggcggttgaaccggccctaggggcagttcaaccggtgtcaggacctatttttgtagtctgacttgtagtctgccagtctgactggcaaactgactgtcagcctgccccaggcggttaaaccggtcctaggggcggttcaaccggtcctccacagccaaaatcagtccaacagccagttttgaagtcccacctatatatactcactcctacctctctccccacaaaagagcatgacccaaactccatttctaacttgaagaacacctcccactctctctcacacatctcttgt

SEQ ID NO: 126515 - DNA, 721 bp, Zea Mays
ttccacttggggttttcgtccaagagatacgacaaccgagtgttgccacggatcagatggaggaatgcaacgtttcgagtcaggcagaagcagatcccaatgactggagagagccaatcatcagatacgtaaaaaaacaaggaagaagcaggtaacaaagctgcggcagagcacattgcaagacagttggcccactataccattatagggggcctgctatatagaagaggcacaagaggggtccgtcctcatgaagtgcatccactcggctactggaaagcagctgttagatgagattcatgccaggcagtgtggcgtacatgcagcgtcacagactctggtgggaaaggctttcagatccagattctactcgccgacaacgaagaatgatgtagccgagttagtccagaagtgcgaggcacgccaattcttatcaaagcagcaacatctacccgcacaacagttgcagactattcctgtgacctggccatttgcatgctgggggctcgacatgatcgaccccttcaagaaagctcaaggaggatatactcacatactagttgctatcgacaaattcacaaaatggatagaatacaagcccatcgcctctttgacctcagcaaaggcagtggagttcattctggaaatattgttcaggtttggaatacctaacaacatcatcactgacctaggatctaatttcaccagctcggaattcttt

SEQ ID NO: 126516 - DNA, 600 bp, Zea Mays
ccatccgctcctagccacacaaaagcatgataatcactgtcggtgatacgacacgccgacaccaccgaggcgacacaccacccaacaaaagaacttctatgtcatataagtcttcatgtacacacgcagaagcttgcataccagttgtggtgccaatatgagtttgacaccctctagctcgtacacctctaacgagttccatttgttttttattcattgccatgattaggagggaaccaaaggattcaagcgtggaggcacaacctgcatggtggaaaggaggcggtggcatgcgagtggtagagcatggagtgagaaagatacaaggtgggcacataggtcgaggagcacgtcgagggaggcaaggaaggcgatgaaggcttggtagagcgagagcaatggttaggaggggagtgagcctgtgagagaaagagggagagtgcataagatgacgtggacgccatacaaatggtgtggagcatgaccatagggtgtcgggaagagggagagtgcataggatggcatgggcaccgcacaaacgcgcatggagcatgaccataaggtcaagtgggagtggaggaggtgagaaacatgagtgga

SEQ ID NO: 126517 - DNA, 354 bp, Zea Mays
catacaaagccacctaggaagtagggtattaccccctcaaagcggcccaaacctgcagaaaatcgctcgactctctcttcctcatgcccacgacacgaaccatcgagttacgatctacaacaccatcctacccgaaagcaccacgagggtacccccgggtgtgcagtcggacactaaacactgacaacctaggccccgccattttgcggcgcggccttcgcctgcgtgcgacaccattcgccttatcaagcagggtcttcgaccttgccgagacagttgttgttcagaattgtccgagccggcggggacgccttcgcgaaggtacgaggagcccccatttaaacggtgcagccc

SEQ ID NO: 126518 - DNA, 557 bp, Zea Mays
gtttgttatgtctacttacattgctattgaacattgtaattctttttaatgtagttgtactacttggatcacctgcatacagccgctgccccccataataagagtggcacacctcgcattaaattttttgataagaatagcataaaagctttgaccaaagctgacaagaggaaggttcgccatggggctgaatctttcggacactgtgaagtaagttattcatattttcacagttggttatgcacagttacacagttggttactcacggtaactacaattttatttctagttccgaagctcgacggagacatgctatgcagttggacctaagatcgatcgccaatctgaggcaagtttatgatgtattatatccattgtttatgattatttattgaacaaatagaatacgaaggtggacatggattcttactattttttgctgaacaaccagccggagtgcaggaccaatattttcgatgcaccgcgccctggccccatgcctcggccaacttttaacatcaaacttccatctatcaaagagatgatgtcaagtaag

SEQ ID NO: 126519 - DNA, 507 bp, Zea Mays
ggggccgctttccagcttctgtcgcctcgcgcgccctggtcaccaagtcactgacgcgtgtgtcccatttgtcagatcaatcttccaggatcgcaacaaatcctggcctccgccgcgcgaactccgcgcttgccgcggcaaatcaatcgcgatattgggcatgagctcatctttcctcgtgcctatatatcgtgaccgctcctttcccctctactaatccatccgtgagctttcctcgacctcggaccgtgagcgagaacgcaggaggaggccgccaccatgaagtagagagaggaagagagcaaatcacgttaccggttgattcgtgatgtcaagtccccggtgggcgacggggggatcaacaatattattcgcacgtggttgtggcctttccaagcggggagatccaccagtgattccccaattgctcgtcggagtactttcaacaccgtgatgtcgcgggtcgtcgtgggccggctccccggaactcgattgccggtaaaatca

SEQ ID NO: 126520 - DNA, 494 bp, Zea Mays
tattgatttctataacattttggatatattgatttctataacattttggtatatccatggccatggtgagaggctacgtgcatgcaaaatattgacaacaattgtgcttgctaacaaaaaaataggaaacaaatgtaaatttccatcacaatctaattaaaaaaacaacgtctaagaaagattaggtggtcaagaagtattacgtggaagtaatcggtgtcttaccattctttcatgagtacataaattattttgaacctgtaaaagcaataaaaatgtatttgctaccgtttttatataccatatgagtacattatgcaactaagattcaaaccttgacttatgcataatattactttatttttgcataaagtggggaaagtgacgtaaaacaaccgtgggctttggaaataaaattaataagacctcactcagtggatttagagtacatttggtagatatctagaattttacagagacatttttagatccgg

SEQ ID NO: 126521 - DNA, 413 bp, Zea Mays
gcagatacatgcttgtccgaagggttgcatgctatttaggaaagaatacacggaggcaatgtactgtcccaagtgtaaatcgtctaggtttatggaggtagatcctggtgatggacagaagaggcagctcgacatccccttgacaatcctacggcaccttccattcataccgaggatccaacgtctatacatgaccgaggaatccacgaaacatgtgacatggcacagaaatggaaaatgatacaatcctgataagatggtgcacgcatccgatggtgaagcatggaaacactttgatgccattcaccgtgagaaagccgaagaggctcgtaatgtatgtgttgcgctggccatagatgggttcaatccctatggaatgagcgctgccccgtacacatgttggcccatgtttg

SEQ ID NO: 126522 - DNA, 342 bp, Zea Mays
cggcgaccggcgagaaattgcgcagttcccggctcggcttcggggctggggaggtcgctagcacccacgggcaggcccacgcgaccccaattgctaaggcaggggcgccacgaaccttgaaccgcggacggcgccgatgacattacttgctcggcggcggcaccccattctctctctcccaccgctctgtacgcatacacgacacggggactacttgcttcgacttggcgtatccacaggggagcgatagggctcgagttttatgcgccccgccagtgaagtccgggtcggcgattcctggcggcaccaccggcttccgttgctacagaccgagcaagaaga

SEQ ID NO: 126523 - DNA, 608 bp, Zea Mays
catcatccaaggccgaaccgcaacatgggatttaatcccgaccgttcaaatccgaacgaacggccaggagatcgcctccgacctcccagcagtcaagcacggcggagcagaagcccgcgacggcgctcttcgccggcaaacgtccattcggcgccccggagcccgactgagcaagcagcgagttgcaaaacgctcctgagaaccagacgaaatagatgggggagaaaaataccttaattagagcggagtacggacccgcccacagcacgatgcggcattgtcaatcaccggcaagcaaatcccacgatttggatcgaccccaggagctttcctgtccaattgatgtcgtgctgggcatcccttcgcataggcgattcagccaaacctccctaccctagaccggacacagcatagggcccgacatcgccgtgtgcccggattcatggcggtaatctcccttccctcggttctctctccttcctagcgtccacggcacggttcgacaagatggatgggggagcgggagcgccagggttatataggggcggttagagtccatgcataagaatcgcgaagatctgcaaccacttcagccagcacagatcacg

SEQ ID NO: 126524 - DNA, 345 bp, Zea Mays
gcttatataaacgtcggggattatatagatgctgctcaagtgtcgcaagaagagttttacttgtaatgccactgttataacacaaattaatcaaaaccaccatggtcctcaccatcgatctgatctacaatacaagactacaaccaggattttgtggcaagaaatatccagcctaaaagtgccaaaggaaagttaataaataaaggtacaggttgttcaatcaacgatattagcaagtacagaatgtggagtcagcagagaactcgagataatagattaacagtagcaagctagacgcagtcaaattcatcagatcatgcatgtgcaacagttaggtaaatccac

SEQ ID NO: 126525 - DNA, 503 bp, Zea Mays
gggaagtggatcagagagttaccttatgtggtttggagcttaagaactcaacccagtcgagctctgcatggaaacacccccttcttcatggtctatggtccggaggcagtgctacctgccgaccttaggtttggggcaccaaggctggtcttcgaaagcatagctgaagcagaagctaccaggctagagaatattgatgtgctagaggaagagcgattgaacacactaatctagtcagctagatactagcagaccttaaggcgctatcatgataaggctatacgacatcgatcctttgtagtgggagacttggtccttcgctgaattctaacgggagaaggacggcacaagttatcaccgctatggaaagggccattcatggtatcggaggtcactcggctaggatcatatcagcttactcaaatggatggcacggaagtgagaaattcatggaataccaaaagcacctcgaggggtaaccccgggtgcgcggttgggtccca

SEQ ID NO: 126526 - DNA, 308 bp, Zea Mays
gttgacgtgacaagagcgatgaatcctgtatgggtgggtagttatatgagaagttctagagttattccttgtcttgaacccttctttggaaaatatcgctggagtgagaggattaccctagagaggtgcacaaggtgcagagtaccttggattagattctcgtaggtatgatcaattatggggctgaagttgtggagtttcccacctctaagtggtgagtcacatgttagtggaaggtgcttgctttggcaaattatggatcattgtgggcgaatgcttaggacatagaactttgtcaaacatgcatg

SEQ ID NO: 126527 - DNA, 386 bp, Zea Mays
ttcgtgcctgtggctctgggattataccaatacgagcacgtcgagtagtgagccagtgagacgacgcgaggcaggttggcagggcccgcagtgcacaagcacaattggacttgttgcgtggcggcttttctttcttcgtccgaccttggcagttggtcgtgtactcgtgtccatgtcgtcggcagcttgaccctgttggatcgggcacatgttccttttttcctccgatccagaaagtagcgtcaccggtgaggtgagctcaggaatacatacacgcttgacgcgggggcggggacgagggagataaacggtcgaagatcaggcacatcatagtgctcgagaattcaattcgcaagatggggaataaggccaggggacatcatatt

SEQ ID NO: 126528 - DNA, 617 bp, Zea Mays
ataaaatctttacaagccacttttggcaggagctgtttcggttgtcgggcacggccttgaagacgagttcttcatatcatcctcaaacggatggtcaaactgaaagattaatcaatgtttggagacatttctttgcagctttgtggacgcatgtccttccaaatggttatcatggttttcattggtagagtactggtataataccagcttccattcttcattgggcactacttcttttgaggtaatgtatggtcggcatcctagacatctgggtatctctatggccgatgtgtccacaacaaatgatttacatgcttggatgcaagaccgggaattgatggtacgactggtcagacaacatcttctacgggctcagcaaaggattaaaactcaggctgataaaggaaggacagatcgtgaattccacgtgggggattcagtatacctcaaacttcacccctatgtacagagctctgttgctcgccgcgccaatcaccaagttttttggtccctacactgttttacagcgcatcggcaaggccgcttacaaattgcttctgccaccgtcggcttctatacatcctatctttcatgtgtcccaactcaaacaatcctgg

SEQ ID NO: 126529 - DNA, 536 bp, Zea Mays
tatgttgtcatcatgaatgatgaactgaatcaatattatatattatttatatagaacaagactcacttcccacgatggaggaaaacgatgaaccatgcctgatcgatagcagccacaaatttgattcttagagagacgaaatattttcagacactcctgaagaggactgagaatatcactacaattatcggcaacaatggtcgcattgtaggctccggtcgagccattattgtcctccctaacggtactaggatcttcattgaagaagcattcctatacccaggagcaactcgtactctcctcacgttcaaagatatccgtcgcagcggatatcacgttacaactgcatgtgtgagtggtgctgaatacctccatatcacatcaacgaacgaatgtgaaacaaaagtggtagagaaagcgcaaggcacctcctctgggttgtattactcaagaattaaaccaccccctgaatttgttgcgatgtctactatatttaaaaatcctgagtcttttcgagtatggcatgaaagactagg

SEQ ID NO: 126530 - DNA, 1314 bp, Zea Mays
acaacctcttccagtgcttgatcaaagtctgatattgaaagcccttgaaggctgacgagtgccgacaaggcttgggagggaatatcgctgcccccgtcgctgcctctgtagtgacgactgttcttgcggatcagcggaatttcttcttcttcctcttcatcctcgtcaaacacaccgccagcagcctgagcatcatcacaaccttcaacattgacctcgggaatgacgtccaccaggccgtcaccaaggaataatgcagaagggctaacgtcttgatccaggcatgacaatcgccggagtcgccttttcttcttctcctcgacaggcgcagtcgggcggttcactcggcgtgaacgcttctggcgggcaccttcgggtttctggatttccacatcctcgccaaactcttgtccagtcgcaatggccattggttcggtacaggtagagtcagacgattccccggccaacaggctaagtacgtcatccatctcagcatcatcggtgctagatggcatctcaaaatgagtttgcctctcagcctcggggagattccgaaggggagcaatcaaggcttcaatatcctcaggggagggccgcactctatggcccgggctaccatttcgagcaggaggattggagacaaattcagagaagggcctattcggaggcaggttccacgtagagtaagctaagggagcaccagcattcgagaccctacccctcagtatcatatccagtcggctcaacaagtcctcattgggaatctgtctgtttgtgacccgggtggaatcattgatgccggtatacaagtaagcagggtaaactctgtccttcaaaggttgaatattcttgaagacaaagtcggcgaccacggcctcagcagtcagacccctatccttcaataagcagatttcagcgagcaacactttggcttcggctacctctgaaaaagtgggagactccacccagctaggcgtgcgaacgtctggttgccttcctgaccgaggggggagggatttgccgtgattctccatggtgaaccactcgaggcgccatcccttaatgctgtccttgagggggatatcgaggtattccactttcctccctcggcaaagttctaaacttgcgccgccgacgagctgatgctgccctctagccatcccgggccgacagtgatagaggtacctacagattccgaaatgggggagaattccaagaaaagcctcgcaaagatgtacgaaaatgacaacttgaagaatggagttagggttcaagtgtggcagattcaaatcgtagaaatcaaggagaccgcgg

SEQ ID NO: 126531 - DNA, 672 bp, Zea Mays
actggttcgggcagaatgtcactacttccagtgatcggtggctagggctgccgacaccattaatgatcaaactcgtagtaggggttacaagcagtcaagagagggaggagaggctcccacatctcttatcagggtggaagtggaacttagaagctacaaggtggagtcctagctaagtcttggcttggtggggctccggcctcctggtcctcgtcgacgctcctcctcctgttcgtccttgtgggttcgtctccgtctgaaggggtccgattgtctctaagagctctccccttctgtccttctctccctcgatacccttgccctgaggcaagcctctcccttttataggctgggagaggggtcggccagcggtggcttcactgggaaggagccgtaaggcaggggtaaaaccagtgttttagccccaggtgaggccacatgtactcgtggggctcgaggctgcatggatgtttcgtaattattgtggcagatgacgtgtgggtcgtgatggtcctaggcatcatcattcaggctacattgaccccccacttttccatagcctagggctcggcgccgcccatcgtgtattgccctgcgggaggtctgtgcacttaggcctagtctgataggccataagtgtgccacaagccgagggttcgtaggtcgtgattg

SEQ ID NO: 126532 - DNA, 615 bp, Zea Mays
cgataccaaataagtgtttaaaaatgtagggaattttctagaatagtgacgggtttagagacccaaaaacattgttatgtgtcagacttaataagggaacaaaatctttctttcattgctatatcggagacggtccgtaagtccttccatgacttttttcccaagaatttgtgtggggaaaattatatttggcatgtgaaagaacccgttggtcattcgagaggtatccttttaggagtgaacttagatgtgtgtgatattggaggaattgatgaagggaacttttatgtgaagtttaagcttcataataaaaatgatagttttaaatgggctctagtggctgtttacggtcctgctcaggatgacagaaaagaagctttcctcactaagctggtccacgtcgtaagtcatgacaccttagctattgtaataggtggcgattttaacatcacgagacatccaaatgaaaaaataaaggtagttttatacaacgatggcctttcttatttaatgcggtgatcgatggtcttaatttgaagtagttagaaatgagtggtagataatatacttgggctaataatcttcctaattcgacgtttgaaaagttagatagag

SEQ ID NO: 126533 - DNA, 313 bp, Zea Mays
agaagatgggcttgtcttgcccttttatagctcaagggtagattttacagtaagaactagcgtctatctatggaggagttcggtctgctgtcttgggttgccttagccctcctggcgtcttctgtaggggcgtgcgctgccgtattcttgatgtggcattccgtcttgtctacccggcgattatgttcctgtagttggtctgatgctaatgtagaggtacttggcgggtcccgcagagtatccttacggcaaggttcagggttgtattcagtacaggtttatcttccgtcatgacccttgtgtcacctttcag

SEQ ID NO: 126534 - DNA, 376 bp, Zea Mays
cttcgccatcaccctgcgagaaatccgtaaggagtgcaaccctcggtgagacttgtcgtcgtcgttcatttcaaccttcacggcaggctgggctctgcggcgggtgcagggcgtgtcgccaggagtcatgggacacgtccgtagaccactgaggtcggagcataaggcggggttgccggaattgctcgacggacctcctcctccgccaacctaccaagtgtcaccgcaggctgcatcctcgccactgcaatcttgggtaagactcagctcaattagttcgttgcatgccctagatcattttgcacccggtagtgttggtatacaaaccccgggtcgttccgtcgtgtgtcgccggcgagtgctccgccgcggcgtg

SEQ ID NO: 126535 - DNA, 372 bp, Zea Mays
ccttagcctggctctagatcactaattgcatgagttcacactgctggagttccctagtagatgatggcatgcttctaaacaactagagtgctaaccttttgccctttttgatgctatgtatatgtgtgtcgtgtgctacccttggcccctacctagctgttcctgcattgcagttgcaggattgtagccttgctagctgctaggatgtctgcaagtgtgaattgtgatataagcggtgtgccttgctgcctagctagctactgccttgctgttgttgctgagttgttagcatgtgtgttggtgctactactctgctagccttttggtggctgtttcatgggccatatgttttgtaaacaaagctaattttgg

SEQ ID NO: 126536 - DNA, 281 bp, Zea Mays
cctcaaagggagatctgcccaaggaagaatgaaatgttgtattatactaatattcagccaatgacagccactgaatccattttgatgggcaagcatggacaaaactccgaaggaaggtctccaaacattgattaacgcgttcaacctgcccatccgtttgagggtggtaagatgaactcatccgtagagtagtactagccaaccgaaacagctcttgccaaagtttacttgtaaaaatctgatccctgtccgaaacaatagaatgtggcagtccatggagc

SEQ ID NO: 126537 - DNA, 351 bp, Zea Mays
gtagaatgcactggagctaggctcctcacgaagcacccactttcttctctcttgtgttctcatcctgtcacctaggattttgatgacatataactgtttggagcccacctagtcagccttactatacttgctcttagttgtgtgaaccaaacacccgtggacctaagactacttgcatctctacccgttggcccctccctcccctgtcactttagtgtcgatggcggctacagtggcacgttagtgcccacaatagtgcatgcaacaactactatagtgcaagcgggttgagcagtggttcaccagatctggagtgctgcaaccgcccccaaacactatgctgctctcggg

SEQ ID NO: 126538 - DNA, 517 bp, Zea Mays
aggcctttactggagttgatcccactggtggtgtgcctgctgaagttgaccccaatgggtgtgaccgtgcaccaactgaccccaacgaatgtatccgtgcaccagctgatcccaatgggtgtgatcctgttgaagctgaccccattgggtgtgatcctgttgaagcagaccctaatgggtgtaatcctgttgaagctggtcccaatgggtgtgatcctattgaagctgaccccaatgggtgtgatcctgcaccatcttttgtccgcatttttgatgaggacgaagaagaagaagaagaagaggaagttccactagttcgcaagaatagtcgactttacagaggtagtagaggggatagtgatattccttctccagctctgtctgctcttgttagccttcaggatttatctataacagattttgatcagacccttgaggatgtcattcctgaggatatgctgttagagctgactgatggtgatatgatggatgtttgctctgacattccagatgtggg

SEQ ID NO: 126539 - DNA, 309 bp, Zea Mays
cgatcacaatacacaatctcaaagacattcatcttatcctccacgtaagttagccaatctgtcgcctcgaccggagtaccactgccatcaaaagcatccagcttcatgcccatccactgcatcagagaaagaccactgactagaagaggcacctcagcctcgccacctggagcagcacccgcagggacagcgcccccgggcactcctcctccaccagcaccctgagcagcacccgcaggggcaacaggaatagcttgcctcagaatggccaactcctgttgcatggcctgcatcgcggctaacattgct

SEQ ID NO: 126540 - DNA, 310 bp, Zea Mays
cgggatcgttggattccatttggacgaacaggattaggtggaaggggtaatcggtcggctttggatcgggaccgtccatttggaaaccggcggaatggatccaatctcgcgttacagacgtgtatcgatcatggaccgtgcgattcaaatccaagggcagaattggaataccggttcgcgggttgtaccaaactaatctgggccgccagtgaccgatcggacggtggggatatcacgataccccttcacgggcgtagattaacacaatggcccctgagttttagataaaccaacccgccatcccttgtcg

SEQ ID NO: 126541 - DNA, 342 bp, Zea Mays
ttcttcacgaggttaaaacgaaaaaacaaagtggagtggtgcttaagattgattttgaaaaagtctatgacaaagttaattggcattttctgtatttcatgatggatcaaaaaggttttgggagtacctggtgtgattgggtgatgagaacagtgagaggtggcaaagtcgccataaaaacaaatgatatgttgggtccttattttactactcataaagaggtgagacaaggggatcctttctctccccttctgtttaatttggttgctgatggattggcttgtatgatttgcaaagctcaagatgaggggctgattgaaggtcttattcctcatatcatcc

SEQ ID NO: 126542 - DNA, 608 bp, Zea Mays
ccagcgaagctgtacgcggcacagaccgtccaatccgcgacctatggcgcagatttaattattatggagtcgctctgctccacccgatccacaatcaagcaccacgatctaatctagcgggaagggtatgtggatcctaatctggaccgttcactcctaaatcaatgacgcaaccctttgcctaccccgacggcgtggacgaacagggcgatacggcggcgcaagttcttccccgcggcggagcgccaccgtcgcaacacgaatcccccctctggtgttccaaaacccgatccaactactactacacgatgcggggaaagaaacgagtcattgagagagggtagtaccgactagactggctcggagttctctgctcgcggcgatggtgatgcagcggcgcaggagttgacgatggcgagaaatccccgctgccccggttgccgatcccgcacggagatgccccaaaccctttcggcaagcccaagggaagctccacgataaaacccggcgccagggtgcacgaattcggggtcacggccgcggcgcgtcgacgacgatttctagcggcggtgaactggatgcggaggcgctagtctacggttgcggag

SEQ ID NO: 126543 - DNA, 838 bp, Zea Mays
ctgtcaggtgcactgaatgagctctcccatggtacagtacctggctgggatcaaaacgccagcgcagcagctcttaccgccgacgactccctccgccgtgattcgtgtcaccggcgtcaggattcgtgcctgcgtggatggatagcgtcgcggggtaaaagatcttcgccgccggtgagctggaagccactccggctagccgcggtatctctcccctgctcaccgccctcggataaggattctcaccgccgtcgagctgtcgtcgttgcgcgccacgtgcttaagcgctggacttcatcgcggtgactcactggatgcatgtccggcgatcaccggagcaactgccacgttgaaagtaactttttccacgcgctgagctcgcctcccctctccggccgccagcaccgctcggctgaattcatcaccgtcgctcgatacgcctataaattgagagcgccgcgagctccgttgggcagtaaactatccagccaccatgaattagcctcgatcattcaccagcgcccgcgaattttgagttctccccaaattggttcaaacaagccgcaaagacacttcgctgtggtcagcgcaaatcaggtctgatcatattgcctttagtcttgttctagcatccctaagcttccctcaaactcatcgaccctttagattgaactaaatcgccatagatcactgggaacaccttcatctgtccgcaacactctcggtcaccgtggccagggcaaaccatttggccatagatgaaattgtgttgggggaaatggtcggggtaggtccaagttcgtgtccgccgctcggggccgccagtcttggctctctc

SEQ ID NO: 126544 - DNA, 1095 bp, Zea Mays
aaggtcacaacggactctcaggactagtttgggggccacataaccggagaggattgaagaacttaaaatctcatccttattcaaaactgaataaggggattttaacccctacaatccctccggttttctcgctcccaaaatatagccctcaaggtcgttgcctgacttgcctagaaggctagaagggtgatgcttaatgtgactggaaatccaggcctcaaaaaaggtatagaagatagcaagactccagacaatatggcacacactgaagatgacttcagatcagctatgtgggttgcagcagtttcttctgtagttgtgtggggtgggggggtgcaatctccttttatgtggctcctatcccaacgtaacaatctcaagatccgagttgttgcagttggcaaacacagatctgtcattgtcactgggtaaaccactgtaattgtcacactagcagtcatctgattcagttcaaccctctgatgcatgtagctgttcatcatgataatagaaacaattcatgtccaaggtggcaatatttatattgtaccgggataaccatcacaataggaattcaaaacttggtcgtaagttcttgttagtagttaacagacatgatgtaactgatccatggtaagatataattctgttgaagtgggtcctgttactcctgtatgaatgcatgtggaataacttcttgaaaagtcacatgtaacacgtgacatttggtaattgaaacaaaaatatgatgacatcaaaccctaaacaacaaaattgatgttccttagaaacaacaagagaaactaaattcatgtgatcaattcattatctaggattatgcttgatgtaaataatcgtatcatacaacacatcggttaagatacattgaatcatgcacacaatgagcatagtacaacactacaactcaacgttaaagtacctgcatatacaccacaatcacacagtcctattttagatgtatctgcaacatattgggtttaagcttagaacagtttcttttttctaatcatatgcaccacaatacattatccacaaaccaagttgaggtaaatttttcacaaggaactgttgcac

SEQ ID NO: 126545 - DNA, 527 bp, Zea Mays
ttcttgcggatttttcttgcgggggcgagcttcttcagcttcttgtcgtaatccatcttcagagtgcggtaggcctcacgggtgttggtttcctcgccttctgctatctcgaggctctcttgaagggacgccttttcccttgtaaattccttgacttgttgctccaggctttccacttgggagtttaggtgagtacagtgggaggcaaggtcatcatattggttatcgagagtgtggaggtatccagccatgtagacgatggtggggtcatcctcggtagggtctctccctgacagggcctgaagtctttttctccaggcgggggtattcttgttgctgggtggaaagtagcgaagggggttacaaagattactctgctgtagttttggcatagttgtcggagggcttttcgggcaacattttggcaagtatctaggaagcggtatccggtgaaagtgacttggaaagaaggatggttcgggtagtttcgactttctcccaggtagactgccatagagcatttctcc

SEQ ID NO: 126546 - DNA, 364 bp, Zea Mays
caaattactgagcaccggttccaaagctgttactactacacaaatcagttactctattcagttaaactcaagctgtcaagcaccattgtccactcatgcataaatcaggtaaacaagttactactacacagatcagttactactacacagtacacagatcagttactctattctacagcaagcataattgtccagtacacaaatcagttactctattcagttaaactcaagttgtcaagcaccattgtccactcatgcataaatcaggtaaacaagttactactacacagatcacaacatattagattacctctgcgccagacacgaagaactcgccgctgttagtagtagattcggagcaccg

SEQ ID NO: 126547 - DNA, 424 bp, Zea Mays
cggctatagagcacaggggcacaaacctccctagtataagcaataggtaagcgccagatgataaaacaaggaggggatgcaatgcaatgcggcttgcaacctaatctagggctagtgtggcgagaattcacacaaggcggctaacgagggcaaatcgagtaatgtggtgtctcgacttgtaatctgggtaaggtggatgggatagcggcagaaacaaataacagcgatggagcggttgaactacgatgaagacacgacctaaactagcaacaagactcgacacggacacaaactcaacaaagcaatctgaaacgaaattgcaaggctaaacaagggttctaggacagcggaatatatttttttgtatggcaattatctggagttataggatgaaaaccctaaactaaactagggtaagcctgac

SEQ ID NO: 126548 - DNA, 601 bp, Zea Mays
ctcttcttccttttttcctcgacaggtgcagtcgggcggctcactcggcgtgaacgctttgggcgggcgccttcgggtctctgagtttccacctcttcaccaagttcttccccatctgtgatggccattggcttggtgtgggttgattcggatgattccccagccagcaagctaagcacaacatctatctccgcgtcatcagtgctagccggcatctcaaaatgagtctgcttctcatcctctgtaagactccgaagtggagcaatcaaagcctcaatgtccttagaagagggtcgcactctaagacccaggctaccatcacgagcaggagggttggacacaaactcagagaatggcttaagtggtggcaggttccatgcagaataggccacaagagcaccaacatttgaaactctaccccttaggatcatgtccagtcgactcatcagaccttcagtgggaatttttctgttcgtgacctgggtagaattgttgacaccgctgtacaaataagcagggtaggccctatcctttgaaggctgaatgttcttgaaaatgaagtcagcaactacaactttagcagtcagacctctatccttca

SEQ ID NO: 126549 - DNA, 404 bp, Zea Mays
tggggaaacggcgcctttgtgaagtaggagtagaagggtttcaatcaaatagtatttggacttggatgtgctgatcaaattggattatgcttcggtatttggggatgattgggattagttggagtgactgatttaaggctaacggaggtttggtggtttagttcaggtagtattgttgatttttggttatagaataattagtatttggactatatagcagtccttccccgatgagttggttaatagcatgggcaattagttgccctacaattgcaaaataaggccttgatcattttagtagtacatacttacggttgcattatcatctcctctccaaactggtggtgatatgtttccggtggccttcaagtgaagctttgggacatagttccagaatactggtt

SEQ ID NO: 126550 - DNA, 375 bp, Zea Mays
gatttgcgtgatgaagacaaactttgatttgttcggataagaaacacttttcattgagttagtacttttatcaagatagtgtatcatagagttcatgtgtgcgtgatcgcgttatatttaaattgactgttctgtcaatagggtgttgaggttaccctcagacatatgagtgtaagcatgctctatgtgctcccgatttgagctgattgctttgttagtagggcatagtaattaccttaaatcatgtaagcgtgagcatgtcgcaccgacttaaggcatttccgacttaagccaattgctccattagtagggtatagtgatcaccctaagtcgtgtaagcgtgagcatgtcgcaccgacttaaggcgtttccgac

SEQ ID NO: 126551 - DNA, 612 bp, Zea Mays
ctctcatcattgggaagatcacaaagagaagcaaccaagacctcaatatcttcgggagagggtcgcactctaagacccaggccactatcaccagcaggaggattggacacgaaactggaaaaggacttagaaggtggcagattccaagcagagtaggcaacaggagcaccaacatttgatactttgcctctcaagatcatgtctagccggctcaccaagtccttagcaggaattctcctattagtaacccgagtggagtcggtaacaccactgtacaagtaagccgggtatgctctgttcttcagaggctggatgtttttaaaaacaaaatcagcaaccacagcttcagcggtcagacctctttactttagcagacagacttcagcaagcaaaaccttagcctatgttacttccagggcagtaggagactcaatccaacttggagtgtgcacatctggctatctttccgaccgaggagggagggacttgccgtgatttttcacaataaaccactcaagacgccaccctttaatgctgtccttaagcaggaatatcaagatattttgttttccttccgcgctgcatctccagactcgcaccacccacgagttg

SEQ ID NO: 126552 - DNA, 473 bp, Zea Mays
ctgaaatatcattatagaagacacaagcaaacattataaactcaaattcgagaataaatattcgattacaaaacaaagtacatctatgctcccgatgatcttgaaagaaatattgccttagcaatatcatctcgaaatctatccatagtcctatcattggattgagtagttgatgtatccgaagcattttgagaaggctgaaatcttgcgtatctctctggaatagtagggatataatctggattccgatcacacttactgaaatctttatctaaagcatgattctctcgaataaaattatgaagacacattgtagctgcaacaatcatcttttgcacttccatcttgtaggtaggcattttcaaaagtatcctccactttattttccaaactccaaatgcacgctccaccacattgcgaatactcgaatgcaaatggttaaaatgttcttgctcaccattaggagctggccc

SEQ ID NO: 126553 - DNA, 281 bp, Zea Mays
gagaagccaggtggtggctcgacgaaggaatatcaaccggggcaatctgaagagcatcatcagggatcaactcaacatcaccagcaggaatcagaactctagcgtcaggtgcgccggtctctaaggcgacttcctcgtttaaggcatgcgctgttgccatgccatcagaatgtggaggagaagacccaacgtggacatccatggaggtatgagaaggggagcccgctcggacaccctcgggggttgggtcgcagcccgcactgcccatcagagccggatca

SEQ ID NO: 126554 - DNA, 301 bp, Zea Mays
gaagggcccaaggccaagaacaaggaactgaaattgcaatgtagtaacggtttggcttaacaggtcagcaataggtagctggatacgagttcaactcttatctgtaatgtgaattatgcaatcgacaacactatggttaaaattatgacaaattcatccaaaaatcgatgcaacttcatatgcaagtaaaggaaatggggatctttgcatattggcaatttatggtacaattacatgcctggaattaataaaaatcgtaatttgaaactcatctgaattggagtgccaaaaccaatacaaa

SEQ ID NO: 126555 - DNA, 347 bp, Zea Mays
cctgtcggccagctgcgtctggagcgcgtccgccttcgttttgggcccttgaaggacgcctatggcggcgcaggttgcctgtaggatctgggcaacggtggacgccctggagatggacacccacgcgcgcgcgctgaaggcgctctgcgtcctctggtcgtcgaagatcttcctggccacggtcgtcttccccacccctcccggcccgtagatcgcgaagatgaggaactcgcgaggtggctcgtggtgctctgtcagcttgtcgaccagtggcaggatcctcatctcgatcttctctgcctccactagactgctgccatggcgcacgaggtcgtcgtccagaccgt

SEQ ID NO: 126556 - DNA, 413 bp, Zea Mays
ggtgtatatatgtatgtccactttattatgtaggatagaagatgcctttaaagcatagataggtttgggcaagaaaggatagggtaaggaaatgctccatccaagattgtggatcttgattcctttgaagatctggcttgaatcttatccttccttgatttgatgaggtcaatcctcttcaatcttcgttcttgaagttgttatccgaatttgggacatgtagtgaaggtagattgttaggtaaacaaaataggttaataggtggttatgagttaaataagtttaagcagagtttgtcttgttgttttgcttctagattggttagataagttatgtaacctgttatatcggtcaagtttggtgttatcatcaaggataatgggtattggtgttaccataactagggacatagt

SEQ ID NO: 126557 - DNA, 318 bp, Zea Mays
tcgtcgtcctgatcctgacgtcgagttacacagcgagcctgacgtcgatgctgacggtccagaagctccagccggcggcgaccgacgtgacagagctccagcggaccggggcctacatcgggtaccaggagggctccttcatcaagcaacgactccagaaacaaggcttcgacgagaccaagatgaggagctacagcacggcggaggagtacgccgacgcgctgtccagcggccgagtcgccgccgtgttcgacgaaatcccgtacctgaagctcttcctgtcgcagtactgcgatggctacaccatgtacggcccgg

SEQ ID NO: 126558 - DNA, 512 bp, Zea Mays
tggtgatgtcgtgtatggcggtgcgaggttgagtcgccccaagggcggcattcttggcccaggagaggagggtgacgaagtccaggtgtctggctcggcggaggcgctcttctctgcggctgggtgatggatgcaagagatgttggctttgcgcgacacaggcgacggatgggcaaggaacagagctagggcttacgagacaacgaggtaaatgttgtgatggggatgtactgcgaaacagacgtcggggatctggcctcgtgtcgcgtacaatactgcgggtttgttgaactaaagttgagggggttttttgcaaaaatttgacataggacgaccgttgaaactagtgctttaatatattagatataaaagatacagagatagagattactgctatgtacggtcttatatggagccgaaagaaaaaggactacgacggatacgggagaccagaaagcacgacgtagggagtcctcactctgtacttgccgctagcgtcggcccaaactatg

SEQ ID NO: 126559 - DNA, 1074 bp, Zea Mays
ggcaatgcgtgttcacgaacaacgcgcgacaccgtagcataggagggatgaccgagcctgtggtgccaccttgaaagggacgacatcgctgtggaaacatgaaacgccgccttattatcggatgactgagaaggggacggcaaggggtagagtccacgttcacatggtcctcgaagaagcacctgcttcgttgcttgatccttaatcaagaaaaaattggggtgaaattcaataaaagcattgttgtctgtagtgagccgatgaacagagactaaattttttgatgtctggggaacgtgaagaattttgtggagatgtaaattacgaccaggggtatgaatagacgaataaccaatatgacgaatgtccatacctgcgctgcttgcagtgtgtatctgatcagtgccattatagcgatcataaacagcaagtttgtccaattcgcctgtgatgtgatcagttgcgcccgtgtctgtgtaccaggatggatcagtagtggatggagcggctgctgcggcgaagcgttgatcagggacgaaattttcgtcaaatctgtaccaacaattggtaacaacgtgtccaactttgaagcatagttggcacgtgggtttcttggagcgattgccagtgtcttgcctattgtggcggccggtgctgttgctagagtaggcaccctggaatcggccacgaccacgggactgcccaccgccacgagaggagccagatcggcccctattgcgacctccataggacgccatattggctgagaactggttgttgcttgcaccagattgcatctctagccgagattcatggctcaaaagctgagcatacagggccccaggcgttactggttcttcacgggctagaaccgccgagaccatcggattgtaattttcttcaaggcccgacaagatgtaggacaccagttcatcatcagagataaccacgcccgaggcaccaagctcatcggcgaggctacggactttggagtaatagtcagcaactgaagaattccctttcttcagagtatgcagcgcaatgcgcgtgctaacggaacgcgcccgagtttgg

SEQ ID NO: 126560 - DNA, 443 bp, Zea Mays
aaaaaggcatgtcatatccaaaggtcgtaactagctattgctttgaggatgggtgttgatttcttgaaatgaccacgataactgccatgctaggaagtgggcacatttctcattcctagtacgtgcagtctatgctccgtaacatatgtagaaaccccctttgttctgcaatagctaagagacttgcaacatcattcgtgttgggttgtctaaggaactttggcccaaacaagtggacgactgttcgtgtgaactagacaactgtttctaggatggtgctctcacccatatgtaagtaatcgtccaaactatcagcgggcccatcgtaagctaacatacgaataaaagttgttaccttctgaatcaggtggaatctaggttgatgtgttccatcatatgattgcttgaaatatggattggatccttctagggattgacaaatg

SEQ ID NO: 126561 - DNA, 394 bp, Zea Mays
ctcaaggggaggtagaggaggcaagctgaaggaaattgttgctaagaaaatgaagctaggtactggttcaagcaacacataagtctaaatatagcaaataccttgctaaagatattgaagacaaatacatgaagattgacctcctagtgtggtggaagacatcttagtagaggtttctaattctacctcgcatggcgtgtgatgtgttgtctatactagtattaatcgtagcttcaaagtcggcatttagcataaggagacacattttagattacttccatagctcccttactcccttcatgctcgaagatttagaggtatttgcttcccctaattaaagtttagtttgtgtcgcatgaaagcaagacgacaacgaccaaaagcaagatcaaac

SEQ ID NO: 126562 - DNA, 646 bp, Zea Mays
cagtgacaacgtcagatcgttcaatgagcaacgctaaggtcaatatactatgttcccatgcagccatgctaacttgcaacaaaaaaaagtagagctctaaatttgtacataaagtgctcatttttgttattacaaagaataacttaaatagaccccctctctccacccacaccctagatctgcatctaaagctatctccagcagctctgctatctcaaactttactctacaaacagtgttatctacaatgcaaatcctcaattttacatgttttgctaatcattacaaattccagtaggtaagatcaaaattagtcacactagatggggtgcgacaagagctaacatagctcatgctaaggtactcccgtattacctaaagacatgtctaacatatataaatgtgtgatgcaattatgcaaataagaaaatttatgagtggggatagaaaggcatagagtataagggaaactttaagtgcctctacaaatttgccttcatttttctatttagagcaccatttaataaatatttggtcggtaaatcaattagatttttatgcactatactccaacaatttatcataaattttcatgcatgaaaaagttccctagaaaactaccacattttgcatttagagacccatg

SEQ ID NO: 126563 - DNA, 365 bp, Zea Mays
aaattacttaaactgccatttgaacagcatgtaaacagtaaacaaaagttgctatctacccagcacacaacaaaatggaactgcctggtattagttggttctggctatcttttcttaacataaacttaactcttcattgtgcaaagagatgcactccaacatctgatcttaacagaactgtggaaacagtttatgcatccagtggactgaaactgaaagcgaccattgtgaactctgaaatatagtggcagatccagatgtggtaacgaatttaattcactggacacagtccgtcgatgcaacaccatcatttccaataacatgctacagtcaatcctaccagaatgctacaacagcagattcaa

SEQ ID NO: 126564 - DNA, 597 bp, Zea Mays
gttctatgtactcctatgttcgtttggatctccggctggctagccaaatgcatgcatggcaggaaggcagggagggggcaggggcgacgttcgcgtcatcacgcaagtaacgacaaccggtcgaccagtcactagatgcatgacaacattggtggtcaaatcctgtttttatgttagtggtggtcaaaatcttgtttttatgttagaagtaagcgatagagcttatggcgtcgaggttccatgtcccgtcatagtcactggcaccgagtttttattttttatggtcccatgctacgctgacacctatcttgacaccatgaatctttagctttcaaccttcatgctatatgttgcctttatacccccactctcaccacacacacttttttctcctctcgtgctacaattttctctctccacgtgccgccctgctccaacgcctcttctacacccgaagttccatagtgccctataggttaagtgtctggatgtctcggttataaatatgggccgacttatcattgatagctcagatgaacaaggtgcatctttatgaggcacgttcaggtataccagtttaggatgattctattttcg

SEQ ID NO: 126565 - DNA, 357 bp, Zea Mays
ggccacgacgagcttgggttcacgacgttcttcaaccggtttggggaaattccaaattcaagttctctggtggggggtttgggatgcaggtgggtgcagtagatgcttggatgcatggcggagctgggggtacagtcaatttatagcgcccgcgggcggtggtgctcaatttggccgagccacgaggcggtcggaggtgaagaagaaagcactggccgcgtgagttcgtggccaacggcgtggcaagctcaccggcgtcgatgggacagccttaaggtgtcacggcggtgcggtggaaaggctaagccacgcggcacatggccgggaggcggcggtcaccggcgaggtaatccactc

SEQ ID NO: 126566 - DNA, 814 bp, Zea Mays
gttgtaaataactatagtgtaacaacactaacaaacaagcataccaaatcatattatagaatgtaacaattgggtattacaaaagcattgattgtgcacccaaaataacagctaaacaaaaataaatatatgcatagtacctgagatcttctaggcgtcatctgtttaggtgaacttgttttcataatgttctttgtcttcaaatcaatagcagactttgaactgcttgacttaatggaaacttgtgggggtgggatgtccgtgttcaatacccgagactttttctttggatggttagttactgaactggagggtgcagttgatttaaaagtgtgcttcaatgttggaggaggcataaaatcatcgtcagacgatgcggctggtgttgcaggatgacttttttcacccgacaagctagcgcctttctacataaacgagtaactggtaatggcggctgaggatctagctacaacttggtctgggtattatcagcatgttgggaggagctgctagatcttgtgcgtctagaaatgtcaactaaaaacaactgttggcttgattcaatagttaatctttttggattcgatggaggacgatcaacagacttcgtgattcagcaagcaatgtaactgttgacaaatgactgaatttaaggaaaatggtgtatgaatacatatatgccatgaccattttgcatagtgtatataactgtatttaattaaactaccttttccggttacatgccataacagttaggaaccatgtataaatacaatcataaatattacctaactagttcatataagtgcaacta

SEQ ID NO: 126567 - DNA, 438 bp, Zea Mays
taaagtgggcgaacttagagaacctgtcgaccactgttaataccactgtcttgccaccaaccttaggaaatccttcaacaaagtccatggagatgtcgttccaaatttccgatggtaccgacaggggttgcagcagacctgctggatgtagatgctcaattttattccgttggcaagtggcgcatgcttgcacaaattctctgacccgtcgtaaggcctgtggactgtagaaggatgctctccatcgatgtacagtcttctcaatgccctcgtgaccacaattgtgtgctgctgccaggatttctgtccaaactgctgaagcgtccgggatgaagaccttcccttgaaatagtagcagaccatcagcttccgtccatcctgattttgcagttcccgctgtaatggcagcccgcaagcttaagacctgtgggtcggtgg

SEQ ID NO: 126568 - DNA, 461 bp, Zea Mays
agccttagtgccgtgtctgggcctggtttcaggcactagtgccgtgccggcacaacacgcttaataatcatgctaaacgggccgtgcctggccgtgccagtgccgggccgcccgtttggccatctatatatgtaattggatgatgcattaggtcgatcgtggctgcatgcctgcatctggtaatggatgtgcaacataacggtaaaacacgaaaattttgcgggccaaaaataatttccatgaattttttgtttagtttatgaaaattagctaattttaatcgatcacgacacaactgacgaaaactaactatttgttgtcggtcagaagcactaccggaatcctgctctttgccgtgtttcaaacagactttgaggactcatttggaataaagaaatttttgctgaattctatgtttttcctgtgtttttgaactaattcctgtaaaattcatatatcac

SEQ ID NO: 126569 - DNA, 784 bp, Zea Mays
ccaacaccgaatgatgtgtagtattataccagtactcagctaaagcgagccagctcttccacttgttaggttggtcatgtacagcacacctgagatacatttccaagcactgattcactcgctcactctgaccatcagtttgagggtgatatgcagtggacatcagcaacttcactcccataagttggaatagatttttccaaaaggcactggtgaaaaccttgtctctgtcagacactatagatcttggaaccccatgcaacttcaccacattctcgagaaatacttgagcaactcctttagcagtaaaggggtgctttagaggaaggaaatgactgtatttcgagaatctatccaccactaccagaatggtatcaaacccctcagactttggtaacccttctatgaaatccatagtcacctcttcccaaataccttgcggaactggtaaaggctgtagcagccctgcggggtgcaccctctcagccttggccttttgacagattgcacattgctgcacatactgtgtcacatcatttttttaaacccttccaccagaacaccttctttaccctctgatacgttgcttgaattccagagtgccctccaactgcactatcatgcagtgctgcaattagtttagtgcgcagagctgagttgcacccaatccagatccggtttgcttttctgataataccttgctgcaaagaaaacccctgttcatccgggctctgaattaacagttgagtgatcaattgatgtgcatcctcatctgtggcatacg

SEQ ID NO: 126570 - DNA, 534 bp, Zea Mays
gggtccaagcagctgttggcaccagcgagtctttccgctgcgataaacacaaacgcaacaaaacgttctttcttcctcctcctgttatcttgttccttctcccagtgaaaactgtttgtgtcctcaagctcaagcataccaccatcgccagtctcagcccaacgctctgcctcaacaactcaccttgccgtttacctttttgttctttggtcgtcgtccatagaaaagaatccccatcgtcaggtcatttatccactccaagccagcgtccatgatagggtgaggcaggtatggtctttgggctcatgttgaggtgaatggggcagggtagttgtgggggggaagcgctcgccttatgcttgttgagattcgactgggtgcaggcaaccagaaattgtgcgtcctgtatgtttgtttggagaagaagtgctgtgagtagaaaaggaacaacgacggggttgatgctaatttgtgtagatgttctttttctttttcagatttcttctaagacctgaaaagtgctaagatatgaaa

SEQ ID NO: 126571 - DNA, 441 bp, Zea Mays
cttgttgttcacgggtttggtttgttcttggcccaatgggttgtcttctgatgggcccaataaaatgaactatgacacttgctgggcatgacaggcgtatgatacaagcatgagggagggagccaaggccgggagcacgtggaggcgtctgtcacggcgagggaggcaggcggaggtcgacgccgaggccgggaggatgtcgaggtggctgtcatggcgggggaggcgagcggagacaggctttgcacgtgccagcgttgaggggagttaggggcgtggggtgggtgttagattcttaatagggtaagtatagaagtatacaagtagtaagaatcagagaaccagagcaagagggagctgaggcagcactagctagatctagatgttggttgatgttgttgtgttgtttttaagctggatgatataataactggaggatca

SEQ ID NO: 126572 - DNA, 2347 bp, Zea Mays
ttgtcttgcatcgcgaatactttgctgtggatgttatttcaatgagaaaatatgtattgttgaggttagctttagctgcgttccgtttcggtattgaagttgttcctgctcttggattgagctggtgttttgattattcagattggcattttgtctcttttaattgcattctggggatcactcatcgttttaattaattgaggatgatttcgttcagcgatttgatcattccctgcttctgtggcctagtttgctaggcttagcacacagttttcctattatcagcttggtcttatggtcaaatttttgatcttttatttgtcagcaattcgtattgtttggtttggtcaattcattaagaatctgagattaagtgacaaacttgtcgtcttcaaatgttttgacctttgctagctcgaggtgaacatgtcaaagaattccagggtaggtgtaggtcttactttcttgtttatatgagatacacacgtggactgattcctcctgttgttctggtaaattttggttggtagttagcttgctgaaatctagagatgttatcttaaatccttcattctatgattcatctgtcattactagttcctttcaccaatgaatgtagttacccaagtggaaaacactaggctcttgttaaattgggaattctgggactggttactgatcatattaccatatcctatttttaagtatatagttttagggtcttagtgaatagtagtcatactcctgaattttttgtttagtccaatctaggatcttttaggatttaaaaaatttgatggtttcaattaattcttcgccctgcaaagactttgaaccatttattccatcttactatcaatgttatcagatcatatgattgaggctagcagtaagatcaccgatcagaagagtaatcatcgaggttagaaaaagcgttaggcagtttctaggcgatgacccaccgcctagagcctaagcacgcctaggtgttttgtaggcgtttttgccaaatttgcattcaacatgtatagctgaataaattatatatataaagagagaaggaccaatagacataccttggttgatacaaaagtgatattcctacttagttgatacaaaagtgatgttcctacaagtggacaacagaccatatcaacaatataaatgatacaaaaatagggaaatagggaattgcaagttaggtacttatctgaatgatctcatccttctcccatccatcagatattatcaccagcaaacgatagccatttgaaatcacaatcatgtacggatagcagcaaagaaaattaaatggatagtagactagcagtagacctgatcaacccgatccgacccacccgaaaaaacccgacccgaccaatgcgacgggcgggtacagaccataatttttgacccgcaacaatcaacgcgccgtgttttttgacccaaaacccgacccaaccatacccgaaaaaacccaacccaaagccaaaaaacccaaccctacccgaaaaaacccgacccgacgcgcccaatcaggaggcacgggccaacacgacccggcccgacgctatgcacgggtcgggcgcgggccatgccaaacgacccacgacccgaccttgacccgacccgaaccaacgtttgaacgggtctaactagcagtactgtacaacacatgattcagttctcacaacacagaatacaggtacataacaggcatgctggagtcctaagttcataagttaaaagataagacatgacatgacatgacatgataaagccccactaccatatcctcttcaatagggttccatatggtcatcttcatcaaacttccttcagagtcaaattcttctccttcgtaaagctgtttcactcttgtacttctacgcaactaagttgttcttctgcttccattgctgtcacgacattgtcgtatcacgtggccgccgccgccgaagagcagggcttgagactccgatgaactcaccttgccgctccttcacgaggaagacgactggaaactctgttctcaatatttttctttgattcctcatctcatgtttaggctgtcctttttgtatcaactcttgcatctcgtgttctggctgtcctttcttcgacgagtccgacattcccttctctgtctcccctttgttgcctcctcctctgagtacgacaccctcctcgaggcggactctgtggtcccccttactccctcgtttcctgcacaccccattgtgccatgtgcggctccgctaccccccgtgttgccccgcgcggccccagcgccgccgcgtgcgtcactgtcgtctctcatgtcgccacgtgcggccccggagtctcc

SEQ ID NO: 126573 - DNA, 372 bp, Zea Mays
gcctaataaaccagctacaactttgctacatcgtgtacccacaaaaagtcacgagatcatgcttagaactgagtcccaagttcatgcaatctcactgtttatttgacttcagactttaaatagtctgacagcacgactttgggcacaattttctccaaattttccataacaacaatgtttaatcccttaaacaaagttgttctcctaacatagctctatatatttgatgtgttgaccctaggcaaattctcaatagttttggatctacagagccctaaagtcagccctcctatactattttcagacttaaccaatagagctccaatagggtttttttacaaataggtccaaaactcggggtttaggttgcaa

SEQ ID NO: 126574 - DNA, 444 bp, Zea Mays
ggagctaaaggagaagccgatggagaagggagtgagacccacctccccgcacctccggagctgccattagatttagcccaagttctagccaaccaaacccgactcattgaagtcctcactagaagtctagagaatcagcgcccgaatggtggaagacctcaggacaggatgggagattttctaagactcaagcctcccacattcgctggatccagcaatccgctcgacgctgatgactggctgcgcatgataaaaaggaagttagaagccattggatgccctgagaaccagcgtgtccatctagctgctcatcaactttctgggatggccctatcctggtgggataccttcagcactgccgtcagagatgctacctgggcagaatttgaagctgctttccgagaacatcatgtgccccaagggatcgttcagctcaaggaagat

SEQ ID NO: 126575 - DNA, 291 bp, Zea Mays
cttttaatacgggagccgaagataagtattttttaatgagatcaaatgcttcctgttgctttgtccccctaagcaaattcggcatcattcttaagccgaaggataggggtgaaggcatcaatcttcccggctagattagaaataaaccttcgtaaataattcatcttaccgagaaacttctgtattttgaccttacaggtcggaggtcccacattccgaatagacttaattcggccagggtctatctctatgccatgttcatggatgataaatcctaaaaacttaccagcc

SEQ ID NO: 126576 - DNA, 646 bp, Zea Mays
aatcgctctaaatatttatgatgtgttgagcttttggactcacgtcgagcgattaaattgtatagtgggtactcagacacgtcgatcagactacgttattaatcgatcgagttatgacattggctgagcaccactggctgcgccctggcaacaagacgcagtatttgtgtcgtacgaacttggctgcgtcatttgattgctatgtcgcactctcgcttaatcggaccactctcgttgagtcggaccgccatcatcgagtcacatatttttcgcacgccctgtaggcattgtttgtctgttgtgatcatcgagccacaattgtgcctattgcgcatgttttatggacttgtcatgtaccccgactattgagtcacaattgcgcctgttgcgcttgttacgaaagcttgttgtgttgtcgtagcccagatggccacacacgcgttgacgccagatacgctagaacttgtactcgcgtggattgtggtgggttgttcaagccccctaaagtcacattatacacaaccttcgtaaacaattttggttgtctatatattttatttgattgtgttgtgtgacatcatatatttatttatattgccaagtggccataacagctgtatcaagctctatagtgcttggaaatctg

SEQ ID NO: 126577 - DNA, 344 bp, Zea Mays
ccaatcccgagacatatttgaacacattatgcaatcaagcatcgcacgcccatgcataacactcacttagattcctagacgaattggaacgcatgacacaatcttttctccaagccacaaggtggctgcatgataaggtatatgtcccattgcaacgttgggcatgtttgctagctaatcacaatgcacccttcgacgatatccctctagctcgcttaaacttctgttagctcttgcggccgatgggtgaagagcttgtgtcaaaactctcttgcaaagacacatggtacaagcaagtcttggatgtcttcatgttcggaaagtgggcattggttcaagacaca

SEQ ID NO: 126578 - DNA, 554 bp, Zea Mays
tccatgactacttggaaataatgttgtctcaggcgtcgtgatcccatccttgtctcgtctcccccctcatcctactttggtcgaatcttcctctccacaattgacttttatagaaagatcaccaccgttatcatcgaggacagcaagtccacttctttctggtatgacttcttgcttccccccgacactcatgcccattccttcctctcctgttttcccatacaacccaacctaacttcttgatttttggagttttcagtcatgactaggtgaatgcccgtgtgttgcaacgagaacgtataatatcatgattatatatacaggtatatgtctgtgcgttgcaatggaaataactgtgcacacataggccattgtttagtaatgtcaggccattgtttagtaatgctagtaagaatcaactcaataatcataataaatatcgaagtatgccagttttattgaaagagatccaagcaatcccgacacacgtttgtatataaatatttacgaattcacatgtaccatgaagttggacagtcaaaggttacatatgc

SEQ ID NO: 126579 - DNA, 460 bp, Zea Mays
cgcggagtgaggtggcgcggattaggagggggatctccatcatgccaactgcgagccagtgctgctggcatgcctacgcctcggttgcggttgcggttgcggttgcagggccctctctcgcctctgatgatcgatgagctaaacctgaaacatgacatgcctccgtcttgtctcgtgggccactaatcatcgcttcggtctttactcatagtgtgcaaggcaatgatggaaatctcgagtttgcggctcaaggttaagagatggcaatgagtacccgaagctcaaaattctgacgatatttatctgatataaaatcaggtacggaatgatttttttactcacgggtatgctaatgaacaagaacctctacccgttgggtgtactgatatgggtcgatactattcatacacgtctatacatacgtataatatacctgcatcagtatcactataaccatcta

SEQ ID NO: 126580 - DNA, 1088 bp, Zea Mays
gggagatgcaagccatatcaatgtggcttccctatagcatcatttgatgatttatataacataacacaataatcatgtctaatgtcatttgcgtcagtagtatgcatgcatgtcatttaaatatgagctagtaatggacgttgctgaaatcaatgagctatgtaatgaacgttgctgaaatcaatgagctatgtaatggatgttactgaaatcaatacttgatgtaaacccaaaattaccacaataaccaacaaaaatggctcactcaggcgagaagcagcatccactagaagctcaacctcctccatctgtgtgatgacaaatcggcaattacattcaagtcaaaatatgctaaagatggtgagatgaagtataattgaattcattccagggcatcttcaactaccaaatgtgtaacgtaagatgatcaccattggtgctgccttgcggataatagtgatagcttcgttcagaataggcttttctatttctatcaactttatcacttcttcatccaattttgtaaatccagcaactttagtcttctcgcaatcacgagttaggaccattacattattaacatcttccagcatcccagcagaagagtaactcgcttgtgggagttcctcagctgagcccacctttgtgaagtctttttttataagatcgtcattgaggagttccatgccagctaaggatgtaacaactccagatgcaccagattggagcaacctggatgtgaagtcagaataagttccttcacttaaatgattcaacgtgacgaaaatcggaatcttcacatgttgaccaacaacatcatttataacatccacaaaatcaccactgccagtatttacaatcagaaaatcagccccttcagaacttgaagcgcttaatgcagagtttgcagattgtatccttctagcaacaatagggagatatatggagtcagcatttgatttcatcatcatactccttgcaacaatagcaggaatacctgcaccaaaataacatcttaaatacaggaatgttgcagacagttactacttagagaacgaagcacaagagttaatgacagaacatatcca

SEQ ID NO: 126581 - DNA, 282 bp, Zea Mays
atggagacttgggcgagcaggcgatccagcttgtcttcaatggaatccccaggatcgttccccatggagtcggacatggatgtcgatgctccactggtctctgataccaaattgatgcgacctccctcggggtcctcttgggcgatctcatgggtgagtggagaaggttagaactagggacagatctcaaggggtaggaacaatggctagtttggcgggcttcgtcactgcggctggtagcttgccgagccacgatgaccgaggtagtcccgcccaactaca

SEQ ID NO: 126582 - DNA, 490 bp, Zea Mays
caacaaagtatggtgttaagataagactcacacccagcaaagatgaggttccgaccaagggcgggataagtaaaacacttctatcgaatcgagatgggagagaggattttaaataacagacataagatagtcatcaaggtaagatggagagacgacgaaggtaaaggtagtaacagacaacaaaggatggagtttaaaactcgtaagcgacaaggaagagaatacgaccaagggcaaataggtaaaatacaactatgagattgagatggaggagaaaaggttttttaatgatgggtataatataagcatcaatgtaagatatagaggtgacaagggtaaagatgataatcgtgaaaagcataaccaaggatagagttaaggcaagcctcacgaagtggcgaggtggaggaaacaatcaagggtaaaatcagtgaggttccgacagaagagttgaagtaaaaattcattatcgaaagaagttacaagaaat

SEQ ID NO: 126583 - DNA, 456 bp, Zea Mays
cggtcataccggtgctcaagacggcggcgaggcccgaccacgaagcacggcgcaagcatggcggcggggaactccgttgacaaattcttgcacttctgcccctcccaacacgaggtcgtgccacacgttcggtcagcggatgatttcgaccctccggaaccgcactccgtggttcaatggcgacagggaccggtcttcctcggcggcgactttctctctctcttcaagctcggtgatggggttcgaggtaggacgatgcgactcgtggtttggacaaagcgagggggcatgataattattctccgtgcagcatatcccaatagtcccccgcggaatcggcgtggtgcatgcggaggcatcggcggcatggtttgttggagttccacactgggaagaggaacaatgcgaagggctgggtcccacccgtcggcgagacaagggtggacatgctctctc

SEQ ID NO: 126584 - DNA, 624 bp, Zea Mays
gggattgtcaacaacagattatctttgctgctcaaaccatgcacatgtggttcatcttaaattatatgcgaagattagcacaaataaaacaacataaacattagcagcccttgcattagtctaggataaattgttgtggtagggggagggataacttgtctgtggatgtgataaatcatttaaaagttcaaggttcagcttaacattctggctcagatctaagtaatttgtgtatggagtcaaattatgtgcgcaatttgctaacaatatttgaacaacaacttgagcagtccatgcatgggtgtaggtagacttgttgtggtggtggcagctaatgagtgtggctcagatctgagaaatggaggggaagatgatgtatatgtcatcaatatgatcggatacgcacagatccacccaaacgaaaatgtctgtagggccaaaccaaacatatcgttcgaacatacgaggaagaaaccaactaatttgccatctaaactatggaccaggggaggaggaggatggaatcaccttgcatggtatcgagtattaagcctacgcttgagaaccttggttggactgctatcaccgctgttgtgcgtgtcgttgggtcttctcagatctccc

SEQ ID NO: 126585 - DNA, 730 bp, Zea Mays
tcagctatgttggcaccactattagcaaacgtctctgctagtttcctcgaaagcaacatgaggagttgttcatgtggagctatgtagtgcgagttgccaagggcttctttaagtccatgatgtatgtcatcggtaaagtagatccaatatttgtcgaacagagcacgaacattgcaaacaggacaatgaacgacaatggtaacgaacagctgacgaagctgagacgccgaggcagagactacagcctcatcaaatagaaggttccacttgttgtcaccttcgagcaaaccatgggcttcgcacgcctctctaaacgtttcagacacagtattttggaaggcccttatatcaacgaagctcgttgcgccgaaaacaaacatcaagagcatgcgtagatagcatagttccccagctgttgggtgcacgaagtacatgcgcccaatcttggcagacgacaacctccttctacgccagcacctaatagaaacatcccacgaccactctcttgggaaatcacaataagtcaggagacgcgcatcactgtatttcaagtttgtttcaaaccattcagttaacattgtcttgttcgctgcacggctcaaaagcaatgtctataggtctgccccaggctcatagcgtacaatgttttttgcaggtaagtgtacgaccagacgttccacagaaggtactctaaagtgaatgtcgaactcaaagattcgccatagagcct

SEQ ID NO: 126586 - DNA, 508 bp, Zea Mays
gccacgctgtctcttagcaaaaaaaaaaagttgcggaatctcaaagtgcaaaataaggagagagaaaaaaaaagaaagacaagttggttgggcttttgtatcaggtgctaggccatgagtggtcggtccggttttggcgggcccatatgtgtggcacaatcggtgcctaggccccggtgtggagcaagtagttagtaagtagtacatgaatggatgaggaaataacccgaaagggtaataaggaaaagcacggctacgaggagagggcagaagagcatatggatatgggcagagcagaggagggcagagcgagacaggggtagcccggcaggggcagccacgggcaatgcgtgtcgtcagcatgcagaggggccagtcgtggttgcagtttccatgcatgctgaggtcagcattgaatgcctcgcgtctgccgtatggggctctgacccaggcgggcagctagctgtcaaaggactgacgagtacgaacacacagctcccaaccacac

SEQ ID NO: 126587 - DNA, 706 bp, Zea Mays
aggtatttatgtttctccttttgattttcttcttgaagaggctatcccctaggatgccctgagtgagatctcaaaggtatgtgttgttgatgttgatgtgcgtcgggcaagtgcgttgtcgaatcgacagttgatccggtcagtcctcagcccccgccgtgggagagccatggttctggttgtagtcttcacggtgcctcatctcttcttcatgtcgtcgggcacatgacaagtcgatgtcgctccatgcgtcacgtcggtcattaagacgatgacatagatctccctccgggtgagctagctggaggagctagttcaccgcttgggtgaggatttgcctgtactcctccccttcaggcatcggtggtagctcgctcgcaaggcgggccaatgcttccccgacttggctcggggtctgggtagccaaatgaacttgggttgtaggttgtgaaggatgtgtgaatgatcgcgaggaggccgggaatggcaccctgtcagctcgcagccacattcatgggctactcggtgctaacgccgacgagcattcctttgcagacaaaactctcgctccttggaagttttgtcatcctcgggcgccttgttctaggaaacaggctgagtcggatcctgatccgcagcggcatggcgtcatcggatgttgtgtcgacgatttcggtggtgatgggcctcacattgtgggggctcc

SEQ ID NO: 126588 - DNA, 643 bp, Zea Mays
gccagctaaactattgcacccactaaagatacccgatggaagtgggaagagattggtatggatttcattaccggagtgcctcacacccagaaaggatatgattctatatgggttattgtggatagactgaccaaagtggctcatttcattccagtcaagactacttataagggatcttaattggcagagttatatatggctcggattgtgtctctacatggtgtaccgaagaagatcattttggatagaggatcatagtttacctccatatttgggaaaagttttcatgagaatgtggatatgaacttaaattctagttcggcttaccatcctcagactggtggaaagactgaaaggactaatcaagtattggaggacatgttgagagcttgtgcccttcattctggtagtagtgggacaagagtctaccttatgctgagttctcatataataatagttacctggccagtctaaaagatgtcaccgttcgagactctatatggcaggaagtgcagtgctcctctatattaggatcagactagaggaagccagttctttggacctgaacttattcaagaggcagaagaacaagtccgtataattcgggagaatttgagggtagctcaaaccaggcaaaagagct

SEQ ID NO: 126589 - DNA, 383 bp, Zea Mays
tccagaggtgggggaaggatctggggccgtcgatgcatttatgctcggccaagatcagatcgggataggattgtcgtgcaccgtcggatccacggttgaccgctaggatttaaagctgcgtatcattttgctcgggcagtctgagaccgtagatgtgagatcctgcggtagaaagcgattctgggttgcattaaacgcctaccgttagatcgggatcggagggggcctggtgccgtaccgattcataaggctcggttctaatcgtggccgttcatgcatgatctggcggccagattcagaccataccccttcgccatacacatttcacagaaaagaccccctgttactttagaataaacccgccatcctcattcactattcac

SEQ ID NO: 126590 - DNA, 1183 bp, Zea Mays
tttagtcaggtcttccccagggatggtgggagcaggttgctctatttcggcagcgaaagatgtcccttcaccaagcttcggcgttgtggctgtctcaatgtatctcggctggtgtgttaagaccttaatctttttgtccttcggcacaacagacatggccgaagcggcagttttccttttctttccctgcttacgcgagggatagcaataatcagggtatacgaaaccaatgacgtcaaaaactctattcaatctatttttgcctcagccttcgaatgccaatgccattgcatgatcttcggcccttgtgtaggccccaagcaattcgtcactggttgcctcaatactgcttaaccattcattgtttggctcatcaaactcacctctatatctgaaagatattttaaatagaccaagccgccctgactagacccaacagcagcctcctttggcatctcccattcattcacaagcggccatactctgtaggcgatgtgttcttgaacaaggtctcttgtgctaataaaagtacacacagtgttgaagcttctccggcatgcctctatatcgttcccaagagcggtggctggcctcctgatgccgaagcgagaccagatggggcgttgaataatttcttttatatcttccctctcaattaatttattcttaacatagaaccactcctccatctaggccctgggccacctttttcggaatgttggaactgagtaacttacatcgtgacggggcatgaagccataacaaccaaagttgttgtgatactactccttgcctgtagccttcgtctcgtacaacaactcgtgcatgttgcagaagcattttgcgcttggctctagcccctggcttcttacggcccacataaaacccccatcctaataatggcttcgggggtaatttgatgtaggaaaattttgaaggtcttcaacacttcaaccaggaatctgcttaatgggaaccgaagccctgccttcataaaactcctgtaaacaaccacctcatcctcttcgggagcaggtgcagcgctatctcctccagctctcacaattgaaatatctcaaaaatatctccctttcatagcgtcaatttgactctgcttaatggatgattttccaaagatagtgtgacttggtcgccagggccgattttccgcatcttcgtcttc

SEQ ID NO: 126591 - DNA, 577 bp, Zea Mays
gctgtcagtaaatggagccccattctgttaccctctctgctcggcgtgtaaaaatctgcttcaaccagtccctgtgtttgggggtcacatggacgatttttacagaccaaggggggaaaggttttggattggatcaacctacagcctagcagcaatgactcacctgcttgtactgtgctggtttgctgtccatgggagactttaccacctctgcagtgtccctgtacatctacccttacgtggtggtcatgcatagtattatggtcatgttggcaccggttattctccctgaaagcctaaatgaagtctcaaccaagccgttaactctggtgctctctcatagtgtaacaaagttcaacgcatgaactccctcatgtttcggctgtccccatagactcttcactgtatcataccgttcctctaaacttaaattacttcctggacgttttctcaaccccttggctccgttgctttaactgaaccacaaagttctgggcgtgtgtggtgaccaccaccacaaaattccccatctcctagtggccggtcttttctggaaggtaatatgctcgatttgctt

SEQ ID NO: 126592 - DNA, 524 bp, Zea Mays
tttatggattctccggtggggactgggttctcgtacgccacgtcggatgaggggctcaagtccagtgacactcaggctgtcaggcagctagccatttttctcagaaaggtcagacgccagagagccctgatgtgctcgtgctcgtgctgtgctgtgctgtgctgcccgctctcagaagatttgtacagcgtgcacgtctcccagttgtgcatgttgatcgcaaactgaaattgtgtgagcgttaagcgagcgagcgcatgaccggcttcctgatcttcctgtgctcatgcagtggcttgaagagcatcccgagttcctgccgaacccgctctacatcggtggagattcatacggcggcatgattgttcctgctcttgcactacaaatacacacaagtagcgcaacaaccctcctccacatctctacggtgccactgttacaaacctacagcagttataattgttatgttctgtttacaacaatttacaggtacagaactcggtgaaaacccatccttcaacctc

SEQ ID NO: 126593 - DNA, 520 bp, Zea Mays
gggctctttaagaaagttctacagccgaaggggtatcggccatcgtgagccgcccgatcatctatggacggataggattaggtttcttctacaaacaaaccggtacgcgtcgttggccatcggatccatgatccacggcccacatttgatcaaccttgttctaacctagaccgttcgtttagatcggacggaccctacgttcccaccaatctgtacgatcctgaatcaatcccggccctcggctgaacatccaacggtcaatggcgctcccacctacttcaccagccacgcgcggcgatggccgagctcagccggcggcgccatggccggaaccacgacgcagcaccaaggttccccaatcctcccttcgattcgtgacagtgaacgatggcgagccctaaagggggggttcaatcccacagagagggatgagtttggcatcaaccacgtcgaggcggattcggcggtgggaatggagttcagatgagaaattggttcgacccccgcccccaatttctaa

SEQ ID NO: 126594 - DNA, 296 bp, Zea Mays
atctggctcgaagtattgcaaacataaagttagtatggacaaagggtggtcggagcaaagctggtgacgaagctcggagtcacctcaagctggtaacaaaatcataccttattcttaccttttcctttgaatttttgaatttggcttataatactttcgtacagattgaccaggccgaagctgcagctgcagagtagaagaacgaagctccagagatagtgtcgaagcttgaatggtcttgtaaaagtagctcaaaaaactcctgtaataacttgtataaaatatgatgtaatctg

SEQ ID NO: 126595 - DNA, 628 bp, Zea Mays
ctgacgtgcctccctgtttgagggataggaacttctttttcttgatcttcatgagaccagtaggaatatggtaattccagaagttagtggagaatgctgtcaaggtaatggtgtgagcagtagcatgtactgtgcagtatgcatcccatcaatctgtagcagggccagtaagacagcccgatgcatatagcacttcatgtgggtgcaatgagctgagcatcttgtccatggactttaaccagtcatcggcctatagtgggtctgaggagttagagaatctaggtggcttgtgactcataaactcctggtgcttatccctaggcggagctggtggtggtggaggttgtagttgttgtcattcctgccattcttgacgcatttcttgatgttcttggcgcatttcttggcactcttgacggatctgtgcttgcatttctatcatcgtgttggccatttgttgtagtagttgcatttgagcagcagccacatcatcagcaggtggggatttggaggaggattcatttctgattctagattagctacaaaccttctaagacgaattcgtgcgggtagatcaacacctcctcccctcctggtattaaccatctcggttagagacatatgttaa

SEQ ID NO: 126596 - DNA, 372 bp, Zea Mays
ggacgaaggaagtattctttttagatcagaggaggttctactactttattgttatgggtgcatctactctcttctttcaccataacctaaaattacacttccatatgccattttttatcttctttcaccataacctagaattgcactttcatatgccattttgtatggagcgaaggaaagtaattatttagaggaggatctactagtttattattatgggtgcaaatgcaattattactctcttctttcaccatgacgtaaaattatacttcgatacaccaatccgaccacgacctcaactttatttaaatgtgagaatccaaatgtcccatctaagctaggacgacccatgcattacttccaaccgaacaa

SEQ ID NO: 126597 - DNA, 450 bp, Zea Mays
atttgaacaagtgctcgctatatatctgaagcgaagatgtctggggagaagaagattgtggaccctgccctagctgggttttacgaagcaatggaaaagaaaaacacggaaaagattacgaatgaaatattagctgagctgtctaaggattctggtgatagcgatgacttcgatgtggaaagcgggaatgaagatgccgaagatcggccctggcggccaagtcataccatcttcggaaagtcgtccatcaaacagagtcagattgatgccatgaagggaagatacttttgtgacatgtctattgtgatagttgggggagacagtgccgcccctgcacctgaggaagatgaagttgtagtttatagaagcttcatgaaggcaggtcttcggttcccattgagcaaattttttgttgaagttttgaagacatttgagatctttcttcatcaa

SEQ ID NO: 126598 - DNA, 585 bp, Zea Mays
gggacatgccttattgaggttggtgtagtcgatgcacattcgaagcttcccgttagccttgggaacgatgactgtattggcaagacatattgggtggtggacctcttcgatgaaaccaacgtccagcagcttcgggacctccttacggatgaaatcctgccgctcaatggactgtctccgaggcttctgactcaccggtttggcattagggtgaatcttcaaatggtgctcgatcacctccctagggatcccaagcatctgcgacggttcccatgcgaatacgtctgcatttgcctggaggaaggcgatgagcacgatttcctatttctcctccagatcgcccgcgatgcgagtggtctaggaggaatcctcactgagctggatggtcttgacagggatgccgtccgccagatggttgcaccttaggcaccttagcaggcgtcttggtataggaagtcgaggggtccctcccctcgtcatccaggcgagtgtcttctgccgccagggcatgcaacttctcgacagctgcaagcgcagcggggcggttgccccgcacggtgaggaccccagcaggggatggcatct

SEQ ID NO: 126599 - DNA, 576 bp, Zea Mays
cgctatcgcagtgtggtaggttcgcttcagtatctctcgcatacaagacctgatatttcattcccggtgaaccgtgtgtgtcaatttctctcgaacccgacaactgaacactggtcggtggttaaaaggatattgcggtatcttcatgacacgattgatatgggtctatgcttcacaaaatctggtgctccgttactcagtgccttctcggatgcggattgggctggtgatgcagatgatcgacgtagtactagaggctttgctgtcttttttggtggtaatcttatttcgtggagttcacgcaagcagtcaaccgtctctcgctccagtactgaggccgagtataaggccattgcagacgccactgccgaagtcatatggcttcaagttcttctgaaggaactgggcattcatctttcacgtccaccggttctttggtgtgataatattggtgcaacacacttgactgctaatccaatttttcatcgtcgatcgaagcacattgaggtggattatcatttcgttcgtgagagagtcaccaccaagcaacttgacgtacagatcatttcaacaaaa

SEQ ID NO: 126600 - DNA, 272 bp, Zea Mays
gttgccagtcttggatgcatgctactgaacgtgaacatgtaaatatctgtacgtctgcaaaggcagctgcagcagagaggggaggggggaaattccaatctcagcaaacagttcctgccagtttcagatccagatgccaaagaacaaggccccccaaaccggacgctctattttctagtttctacagcatagtactgccgaaacaacacgcatcactggaacttcctgatcgacgacccaggtttgggagcctccaagaacttgcaacggcc

SEQ ID NO: 126601 - DNA, 466 bp, Zea Mays
gtaataattgattcaaaaagagcaggggctcttatgcaaatccacacagccaaaggggtatcaagcgactgcagccatccgatcaaccaacagcggccatgattagttcaaacatataagcggactggtattcgcgggtggccgccagatcacgatccaacggaccggatctgaactggtgaaggggtatctagacgcctaatctcaatcgtctgttaactatccaatggcccgaggcctctcttcttcccttatttctctctcccccccaccggtgccagcccgatggcactgagcagaggcacgacggcgccatcgccgaccccgccaaaccattggcccgagcaccaatccatgacccggacagtgctacacgaactatggagcaaggtgaattaaataaggtgattctcaccgacgattgggacgcgcagaatcactgccacgaagatgcgtaacactacag

SEQ ID NO: 126602 - DNA, 681 bp, Zea Mays
aaaatacaagataaattcgtaaataaataaatgcatcccataatgatatgattcaaattatacactcaaaatttagtgcaaattcgccaccaaactttgaattcaaacctggaatctaaaggtaaaaaggaaaggaaaaagaaaataaagaaaagagggaaggaactcggtatgggccgtaatcaccattcggcccagatcagtatgagcaccgcgcgaccgacttcctccacttgcgcactcactggatacggacccacttgccagtcgcatgcacgtcgttcgcccatgcacacttccgctactccacagctgaccagtggggcccccctatcgctgttgatattcctggtggcgtaacaaacccaggcggatctcgtccgggtcgcgcgggggaacctcgacgcatgatcggagccgggcacgtccgacctgtcgggctataaagccgcgcgcatggcgctcctctcctcccctcccatagagccctaacctccgccgccatagcttagaaaccatcacgacagccgccgagagaaagggaggagagagaacaaacgcctcggcgctcccatcgcgtggaggaccttcggaccgtgagccagtcccgtcttcaccccctccgcgtcggtatgttccgtgccccttctctgtagcgtgataggaagcgcgagacgtctt

SEQ ID NO: 126603 - DNA, 513 bp, Zea Mays
gacaaggactcgtggtcagaatggggctagaacttctcggggaggtggagagaaaacttcgatcccaccacctatacctcccacgttggcagaggcaattgctgctttgattaatgccactactgataatacttggtttcttcaagagatggcaggaaatcagattcatgagcaaggaggcagaggtcaacaccaagcccctagagacactacttacatggaattctcggaaactcgtccccctattttcgttaaagcaaaagaacccctagaggcagatgaatggatctgtgtgatggaacaaaagttcggactgatctgatgcacgaaaactcagaagcccttgttcgctgctcatcaactgcgaggtcctgctagtacctggtgggcaaacttcgtagccattcagcctgaaggtcatcttgttacatgggcagagttctagtaagcgttcagggagcattatattccagatggtattctgcagatgaagttggaagagtttgttcgctt

SEQ ID NO: 126604 - DNA, 393 bp, Zea Mays
ccagcttttatgtccgttgttatcttgaattgatgttgtccccacacaattttattagatctttttgtatgttgtacgatccaatctttatcacaaccgtctgtgtccttcaatattctgtatgcagtggtgtatttcattgattcctcaaatctattcataacagctctggtgtatgccctagagactctcacttcgaacctatacaacgtatcggttgtccttgggccctataagacgttaacatcataattaaataatgtaattacataaacatctatgccattgattattgataacaaacatgatataccatgctcatcaatgcctcctttgattctttcattttcctgctatgcaacattttcatcatttgtttaacaaactcatgca

SEQ ID NO: 126605 - DNA, 396 bp, Zea Mays
ttattatgtcacgtaaaaataatctttcttcttccttggacgtaaattaaagcgtctgcgatgcggaaggccgggctgtcgtatctgtgatatcccacacgaagtgtcagttttcaggaggtagtacaaatactgaaagacacgtgagtatgtacggtacatggaactatatatatacggcagctgagttctcaagtagtcaagcgggtgtgtcggctgacctgacgacctatcggatctctagctaggctccctgtggatgactcttctgtgagcagtctgtaggctgtcgtatcgttgcttcatcagcacacaagctagcaggacgggcctttcccatggctacgcaacttcagtgaccgaaccaaacagtaacaggaatgagtgagagcgcca

SEQ ID NO: 126606 - DNA, 571 bp, Zea Mays
caatcccggttgtacggggtgcaatcccgccaccgtgaggccatgggcaccgcgcgagcatcacaatgaatcttcctggtaccccctggcagcccgacgtcttctacctctcggcttcccaccgctccttctctcccctcgattttccccgagctggtgttctcaatgcatggcggcggtggttttctggtgatgggcaggggcggcggccgtatataaagccacaggtggaagttgtgcgcggagcggtcgacttccaccggcgagaatcacggtcgaattccgttatcgccacgcgtggagctcgaacatgcagccatggcgtagggacgacaggatcaaaggatagggcgagatcccgatgatttcggcgcgcacaggggaatgagagaggagaaggctgccaggttgttgaggagttaaagccgagatccacacgttttcctcgcaggttgttgggcatccaagtccgagcggacagcatctacgggtgtggcggatagcagctggaggatagggatgacaaggtggtcccacgcattcgcgagctgtgcacaccatcgaggcaaca

SEQ ID NO: 126607 - DNA, 748 bp, Zea Mays
cttctaagcacttgatcatttctaagttatctaatctttcattatcatctttcccagattcactccaagttttttagctatatcaatcaacaagttattttcagaatttaagatggagaaggggttggggttgttacctttgttcaagaaggcatccttcgcttcagctctgttgatggctttgtccgtaatcctgatatcgtcatttgcctccagtctgctacttttccttgtgccttcaacttgatctaccaactttgctttacctttgttatccttaccggtttgttgttcatcttgaaatttaagaagttcaccctcatccatctccaattcctgctcatctgctatctccacacccattcctttcacaaagttgttaagctcctgagaactgaggaggccttcatcactatcttcaaagtctaccttctcattgttttcatcccccagatttcccccctcttcattgcatttgtcattttcattggtatgaggatctgaagaaatcattgcttctttaaactcagaggaagatgttttctgattttcaggaatcagagagaccttcccactttcttggatatcacttttgggttttttccctcccttgtcacccaaaccaaactcgttcggttgtaaatcaacaaaagatctctttctcaaactagcttcttcctcattccatccttcagtttccaccttttccaccttaaaataaatgtcatataagagatgtttgactcct

SEQ ID NO: 126608 - DNA, 282 bp, Zea Mays
gatccaaattggaaacaagctatggttgatgagtacaatgctcttatgttcaacaaaacttggcacctaattcctcctgatccctcactcaatgtcattgactgcaaatgggtgtttcgcataaaagaaaaaccggatggctctattgatagacataaagcacgattagtggcaaagggttttactcaggagtatggcattgattatgaagaaaccttcagtcctgtggtcaaacatactacaattcgaattttgctatctcttgctgttattagaggctgg

SEQ ID NO: 126609 - DNA, 275 bp, Zea Mays
ctgaggcatctgaacttgcacttgaggctgaggtggaggtggctgctgctgcacctgctgcattgctgctagggtctggccaattgcttggactgcctgagtttgcatcatgaacatctattcaactgtcatcgggggtggcggtggcaactgctgctgctgagctgcctcttcctagggtacctgctataccgactgagcatgccttgcacctctacgcctgttctcagacatctgtagaaatcacacacacgtcagatctgactctacagtct

SEQ ID NO: 126610 - DNA, 537 bp, Zea Mays
ctttgctcagctgatctagcctctttagttccaggctgctcttgaggcctccagactttagtttagtttctaccgcccaactcctgaggacactgctccagctccaattgatccactggcatcggacttcagggttgaggacgaggctatcagacagtttgaggatcagggtgcagctgcagatacttcttccgatgatgaggatttgggaattctgccaccacctctatgccacctcgttcccatgatcacgaagctggtggctccagtgctgctccttcggctgctcctcctgtgattgaccctgcattggctgtaattcttcagtctctcactcagcagtaggctcacatggcagcagagtaggcccatcaggcaacagagcaggccagacaggcagctattcagaagcaattctgagcggatgttgtccatgtttcataccattcaggaccgctaggacactcttcagtagcgacttctagcagatagggcagagcacctggcattcatgactctcatccttcagcacaccgg

SEQ ID NO: 126611 - DNA, 347 bp, Zea Mays
gttagacagtcagctcactacacactcattggggagacactatacagaagaggcgcatcgggtgtcctcatgaaatgcattctctcatctacagggaagcacttctagatgaggtccatgctgggcaatgtggagtacacgcagcatccaagacactagtcgggaaggtcttcaggttgggattctattggccgacggcgaaaagtgatgcagccgagttagttcagaggtgcgaagcttgccagtacttgtcaaagcaacaacatctaccagcacagcaactgcagaccatactagtaacttggtcgttcgcatgctggggactggatatgattgggcctttcaag

SEQ ID NO: 126612 - DNA, 425 bp, Zea Mays
ggagcttcggcaggtttcttcggagtggtacttgaagactttattgtctccagtacatctagaacattaaccatcctttttcttttgggggtcactgctagacctttctgggtttttgacatttcaactcctgcgaaggacttaaaatttctgatgctcttgtcccttcggctctcggctcttcaaatttttcaaccttcagtgttgctctcagctcttcagttttctgtgcaagcgcaggttctttggcttcagtagccgaagaggtctcactgacaaactcgggcactatggccggttcaataaagcgcggtcggtgagtaaggactttcaccttcttcctcttcggcgcgggctcgcttggagcagctgaagcgtcatctttcccagaagttgcaccttttcttttttgcccccgtaacggg

SEQ ID NO: 126613 - DNA, 524 bp, Zea Mays
ggcgaatcctgtggagaggggtggggtgttgcagccttccagccccagggacacgagatggcctaaggagaagattgagcggaggttgaggctctcgagtgatccgagaaagcaacacaggatgatggactcgacgcggctcgtcgacgtcgatgaggaagagggagacgcgggggcctatgtaggggtggaggatgctatattgctatcgatgaccgagggctgcgtgccgtagtaggggaaatagagggagagcaccgatagtttaaatttcatcctcgctgaaattacctctgttagcgtctacgaaaacatcattcaatataagcaaaaacatattttagaacgccattaacaaaagatagatctataataatggactcgattagatgtcatacttacatctccggggcctacatctcgaggatgagacccattctagtcgcgcctcggaacctgtaggtcaagagctttacaaaaaggcctttgacactctctaagacactttggaagacaaactctag

SEQ ID NO: 126614 - DNA, 274 bp, Zea Mays
cacaaggttccatgcaaagttcttcgctattttccaataaaaagaaggcttcagaggttatttctatcatctaagacagcaagtgacacgaggtggcatgatgaggagcgtatacaagatggattactaaggcatcctgcagattcacctctctggaaggattttgaccaaaagcacccagtgtttgcttctgacagtcgcaacattagacttgctttagctatagatggttttaatccgttcaggtccatgaatgttagctatagcatttggc

SEQ ID NO: 126615 - DNA, 583 bp, Zea Mays
actcatgaatccaactttatgcaataagtgtggaactaaagaatcttaaggtgtgcggaccaaaatagattttcttatgcatactcttttctcacccacagatacgtgtgaatacgcgccatgtgcacctaaactccatgggcaccgaagatagaggaagagatgatggtgcagtgcctacatgtgtataataaacctttgcctttcgaggaaaataaatataattgatgtcgagttatacgaacacgcacgtacgagcaccacacaaggtggaggcagtggcagatatccgattctgtcaggtaatgctagttgggctaaaaaactagattgagatgttgggttagtagtgtacagacagaaggcatgcatggtgtgtatgcgcgcgtttatagtggtggaccaaattaaagtgcatatggctgcttatcaagtcgtctcagtggagactggacatgcatgtttctcgtgcgcgtacgtgtttgaggaaaacccatgcatggtcctaacttttatctattaaacattcaaaggacttcatttcacatttaataaaatacaaagataggggtatatacttaaa

SEQ ID NO: 126616 - DNA, 559 bp, Zea Mays
ggcttgtgaaggacggggttgtggctgttgatggtgtgggacagtggcggtgcctagaaaggggtaggcgcggacgcagggagagggagtgggatggtgtcagctagagagagggagacattaatatcgagattgagaaggtacaaggactcagagttttcactctatttctacttattgaaaaggttaaattggactctcgattgggaggtgtaccattcaagttaggccctattggttagtttaggtccaacatggcaccttggttgaggccttacccgattaggacccttctttgggcttcattgggcttagcaaggacccatatttaggcctatgacatcactcccccttttcgtataatgtcatctggtctaatggtagacatcaaactagtctgatggtaggcttcaaactatataggcatattcaatggtttgcaacaactagtgctaacacagtactaacacaatagctattgttagacatcagaccgtgcttaatggtccgacgatgcatagtgaggcatgttgctattgcaacaactagttcactcctt

SEQ ID NO: 126617 - DNA, 815 bp, Zea Mays
ctatgaaggagtgggatgctccagaatcgaaaagtacggtagcgggagtaaattcaacaaggaactcaccgagcactactcttggagcttgctgagcctcctgggcatcgacgtgattcactcgtgcccttccttggtacggagccttgtactactggctgacggaggagggcgccttgggggcggatgctgaggtattcttggggccattcactgagttggagtaggcgggtcctggtggcttcagctgcggacagttgttcttgaagtgactgggatcaccgcagtgccaacatgcattcgtcgggggttggttgcttgccactgagggggaatggaaagagctctgactctgctggctgaaccatgatggggtgggtccagctggtctactaaaggttggccccttgggtggaaatccaaatgatcgagtcttctggtgcaggtcctgctgctgtgcccggagaacctggaactttcttttgagatgccttttttcttcctcctttgccctttcaacttgcatggccttgttggaaaggtgagagaaattgaagaagtcttggctagccagaattgtcttgagttctggcctgagtcccttcaggaaacgagccatcttcttgccctcggtactgacatcatctggcgcgtagcgggctaactctatgaacttgtgcacatattcactgacagatcttccgtcttgagtcaattctcggaactcgtccttcttaagctgtacaagtccttggggcacatggtgctcccggaaagccgcttcaaattccgcccaggtagcatctctgatggtg

SEQ ID NO: 126618 - DNA, 679 bp, Zea Mays
acgctttttagtactgaatgctgttattgctttcccgttgttagaattcaacggtatctacagtcgtaaaagtaagtgcatcatgatggttttgaaattttttcgtggggcatagagatcgccctgggaggaataatcacgaacgtgccgaatgtgccgtgccaatttaagtcattgccaacttaaatcgatcgctccgttatcaggggtatagtgatcaccccgagtcaagtaagcgtgagcatgtcgcaccgttttaagtcctcgccgacttaagccaattgctccgttagcagggtatagtggtcaccccgagttaagtaagcgtgagcatgtcgcaccgccttaagtcatcgccgacttaagtcgattgcttcgttagcagggtatagtggtcaccccgagttaagtaagcgtgagcatatcgcaccgccttaagtcatcgccgacttaagtcgattgctccgttagcagggtatagtggtcaccccgagttaagtaagcgtgagcatgtcgcaccgccttaagtcatcgccgacttaagccgattgctccgtcagctgggtatagtggtcaccccgagttaagtaagtgtgagcatgtcgcaccgccttaagtcatcgccgacttaagccaattgctccatcagcatggtatagtggtcaccccgagttaagta

SEQ ID NO: 126619 - DNA, 407 bp, Zea Mays
gcaagacgcctgggaagaaaaaccaccaagagagctcgtcgccgagggttaggagagagaaagaatgagggatctccatcgtcgtgtggatagatcatggtcgtcgttgttcgggccccggagagtgatcgagggggtccacgggggcaccttgcacgtagtcgttgccttcttggacggtgagatccaccagagcgcctccaattgctcaccgaagcaacccagctgcggtcgagacgcatctcttcatcagcatgtacttcaacgcgtgcgattcatggtaaggatccttccacctagtttgccatgttcttcttaacatatagcatacttcggattgttgtttcatgcaacgaattcggaaggggctttgcgccgacaacatcgccggagcataggcggcaccg

SEQ ID NO: 126620 - DNA, 497 bp, Zea Mays
gcatttgaaaattaaaaatgcgagtaacatcgaggttgaaacggcatggaggtgaatttcttcgccctaggagaggagggatatcacataggataagggtaagctttgttgagaacataaggtgaaggaaaaacaaaaaatacatccaccttagcttagtgcagtattccagctcgcaagatatattatccgtgtgacccatgttgatataaaaactaagatgcagcaagcacaatacgtggttcacttgcatgcttgcagtattccagctcgcaggattattctactaaataattatgcatcatttttgtcattgaaaatatatgtttatcctccctgtaatcaatgacctcctccctcaacctttagaatttaatcagttcaagtccaagtgattcctggaattataatcaggtgggacacatcaggttccaattagccttggccaaggaaatccttcataggttggagattgctcaggatgacaggatcctttc

SEQ ID NO: 126621 - DNA, 571 bp, Zea Mays
caatactgattttgtggcggcctcaaccgtagtgcctgccgatgatagtttgtttggttctgtgtctgagtgttttgagtccgatggtgaatctgggagttcgtttccttggacggaggagtcctcggatgaaggcttggattattttgttgcgttggatgtggctgcggcagagacttcaccgcatgtggagggtgccggggatcttcctagtgcgagtactgggtgtaggcaacgaagggtggtgggaaaacatagtgtgagcgaattttcgcgaagtggcaggcgccatcgtatggggatggaccgtggccgtctccaagtagaccgggttggtaaacgagaattgttgtcctcaccgactggggcgagcataggcgagggggatctccggaagctttttgagggtgaggaattgaggataatgctgtttaattacagggagatgggtatcatcccgaaggttgagccgatgtagtatgtgatgccctcgtcgtgtgtatgtaattgtaatttgtacggtaatgtggcatgtttgccgtatttgcacgcctgtgttggtccggctgcg

SEQ ID NO: 126622 - DNA, 1202 bp, Zea Mays
cccagccaccctctctcctctactgtgctgctgtaggcacaaccaactccatggttgctgctgttactccaagcctgaagccccacccgacgcggcccctgcccacgacgagctagcccctgcacgcggcccccagagcagctgtcgtcgccgtcagccctatcctccgttgagctaccacagacaagcccgccccgccgtgtgtgccccctgcgtgatccggtttttgtgatgttgcaattcgtgcacggagccaaggagagaggagaaaccgttcgtgcgtgatattgaagaagaaactgtagtggccccacctgcagtttttttattattactttttatttcctttccccacgatgaagtatgcacgtagttgaatggctcaccactcacgtagaaaaagatttgtgcaggtttgattgcggccacgattttgtggtactccttgttgtttcggctcagccaactaaaatacgctacctcttcttaaatacgcgaactagtaaatattcaatatatattttacgtcgtagatccattttgtctcgttccagttgtgttagatttgtaacgacatgttaataatattgtttcatcgtttcacgtattttagctaatttatttttagtataaaaacaacatttagttagtgattctcgcatgttcgcgttctgcttcgtgcatcacgcgtcgctcacgtatgtcgcgtgttgtccgcgcctacccgcctgtactgttcgcgtacgctgtcaccgcccattccacgcgtgtcacgtgttgtgctctattctacgagtatcgtgagttcgatccgtacgacgttcgcgcgtgctgttcacgtgtcgtcgttcgtgcgagtcgcgattcgcgcgctttaataaaattgtttattcgtcacgaattggtaactattcaatatataatgcaccataaacctgtttctatttgtttcagtcatgtcaactttgtagcaacaccgatttcatattagtaacgtactttatcatgtcacaagttttacttatttaattagttgttcattcgacacttattaaataaaatgaccttctaattaaaattagtttatatttttaactcgcacttttataaatataaatgttaactcgatgaatatcaacttaaatgcttctcagttaatacttgtttagtataatcgtgttatctgttagtgattatcaagc

SEQ ID NO: 126623 - DNA, 437 bp, Zea Mays
ctttgtcgcatcttaagtactcctttgtttgctcagggataagggaagcaatataatcatttatggaatcaacaacatcatttgtgggtgttaatatggcacgatcttttagatatttaaggtccatgtaattagtttgcaggtcttcatagaccttttcaactatacatgcagttttgccaccttgaggcattagaagaaattcttcgggtatttgtatccatgttggctcatcttcgccttctcgtgatgtagcatgtatcttgccttctccaatgttgatcatccatttactaaactgagacagttcttctcgattttcttgtaacaatgatggtgacgaaagcctcatattatgtgtacgacgtaggatatggacatgaggccaaagagaagagttgattattactgaatttacaatctgtgaatgattaccc

SEQ ID NO: 126624 - DNA, 422 bp, Zea Mays
ggtaaaaatacattgaattaggacactttctggtcagagcgttgtgatgcttttagtagatgtgccttgcctcgggcacagtgctgcccaacctaatcggagttcggatacattctaggcgtccattttagtgtagagtggtcctgaactctgaggtggagaagaagttgagtcggacttggctctttaaggattgagatcatagttttaaggagctattgtagatactccaaagcatagtgtggcatcctggggaaacctgctaaccagcaatctggaggtccggagagaaacaaaacgccagtggcattccaatggcagctagggcttaagcctaatattgcaatagcacatctgaacatcaattgtttgttgcgactggaagtcctggtgatcatccatgttgtagcgtgtgagttgtg

SEQ ID NO: 126625 - DNA, 614 bp, Zea Mays
aaagtagggtgcttcatcgtgcgggcaatcaagtttctcaactcctcatcaagtggtcctcctggccggctgatctggccacttgggaagatgaagacgccatcaagcattaattccccaatgctccgacttggggtcaagccacgtcaaaaggggggagagaatgtcacaagacctgttgggagcccagaaccgaaaaggaccaaacgacaatacaagcccaacagagcggtgtatgggtcgtactggactcagtaggggagtgtatttagtcctagtcccttcgccagcttcgttagggttaggcgaggatagagttggctggaagagaacagcttggccggctgcgtccagacttggagagtgtcgagaggcttttcatttccgtttgctaccattgatctatgtaacatgagaacttcgtgagagagagtactgggagcggtgctcatcgtcacaagatccttggtgtgattacaccgtagccagtcacacaacacactgcatttgattaccgttggcataccattggatggctggacaatgagacgatgacgtggctcaatgtggtggcaggattgctccggcgcttaatatatagaaagaaagaatag

SEQ ID NO: 126626 - DNA, 453 bp, Zea Mays
acctgccggcggaaggaccgatgaacaggctagccgagcccgtcagcccgctaggcggtaccgtaccgcggtatcccctgacctttgtccgctcgacaagctcttcttgatatccactccaaccggtcagccgctagcgagcttgctgctatcaccgtctcacgcttgctgcggtggtggtaaaatcgttccccatctcatgcttgagctgaatgctgcagtggtgcaaaaaatcaagtagaggtagttgatgctgaaaatataacgtcaggatattctgatccgcctcgacatccatcaaaacttaaccatagcgcaaagcaacttgcgctgtggttataaaagatctggctatgatttaggaaatacgaacaatacttgtttcgtttcccatgcgttttcagacgatagacctgcttgtttatgctctactagaaacgtactatagaatat

SEQ ID NO: 126627 - DNA, 376 bp, Zea Mays
cagaaataagattcttgataagttgaggcgaaacaagaacattatgtagggtaagagaaccaaggtgtgttgtgccggtggcggtgacaggcagaagtgaaccattaccaacaacaatagaggtgggagagggataccgaggggttgaggagtgagagagggtatcatcatgtgaggtcatgtgggaagaggcacctgtgtcaaggtaccagtcgttcgccggtggagtgagggtgacagtgctgaaagtggaggccagagaattctggtcccagagcggagatcccaccatgggctggtactgcgctgccatgggctggtactgcgccggctgctgctgctgttggtgggagtacagctgctgggccagaagcgc

SEQ ID NO: 126628 - DNA, 445 bp, Zea Mays
atgaaaacgaaagtccaccacctcaagcttgtgttgagagataacacacttcctatgtatcacctcgcaatccaaccatgcttgtttgttctctcttgtaaagacaaagccaatttggctagagtgttggtcactactatatgtcactaaataaggttctcttctgaaagaaagtgttgactatcaacaactcaaaagctacctgaagtctttcccttcctcctgattcatactactatatctaaaacctccatgaaacacctcaaaacctacacttgttgtacctactttccattaaaatctccacctataagaagcttctcactagcaagtataactctaaccatgctatctaagtctttcgagagaagtctcttagcactctcatcatgtccatttaagggcacacgcactaattacgttttaagtccaaatcactgacgac

SEQ ID NO: 126629 - DNA, 507 bp, Zea Mays
tgattctctaataggatgttatcttaatcgaacgtgacagatatgtatatgtagaatagaaagcaggctaagctagctcaataatggtggctgagtgattaacgttgcggaaggctttcgactctcttgttttgcttgtggcatggctgatttggaaagacgaataaaagagagaaataggcgggtgttggatccaggacggcgcagcagctgctcgcacaggacaaacattgacatttaattgattcaaaccagccaggcgccaaattaacacgatgcagacgaatccgtgccaaaaataaacctcctagttattctttccgccattgctatctccaacgacctacgctacgctacgcatggccggccatcgtcaagcgtacgtgatgcagaagcagtcgccggggaagccgctgggcagggtgtcgcagcgcccgccggcgtagcctttgctcgtgcaccgctggtagcaggagaaagcgctgctgccgccgtcgctgatgggga

SEQ ID NO: 126630 - DNA, 657 bp, Zea Mays
ttcggcaaaagctacgtcgtttcacgcccgacaacagagagaccattcgcgccgagttagctcgcttggtcgctgctggatttattagagaagtgttacaccccgagtgcttagccaaccctgttcttgtactcaaaaagaataaagtggattggcgcatgtgcgtcgactataccgatctcaacaaacactgtccgaaggatcccttcgggctcccaaggatagatcaggtggtggactccaccgctggatgttctgtgctgtctttcttggattgctattccggataccatcagattagtttggcgaaggaagacgaaaaaaaacatcgttcatcactccgtttggtgctttctgttacacctccatgtcgttcggcctcaaaaacgctggagcgacttatcagagagccattcaaacgtgcttagccgatcactagggcaagcgtgtggaggcctacatagatgatgtggtaatcaaaacggagaattcggaaaacttcatcgaagacttacagctggttttcaacagtctgagatggtatagatggaagcttaatcccgaaaaatgtgttttcggggtaccagcaggaaagttactcgggtttatcgtcagccaccgaggaattgaggctaatccggataagattgaagctat

SEQ ID NO: 126631 - DNA, 745 bp, Zea Mays
gttaggttgaaatacaccttcagatatgaaggtaagtttattgagccagatgatgattggctgagtgcatcgaagctacaagcgacgaactgcttggatcatactcaaaggcagaagataacgcgttatctgcggccttcggaggctggaagaagaagaggctgaatagagttttcgatgctattaggtttatgtaccctgattaccgctacccgctgaaagggcaaaagagaaaagtgcaacttctgggaaacgtgatgcttcagttgctctgagcccgcgccaaagaggaaaaaggtgaaggtccttactcaccgaccgcgcttcattgaaccggccacagtgcccgaatttggtggtgagacttctacggctactgaagccaaaggacctgctcttacacagaagaatgaagagccgactatgatgccgaaggctgataatattaaagaaatagaggccgagaaaacaaagatattagaagttacaagcccttcggcaggaatgacagtgccgaaggcacaaaaagatctcacggcgactcccaagagaaaaaggatggtcaatgtactagatgtgctggagacaataaagtcttcaagcaccactccgaagaaaactgccgaagcgccaaaaacgcaaattgagacaaaaaacattcgaagacgaagctgcaaagagccagaccgtggccgaagctgggccttcagagcccgccaaggagaaatccttggaaaccggagaa

SEQ ID NO: 126632 - DNA, 526 bp, Zea Mays
ttattccaaactaaccatcctcctttaacttaagcacgcttatctccttaccgctaccgtagcacttacacttacccctccttcacagatggcttcacctacccccactgatggaggagacacctgcttcagctttgactacctttcctgcgagggcttcccctctatcttgtgggaggtactctactctgctgggtaccccacaccccctctgtacatggtgaagctgtacgaggagcatcgggtgccgcgctgtagggtttggctaaccctagagtctcaccctctacagcctgggtcgcgttcacttgattccgaaaatgtcggattcagggagacaacaccactgaggccgcggcactgaaggctttgacgaccttctgcggataccacctgttggagatgatgatgcacccacttgtactcttccccgctgagaagagggatgatctgatgtggtgcaacagagtgagccacatcaaggatgtgtgggccatgcatcccgaccaagtcgggaggatcaccg

SEQ ID NO: 126633 - DNA, 850 bp, Zea Mays
aacgtcgatgacaccaaccgaatgcgctctgaacatttctttttcaggtacaactggacctcaatagctaaaaatgaccagatgtgaagaaatatagtgatgtatctcgcatgtgaatgcagtgagatacatcaaagaacatggaaaccattttcacgaaaacacaaaagcagatataaacagctgccttgcacctagactctggaactcgcgtcatgtattgtgttcttttggttccagtgactcacgctagcaacaaatactggtggaatcgttgtccttatcgccaatcatttctccccatataaatatcccattccgcgacgagcggtgatccaaaagctccactctttttcagagaatggaagaaacttctccccttttttccatttctctcaaggtgtcaatcagttcagctttgtgtttagaatctaccatgttcacatctcttgcaaaaaaaaaacggcacctcgttttttgtaattaccaatttttataggcaatttcgacttggggtgcctgaatctgatttcgacttgcgactacttatgaattgtgaacatcccaaattgggaacaatgaaactacaaatcaaatgactccgtcagaaatttgatcattttcggtgcccaaatggagcattttgcatcaattaatgtccagttttcaaatttcaagtgcgtgcatagtaagttgacatgacatgatgatcgctgaaataaaaagagtcggaggcgagctggcgatcaacggcgcgggaggtgcgcacgtactcaccggcggttcaggcgagcggcgcgcaagggccgtcaaattctcctccgtccactccatgacgtcggcgtcggcc

SEQ ID NO: 126634 - DNA, 469 bp, Zea Mays
aagatgcttgtacttcgtattgtgaagatgctgccgataggtgtgacttagagaccacagagttcgcttagtagcgttgctgaccgaagcagcgtaggtggatagcggcgttagagactcatgtgctgatagagtcctgaaccctctatcacatgcatccattaccctgacatgaatgcgagtgatgtagtagcaagtccgaggaggctcgtacactcgtctggtctcgtacaagggtcgaacgtaggttcccaacgtgtgcagaacatcctgcaacaggttagggaagtgctctgtctcgaacattgaggtgtaatgttcagtgataggccataaccccacatagtggtcctgttgttcttcgttggcatcatcattgaggttttcctcatgttcttcttcttcctcgtcgtcttcatcatcgtcaccagagtcgtctggatcattgcctccgagagcaggggcttgg

SEQ ID NO: 126635 - DNA, 321 bp, Zea Mays
atgccttggaacagtacacaagcacctcaagagctgcacaacattctgatacgtcgcgaccacgcctccgggtgattctagagatatttgagcgttgtttttgaactgtaactctgtcggtgtgttcttgcgctcttgtctttgcatctcttgcgtgtgttgctgtgatttgctcttgcgtgtgtgttctttctccctcccttactctggttttaattgtgatcattgtgtaaagctgttggagactctaaattgagaagtttcctcactcacaaacgagatactgagatataaggaagaaccgtaatactcaagtttgat

SEQ ID NO: 126636 - DNA, 425 bp, Zea Mays
gaaaaatgtacttaataaaacctctctctgcaggtgcttgggctggacatttgtgctgatgttattattggcgatgagatgatcagaggaatttctggcgggcaaaagaaacgtgtgacaactggtatgcatgcattagatatattgcaatcccgccttacgcagacccataatcatgcatcaatttatttatatcctgtttaattttgtgtaggggagatgctaacagggacagcaagggctttatttatggacgagatatccactggtttggatagctcaagcacatttcagattgtaaagtttatgaggcaattggtccatgtcatgaatgaaactgtcatgatctctctgctccagccaccgccagagacctataatctttttgatgacataatcttgctatcagaaggatacatagtgta

SEQ ID NO: 126637 - DNA, 371 bp, Zea Mays
cctcttcatacgacgagtctcgaggagggtcgttagaaggaggataagaagaagaagagggacccgaataaggtggcagaggaggaggatgagcagaaccagatggtctgggatcacttggaatgggtcctaaagcggtagcaggagtagactggaagtaaggtgaatcatcatagtcctcttcctcatctttctgagtaataaacgacacaccatattcctgctggtgccattcattgagatattctagataggcaggaattggaacaagaggaggtcgctatggcatgggatgtcccatggaggctgcaaagcttcgcatgtcatcatgaagttcttgggtctcacgctgttgcatagcctcatcaaca

SEQ ID NO: 126638 - DNA, 432 bp, Zea Mays
gaagaagttccactaattcacaagaatagccggcgttacagaggtagcagaggggatagtgatattccttctctagctctgtctgctcttgttagcctgcaagaattatccataacagattttgatcaggcccttgaggatgtcgttcctgaggatatgctgtcagagccgactgatggtgatatgatggatgttttctctgacattccagatgtgggtttagaggtatcccgggcagcatctcgcgcatcgtcgaccttggaaggcggtcttcagtgttaagaggttggtctagattgcccgactctcatggaggtgactgaggatctttcagccatagagatggctgctgcagaaaacccagcccccgaagatggtgctggcgattacccagcccccgagggtgttgccggtaatgatccggcttgggtg

SEQ ID NO: 126639 - DNA, 305 bp, Zea Mays
ggatgctttgataactgtatgtgtcgagtatgattaactatatgttatgcatgtgataagtggtacgattaatattatgtagaatgcttgttgaaatactatgtctagtgtgatggaattggttctatgtttgtagggaatggcatatcggtaatgagtaggatggattgatgtttctagcaatcagtcgataacttatattattgttatttatgcctagtgtgctgtcggatagagatgataccttatcatatcagacatcacattctataggtttattaatatattaaatgtcataaataaat

SEQ ID NO: 126640 - DNA, 563 bp, Zea Mays
gttcgtcgtcaataatgcaaagctgtgttatcctccgttgaaggttgttctttgttccccgctgggttcgaactacatgaaatggagctatattcttcggcagatcttcatcttcgtgtgctcccgtcatctcgtgccttccgctaattttgtccgcatcccagtcgtcacatgcatgtttactggctagctagtacttcatttaaagcgcgtagcctcacctgaatgaattcccatcaattcaggtgaaaagtagtgagcttgcgctcaaccaaaattcgctcatatttcacctgctacatctatatatattccccagttgaactcatctgtgatcataataatcattctgaatcgtgaggatatatatatttgccagttaaacgtagattttattgatttttgcaagattccatgcatgctcagctcatacatatgagctagctgtgtttcagttcttccctttgctacgcataatgctctcttctcaatacacacagatagagtgtccatatatatgacgcacgatctacgtcaattccttcgttcgttcatctgttcag

SEQ ID NO: 126641 - DNA, 490 bp, Zea Mays
gaaaatcagcgtgtccaactggcagctcatcagcttttgggaatggctctagcatggtgggacactttcagtgaggccgtcagagatgctacctgggcagaattcgaaacaactttccgtgagcaccatgtaccccaggggatagttcaactcaaggaggatgaattccgggagctaactcaaggcgggagaacagtcagtgagtatgtgcacaagttcacagagttggcccgttacgcgcctgacgatgtcagcaccgagtctaggaagatggcgcgtttcctgaaaggactaagacccgagcttaagaccatcctcgccagccaagacttcctcaacttttctcacctctccaacaaggctatccaagtggaaagggcgaaagaggaagaaaaagggcacctcaagaggaaattccaagttctccgagctcaacagcaagagcgtcaccagagagctcgaccctttggacttccacccaggggaccaa

SEQ ID NO: 126642 - DNA, 309 bp, Zea Mays
gggaacgacgccattcacacggaactggtgaggcaggtgcgagggtgcaaggagttgcaaactaacgggaagattccggcggaaggaagaaagcaagcactcgagtgcgaggaaacggtaaccacaaccaacccagagcatcctttttctatgattatgcgagggcgtaggaagcccaagcggtgcctggaaggtggtcccacgacgaacaagcatcggggaatttgtcgccccaattgcgagccacctcagtcatcgagcaaggaggaccgtgcgttttgtagggtctgcaccgcctaggacaaggcg

SEQ ID NO: 126643 - DNA, 329 bp, Zea Mays
gcctgcgttgcagtcagtctcaaggactgccgccgccagcagcactagacacggacaggcgaacgctggtagtgcaacagcgaggacgtgtcacgtgtgcgccagacgccaggaagcacccagaatggtggtgctgcgcatgctcagcgagaatggagtgtgcaacttctacctcgcccctgcgcaacccacggctatctgataacaattatgcaaagcaaccgacgagcaggcccaacccaaccacagatttagcctcggcaaccaccgggctgggctgggctgggcccaattgcccgagcaatgttccagtccatcaccgtctcacc

SEQ ID NO: 126644 - DNA, 390 bp, Zea Mays
gcgatgactcgggtaagggcggtgcctatctatgttaggaatccctcactctttgcggtgtgatgatgtgagtttatttttttgcaggacatcatggagaaatccatggccaagttgatcttcgttcaccgcaaactggacgtctgggctatgctccaatgccatcgagccatgctgcttcgtgccaacgagcagttggcgctgaggagcaccgaggtggtggacttgacgtcactttgggcgggactgaaggacgaggtcgtggccgagcgcgcgaaggtgcctccgctggaggaggaggtctgccgcttgaaggcaaaggtggccctatagtaggaggagatatggctgctgaaggggaaccttcaggcggtggcggcggagcaggat

SEQ ID NO: 126645 - DNA, 597 bp, Zea Mays
gctgatatcctttgtcttctaggtatgttttctgctgggtgagttccaatgcattctttttgttttcaatttccccagcattgactgacgatactcctctagacatctaccaggcctctggtgtaaatgttgaactgtaggacatgagtaaaagagagccaatagaccagcgggttttgcaagtaaatagcttctttaactcgtacttactctattacttattttctcatcattagccccatttccaaatgtaattgctttctggatccttgaactgtatttatctctccttgaactttatttatctctcatttcagatgcgttttctttaaatacatgaaagcagaagctgtcctatgatttccctcatatcagtgttcaagaatctgaaacaataccgacatatatgaggctgacacaaccaggtaccttctagcattgcatatgaaatatcatccagtgatattaacattgttaagacattagtttgaatgcttgcatgggaaccctatagatttctatcaggcacgacaacctgactacggaggtcgcatgaatgtatttttggtcctcccttatgatgattgaagtttttcc

SEQ ID NO: 126646 - DNA, 648 bp, Zea Mays
gagatatggattagacaagtttctatgtattttattattaaatttatacttaaaatagatccaaggggtctatttggaaagtccaggggccggtttgcaattttagaagttaccccgaaggttttaatgtgaaaaccaagatggctagttattttgcaaataaaccagggactctttagcaaaagatctaggtcaaaggggtaacggtgaattctagccgcccgatccaccgtaaacgacctagattagatcaagttttataatcgaaccggtacaccaacggccatcggatcttgatccagtggtccagatcagaaaaaaacccgaacgcataggacagttcatctccagatcgacgatgcgaattctaaacaatgcaatctaatcctacccgcacatctcggatccaaacgctaataactgcctttccccccaaagcggcaagacacggtggcgcccacggtacgcgcggcgtgccgtggctggcgaggcaaaaccgagccccaagtttcctaagctcgatgtcgaatgctgctacatcacgcggaggatgaagcggatatatctagggccttttaccaggatttaggacgctgacgttccccgcccacgtgatccacggtatagtagtgtattcattgctccagc

SEQ ID NO: 126647 - DNA, 2314 bp, Zea Mays
cggtagtgctagcataatcttccaacttctagagttaatcacatttaacgataataccattctcatagaagaaattagcaacatggtcatcaataatttatttagccttcttatctttttgtgtagtgctcaagagcaggttaagaggtcttgccattatgtctctccacaactacttctggtgtcttgcgaagcatggcacttactaacttagacttcttttgagtttggggttttggtggagcataaacaacaaaggatgtgatgacactttgtgaaactttcttccttgcttgcttagcttttgtaccaaaacttagcacttgtgatggtttagttccaggttcatcagcttgttcctcttcatctacatcttcttcaccttcttgagatgtattcattgtattcacaaacatagtcctagaattctttttgatgtaatcatccatctctttagtaactattctaggactgcttggacatgctaatgcatcaccataatgtaggggaataggtacactacacactagcatatgtacaacgtttagccaagataacatgcgagtagagaatcatggattgttaccactagatgcacaagaaatggaagaagaacatgatgatgtaatggaagtagtcatttgtcctcgtgtaccaccttcaacaacatgttcacatgtgctcctcatgttcattgctggtcaacatcacatcaacaataataacgtgtccatggtatccacatatgcggggataaaacaccatgacgcttgtgagctagcaccacacatgcaatgagagaaatagcaggagtaccttgggcacccacaaccctagggagagaaacgacgatgacgactagagcgagtctctagcatgttatgcctttcatatatgtagacctcttctaatgggcttttacgctaaatgactattaccattctcataggtcatgattgccttttatacatatattcaacacataatccccaacaaggttctacttgaacttgattattcctccatgtattaactttgtatagaataaacaaagtctttctttgtaggatctggccaccacccatactttgatattgggtctatagatcgagccttcctcgtaggatcaatagattggtcgtgaagttctactagtagttttgctatagctttctcaactaaggaagaatgacctagagcagttgaggctacataggaattaccagttgtggcaacaaagttctctaggattagaaattatcatttccacccttgcatgctattattctatatccacttctacacatgaagaggtattcagttatacacatgaataacatgcaagagagcatagcagcaacaacaagaaaaaaggggtacatgtgtacataggagtagcaagccaacaacaagcaccaaggggcagagggtagaacaatagcatcacgcaaacataaagacaacaactaagaaacatcaataagataagagcatacaacatgtagtagatctaggcttccggcaacatcaagcatgacaatcaaaggcaaagaaagaagatcgaggactgtgaaggtaagaagtagtgaagtacactcaccgatggaggatgagctcaaaactagagaggcaatgagggagcataaggcttggtgtaatggtgtgcttgtgcctctcccttgatcctattttgtgtgttgtgtataaccctattagactgagaagccagaaacccagcccaatttttctctcctaagcccacttgagaatcctagagtggtcgctccaccacctaatcaaacgattaatctcatttactcgatgaccaatcaaataaatgaccaggtttttggtcgaggtggtagggtcagtagtcttggatgggtaggagaaccgattagctcgagtaatcatgactaatctgatgacttataaacagtgagcatgactagtaaagataagtaaaaaaagctaggtctttagttttacacaacacaaggactaaaaggttctagagaaacttggctcattgtctcgacaatgagaaatcacaagaaattgtgaaaagagtcggaggtaacttgccctgtggagtagagatgaaccagcaatagcagcagctcgaccttgtagtaacacacaacaatataccttgcaccataggagtgttcacggaagcacttcacagaagatccctgttgtggccacgttgcacggtccagtagcattgtctaagaatataaagtcaaccagcttttgggatttgaagacaaagcttaagcaacccaagatctggtttctctcaacataaaca

SEQ ID NO: 126648 - DNA, 475 bp, Zea Mays
gccatacatcagcatcaatgtcttaaacactcttttatgaaggggtaatatgcactaagcacaacctttaccaacttcaacaattcattttaagtcaatggtgaaacatccacactagatgaatgtataagaagatcaaacacctcacctcacagcaccacaaaacaagtagttctattgaaacaaaactcctaatcttcctaaaccttgttcttgccataatgaaaagataatcatgtaatctaacataatttggaccccaccaaaagggagaaaatctacagaactaatggagcaataaagccgacaagaagccaataaaatcttgcgcgtcatagttcatcgaagaaatgccaaaaattctacatagagcactggcagcccaacaacacaatacttgcttaacccatgtcactatacttcattcagaatctcaactaagaaaaatatccaactagtaaggttaacctacaca

SEQ ID NO: 126649 - DNA, 766 bp, Zea Mays
gtgggatcgtcggggccgcgcaagaacactatagcaaaccccgccaagtccgtcttctccacgccatagcaaaccccaccaagttcgttacaaatccgttcgtgcggatcccggtggcaaccacctccggtttcttagccgaggtaggatccccatgtgcatattagcgtgacccgagacccctccctgagcctcaaccattcacacccagtcgtcgcaaaccaataagcgccaagagagggagagcaccaggagatgccagccgccgtagttgccccacgtcctcatcgccgtcgaggcctttgaattgggctaggaagcttcactgggccgcacagatcatgtccatggctttgcctggatggatgcgtactacaggccaccggaattgctccccggagctttctaccgtcgtggatcctccccatggccttgccaaggcaccctgctacataccacacggtaagaacccccaccctgatttgacttcgtctctgcgttgtataacatcaattgggatgggaattatcggactggatcgtgagatggtcctgcgtcggcgaaggtctaccaccgcgactcggtgctatatggaaggaggttgtgtagccgtgggttcggtaatcaacggtcccgattagaaattatatattgtttcttccaaacaagattgctgccactaacccctcaatccaggggctgaagtttgtcgctgacgtgggcggctctcgttccgtggatccaagatctagtggttaggcttgaa

SEQ ID NO: 126650 - DNA, 761 bp, Zea Mays
tctgtgagcaaaagagcattcagatcaaatatgcttcgatggcacacccaagagccaacgggcaggttgaaagagctaacgggatgatattggaggcactcaggaaaaagtcttcgataaaaatgaaaagttcgcaggaaaatggacaagggagtttccctacgtcgtttggagcctaagaactaaacctagtcgagctctgcatggaaatactcctttcttcatggtctacggttcagaagcagtactacttgctgatctcaagtttggggcgccaaggttgatctttgaaaacatagcagaagccgaggctactaggctggaggatgttgatgtactcgaagaagaacggctgaatacggtaattcaatcagcacggtaccaacaaactctgaggcactatcacgataagaccatgtgacatcgatccttcacagtaggagatctcgtcctccgccgaattctaacaggggaaggacggcacaagttgtcacctctatgggaaggaccgttcatagtagcagaagtcactcggacgggatcatatcgcctcactcagatggacgacacggaaattgggaactcatggaacatagaacacctcaggaagttttacccctagccgtatttaaaaagctattgggacgacaatgtactctgtaaactgggaaatatatcatcaataaaaagacttcaagagcgctcaaattattcattgtcgacctgcattcctacttaactcagggtgaccactataccct

SEQ ID NO: 126651 - DNA, 731 bp, Zea Mays
tgctgttttcgctgggtttgggtcgggatttggggtcgattgcgggtttgtggcgatctgatttctgaccgtcggcaatctggtgagcaaagccgagatttttcccttcggttgggaatcggcgtggtgcatccggtgatggggatgggatgctcccctccctttcccttttgagtgctgattggcacattcgattcctcggcaaagggtgtggtggtagggaagctgacaatcacttgatggcgatgaggatccacctctattgattctctctaccttttactctattggtcggcgcccttggtcgtgcccacaacccagtcttagttcgattgttcttttggggatgatggtagatacctagatggagaggttgctggagtggttttgatgtgtattctttgcagtatttgacgttgttatttatattgattaatgattgtaaccatgtatgcatgtggagattggaaggagctcagaaggctgggacactgacctgctttacgacgaggagcgtgggatggttcaaggtggccctgttcgcagacctgctttacgacgaggatgcgtggacggactggtgccccgcgcaggatgccacatctgaccgcgttatagccgtcatccacgacgccgagaacctaggtgcctacttgcccacgctctccttctgcttccctttacggttcacccctttcctccaaatgaactgacacggaactccctctgcc

SEQ ID NO: 126652 - DNA, 535 bp, Zea Mays
ataatcaatcatgaaccctccgatctcattctaatggccaggatcgcaccgagtgaaacggtatgcaaattctaatctcagtcgttcaccgcgaaatccatggccagagagccccctgccccaacagacaccgtaatacgacggcgccgcgccagacccgtggcggcgaccatgtccggccaaagctaaaccggcgaactatggcctaaactttgaataaagtgatgctacgtgtaacaccccaggtgttaccaaggtgttggcttcctaatggcacatatacctattattacatgtggttaaaacttggaggagagggagtacttaagaccttggaagcatgagtgagttaagtaatgccaaggaccaaagtattacccaagcttttaggcaatgatcacctagggcaagggaggattgaaccttggaccccccctctcttgaagcctttagttgagagaaagattaggcaaatgcacatttcataatttaaaccttaaccaaagtttaagagtaccaaaatgtttacaaaaga

SEQ ID NO: 126653 - DNA, 306 bp, Zea Mays
ggaccgaaggaggagacttcaggcgaagatcgtgggaatctggatgtacgggacacaatattatggtggagatgagtagtagaaccacggaaatggtaaagggagaaagattgttttttctcacatagaagtataggtggcgagtggtttgaaaggttgagttatgttgctgattcaacacgggtcgggttcgatccctcgatccctcaatctatctcctttttttactgcacgggcacggttgggtggcagaacaacgtcagaggcagaacgacagactacccttacaacattaataagtagtat

SEQ ID NO: 126654 - DNA, 558 bp, Zea Mays
cgctcttcacacattaatttgcattttacttagacatcacatgagcactactacttttcatctgcgaccataaccatacacatttagaccacaacaagcaattcatcgtgattacgaacttaatcaaagccatctaacaattcggctaactagagaaacgacatagcccgctatacaacattcaagtcacataaaacaccatattttatgagatctaacatgtcgagcattaattttacaacataagcaattcaacctctaccctgcttgaccgaacctattggctaacatatcttaaacaccctatccattcttcacatttctaaacctattgcacgacataaacaatttcgatacacatttataacatcatcacacattaccccaacttaaccatagaggaagcgatgactacttcggcatgtcaccacctctctacggtccaaatcaatattaactacattcatcgaacctcatatcgtgcaacacttctaacttactacctcaaatacaaccatatcgtggcatgcacttgagacacttccgttcaacttaacg

SEQ ID NO: 126655 - DNA, 394 bp, Zea Mays
tgacaaagccgatcatgtccttcgttgccactgacttcgtagggacagcctccacccactttgtgaaatagtccatgatagctaaaatccactgatggtctttgttggacgaggggttgatttttctaatcatgtccatcccccagcccctgaatggccatggtttcacaatagggttcattactgacgtcgttatcatttgtattttccaaaatcttcgacatgactgactccctttgtaatatttaaagtaatcttcaagcatggtgagccaatagtatcctgaccgtctgatcaaccttttcatcttgtgggctgattgataagttatgcaagctccctcatgaacgtcatgcaagaggcgattcgcttcagtcggccccagacacttgag

SEQ ID NO: 126656 - DNA, 551 bp, Zea Mays
cagcttttcaacggaagtcaagtccatcaatagctctcttagccattcaacctcattagtagctgatcctaatgatacaagttcagcctctgtggtggacttggtaaatatagtctgtttacaagacctccacgaaaccgtagcatcagtaggcaaaaacatagacactcgtggctttcatctcgtccgcatctgagatccaattggaatcactatatccctacaacgctggtgcatatcccgtgtagtgaattccaagtgaggttgtgcctctcaaatagcgcaacactcgttctagtaccttccaatgctcatctcttgggtttgatgtaaaccggctaaatttgctcacagcataggagatatcaggatgtgtggcgccagctagatacatatgggaacccatatttgtgaatatattagttgatattttccctttatactttttaaatttgatgctctcatcatagggagttggggcgactttatagttctcaaagccaaagcgggaaagaattttctccgcatagtgagattgatttaaagtaatc

SEQ ID NO: 126657 - DNA, 394 bp, Zea Mays
agtgaagactttgatgcagaaagtgagattgagggtgccgaagatcggccctagagaccaagccatgttgtcttcgggaagtcaacgatcaagcaaggacaaatggatgcaatgaggggaaggtacttccgtgatatttctattatgagggatggaggggagaataatgtccctctgcccgaagctgacaaggtggtcatttatagaagcttcatgaagcagggcttcggtttcctctggataagatgctggtcgaagtcctgaaaactttcgaaatttaccttcattagcttactcccgaagccatcatcaatatggggatctatatttggccatgagaagctaagggttagaaccaaatgcaaaatgcttctacaacatgcatgaattgtct

SEQ ID NO: 126658 - DNA, 661 bp, Zea Mays
gttgctctgacattcaatatttaaatagggccctacgtgttagatggatttggctccaaaaaactgattcttctaaaccttggactgatttgcctttccaatcaaaccggttcttggatagcttgtgctctttggcaatggcctccatagtgggtgatagaccgtccactcttttttggcatgacagatggctcttggattagaggattgtagacttggcccctcatgtttttagtttggttcctaaaaggctggtgaagagaaggacagtggctgatgctctacgtagctcttcatggattggggatttgaggggagtggtaacgtgggaggtcattgctgacttcattaatccgacagatgttgtggctgatgttgatcttcaaccgggagttccagataagcattattggaggttctattccaatggtatctattcggccatatctgcttatgagataatgttctgcggctctacctccctgccgggctttgaaagagtgtggagcacctgggcgccgcctaagtgtcagtttttcctctggttggtcttacataataaatgttggacgactgatcggctcgctaagaagggtcttccccatcctagtacttgccccctatgtgaccaggaaggggagtctattcatcacttgcttgt

SEQ ID NO: 126659 - DNA, 1201 bp, Zea Mays
gacctgcaagagagcgcgacccaatgggcagcgtcggggtcaccatatcaagtaaaaaatcaagattagattcttgagagctcgcgattgtatgttcggcgaatggaaaggaggtctcgtcgaaggtgacatggcgagaaatgatgacccgattggaggccatgtcgaggcatcgataacctttgtgttcaggagagtaaccaagaaacgcgcacaacgtggagcgaggcataagtttgttggcggcgatggcggagaggttaggataacaacgacatccaaaaacccgaggtggtcataggtgggtgggaagccaaaaagcgcatggtgaggggtggagaaattgagagttttggtggggtgtcggttgatgagataggtggcggtatggagagcttcgacccaatagtgtgggggcatgctagagtggaagagaagggtgcggatgacattgttaatggtccggatagagcgctcggctttgccattctgctaggatgtgtaggggcacgacatgcgaagtgaaacaccgtgagtgaggaagaaggaacgggaggagaggttgtcaaactctcgatcgttgtcgcactgcacggctttgatggtggtgtggaattgggtgtggacgtatgcaaaaaatgagagagggtgggaaaggtgttggatttgaggccaagggaaatgtccaaaaatagtgagagcaatcatcgatgataactaaataatacttgtaaccagagacgctagcaacaggagatgtccataagtcacaatgtattaaatcaaaatggcgtgatgctcgagaggtggaagaagtaaaaggtaaacaagtgtggcggcctaattgacaagcatgacaaagggaatcacaagtgctatgagtacatgaaatagcagctgaatggacgaggggacgaaggccttctgatccaaggtgaccgagacggttgtgccagagggtggtggaggtagcaaccaaggcgtggggacgtggtggtgatggtagcaacgggtaaagatcaccagaactattgcacttggcgatcacagtcttggtgcgaagatccttcacagagagaccaaaagggtcaaactcaactgaacaattattgtcaatcgtaaagcggcgaacagaaattaaatttttgataatttgaggagtaaccaggacgtgattaagagaaaagggaccatgagcagt

SEQ ID NO: 126660 - DNA, 420 bp, Zea Mays
atggcatcaacacgatgattcaccggcgctaatcttgctcctagtcatgtaatgtcagctcctcactccaagactccaatcgcacactcgtggaaatggaaagagaagtccacgaccaaccactgtgaaacttccccatggactggatcggccaggacatccaaggtgactaggcatggaggcgatgaatgatgatccatccagcggagacgaagcacccccacacacatgacacacattccctaagcctccaatagtccaaccatcaaccaagtagatatgtgccttgctggagtcactccacgcctccactctgccggatcaggagtttagacacactgcaaccttgctagtttgtgatttgcagccccacgtagctttatcttattattattatgcacatgcttggctacttccgtc

SEQ ID NO: 126661 - DNA, 579 bp, Zea Mays
cataatgtatgtatagttttgtctaactcaccttttccttatattggtttgcaggataattcagaggacattcgctctattgtactgaagtacctaatattccatcgactaaacagaaacagctccatggtttcccatctggatagattcaagttctctcagtagtagcctagtatagtttactctctgaatggtagtctgaacatgatggtctgatggcttttggtggcttcaagttatttcagtactagcttagtttagggtactgtcactgaatggtgttgatgtacatattggtttgttggcttatgttagcattcagataatacttatgtccatatgcagctcttagcaaactcttatatatgtcgttccagatatgttttagatggacatatttatatatgatagttatgcactttatcatttgtgttctggtttttatatcttcttcagtgatgtacttcaatgcatcggatgttttattttgttatttactgtatgcgcctgtttatccagtgccaatgtgctgcctttctaagttcagttatgtacaatattttcagttcttctctgtat

SEQ ID NO: 126662 - DNA, 372 bp, Zea Mays
tgggccgacccaagaaggcaatgggcccatgcccggatcgtccatggattacgcacaatctcaaggaaccgtccgttttcccgcgccgggcgccctcgaacgtgggatagatcgggatggagtcggcgggttttgtttaagataagctaagtcagttcgctattagctaggagatatgctagaagaatgtgatcaccatgtacgtagggagtgtcccacggtcgtgtatataaggcccaggaggaaccccatcattttcatctcattagcccctctccattcaggagacgctacttgtaacacaccacacatacagagctaccctaggaagtagggtattacgcctctcaaagctgcccgaacctgcagaaa

SEQ ID NO: 126663 - DNA, 276 bp, Zea Mays
cctagctatagtgtccactaaagcttatatcgtgggaaacaaatttatcactcaaatatggtcgaagggtggtagggaaactgcgggagatgaagataggcgcttctggatgaagtatgttccaaggcttttttcaatgacgccttgtgctccttttctatttttatgtactaatgcactcacactttttgtaggatgacgatgatgacgaagaagccgaagcttagaggatttttactgaaaaacttagaggacttgttagtgcatttcgacgac

SEQ ID NO: 126664 - DNA, 551 bp, Zea Mays
gaactacacagtcgcttcggcaaagaagggggatttctttatgaagcgtgaaaagaagggaaggtgtttttgcctacggctcaaaaaacgatacatacgaagatttcacgcctcacaaagaattatattacatcattaaatacacagatagttgataagtgtttcttacaacggcaaaattctatacagagaatctaaagtcttaaaaataagctctagtcgtcctcttttagaactttatcggcagcttcttccaagagtctgttgacaccttcgtcaacggcttcgttagcaatcctaattacatcgagtgccctcttcagagatggatcagctttggggttgtatggctccggagggggagagagctcagctgtaccacaatacaagtccgttactaccgaagctaaaataatttacgaagttaaatcatgaaagatatacctataagcctggcacgtgcagcggcttcttcagctctcctggcctattccaaggcgtcatgagattctttctctttctctctaatagcttcatcagctgtatctcgg

SEQ ID NO: 126665 - DNA, 1132 bp, Zea Mays
ctgcaccttctcttgaatctgcgccagtagcactgcacactctaaattagtaggcacttgagctaacactggaccttggagctccactttcaagcctttgatgaattgggaaacaaaaaataattcgtcataacacatatgatgcatgcacacctgataatgtttgtcctcaaattcttgggcataactgtccacatgtgaaaactgcttcagatcgagtaaggcttgcaaagctttgcgatagtcctcagcaccaaacttttgttccactgctcgactaaagtgaggccaatcagctcctggaaactgcagcttatacacatgccaccatttctcagcattgccttccatatgtaatgctgctgcccggacccacaagacctcaggaacctcataaatgaggaagtaatcaatgcatttggccacccaaatttttggagaagaaccatcgaactttggaaaagaccacttgggaagcatgtgtctagaccagtgcccgtcatgctgaggaggacgcattggctcccgacgaccatggttgtggtgaatatgaggagagtgcccacccatcccgtcggaaccaaatgagttattagatccatcatcgtccaactgtccccccatctgatgaagatttagattagccaccactcgacttgtttcatccaattgcttagccatgacttgttggtccttagtaagctgaccaatcacaccagaattgagatctaactagaccatcatgtgttgctggttcgcaaacatcatgtcaatattatccaacacccgctgccaattgttttcctctttctcaaatcccgctgccataacatccaatacaaaccgggattgcacggaaggctttggaggcgccgtgtctgttggttgatgaagcaatcaaagagaagaacacactcagacctttcgtcgaacaggtcatgagcgctccgtctaccgccgccacacttcgccgaaatccaatcaccgccaccagcaccaccttctaccgccaccaaaaccgccacacggaaccccgccgccaacgcccagaaaaaaagaaaatctagcaaccagagtgaatcgaggtgagtgaaccaaagaccactcgcctgagagaatccgctgcggatcg

SEQ ID NO: 126666 - DNA, 550 bp, Zea Mays
cacttattaggaagatttaatcgtggccaccaaaattagatcgggcggccaggagtcaatcataccccttcgaccatgggatttgcaaaagagccattgcataattgctaaaacaacccgagatccatgtaagatttatcgttccgtatctatgttttatactaatttttactcccgtggcaacacaccggcatagacctagtgactctaatacgcttagattagattgagtaaatatatggatactaaacactccttgagaagaacacccccacccacacgatgacacgaccttaacgttttataggatagtgccacatatgtgcagccggccgagacatgaaatgttcagagcaacgtaatgtaaccgcaggagcaaagccgagatagatgcccacgagctgccgcggccggtcccggcgccgtacgcgtacggcacgtctcgagcaccatcagtcagctgtcagttgtcaccaccgcgcgcgcgcgcacggcagggtaggagcatgaacgaagttgccggcgggcacggcgtgcgtcgacgtcgacg

SEQ ID NO: 126667 - DNA, 387 bp, Zea Mays
catcggtctcaaaggtgaggaaaccttgctagtaaatgccatccatccatgcatccagggggaaaccccatcaaaccccgcccgaatcttcgcccatgtggcctcaacgcagcggcaccccgaagataacgtcacaagttgcacagcgccctctccgtttctctcccctacgcaaaaccaagaccccccatgaaatattcgggcgagtttttaatatcccgccagccccaacacgcgaatcaagttgatatcccagcgagcaaaagacagggcaacgtgaaaataaagacaagacaacgaaaattcccaagccgaaatccttgcccacacaaaattgcagcgccgtatttaaccccacactatataagcgccctcggcacactcccc

SEQ ID NO: 126668 - DNA, 272 bp, Zea Mays
ctcctccatgccaggcggggctcccaacgactcggtgcagccccgaattggtggatggagggaagggggtcgcggagcttcggcttttatgcaccacggtgaagtccgggcggaatcaggaagatggagcggaggttgttggcgatgaactcgcaccaacagagccatggtggcggcgctcaatttttccccccggacaaggcggaccgatccaatccggtagagggtcctaaacgatggcgaagatgccccttcccggcgacggccaccac

SEQ ID NO: 126669 - DNA, 371 bp, Zea Mays
ttttagatcagtggatgagatcggattgcgtttatttaaaacgggtaccgttggattaggatcgggcggtccagattgggacacaccatcccttcacgctatcaaatctagaccgtctgatctggatcggaccgtccgcgaagcgtaccggttcattaagcgcctaatctaatatgtaccatcggattgaaatccagcggctcagaaagaaccataccccttcggccctgtaaaattgcgtaagagaccctaggttattacaaaatagaacccgccgtcctctgcggggttagcctgagtcttgggatttattgcgccagggcccctgaccttttgtttattatgcgcccagtcctgagctcatgaaaatc

SEQ ID NO: 126670 - DNA, 412 bp, Zea Mays
ggcagggagaccgacggtgtagtggatgacgattgactggatcgtgataccaagccactcggcgctaccaggttgttaagggcgttgacgcctaaggcgacaatgcctcgactacatagctcgtagcctcggttagtagaggcatcgtggtttttgctcgatgccctggtgatgaaggggatgaaattaagaggagaaaagggatatttgagatgtgtagttctttcttaattccaaagagtgcctattacctccaatatatagacacatagcctactaacaacggaaacaaactccctaattatagcttgccttggatgcttgcttccctaaatcgtgcctaaccactcggcgccagtagttgctgcacctaaatgagggattgacactagtaatgttggccccacatgat

SEQ ID NO: 126671 - DNA, 357 bp, Zea Mays
gaattgtgaatatgcacatgcatggttcaatttcctgaactgaatgttgtagttgtctctattcattcgaattgtcaaactgatgctaaaaatatgatttaacttatttgaatccctgaatttgttagtcctaaaagatgtgaatacacacattctgcttatggcactgcttatgacttatctaaatacagtgtggttacttgtctgatctatagtgcgttttgatttcctagaatgatttatcccatatgttgttattccagtgttgctatgatggtgttttgctcttccctgatagtgtgtatatatcatttttcttaatctacaagagtatgacgatgtttggttacaaggctg

SEQ ID NO: 126672 - DNA, 327 bp, Zea Mays
catcacaagcatgcgagagtgctgaaacacgaataaggagggcgagagcggacctggagatggatgtccacggcgcggcgtcacatggtggcgcggacgaccgatttggtggaaaaactaaattagggcgctatggtggctaatcggaggcgagggttggtgctctggcttcgtaacaacctagcggagctagctgtgcactcaatttatagcatcccatagcggtggctccgaatttggaagaggaaagctagcggccggagagagggggtgagtcactggcgcgaattaccgtggctttcaccagggcaatgtctcaggtgatgg

SEQ ID NO: 126673 - DNA, 475 bp, Zea Mays
cgccaacataaagaagagcctatccacaagatgatgtgtgcacaaaaagacttggatcatgagcattagcataaaaaccagcagaagaaaaacactctaaccaagcccgaggatcctgcttgagggcataaagggagcatcaacagacatgtcgtcgcagctgacgggcgaactctggcgagtggtcatgaagatgagcgccatcaagtcaaaggagctgactgcgaagacgtgcagagccaccaagcgatgtgaggaagcgatgtgaggaagaaacgattagagaaagagaggaataactctaaccctaatttttggctctgtatactatgttatgaatagctctcatattcaatatgagggcactaagctcaaatatatacatcgatacatgatagggaccatgtacaacaaggactgtttatgagaccaaacacaaaaaaggatacatgcatcagcataggtgtctaacaac

SEQ ID NO: 126674 - DNA, 610 bp, Zea Mays
gttagacctattagattagcaaaaggctcaaaaattagaagatcacattaagaagatggacgaggagttctagcgacaaaaggctcagataggcaagatgaccgagaagtggcacctctctcgcgcttcagagtagatcgccactagaaggtcgtcaaggagaggaaaataaagtatgattacgtgttagccttgctgcagtagctccccattgtaagtaacacaacaccattagccgatattcaatatattaaaatccctttttataatcggattaaaagtataattggggatgtagaggatatgacgcttgtattagaaaaaattctatacctgattttttgtcacacgaattagacactaaaataactacgtcaaacacattggcaacaaatggtgcttctcagtcacagccatattcaggacaaatgatgccgccatcctcactacacgttagattggccctgggcacaaccgaacagtgtgcgtatgatcacggaccatccggcaccttacaccggacagtccggagtcacaccgagccggtcacaaggtccacaggcaatgcccaacacattcggacagttcggattagtatcggaccgtccag

SEQ ID NO: 126675 - DNA, 702 bp, Zea Mays
gaagtccacccgcaaagaaatgtcatattgaatatttattttctttttttactgtcaaccgggggagagaattccacatgaatttcattgtttcaatgacctcatttttaagggaaacgaggtaaacctttacataactttgtggcataccgcagattacagctgcaagcacaacgcagcaagtacttcgccaacaaggaggaaaagaaagcaaaaacaacacgaacgtacttgacacaagcggaataataactaaccgagttcctgaggacctgatcatcaaacagcatactcgtcggctagccgaaaccaatgtaaaccacaccacccgccgtagcaacgccgcacaattgtctccctccattgcgcacaacaaggccacccgccgtagcaacgccgcacaattgtctccctccattgcgcacaacaaggggaggaatgcttgaagggatgaaggaccgcccaactgagaggcgactagtgagggaggacgcccattgaagcttgccgaagaacaaccatctcccttaaggttatagcaccccatagacagcacatccacgcaccataaactaccatccaacgcccttaaaggggaggaagcctctacggagggagagtgagatcatgggtccacctggcataagattgatgtcaccaccaacaggagacgaatgatgaagcagaggtgtcaatggtcat

SEQ ID NO: 126676 - DNA, 557 bp, Zea Mays
tggattctgcttcgtcacaagaagagctttggaaaaaaggttattaatttccaaggaattttcaagaaaatttaaaatcaaatggccagtgtatgctccactgctagggttgagcgtgatggagatgagaccgaagccgctgaaactgttccgatttccaaaccaatgagacgttctgggctggtttcatcagaggacacacctgttgccgaagcaacacaagctgatgttgaagaagttggttccgaagatgagtacaactgcgggatgccaagtaaacctagtcatttggactttggaaagtccatctctgaagctgatcttcccaaaatggtgaagctgggctacttcagtgaagcaaaaaaggagctgattcgttttggcggagaggaaattactccgaagccggaaaagaatgaggttgtagtgttcaaaagcttctttaaagcagggttaagatttcctttgaatgggatgattgctgatgttttgaagaagtttggggtttaccttcatcagctgacccctaatgctatcgttagattaagcgtttatat

SEQ ID NO: 126677 - DNA, 911 bp, Zea Mays
aagccatacttacagttgcacaactttggtggcaataatttaaacttgaagctggataaaaatttgtagagcttacatataaccattaaagaaaaccttttgaccattactgcatagcccagaacgggaagattctcaccaagttgggcctacaggagtaaaatagcatagttatgatatgagccaaaaaaatctcaaacagcagatgccagccttaagatttttcacctgaaataaacatttggattgaaacaaatgaagtgtaagctcttttccttagaacggaatgcaatatcaaatatgaatgaatcatagtaaacacgtcgtcatatcgaagagaataattgcatctgatcattattatctggattgactctttacaggtcatatgctcctaaattttgtaccacatgcttggcattcagaaacagaattctggaagcagtgagcaacattatattagagtgaatgtacaattgattctaatgaaaatagtagtgatgtcttgaagagatcacaagtaagcacaggatctctagtcactcaacttgctggataagaatcaaagtccagaaactattatacttaagtttcacatagtcatcctccttattttatgttatacacaggtcacatcaaacaatacagcccaccctttcaatcatagtcaaaaggatatatccttcaaatagtttatccttgcttcacccgacataacttgcattatgtaccaaagactacataagctgctttacaaaagaaggaagcaatacatgtcctatgagaatttggttactggcctaaataatgttggatgtgatatggtgcaagctgagtacgctgacagaaggattgttcaatataataggataataatccactcacctcaatgtcgttaatcagcatctcag

SEQ ID NO: 126678 - DNA, 278 bp, Zea Mays
ggcgaggaggccaacactcatgaagcctaccgaaccctgaagatggattacgataagaagctaaagaagctcgcccccacgaagaaaatccaaaagaagaccaagagccaaggatgccaaactgggcggaagaagaaagcccctccagcaccacctccccccgggatagagaacttgtccgacgtcgaggatatgtccctagctagccttgatgaccttctcaaggaatttggggacacttcagaaaaggagtttggaagtacctcagaaagcgctcg

SEQ ID NO: 126679 - DNA, 374 bp, Zea Mays
tgtgttcggttgtctgaatagcactaattttaggcattagtctattatgcaactaaggtttactctaacatttgactgatgtgacactatgcacaaagaaccttgttgggtcggtgagtcacctgggctgtaatggttagatttttatggatgtaaaacattattcggtgtttctggtactattagtttatatgagtttagaatttcacattgtaatctgaatacgatcaagatacttagtttattttcctatgttgaaggtatacaaataccttccaagagtaccacccagtgcaggcaacgttctcggtcaaataaagtgccactaaggaatcacttgcataaattgttgccttcgaggtatgtatttgtcg

SEQ ID NO: 126680 - DNA, 394 bp, Zea Mays
ctcgctggcatctcaaaatgaacttgcctctcatcattgggaagatcacaaagagaagcaaccaagacctcaatatctttggcagagggtcgcactctaagacccagaccactatcaccaataggatgattggacacgaaactgaaaaaggacttaggaggtggcagattccaagcagagtaggcaataggagcaccaacatttgacactttgcctctcaagatcatgtctagccggctcaccaaatcctcagcaggaattctcctattagtaacccgagtggagtcggtaacaccactgtacaagtaagccgggtatgctctgtccttcaggggctggatgttcttaaaaacaaaatcagcaaccacagcttcggcggtcagacctctttcct

SEQ ID NO: 126681 - DNA, 620 bp, Zea Mays
gcaatgtaaggctggaatgaaataaaaaaatatatgatgatgaaaaaaaatggttgtagctgcaaaaattgaactggtgaatttggagcataaccatgagttcataactgacgaagcagagaaacaacatttacgttgcaacaaaagtagggatgctgagttcataaattttgttgatgcaatgtatgatagccgagtgtcgcagcattgcatagttgattttatatcaggcatgcatgatgggccagagaatgtatcagtaactgctcaagatctgaaaaacatgtaagcaatctttttatgttgcctatgtatatattgagtgccataaatattactatagtaaatgtttggataatcattttttgtgcatacaaatgtaggagggcagcaaggagacgagaaaactgcgcaaatgatgtagccaaacttttggctttctttacagaatgcaagaaacagaatccacaattttttgtgattttcagctagacaatgatgggaaaatagtgagtattttttggtcacgcgcaagtatgcagggggaatatgcaaattatggtgatgctgtgacatttgatacaacacacaagacaaatatatatgataaaccactgggc

SEQ ID NO: 126682 - DNA, 335 bp, Zea Mays
ctagcttgtcgccggtgggtctgccacggtgaagtccacgaatcaccgcgccaatgactcggttcccctctcgaccgccagcgcaattcgtccaaattaaacacgactgctcaagcacactataaattgagcacaccgacgggtccgtagggttgtcacgcaccaagccaccaagccgtgcctccaattgttcaccagagctcgccaattccaaatttcccccaaatctgctttgcgccaccatgaaagagacctcgccgtggctagctcgtcttaggtcctctcgtaccctttgccctttcgtttcagtgttctggtgtgttcctgatgctccc

SEQ ID NO: 126683 - DNA, 2697 bp, Zea Mays
agagggaactggcaatggctgtaatagcccagcaggtgaagatgttcggacttatttctttgacagactgcacagccccgaacaaattcctgtacccgtctcctgatatgggtattgtggaatgagctcctccatctatgcaaggtcttctctactccctcatgacctgctgcatgagcagctatcagcaactgatcccacacacttgaattatctggaacgaagactctgccccggcataccaacaatccatctctttcagtccacccttctcctgcagttcttgccgccaactgtgtctttagttcctggacttgcggatctgtcaatgcttccttcctgagtgtatcaaagacttccagagttggggtggacagcagattcactgctgctgttggttcctcatcccttcttgataaggcgtcagccgcgccgttcatcttccctggcctatactccacctccatgtcatacccaaatagtttgttgacccacgtgtgctgtggtatggtggataagcgttggtccagtatgtatttcaaactaaagtgatcagttctcactgtgaacgctcgtccccacaaatatggccgccaattgcggactgctttgacaagcccaatcagttctctctcatatgtggaagtttctggtgatgtggtgccacagctctactgaaatatgccactgcccctgcaccttggtggagaactgccccaaaccctgaacctgatgcgtcgcagtcaaccacaaatcttttgctgaaatccggcatctgcagcaagggagcggtcaagagtgcctgtttgagtgcgaggaatgcctctgttgatgcttcagaccactggaatgcttccttcttcaataggacagttagtggtgcagcgatgttgccatagcttgcaatgaacttccggtaatatcctgtgagcccgaggaacccacgcagcgcccttaaagttctgggctgcggccaagtttctactgctgctatcttctcaggatccatcgccactccagatgccgagatgatatggcccaaatatgacacactagtgaccccaaaaaaacacctggagcgcttcaacgccaacttatgtgctctcagtgtttggaacacttgtttgacctgttgaaggtgagccgcccacgtcttgctataaattaggatgtcatcaaaaaaataccagaacaaacttgcgtatgaatgggttgaggatatcattcatcaagctctagaatgttaacggggcgttggtgagaccgaatggcatgacgaggaactcaaagtggcctcggtgtgttctgaatgctgttttgtcaacatcttcggagtgcattctcacctggtggtacccactccgaaggtccagcttggtgaagaatctggaaccttggagctcatctagcaactcgtccactactggtatggggtaacggtccttcacagtcttcccattgagctcccggtagtccacacaaaatcgccatgttccatctgatttcttcactagaagcactggggaagagaatgcggatgtgcattcccttataattccttgctgcagcatgtcctcacattgcttctcgatctcatcctttaagagctgggggtagcggtatggccgcaccgctattggcgatgtgccgggtagtagtctgatgtggtgatcatggcgccggactggtggtaggccacgaggttcttcaaacagatctccgtatgattgcagcaagttctccaataattccttgccctccgaaactacacaacagcggggttttgagctacccatccctgtccagcacaccttgcgtccttgtttccagaacgtcattgatagacgttcgaagtcccataggattgggcctaaggaacgtagccactggactcccaacaccacatcaaagccttctagtggtagagcatagcaagtcagggcaaaccgctcttcagcaatttgtacggataatcctgtgcagaaccttgggctggtgatcttgtctccattggcaacccgtactgctccttggcgcctttccaatggaagctgcagctcagacacctttgcttctgtgatgaatgtgtgtgtggaaccggtgtctaccagggctgtgagtggtactcctttgattagaactgtaagcttcatagtctcccccacatcaattcctgtcagggcgtgcagtgatatgcccagctcggccactgtctcctcctctccagtgtcatcttctaattccagcaagaaaacccctcgagcaacacatttgtggtccactgagtacttctctgtgcagtgatagcattccccttttgcatgcttcgctgctagttcttccggtgatagccgtttgaatcgaggccggggtgcagcagctaccttagatggtgcgctgttgctggcttccttgaataccaaactcttcccagcaactttgtatcctcccctttttcctgcttccagttcccttctctcataggcccttgccaggttcatggcgcgctgcaaatttccaggagcttgtagttcaacatctgtgcgcaggggttccccaagaccggctgtgaacatgttgacctgctgcatggcagtaaggtcgttgcatcggcagagaagaagtgagaactgccgctggtattcctcaacagtgccggtgcggtagaggtcctttaattcggccatagggttggag

SEQ ID NO: 126684 - DNA, 387 bp, Zea Mays
gtacgctcaaaattccaaactctatcattaagcagatagacatttacaggaagcattgtctttggagggggaatgacacaagctcaaaaaagtctccgctggttgcttggtccacgattacttagagaaaagtaagtggaggtcttggggtgatacgcctagaaactcaaaatgatttcttctaaaattcttccacaagttcttcaatagttatgatttaccttgggtaaatatcatctggaataaatattatacgtctggcggacttcctggtcatagaagaattggctccttctagtggaagagtatgttgaaacttcttcacaactttaagggtctggcgcacccaatcattggcaatggtagatcaattcttttctgggaaga

SEQ ID NO: 126685 - DNA, 283 bp, Zea Mays
tgaaagttcacagagacgctatgttcatccaccccactgcccgcacaaacaccaatgctatttttccaagccaccaggatgccaccactagcaccaacagaaggtaggaatacaaaattgtcaaaagctagtcctagcatccgcaataaaaggaaccgataaacatccaccattttagtttcttgaagacaaaccacatcaactcgagcagaatccaccaaagtgcgcaccgcatcctgtctagcaaacccatttaggcctcgcacattccaaattagaattt

SEQ ID NO: 126686 - DNA, 542 bp, Zea Mays
aacagagcaatcggcttaagtcggcaatgacttaagacggtgcaacatgctcgcgcttactcagcttagggtgaccactataccctactaacggagcaatcggcttaagtcggcagtgacttaaaacagtgcaacatgctcacgcttactcgacttagggtgaccactataccctactaacggagcaatcggcttaagtcagcaatgacttaagacggtgcaacatgcttacgcttactcgacttagggtgaccactataccctactaacggagcaatcggcttaagtcggcaataacttaagacggtgcaacatgttcaagcttactcaacttagtgtaacatgctcgcaaggcgatctctatgccttaccagccgatcaactagcgtaaattagaaaaagattccaaaaccagcgcactacacttacttctacaatcattcatgacaactgttgaattctaacgacagaaacaaaacgttatagtttttggcgccaagaacacattctaacatcctaccgaatattcaagcgcgctggtc

SEQ ID NO: 126687 - DNA, 784 bp, Zea Mays
gcatattttcaatgggcaagtgatggccttggggaaagttgtcttaatcgatgctgaggtcataacttatatagtttaagaatgacttcgagggaggaagaggtcgaagatcatggcatgctcacctacggctcaaatcgacagtgatggcttgttctctggtttgaagagtaaggcaagtgttgttcggatgtgggggtgacaatgagatggtggttggactgtgaggttctgcggcaagggcatcagtatttataggcggaggaacgacagtttataatggagggagtcttgaccggcgtactgtgagtggtgacgttgccacagtgcagtcgcaacatcccgaggttggcagggtaacttggctcatggtggggcattcatttagttgtgattgtaacaagtgactggcgtgtgctcaagcgggtgcacgaggtcttgccggagtggctttctgcactgaggtatcacttcaaggtctgcaacctgacactaatatagcagctcggtgtgcacgacaaaggctgtctcagggcatagggtgtaggtggggctcactaggatgcacaaatgccaaggcagctagaggcaggcttatgatttctttacgcatgtgttttgccataggtggttgtgggctccctctgtctagtgtgcgttatggcgggcgggcatcagacattttcaagaatttaccatggtgaaagacaagcttaggatataatttagaagaacattgaggaataatcgatagaggcattggtttgcatagtttggattaggc

SEQ ID NO: 126688 - DNA, 1086 bp, Zea Mays
ttcttatctttagtgccaaaatcacatctcataaattatgttttagttatactgagtcttaaacctttggattctagagtctctcgctaactcttcttttctatttactcatatccaactttcaccaactagttagtacatcgtccacgaaaaacatataccaagggatatccccttatatgccccttgtgaccttatctatcaccaagacaaaaaaggtaaggactcaaaaaagacaaatacttgatctgctaatcttccttgaagcaaagttaccttcttcaaatatctttgatatggtacctctctgaccagatagagcctctcttaatttttctgatttggacacaaaagctgtgttgcctaatccagatcctgatctaaccatactacatgatgttttagactgtcaaagagaaaaaatacatataagaaaatataaacatcaaaatagcaaagggtacaacagaactgtacctcttcagcacaactatcagacacagactgtttgaaccttagaatttgatcttcaaggccttttctctggctcatttccagctgcaccttttcttgagtagacttcagttcatcatatattgattcctgcaacaattaccaaagaaacatgtaaccaagaattacagaaaatttaaagtaaataaacaaaccatttgtttataagattcacagtcagggtcggctagctaagactggtttgctttaccttctctgaaataagtccgctgatctttccttttaatgattgtatttcaattgtaaattcttcagtcgctttggttaattccttttccaattcacgggccatactttcctgcaactggaatatactttggtcacattctctgatgattaaggcaatacttcatattcagttgagggcatctgtgcagcattcaatcgtttggatataacttgaccttgcaaaataattcaatacaaccctcgcaaccacttataagatgaaatgctttgactcgctgaaacacacctatcaactgcagtatttattccaggtgcacataaaacaaattcatatgcaaccctagcaaccacttacaagatgga

SEQ ID NO: 126689 - DNA, 611 bp, Zea Mays
agagaagggcacgtagaaggtatacggggaaattacgggtgcaaaatcgtgtaggccaattgcgatccctcgccggaggcttgtcaccgtcgtagtctcacctcacgccgtgtgtcgcataactaccaccgtggtttcaggtaaggattccttcacccaattcgtgatcccctccgcttgatatgggcttatccgcgattgcgttagggcgtcagcacgtgggggcatcaactctggtgatggttgccgctgtggcgggtacctgcgccatcggccggtgtatcgggggaggggagtataaccccgggtctgttagatccgtatctggcagtccaaattcaaccagcataccaatgggcttgggccgttgatttccggaggggtggcctcgatttaatctagcataccccttcgccatgttatatctgtgtcgcagatcgattatccggggccaagattaaagattgacgtgggcaggtgatgatcgttggatcatgatctgatggacgatgtcgtgtatcagtttgggtcgagggaagatttaatccaagccctctatttcagatcaagcggccagagtcagccgataacccttttgtgcttacatcttc

SEQ ID NO: 126690 - DNA, 817 bp, Zea Mays
ctgattgcgtcttttgtggcttgtttgaatctactaagcatttgtttttttgaatgctcagtagctcgattcatttggcgtctgattcaaattgcactttatttgcctactactccgacagatgtggaacatctaactagggtgtggcttagaaactttgataaggggtacagaaaatctgttgtagttgggtgcagagctgttctatgggcgatctggaagtccagaaattccatttgctttaataaaaagctccataatgaccccgctgatgtaatcttcatgtgttgttttcttttggattactgggcactaatgcagacagggagaacaaaaaagatgttggaggcaggaagcaagcgaattagagagacgacaagagaggtgtttaatcgcgcgcatgggtgggctccggtgacaagaagtatcacatggtgattgtgttctgtcttacaatctgcttggtcttctgatttgctaggtgtgtatggtcagttagcttgcctttgatcggttatggttggttccaggcagctgagagtggtcggctgtagacaattaagtaagtgtttggtaagacttagttgatctaaataaggttgtaagtctggatttctgtgtccctgatccctttttttggcgttgctctgttgggatgtagccatgtgccatccttgttgagtggcgggcctcgtgatctgtgttggttgtaaaaactctatcgttctattttttaatgaaatagggggcactgcccttttggtcaaaaaaaaaaccagcattagcaattgtcctgcacccattgtttgctttggca

SEQ ID NO: 126691 - DNA, 473 bp, Zea Mays
agagaccagtttgggggaagtttgaaattccagagctcaggtgaatgattaagggtgggagcgggtgctatggcttcgggattatacagcgcaacagccccggccatcaatttataggaggcttaggcggtggcgcgtaatttggctgagcagtgctggcggccggagatagagaagaaccttggctcagtggattggtgtcctcagccgtggcgaactcaccggcgatgattagacgggtataaagagtcacggtgccgcgacggaggtgttcagatacatggcgcaaggccgtgcgacggcagtcaccggcgttcttatcggtttccaccgcggtgaacatggtacggcggccggaattgtttatcggccggagtttatccccgacgacgtacaccgggtgttatccactcaccccgagcacaaattggaccgacggtggcacgaatcgcggcggaaatcgatcgtcggcg

SEQ ID NO: 126692 - DNA, 406 bp, Zea Mays
gtggcttgcatatggtggtcgtactgttgaattataagtttgcaagacagattgttagtatttgtgcttcatcatccggttgtgagcgaaattggagtacatttgaatttgtaagtgagctagtcaaattattcaatttctattcgccactacttttttatcatcagttcttcattgtttacttttatttccacttgtagatgcataccaaaaagaggaataggttagagcacaaaaaggttgaatgatttggtatatgtttcatacaatagaaagatggttgataggtttcaaaaaatacgtgaggaagggaaaaactttgatcctttgattttagaagactttgattgggataatgaatgggttgatccattagctaattcttctcatgttagcaatgctcttg

SEQ ID NO: 126693 - DNA, 436 bp, Zea Mays
aggtgggaacgtattctttcgagcagaagttcatccacagtgaccccgatggggttatccagtggatcagtgggaggttgaagcttttgacgagatactcagcgatcggggggatttctgtgcttttgctggtgcccacggggctgtatcaattttagaaaaggtcggctgtgaccatgcgaaggctgttgtttagctagaatttgttatctcagccgacgacattaagaatccttcagctgaagcgtcttcattaagcggtaaattttactccgaagtatggacaaagggcggacaggagatagccaacaaagctattaggaaaaaatgaaaaggaatctcacgacgctcaagaagaggccaaaaaagctgaagaagctgcagagcgcgccagacttataagtaccttaactgaagttgagcttcgggattcgtt

SEQ ID NO: 126694 - DNA, 370 bp, Zea Mays
ctgcaattctgctgccaagggagaagcatcgtcaaaagcaaaattgccatgatgaaagtcaccgtaccattcatcatcattgtatgaattttcttgacgaagctccctgtgctggggccttcggtcttggtcgtcctgggtgaggtgacgcatttcctcggtggcctcatcaatcttcctctgaggtcagcaagccgaagaatcttctctctcttcttttggacctgttgatggatagcatccagatccctgatttcttggtccagttcctcctcctgaggtgtttggcttgtagccttcctcttctggctcctagcttcacgtagcgtctcctgattagtgtccagtggctgcaatgcagccgctggcg

SEQ ID NO: 126695 - DNA, 607 bp, Zea Mays
cttagatgtgacgtccttttgctttcgaaccttagaagtagttgcatcttcagcttctttcccaagtgctacgtccgcaataattctatcaatttcagacatagtggtcccataagtgccaccactatcttcaggtccctgagttgtttcggcagttttatctgtcgcaatgagtttctatccggtcataatcttcttccttgtttctgttggaggagttttacacacagccttcatcaccgtcataatacgtcgtttcttttgaggaaccacctttgaaggacccctctctatctcttcttcgtcatttttgttctttgttgtctataataagttagtcagatctaacccagcaggcttagcatagcaaaaggcaaaggaccagtcattacctccagaatttttgtaacactaatagatgacgtcgaagggggtctcagtggcctgcttcggaagtttagatgaccatttgtggattctggccatttgtggatcacgaagctagtagaagggctggtgtacacgaaagagctttgaaggcagagaaataactgtcagcaggttggtgcagaagtagtaaatgccaaccgacattgtagggtcgccc

SEQ ID NO: 126696 - DNA, 764 bp, Zea Mays
gttttcaagaacattcagccgttgaaggacagggcttacccggcttatctgtaccgaggcctagctgactcaactcgggttaccaacagaagaattccctccgtagacttggtgaaccgacttgagatgattcttagaggcaaggtatcaaatgttggtgccccagtggcatactcggcctggaacctgcctccttgcaaagccttcactcattttgtttcgaatccacctgttgctgatggcagtttgggccttagagtgcgaccctctgctgaagaagttaacgccttggttgcctcgctcggggaaattcctgatgatgaacggcaagtccactttgaggtacctttggatcctagtgacgcagaaataagtgctatgcttgatttgctggctgaggactcttctgatgctgctcctgctgggacgttggtggtggcgcctcctccagaaatagatacaaccttggatattcataagcctgtcagtgttcgcccaagacgcccttcccgagccaatcaacttgatcttcctgctgatgagcagaaaaagaaaaagagacgcctccggcaagtatctagtttggatcgggatgttggtccttcggttcctgctgctgaagaagtgtctgttcctgaatttattgacgctgaccccaatgggggtgccccacctgctgctgaccccaaagggagtgctccgcctgctgctgaccccaatgggggtgctccatctgctgctgaccccaatgggtgtgttccatc

SEQ ID NO: 126697 - DNA, 480 bp, Zea Mays
catatatatcggtgcgctcttcacttagtaatttgcatttttaacttggacacgacctgagcactactaatttttacccgcgaccataaccatacgcatttagaccataacactcaattcaccatgtttacgaacttaacccaaaccatctaacaaatctgttaacgagagcaacaacataggccgctatacaacatactggtcggctagcctcttactatcgaaatccgagacatacactcattacagcatttttgtaaacatacatattcacaagtattttcgcacaccgaccaactcatacgaatcgtaaaccactaatctctaactcgaaaccatcatgcgcttacttcccaaatcatgaacacataacgcgtattgacccgactcaagatatagaggaagcgatgactactttggcatgtcaccacctctctatataagccaaaacaatttctactatcgactaagagttctaag

SEQ ID NO: 126698 - DNA, 470 bp, Zea Mays
gttgcgctcgtgctcgcagaccgggctggtggagctatggggcctctggtgctctatgcacggatcggagtcgtggctgtgggcaagacgcgatcgaaatcgctcactggcgcttgacatcgcctcggttccgccccacgctgtggaccggctccatcacaacaaatccacgggtatggctgcttccgttgtcattggctaatccttgaggtgtagtgtcacgcaggggagggaattgttcttcgacggggacgggaattgctcaccggagcccctctggcatcggtttaccgtggttcaccgtggttggggatctgagcatgtcaatcggcgacgtgtagtagattttcgagttcaggaacgttaggacgttgtgcactggcgattagacttggaatctgagtttgggggtgtcaggcggagtttgggggtgtcaggcggagagcgtcgacgacctgctccctcggcgg

SEQ ID NO: 126699 - DNA, 403 bp, Zea Mays
caagaaagctcctccgaagaaaatcaaggaggtaactcttgagattttacttgatgattgttctaattatgcttcatggtctactagtgtgataaaagcttttagaaccatagactcatgattagaacaaattatagacaagagtatcataccctccagttataacgataaaaatatttccgaggaagatcaaagatgtttacacttaaattatcttgcttttgacatcctagttaattctcttagcaaggaagattatcatgccttcataatgaatcaatatgaacatattcctgatgcacatgatatttggaataaaattataatcaaatttgatgagtctaaacatgatagttcattttgtgcttctacttcctttagtatttgtaaaactaaccctttg

SEQ ID NO: 126700 - DNA, 792 bp, Zea Mays
ttcaagaggtcaaatgacgtgaaaacgacgtttgacgggcaaatagtgtcataggatgtttggaattcgaattgaggcacgaaatgatatggaattgagccgatacttcacgaataggttcatataggtgaatatgagtgaagtgtgtgcttggtttgaatttaggcgaagaaaaaggaatttgggcactcggctcggaaacgatcgctcaaaacgggaaatttggtgaaatttaagcctgggatctcggattggcgtgaaatttggcaaggaggttactggaagtgttgtgaaggtgcctgaaaaatttgggttcaattggagcaagtttggctggtttgggcatttcaccgagcacgtggtgtgcggggatttagggtttcggtgaaacggttatttgaggtgggaaaaccctcccgaaggagctaggaacctgcagggaggcttaaggcacacaggggaacacatttcacaaggggaaatcaccagaattcacaggatttagagttgttgcacaaagggaagaggtgggaggctctgctcaccagaacagagaagaactgagggagtgagagagcaagagttgctcaccgaggagaggagaggaggggagccctaggtcaccggagcaccgccggagagggtggccgccagaggagatcgccggcgggggggaaatcgccacagacagagagcagcaggcgcggctgggaaataaaaggagcctctggctcggttcagcgggctggaggcatttttaaaaacgcgatatgggcgcaccggacagtgaac

SEQ ID NO: 126701 - DNA, 1007 bp, Zea Mays
taaaatgaaattaaaagccttacctttaagctgttataggccaagcaatctacaaggttcccctttgacattgcagacatgccatcttcgagcttcgggtatccaattttgtccatcatgactcggcacacgttgatttccctactgtctgggaggtaatacaagtaatcatcgacaacacttgatgggtatatgagtgccttaacacatggttgcacttcggcaatttactctgtagttagctttcctccggctgcatgtcggatgatgtattcagcagacccggttgtttgctcgtttgttggcataggcgcctcttctttggagtgggtcttttattttgtaagaggctcttcgatattctcatctacctcactcactaatttttcttgaacaataccctctttcggagtactgtcaaaagtctcgacaaccttcgatggcaccacaactaatatacccctagtctcttttctttagggaccctggtgtggctcaggcttggaaggcttttttatagtcattgtaccaaagagtgtgtccatcactgaggtcatcctactgcttttcctcggtgtccacttggtagccggtttcgactttggctcaggctgcatgctagccagaggggcctcatcttggataggtaactcaaccacgtcttcatcatcttctttattttcctgtgagaaaaataagttgtttcaatatcacttaaaaaataaaattccatgccctaaaaagaaataaaaagctatttttaccttcgttgttcttgaagagctggataccttcagcatagaaactaactatggatcgccgttagtttcctcaacaaatacaagctccgttggtagcctcggttcaataactgatgctcttttttatgaagttgactttttggcgctttgttgtaacttcacaatttttacttcggggcatttggcggtggcttcgaaatcgatttcctttccttagtctcgccctgcgccagccggggatcgtca

SEQ ID NO: 126702 - DNA, 370 bp, Zea Mays
ggatccctttgcgtggagtccggactacccacagtcgggtcccgggactcagggcagagaatacctaggccttgctcgggtaggggtccggtgccgacatgtgtccagacgcagcctggtgcggacctgtccgcataacgctactgctccccgcccaagcggagacctgatgctgccacgtggcctaccgtgcgtgatgtaagccagcgggcggagcctgacgtaaggcctctgggccgcactgtctctgcatttattgcggagaagacgcgccgcctgactatcccgctcacaggcgatgtgccttcctacaacatttaatgcatcctgtccactcagctggcatgcggcatctaggccatccagcagc

SEQ ID NO: 126703 - DNA, 416 bp, Zea Mays
tcactttcaaaagggctggcaaaaatacaagtcatcccaagatgaagacggctttgatttgattcttcttcaaatcaaatcaggccattccgttttcagaggctgtcaaaacaggccggccggccggccgtggaatattaatttctccgtggagcaacggatgattccactacgggtcgctgtcagctgagatgagagtccagttcccacctgttgtatgtatttcgccaatcggagactcgcttctccacctttttgtacgtgcgttgaactgtattgcttcgcacgttcattcgctcccctggaattagacaccgtcaccgagcataaaaatgcacacgcggatttaggcttgttttgactcagccacagcaacacagaccagggaacattcagactagtgaactgaagggaca

SEQ ID NO: 126704 - DNA, 605 bp, Zea Mays
gctctgtgcttcaatgcttctgtcgattagacttgtacttcagtagccacatttggacttcctcccatctcagccgatcccctccttttatcgtggtacattcattgcgtatattttgcggatatgacttcttcaaaaaatctttgtaaaattcctggcgacacacccaatgggtgtcttggtacgcagagtgtttaccacactgtcctgaagtagtaacttgatgtgactgcggggtgtaatcatattgcctgagcagttgaccttggtccaaacggtgtcgtgttacgcgaagcgacgcctgttgcctgactcatttttcagacggcttgaattgcttattgaattcttgcgactgttcggcgagcgtggtaggaagtggtcggtcacccctggcctctataaatagcctgcttgccatgttgctctcttcacttatcctttggttgtctgctttcttcttcttcttcgctctctccttctccaaccaaccatgggtagaggcaggaggggtcgtggttggcctcgccgcgctgatggcaagtgcaagcgtgctccgagtcctccctcggaggacttcggggatttggtgtactcggaggaag

SEQ ID NO: 126705 - DNA, 764 bp, Zea Mays
aaactgaacaagttttttttggttgcttaattctatcgttgagggcctctggtatgagcctgagatgacacattctgtagacaacccctgacgacatggctgaagtcatcacttacacgtggatatgatcgagagagagatcactcttgtcaaatacgtgtgggaaagcaaaggctcgatagtccacgataaacttcagaactgagcaatcagtgaaccgtaaagctcactgtactgtttctctgccgggatgcctgctgaagaagtacagcacatgcaaggagcagatcgacacacggtgcgcttaattataaataaatataaacaagtaaacagtcactgtcagctactttaattaatactcctacatatacatgtagtattcttacttaattgtactatctgtatgttgtattatagtaagggatgctatgcttaggtggcacatggtaggatgatgcttcttattagtccttattattccctcttgcgtgtgctacttctagtcccggacggctgcccctgcccccatgttgttcaacagtgcatgccagtttcgatcagagtcagagaatcccagtgaatccgttatggcggatgagcgcgggagagaaacaaaaaggcagaggcttggggcttcttttggctcctaatcaagatgtagccagtgcgtgatatgagatatatatatgtacgacgatgcttgctagatttcgaagcacgtgcttgaacatgcatgctccgtgtggcttgtgggcgtcgtt

SEQ ID NO: 126706 - DNA, 381 bp, Zea Mays
gccatttggacgtaaatatgcagggacatcaatgtttaatttttttaatgtaacgaggttgcaattcatctcacctgtatgctcccactgcatgcatttgcatttataaacgcctgctgctttgtcagccaccaccttgaatgcgtgttgtgcccagcaaaatgtcccatcgcctttctcatgtttcaccaagtaaccgcattccactcccggatcaggctctatcacaaaagttgtgttgttaatatattccctcttgtattcattgtacacagccctggtgtacaccctgctgagttgctcatcaaatcgtgatttgcaggccctgacaacttcagtctgcatcaagaccaacaattgcaatcacaccagacaacagtt

SEQ ID NO: 126707 - DNA, 510 bp, Zea Mays
gtgactttttgtgagtacacgttatagcaaagatatagatggattgtagcactacaactttgctatagatcactggttgtgttaacacttgaaaatcagagaaatggtggcttaaacttgctcggtcaggctgtctgaatagagctactgatggtacagtaaaggttaactgaagaagatcctatccctctgcccatcgccggtgactgtcgccgtcgattaccgctcgccgtgatttgtgcaccgtggacatcagataagcatcacccagtaaaaatcttcaccgccgtgagctggccaccactccgacgacccccccttcccctctgctttgcggctggcacgataagctcaccgtcgaccgccgcttcccggccgtgcgccgcgtggcctagccgttttacagcactgccgtgacaccatatgactgtcccatcgtcgccggggaggttgccacggcggtggacacgaattcactgcgccagtgttttcttctacctccgaccgtcg

SEQ ID NO: 126708 - DNA, 376 bp, Zea Mays
aggggtcatcaacagatcgataaaatggtttgtctcgttccgatgtttcaacagacctacagctatttccacgaatcaagtagtatcgaagtgccaatatgtggcgatgcatccatgatacaatctaaaagaaataaagaatggatgcattatgtgtagccaaacagcagaatggacatctaactttattgattttccaggtttcttatactcagaaatgcttttcaactattattgctccaagaaacgaccagttttagtcaactcacattacagatctcgttccattttcaaccttttttttcattactcactagtggaaacacattgacaactattttgacaaaaactgacttggacgagtagcaaataagtg

SEQ ID NO: 126709 - DNA, 632 bp, Zea Mays
cccaagcctttacctcattaagcgccacggtagacgagctccggtgactcatctcctcaccaccacgagctcatcttcgtccaaattcgttgcactcgtgctctctctctctataaattgagtgttactctcactccgcctctctgttatgaacccagtccagcctcagccaacccttctcgttcactagagcacaagtccatcgggtttccccaaaactggtcaccatcgccgccatgagacaccccgccgtggccagcccttctcaggtccattcacgtctctctaatccatgtttctacatcctttggtgctagtgaaactatcgatctcggccaattaaatgctaccacgtcgttgcctagggaacaccgtgtcatcgcccgggaacgccgctgtggacatggctcatgtcgaccggttgttcctagttgtctctgtccaaattggtgcaagcaccatagccctagtaggtcacttcttctttctgagtcgttggattgaacgctaccagcttgtataacccaggttgccggcgatcttgctccgctgttgtggtggacagatatgatagtggaggactggtcgaattaatcatagggatgtgttctgatagaatcggtgatggagtc

SEQ ID NO: 126710 - DNA, 332 bp, Zea Mays
atcaacttggcaggtgcacaataaatcatgatacatgatattaatcgattatactaaaaccaatggaggcttggatgagagtttgtcctatttttagggtctgtttggtagtacttttttatgggttagtttggtaagttggctagaatttgtcctggctagatcttatagacaagctggtcgtggatgttgccaccgtggtctgaggtggtgtagtaacctagccgttgtttggtttacctggttatctgggtggcttaaattaatttgttgtttgattaagccaaaccacatttcatacagattttggctatgtccttgcatgttgtttt

SEQ ID NO: 126711 - DNA, 665 bp, Zea Mays
gtaaatggggaagaggaaagggaggtatttaggctagatttacgctcctttgatgactggttaagcgctgctttaatcattcgggaagcagcaaccgttatggtggcggaggtgctgttgcgagtgagagaaggggaggggaagaggtcacgacatcagtggagggcggaggggaaggggaacaacatccatggggctcctccactggagcaagcgaagaggtgacgaggagtcgaggagtcggcggttgcgctttagagaggaaacggtggcggcactgtgtcaacctgagatagggatgaaaactggatgggtacctgggacgggtaccggatatgggtatgaaaataggacaacttttcggatacagatacgggtaattttttttgtcgagacggatacgggtcttacctggatagtgatcaccggataccggtaggatacggaatcaccaatacccgataagtatccgaaaattccacgtaggatacgggtacaatacgggtgggtacccggaatgaagtggcaaactggcaagtcattgtgtttgcgtctgtgctagtcttgtgtgcacgcgaggcaagcgtcacaagcttgctggcctgctccctactggtcggcccattaggacattacgacatttgccattatgcccccaaatcgtg

SEQ ID NO: 126712 - DNA, 816 bp, Zea Mays
ctgcccccaacgaggaagaaggcaaaatcgaaggttagggagagaagaagaagggtgctcacctcggcggacgagcagtgactgcaagggtccgacgaacgacgccgcaacgagcagcactagggaggtgagggcgagagggctgtgcagggacgaacagtttcgagtttatggggaggtctagaacgtgcgtcatggaaggggattagagaggtaagcatgcagtcggttggggcgctgcgcctgtgggcccaccaatccggggtggcgtcgagatggagcaggtgcgtgagcctgcgcatggcggcggcggctcaagccgctgggcaactgcacagagcccgcgaggcggacaagcgcgtccgcgttctgcgcaccggttgttgggccgtcgtgggtgcgctaggaagacgtgggtaggcgctagcaggtcggccggggagagcgcgcgcaggcgacggcggcgctaggagtggcagcgcgcgctagggttgggggagaatggggcgcgccgcgcctggtgggctcgctgggccgcgcgaaatgggccggggacgggcgtgcgcgcaggccgcgggagctgggctggggcagcgcagggatgggccgcaaggccgagttggtgggctgagaggaggaggaggggctggtttcgttttccccttttctattcaaatttagttatagtttttgaatcgaaaattcaaatacacttcttgagtttgaatggatgcaccaccacaacaattcaacataccataaaatatctcggcatgttatgcaaaaatcaaggacccttttagggttctattttac

SEQ ID NO: 126713 - DNA, 677 bp, Zea Mays
caaggttatctacaacttttctatatggcttctctacagaaaacatgatttagtttatcaaacattcaacatgaggaaatcactacgtgcagtccaaaacagcactaataattttaagctccttttaatttcaagaatcgttgtgttttaggtacttgacttactctaacttatatcaaggcatactcaagcatagtcacacaatatgacgtgatggctatgtagtcatgccatcacttcacacactcccaagtaacacaacaactctaaccgaacttggcatttagccgatcgatttctaacccatttttcataccaccacgacatggcataccaaatacattgaatgattcgttcacatttcacatatatctttaccaaaacattcccacatcacttgcaacttaacctaagcttccctacacaattacatgacatctacttaaatcacgaatagcattatcacacgccttgcattacaaatctacttgtccactagaaaacatctattcgaagtcatgaacacaaccatacactatgtgtgatgtgaaattttatgaacgcctaatatgcattgacgcgacttataaacataggggaagcgatgactactttggcatgtcaccacctcacctcacacgcaaaatcattcttaattggactgaccaatttgaacg

SEQ ID NO: 126714 - DNA, 531 bp, Zea Mays
gtttccaagtgtgtcgagtcagagtggtggaatcagtgcttgacatggtctttagcggggttcgcgggagagcatgtaacatttaatgtgcatgcttccctattggggtagttggacgaggtcgagctcgggcgaggcaaagatttcttccaaggccgaggacaagattagacattgcatgtactcacgctttgtgtggttgaaacagtagtcagagtgggggaatagtaccctgtattcgcgccctgaccaccgctgtgtgtgggaaaagtagattggaccatggtcgtgttgtcctttgttgactttggcaccttcagcgaggcaggtggctgtatggacgcatgttctgatatcggagtggttggccgaggcgagcgccccccggagtgttgcccgagacgccctcgagcgagtcggaaatacacttcctgcatgaggttggtctcgggcgagtcgtgatccaagttccatgtgcccttggagtgtgtttgcttgtgaccccttattacctaagcgcctaggcacttt

SEQ ID NO: 126715 - DNA, 291 bp, Zea Mays
cagagatcaccagtgggacgagtatggcataaggaatacaatgtccacacattatgctctatccatttgaaacaactctgaagcaagaataaatgatgctaccaggatagccatgttttcattcaatgatctgaatcaagggtatatggccagtagcatcaattggtactatccgcaatgcccatccgagagaagcatcatgataatcgcgtgaagggtacgatagtagaagacaacatctagatggacacactagatatctgaagcatcatgataattgcaacccatcca

SEQ ID NO: 126716 - DNA, 391 bp, Zea Mays
cgacgacatcaaggcaatgccggagagctcagatctgtaccaggggcctgcacacgcatgccaagagatgggacatcgacccatttttatcccttgctcatcctacgtgtgggattaaaaaacatttacatgtgacaagaacactgttatgtaggaaaagagaagatgagcaatcaaacctcagaaacaaaatggaatacttataagcttggcggtaatgttaaacagactgtggcaccaccctgattatttttcagaccatctgagttcaggttattgtatatgttatattcagatatcagccaagaacaaaaaaagatttaagactggatgaagatcaactgaatgttgttcacaaccaataaacttgtgtgttagagaacaaacaaaa

SEQ ID NO: 126717 - DNA, 586 bp, Zea Mays
gcgtaggtcaaccacgaatatttgtgcatccggctggaaatgattcatgtcgctgaaaaattaggaagactttacagtacctgttggagctcggttttcatgtttccccccctaaaaacagattattggaaggctacaactggtgaacttggtcttctcttctctacctacattctacatgtccaccctaagactatcggcgattgtgatcaagcagatagataagataagcacaggaaaaattgcctctggagaggtggagaaataaatgcaaacaaacaaccacttgcagcgtggaaaatggcatgtcaaccgaagaaatatgggggcctcagaatccttgaccttgcaactcagaatggcactctcacgatgaaaaacctggacaaatacttcaacagacacatcattccctgggtgaacttggtttgggaaaactactacaactccggagcagtaccgtctatgaagaaagtggggtcattttggtggaggcaagttctagcaaacctttccagttacaaaaacatcgctaatccacgggctgggatggccacacgttgcaactatggcatgacaagtgggt

SEQ ID NO: 126718 - DNA, 567 bp, Zea Mays
agaggcttcttcgcgtgtgatggatgctgaagttcttcctggtccgagtgctgggcataggcggcgaagggcgatggcaaagcgtagagtgagtgaggtggagggtggtcgtcttcgtgtggacagggctggcaagcgggaattgttgtccttgccggttggggcgagtgtgggtgagggggagttgcgaagtctttgagggtgaggagctgaggataatgctatttaactacagggagatgggtatcatcccgaaggttgaaccaatgtaaggtgtgatgccctcgttgtatgtgtgtaactataatttgtatgatgatttgtatgatgaggctgtgtgcctttgctgatccggtcgtgcccgtgggggacttgtgcgcttgatctagtgggcttattatgtcggtccggctgcacctgtagtcggtttttgcacggatagtcttttgagggagacttcgattttgcgcacttgttgtgctagtccggctgcacccttaggcgacttttgcccggatagtcttgtggggaagacttcggtttagcgcacttgttgtgctagtccgg

SEQ ID NO: 126719 - DNA, 317 bp, Zea Mays
cttgtccaggggtggaactggtggaggaggtggtggcggcaaggtgcttgctgctgttgcacccttcgctcctgacacatctcctctctctcttgatgcatctcttggcgttccttccgcatctgcgcatgcatatccgccatagtatcagccatctgttgcattattcacatctgggctgcaactgcgggatcaactccgactggtggaggatttggaggatccatctcagcttgttgttgttgtggttgtctaaatatcctctgactgtgtcgattgcagggtagatcaattgcaccacccttcttggtattgac

SEQ ID NO: 126720 - DNA, 389 bp, Zea Mays
gcatgatgcggaaaattgtgcgaagctttagttgtaacatatctgtggaacattgttactgagatgggcaaaatggctgcattgctgtatcttttgcttggccagatagttgacatgggattctgtcaactaatcatgtttcattccttgggacttgagttcatgcattacctagtgatgaacttgctagagggtccattgttcttccatgtcggagattgagcattgtggtctctgtttttcctttgactttggaattatgcactgcttggtttaatgtgttattgtctggttgctcattatgcttgttgtatataaagctggcttatgagcacaaagatgacatcatgttgagttgcaccccaccattttaagctgaaccagtttat

SEQ ID NO: 126721 - DNA, 683 bp, Zea Mays
tgtggatggaggtactagtgttttgtctatagttctaaacttggtgtgcataatcaacatcatcaataccctaaagtagtaacagttttcacaattcacaaaagcaaaatgaaattgaaatgcagaaaaaatgcaaccatgcacctcatgctacggatatgattatccgtgggtcaggagcagtatctgacctcactattgcataatataacactatttgttgcaaacagatacacttaaaaaggttgaaccagttgctattgatggtttcctaagatcgacatggaaccctagtaagactataaatctagaactaatcatgtgggatcaacccactactgcaagcctaacaatgaagcaaactgagctgggtgtaaaatattctacacaggatagaaaggctagtgctttcaagacacattgacaaaatatattgatttgttagttgtaaaacatggaatagtatctaagacttcactggatcaaaacatctaaaggctagaaaagatgactacaactctagaactgaacatgtgcgatcaaaccactactgtcagcccaatgatggactgaatggagctgggtgtaacacatttcatgtaggacaaaaaatagtgctctcaagatgcatgtccaaaaagtagattaataatgagttgggtacatggcattctgcaacatct

SEQ ID NO: 126722 - DNA, 370 bp, Zea Mays
agaggattttaaataacagacataagatagtcatcaaggtaagatggagagacgatggaggtaaaggtagtagcagacaacaaaggatggagtttaaaactcgtaagcgacaaggaagagaatacgaccaagggcaaataggtaaaatacaactatgagattgagatggaggagaaaaggttttttaatgacgggtataatataagcatcaatgtaagatatagaggtgacaagggtaaagatgataatcgtgaaaagcataaccaaggatagagttaaggcaagcctcacgaagtggcgaggtggaggaaacaatcaagggtaaaatcagcgaggttccgacagaagagttgaagtaaaaattcattac

SEQ ID NO: 126723 - DNA, 823 bp, Zea Mays
tggaaaattcctaaaaattccgagacaattccggaaaattccgagacacaaatcggtaattttcgacaaaaaccggtaaccgatggaaacggtcggtaaaacaccacgccgattccgatagaaaattccgaaaatcgattctgttttcgaaaaataccgttaccgatgaattcgatcaaaaattttgaaatcggtttccggaataccgaaaaattccgaaaccgttttcatccctactctcagcggtccctggcccgtcagaggattggcttctgatggacgaggtggtgctttcctggatccatggcaccctcatggccgaacttcaggacatcgtccgcgtgccggacgatactgctcaccggatctggggtgcccttgaggctcagttcctcggccactgctagactcggatcctataactcgagaccgccttctgtcaacttgctcagggcgatctctctgtggacgagtactgccttcagatgaagacgatggcggacactctccgcaccctcggggcccccatcaccgatgagtgcctcgtgctcaacctcctccgcggtttgagccctcgcttcgatcgtgtgatgcccattcttacccgcaagaagccttttccaacctttgcggagaccaagaacgatctgcttctcgaggagcttcgcctctccgccactacgaccgccgctcccgccacggcgctctacaacgctcctcgggctgcaccctctgcctccggaggggggttcctcttcaccgcacttcggtcccccgccgcctggagctcttcggcaacctactggctccggggggggggggg

SEQ ID NO: 126724 - DNA, 321 bp, Zea Mays
ggtcaggcatgatgatcctgctagttgaataacaggagcatagcaggactctgtttgtactactaaagaccatggcaagccatccaaggagagcctgtttgttgtggcgagactggaacctagcaggggaaaacaaggggtaatatgtttcacttatcttctgcatgtctactacgcaaggcatgacacagggagatagtactggtgtctaacaacacttggatagcagcaatacagcagcaaacagcccagccagcatttggataagtttaccacctcctcatcacttctatgtgtgtgcatgggtgccaagtacccccc

SEQ ID NO: 126725 - DNA, 400 bp, Zea Mays
tgacctatccttcccatgtagcataacactattactgaattgacctcgacgttcactcccctcaatccaaattgcagctacctccgaagtaatgggtgaattatataacttctggttcagcgtttggtcaaggttcaaggcgatgtggtagtcttcaatgttatcaacgtgccccatactcctaaggtgctcagagtatggatttcccttaagtatttcaaccaattgtttaataactgccttgtctttctcaaattgttgttgatgacatttacgatatctatgctcgaggctgggatcatcatcgtagaagtagagttcaaggtgtttatgttccgccccagcttccctaccgaacgaccttacgttgtggtacatcatgccatgtgcacgaaacgtg

SEQ ID NO: 126726 - DNA, 676 bp, Zea Mays
ttgtgaacagcataactcctaaactgtcagacctatggctgtcaaattttaacaccagcaagataatagagttttctatagcacatatctacagaaaacacaatttagttcatcaaacatacatcacaattaaaacagcgtgtgcagtccaaaacagcaatcaataaaattcagctcctatataattcaagaattagttgtgttctagagacttgaattattctaacacttcaccgttggttagagttaaattagtcaaattaggaccatcaagttgactcataaattttatccaagtcatttcgtgctctagatttaccctactcaattaaccacgcgttctccacgataatcaacatcgaagcgcttttcacccaataatttgcattttaacttagacatcacatgaacactactacttttcatccgcgaccataaccatacacatttagaccacaacaagcaattcaccgtgactacaagcttaactaaagtcatctaacgagttgattaatcaaaggaatggcatagcccgccatacgacatacacgtcggcttgcctattattatcgcagtccgagacaccacacctatttatatcacaatcacttactccatcgactcctacttaacatgagttggctaaggactgactatttcccaattatcaacatac

SEQ ID NO: 126727 - DNA, 492 bp, Zea Mays
ggaaaaactccatccaagattatggatcttgattccttttggagatccgacttgaatcttatctttccttgatttgatgaagtcgatcatcttcgattttcggccttggaatcgtcacccaagttggggacatatagttaagatgacatgtaggtaagggcagatggttagtgggtaggggtcgcatagaatgagtcttgacatgtcataatctagcttcctttggggtctagcttgattcctattcttctttaatgagattgatctcttccttcttcagtctttgtctcattgattcgacgttagtgtatttttggagttagggaatatggttaagatagatattggtgagatggactataggtcaaaagtttgtttgatgttaggtgggggttgatagattatgcaatccatcgtgactctatgggttgggttagacctcatgcatgtggctgagttggtctagggcactagtttaagttaaccctagct

SEQ ID NO: 126728 - DNA, 428 bp, Zea Mays
gtgaagtcgaagcatttgacgaagttctaactagcaggggagatttttgtgcctgcgtaggcgctcggggggctgtatcactgcttaaaaaagctggctgtgaacatgctaaggctgtaattcagccagacttcttagtttcagcaaatgacattaaagagcctccagccgaagctactgcctttggtggaaaattctattctgaagtgtagatgaacgacggctgagagatagcagacgaagctatcaagcaaagtgaagaagaatctcatcttgcctcggaagaagcgagaaaagctaaagaagccgctgagcgcgaaagatgtataagtacctctgacaaaaacttatattttgtgtagctgaactctctccttctcaagagccatacaaccctggcaccgatccagccctaaagggtattgtcg

SEQ ID NO: 126729 - DNA, 282 bp, Zea Mays
ttttatcaagttgttcaaccagcttgctgttatcatttggtgcaaaattttggttggatctgattgcaacacttgcattccaatcatactccttgtctgcatcaaatctgaaatttcttgcgcgtgtgtttgatctatttgcatccctcgtatcttgtggtcagcactaggcagggaacttctagttggatggttatttaactttacaacaacttggattcagattgcattccttgtttactattccccaccaagctccacatataagccatcgtaatcggt

SEQ ID NO: 126730 - DNA, 323 bp, Zea Mays
gccgagcaggatacgggccatacgtacgtacggcccacaaaagaaacgtagaatggctattcgactcgcgtacacccgtaaaccgcggaagaactagcttcgccatccaatccaagtcacaactcaggtcaggtcgtcaggagtcgtccttgaaagggcatcagccagccgcagctgtgtgtgtggataagacgagagctctgcagcaacgtgttggtagttttgtgaacggcagtcacggtcgaatctaaacctctagccgactagccgaggcacagaatcttacccgtgttctggtcttctggaccgcgggcaagtcggcc

SEQ ID NO: 126731 - DNA, 783 bp, Zea Mays
tttgcataccgcaaagatacaagtggtctagttctggcctacagtacaaagtggcatggcgactggacaaaagaatggttctgtgacaaagttgagtatgaacaacgcgaagatttcaagggtatgaagtatgatgatgagtcctttggaagtgagcttcgctttgaagaggtcaaagtgcgagatgagcgaagccgctgatgaatgcttcaaacctttcagtacaatcatcaagaagattggatcccaggatttagttcaagaggcccttgcttataacatatatccaactcggactacatggaaattaccaaaggaggtaaaatgtaaagatgaagaacttgttactttaacttttgacttcaaggaacaatctacatacaaggttccttcgactgggtgactaaagtttattgaagagaaatgcaatgagatgtgtggtaattaccttgctagagagcatgaggatatgtgatcctcctttggaggccaagggaagcttcagattaatacctgaattgtgaagatcatttggccaatactggggttgggggggaaaaggaagagagctacgaagaatgaggctgaagagccatcttcgggtcaagtgaagaaaaaagctaaaacatttgttcaaaaagatatagtcgcaaaaaggctttggctctaacaaagactacagttgtcctagagtaggataaaggaagcactagcactaactcgtcgctaggctacactcagattcttgaggtaatgacccgaccgctggcagcgccaccttcg

SEQ ID NO: 126732 - DNA, 800 bp, Zea Mays
aagtagtcgaggatgagatggtgacgctggcaacaaggttgtgctggacgaaggcgaagaggtaggcggtggtgacacatcgaggttcctagagtttcaagggtgggagagccacgatgcataggaagaaggtcctcgataatgccactttagcgctacggcggcgcttgaagttggataagaacttgaagagccaaataataccatgcatgagagacgtgcaccggcaagagtcgacatcgtatagatgtaacgacgaggactatgataggtgacgatgcagcgacagtcctcttgtttggcgaagcatcgcgcgatggacgacaaatgtctcggaacggtggttcgcccgcaatcggttgatcaggccgacgatgtgcaaggtagagacactgatggtggagcctcccaaatagtggtggcgatgacaagccgacgtagatggacgtgtagatgaagagcatggcacaaacatgcatttcggttatgttgtaggacacactagttgcaccataaaaaagatgaagaagccgatgtcgaagttgatgtcgaggacacacgagtcaactggggatggggatgcaaacccgatcacagattgggaaaaaaagagaaatggtgtgattgacgacgtgatgggtggcaggatcagatggatttgccgtgaactcgaggacgacgatgaacacgatagtatgaaggacttgtcacgcatcttaggagggcgctgtgccgggcggagagcgatctcaccgggggtagggcggcggtggcagtggaagacgccttttggatctaaa

SEQ ID NO: 126733 - DNA, 512 bp, Zea Mays
cagaagcagtagtgcaattgaacagggagatgttgcgtactggaaaaaagaacatgatattgcgttgagattctacaatgaagtaaattattgcgttctccaaatgatattttaattgcatttatagatgccaatataactctccagcctctgtattattggatgattgcaggctgctcaggttggtcacgaggtcgcaaccttgtatgcaaagaagagtctttgctatctgcatctgcgtgatccagcaaaatttatcgatgaagcaattaactacataaatatggtgcagccagatttatcgacacttaaccctgagtctgatgctaagaaattggtgctggtgagttgttggtgctagcaattaacgacgccacaatgtgtcatatgcactattgttttgttgacggttcctgttttaggaatttggtagaacctggaaagcaccggggtctagttcgaggcaggattctggaagtagcccgactaacaaaactggcgaaacatccagc

SEQ ID NO: 126734 - DNA, 638 bp, Zea Mays
ccccagcatgcaaatggccatgttacaggaatagtctgcagctgctgtgcaggtaaatgttgttgctttgataataattggcaagcttcacatctttggactaactcggcagcatcactcttcgttgttggccaatagaaaccagatctgaaaactttcccaactagagttctggacgcagcatgtactccacattgtcgggcatggatttcctctaacagttgtttcccaatagccgagcgaatgcacttcatgaggattcctgtcgcacctcttctgtatagtgtgtcccctatgagggtgtagtgggctgattgtcttgcgatgcattccgctgccaccttgtcatccggttcctcttcattttttatgtacctaatgataggctctctccagtcattggggtctaactctggttggctcaaggtgttgctctcttctgcctgatctgagagaatactcgggtgtgatacttcttggacgaagatcccggatgggacctgggcccgactggatcccagcttcgacaacgcgtccgctgccgcgttgcaatctcttttccacgtgatggaactccaacccttcaaatttatcctctattttttggacggctgcacagtacttgcccatagaatcag

SEQ ID NO: 126735 - DNA, 277 bp, Zea Mays
ttcagctatagcaaagttggcatccctcgggttggcatatttccatcgccttgaggggttcctccctgctggggagaggttgcggatcccctcttggttcagtactttgccgcaggattaggtcccgaccctgggttccctactatgcacgaaccatcggccatagtacttgggcgcctggttatgatgtgcatttagggttgcaacttgacacctgagtccgccgcttgagtccacgtcctcgcgttgtagtggcccctacacaaacccatcgaaa

SEQ ID NO: 126736 - DNA, 390 bp, Zea Mays
gttcttcgttaggtctggccaaactttggcttggtagggttgactttttgggtttgggagggggacctctgagttttctaaactggtggtgtggacctcgcgctcttgttcagtggaggtggttagctacttttttgtggtgtggccctcgccctgtggattcgtggtggcctttgggttaggtggtggggaatggtcagcagcgagggcaagcttacccttcttggcgacgagggttgtcctggcatcatcatcatttggtggtgagctaggacgattgtccttcttgggaggcatcgtgggaatagtcttcgtcgcacaaatggtgggcgccaaatgtttggtgctgacacatggtcatgtgggcccgaacacgcagagacggaaagg

SEQ ID NO: 126737 - DNA, 778 bp, Zea Mays
tgggccggtacccacaaggcgtatgttatgcacggaaattcccaaagcgctgttaacccatcttggtccttacatggcaagggcttgcctcctctaagaacggttgccaccctcaatggtgggccactcactccatccacctttctcgttccacaatcactcacaggggatgtcttagtcatcccctaaatattttacacgcacacatgcttgcccctgccagtaatcccaactcacgtcactattcccgctcattcccatcctgcttcacacacgccaagaatccaccacaatcccatccatcacagccacacaccacatacacacaccaagtcgcatgaatagtatatgtatagggtagtagcatgatatcaagtaggagcaatgatatcaacaaaggcttatcaatcaaacggcatgaatatcaaaaggcgagacattcatgaaggctaggaatgagatctcgggtttttaggggtctcactcccatttgtcgctcggaactttggcctagcactactgcatataatcatgtctataggaagggcgaggatgttagggtgacctattgtagtgaagtcctcctcgagctcggggacatactccgagtcgtcggcttcctcctcaggctcctcgggtcctagtatcgacaagatcccgaacaaatcgggagcacaaacattcaataagacgcaaaaagatgcaacaccaagcaagatgggtaataccggggttaggtttattcattaggtggagatgggaagttatcaggtattat

SEQ ID NO: 126738 - DNA, 425 bp, Zea Mays
tcatcaaattacgaatatggcgtagctctgccagaaaaatcattttctcattttcaggttgaagaccataaacccctgtgaggtcccacaccacgtcgctcagacgggagcagattctgacagataacgagtatactgatggatagggaatagcaattatgtcaaaaagatccgcatcacatgcaattagaatcccacctggcgctccaagagatggtaaatgaatcgtttgagcagctaacttgtaacccagtgtttcctttagaaggttattattccaactcattatctttgtctcttgaagacagacaatagttgccccagaagagagaatcgtatgtttcacacttgcccttttagctgggtcatttagccccctcacattccatgacagaatacaacagttggcattcattaatcaaaag

SEQ ID NO: 126739 - DNA, 274 bp, Zea Mays
tggggtttaccagtctattaccgaaaataacaaaacaaatccaaaaaatggggacagagaaacgggagagagagcggatgcgcttacacggcgggcgcgcgcgcagactactctggcgcgggctacgtcgccgttcgtggtctacgtctccggcgagcaaacaattctgacgggagccgttcgcggaggatccgttcgcggagaagtgtggagggggccggagcgggagcgtgcgggatggacgaagacgggagcgggatcgagcgcacaacgg

SEQ ID NO: 126740 - DNA, 504 bp, Zea Mays
gggctacctgactgttttgattggctgctagggcacgaatgcgaggtgcctgattactctacctctggtatggatttcctcacgggtgactgttctgacagtactgctttggttgctgatactgcctctaaatctgttgttggttctgacgctggttctattgatgatatccatgtgggtggccatgcctatactgctgagatgaactgtctgagaaacgagggcggttgtagcacccgaactggggtccgctcatcttatgcttctggtcttccatctccttgcattttctttcagtcatgattgctcaatcgatcaggtgctggaaggtggggaagattcatcgtctggtagtgcatgggatcaaccaggcctctcatgaacatgtattgcctcttggcattagtgttgatgtctttaggagcatagcaggatagctgtagaaatctatctatgtactcattgacggacatgggtcattgctttagtgcctgaaaatcctcc

SEQ ID NO: 126741 - DNA, 482 bp, Zea Mays
agagctggacaagttcgtggtcgttttcattgatgatatcctggtctattcaaagaatgaagacgaacatactgagcatctgcacatcgtgcttcagcggctacgcgatcatcatctttatgctaagttgtctaaatgtgagttctggctaaaggaaattaaattattgggtcacaccatttcccaggatgggatatcagttgatcctgagaaggtacaagaggtaatggattggaaacccccgactacagtgaggcagattcggagttttctaggattggcagggtattatcgacgatttattctggatttctccagaattgccaaaccaatgactgaactgttaaagaagggagtcaagtataattggagccaaaagtgcgaagatgcctttcatacactaaggcagcatttgacaacagccccagtgcgggatcaacctaataacaccaagccctttgaagtttattgtgatgcttctg

SEQ ID NO: 126742 - DNA, 397 bp, Zea Mays
tgaatcccttgatggttgtggataaggtggtggtgtcctaaatgttgatgcttgtggcggagacggtggattagaaagaggatgaggagcaacatgggaagattgtggaggtgatgatggatgtaaaggtacttaagtttgaggaggcggagatggttggggatgagatgacgacgacgttggtggatcaaccaattcgacatcccttcgaggccaaaggatgaaaattttgatggcttgtccaagtgtctcgattccttcaagcccagggatgtctagcatgtcgtcctcaaatccttggacgaccatcatcacttctaccctgcaataatcatctggtatgtcgcttccatgaaacttacgtcctaggatcacaatgcttgttcctactttcttc

SEQ ID NO: 126743 - DNA, 570 bp, Zea Mays
ctacatgccgtgatctcctctcgtttggcgcaacagctcccgttgaaatcgggattcatccgggaaaatcggcgatggatccctcaaccgccgaccttgtggtggatttaagccagtcgttctgccgtgaacaagagagagaaacaggagagagggagagtcgtgctcgcgggttgtgtccgtggcccggggggaggaaattttctgggcgcctccacctttggtgctcgcgccgtcgacgaagaaaggagagcaaagagagagaacggagagtgggtcaccgcgtccgaggctagcaccaagaaacccaatgccgccatggtcggggtccgcggtgtcgatgtcagtttccacgggatctggctcgtcggcgcgctcggagaagtaattgggtgaacgaggcttcggcctgctgaggattcttcgccgtagttgtatcctgccgcggatccgccatgtcgtgtggcctgcctcgccgctgcttcaatcgccggtaagaaacccctagcctcgatcgcctagtaattctcatcgtgtagcgcccgttattgcagcgagtgggggcggaat

SEQ ID NO: 126744 - DNA, 577 bp, Zea Mays
tgttgtatatatttggtcaaagataaaaatggttgactcgtagagaatgacaaatattttggaacggaggagtatgtgtggatgtgtgctatgtaagctcaaaatattgaccaggtaagtaagcttaattaaccacataagtgaaatttatggttgcctcacaattttgtagcatctttggttctattgtgaaccttgaaaggaatccagcactctcaatttaaccagagtaggatcaagcgatttctcaacctaaagcgttctatcatactggaacaatttctcagtagcccatgtcatgctgaaattattcgggaaaaaggggaaaatcaattcatagaaaattcttaacagtttttcatcagccaataccaatctgagaggtaaaatccaaactatgcagttttcagcatccatcgagcagtccgcagagtagcagatttcagtgcccacttgtaataagcatttaaaggcatgagatcaatctcaccagtttaaatttgtgcaacttctctaagaatcactgtaccaaactcagaagtggtgaaatttccagtaaaattagtgccctcttgcc

SEQ ID NO: 126745 - DNA, 897 bp, Zea Mays
ctgacaatccagcaattatcgactggtccttctccggcaggtcctgtaactgacacagctcaataacagaacactgacccttcgatgactgtaatccatacagcttgagacaggttttctcataaggaataacaagccacttgtcagcccagtgtaccaacatagggctaaacatttccaaccaatccatgcctataatcaagtcatatgtttgtaatggtaacacccgcaggttggacttaaactcataacctgaaagcgaccacgcagctcccaacaactcctgtgtacaagagagtagagaaccatttgccactcttactgacagtgctttgggcaacatagagagacctgtcacatgatcagccacctgtgtactcaagaaggaatgtgagctgcccgaatccaacaggaccaacaaatccattccctgaatgtgtccaacaaactgcatggttttaggagcagccttgccactaacagcagcttgggacaaccatagggcatttatctcttctgacgaattgtcctcctctgttacctgcccttgcaatatttgccacagctcttcaaccacatgaagctgcacattatcagcacacctgtgaccccgtatataaggaagaccacacttgtagcacagtcctttcgcctttcgataggctatcagagatgccaatttatcatcagtagaacccatcttggacacaccaatatttgatgcactatcaggcttggactgctgagatgtcttgggaggcggtggcagcggcagaggtgattttggatatattttggaaggatatgacccatcatactttttagaatcacgcctcttgtcgccgacttcttcctgcaattgagccaaaaccacagcagtatccaaatctcttggtc

SEQ ID NO: 126746 - DNA, 1110 bp, Zea Mays
ttttatgagcttctctcaatatatccatcttcacctctgatttctgaggcacacaaaggtgacccttgaaacgaaccaaatcattctcatcgatggagaactcccggggtttaccatcgccaaccctctttcgagctttctgcaataaacgatcctgctgctgagccgcacgcactctctccatgagggaagattgaataagcatatgagtctcctcactagcggtgtcgacatagcacaaggcgatccccaaacggtccagatcagcaatcaactgcaaggccacttttggaaccccggacctgctaagggcatcagccaccacatttgccttcctcgggtgataatgaatagacaaatcataatctttaatcaattcgagccaccgacgctgcctcaaattcagctccttctgagtaaaaatatacttgagacttttatgatcggtgtaaatgtcacacgtctcgccataaagataatgcctccacgactttagagcaaaaaccacctcgaccaattcaagatcatgagttgggtaattcccctcatgcttcctcaactgccttgagccataagcaatcactctgccttcctgcatcaacacacagccaagaccaatatgcgaagcatccgtataaattgtgaaacgcttactgctctcaggcaaagctaggataggggcgtctaccaacttgctctttaatgtatgataactgacctcgcaatcgctggaccagaagagaagacccttctccaagagtctagtcaagggcttagcaatgctggaaaaatttggtacgaaacgccgataatatctagcgagccccaagaaactttgaatttcaaagacactagagggtctcttccacttcaccacagccgcaacattcttgggatcaaacgcaatgccctgctaattaatcacatgccccaggaaagccacttcggtcagccaaaatgcacacttcttcaacttgccatagaactgattctcccttagggcacccagaacgagacggagatgctgctcatgctcagcctcggtcttagaataaatcagaatgtcatccaggaacacgaccacaaagtcgtccaagaactcatgcaaca

SEQ ID NO: 126747 - DNA, 888 bp, Zea Mays
tccacacttaccctcgctgaccagaccccgtcattagctccggcgaggtctgcgccgcccgtccgagccacccgagcgctggccaccgcggccagccatttctagagacccctagcctcacccgactctctggacagcttccccgaggagccgtgaagcttctccaaacaaggatcgaggccctgcccccactgaaacagtgagatcaccatcgctggactttggcctcccgccaccgcacgtagaccgagctattaggtgaaccattcttcaattcctcgcgtccatgcctcccctggcacctagtgaagctcaatgtccggtttagttgaactctatcgccctggataggccggagccctcgccgccgacgagctcccccgcctgtgcacgtggatcggcctactccgaccatccccgacgatgatccgcacatcgacgtgaccgtcacaacctcccctacgccctcgaccacctcaccggagcaacctcgccaccggtaaacccctccgtcctttcctccgccgcgggcactatttaattgggagaaggacctcgggttaggtttagtaaaaccccagggggttttctgaattgtcagtggcacgtttgaatagtgacccgaggactagtctgtaaggaaattagaaaacacacgctagggaccccgatgcaaagtcatttcccatttaaccatttctgattattctttttaatgaacagataacttaggaaattcataacttgagaaatatttaaccaaaatttgtcaaaccaattttgctggaatcaaaataatatgaactatcaggcaaaaatagtaaaccccatgttttctgtattaatttttagagttttgaattaaataaggaaactgcccaaacctta

SEQ ID NO: 126748 - DNA, 778 bp, Zea Mays
taccttcccatggttctttcttagatcaaggaactcgaaaatatcagcatgccaaggctccaagtatacagcaaatgcacctaagttttagaagctcataagaatttctgaagacgatgttactaaaagtggaaataatgaaaaaaagcataccctttcttttcccaccaccctgatcaacataacgagcagtatcattaaagactcgtaacataggcacaattccatttgatgttccatttgttcctcgtatgtaactcccagtagcacgaatattatgaactgagacaccaattcctccagctgatttgcttattacagcacactccttcagggtttcatagattccctcaatgctgtcatctttcatgcatataagaaaacagctgcttaactgcatcacagaaaagaaacagtaagtaaacaatttcaacccacaatgacatcgtctggcaggaagcaagacagtacttggggcctcggtgtgccagcgttgaaaagtgttggtgatgcatgtgtaaaccagcgctgggacatcagatggtacgtcctaatggcagactcaatgtcttccttgtgtattcccactgaaaccctcatcagcatgtgctgaggcctttcaacgaccttcccaccaagcttcaagaggtaagacctctccagagttttgaagccaaagtagtcatagtcgaaatccctatcataaattatttcactgtccaagcgagcagcattctgaaatgtaacagcatttggagcgatatgagggccaatttac

SEQ ID NO: 126749 - DNA, 867 bp, Zea Mays
ggccagagtcaagctagaataggaagtaatttggcatgtactgacccgaggagtgctggccacggaggggtttttcacggcagcggaagaaaccgattcaagggaactccgatgatcactaagggtggtggacagaatagagtgactagtgattcattggcttcgcaacgaagggacgaagagctgtgctcggttgatttggatgaagggggaagagagcgtggtgaatttataggcccaatgagccaccgcgacggccatggtgataaccatcaccggaccttgcttgccaccaacgacgacatcggcactgcccttttctaagagtttgccacgttccgccgcgacagtaatgccatcagatcggcgatggcatggatggacggagaagagtggcgctggtgaccaagcttggccggaaggatcagtggtcgcgtggcggccggaataattatcttccaccgcgacgatcttacccacttccagaatatcatcgcgaggagatgctcgccgaatgctcagcccgaccatggcgcaaatcacggcgcagatcagtaccggcggcgaggtgtgcggtactagagatttttcttgctactgtaccattgggacttctgcttaaagcgcctgacatagcataatcaaggcataatttctccataatctatgtgacaacgtcataatgcatctgcatcaaagttatagatctataatccatcttcatttttgctatagcatccctagtcgaattcctactgaatccaacccaaacttgaacttcaaacatggccaatgtcactggtggtcatacttttctgaaattggtgttcagaactgtccaattgacttctgacagcacgccttctc

SEQ ID NO: 126750 - DNA, 319 bp, Zea Mays
gctatgttttcgaagatcaatcttggtgccccaaacttgagatcagcaggtagcactgccttcgaactataaaccatgaagaagggagtgtttccatgcaaggctcggctgggttgagttcttaagctccagaccacatatggcaactctctgatccactttcctgcgaacttttcattcttgtcgaagactttctttctgagtgcttctaatatcattccgttggctctttctacttgcccgttggctcttgggcatgctaccgacacatatttgatctggacgctcttttgttcgcagaaatcaaagaattctgaac

SEQ ID NO: 126751 - DNA, 370 bp, Zea Mays
catagccttcagagtgtggccgcttgtagagcaatgggaaatgccaaaggaaactatcagtaaatctgacgaaggcggactggttagattgaaatacaccttcagatacaagggtaagtttattgagccagatgatgattggctgaaatgcatcgaagctacaagcgacaaacttcttggaccatattcaaaggcggaggataacgcgctgtctgcgacctttggagaccggaagaagaagaggttgaatagagtttttgatgctattgggtttatgtaccctgattatcgctacccgttgaaagggcaaaagagaaaaaatgccacttctggaaaaggagatgcttcagttgctctaagtgaggccgcg

SEQ ID NO: 126752 - DNA, 1882 bp, Zea Mays
ttctggtcccatccgctctcatctgtctaaccaaacaaaaaaatggctcgccccatccatccaaccaaacagataacatggatagccatatccctaaatcaatggatgactatatcccatccactcttgtgctcaaaccaaacacaccctaagtaataggcaatgtctgcttcaaaatatttcttttcagttatcgtaacacttattattactaaaacattgtaatgcactaggctatgcatcatggtgcatagaccagaagttccttccattatcttaaacataaacgctatcatctcacctagtagtgataagaaatatttatgaagtatttagtttgaggaaccacaccattgtagataaggtgctacatggtaactccacccctcaaattagcagaatgattccaatccacagactatactaacaattagcttgtgagaaatgaggtcgtgatggatcaacacattctattccataaaccaaaaaaggtgagaaatgagaggataattggatcaacacattctatcgtggccgtgaagtgtgcaggaatatgagtcgggggtcagggtcagaatttccgactctaggaaggcaccgtggtggtgtgggcacagggcgacagtgccgcaacgagcgagggagaacgagataacgcgtaggaaaagcccttgagggcaggcaaaatgtttgccttcctccctttcaaacagttacattgcccctatatttatagtccctagaggacttggttcccaagcaaactatagtttcattaatgaaacaataacatatcctttagaaatgtattacagaaggcgagggagacacatgtggtacctgcaacaatggcatcgccagattgtgacatatcaccggtgaaaggagtgatcggtgcatcttctgtaccacggacccagccattgtgtgtttctgtgtaatagtgaatcttggaggtaccatttgtcacaaagaggaccttgagattactgtgccacaatttcataataacttctgaactatagtgtgtgaatttggatttatcattatcatttgtgtcaaatttctcagaaggtttgatgctgcaaaggaactcaagttcttgttttgtgacttcaatgatattggcagcttcccatgcctccttaatgagtgacttggtttccttgctggatgaccatagtggaagtggaagattaaggtcaaagaatattgtaccaccaaatttctttgaaacatcaatagctttcaacaatgatgactctgtagtgggctcaagcaaagctgaagaattatagtaaaacatcttagcctgtataagatgtaaaaggtagcagttagcaaagataaattatcacacatattttatacttttatgtgcagtgcagcaactgtcagtgccttgccactaaaatgttcttatccaatttttggtatcatttatttgttctctcacacatgataccagaacacagtgaatagcgatacctaaaagaacattttaaagcacattgtttttaaatgtttattacaaaataaaacaaaggcctgcgtaaaacaagatagtaaagcagatttatagagatgactgacttgagtacttgactcccaaggaagtatcctaaccaaatcaatctaacttatctctttcctagcaaaccaaaccaatctaatctaatctatacgacactgtccacaaggcactattcatgcgctacaatttcgcatggccctgagctggctccacttgccacaacaagttgaagcatgcataattgcatatttgcaaatcaagatgtttttgaggggaagtatccttgcgtttcttctctggaagagggatttagggatgagctgcatctatggcgcttggcaggggcta

SEQ ID NO: 126753 - DNA, 330 bp, Zea Mays
gtcaaagatagtccatgaaccatgacttggactagttgaaatgtgactacatatgtttgtctaagtcaaaaagattaggagaagaattggacaaaagatagaaaaagaagtctgctgacgggcacaccgggggctcatcgggctatccggtccaaggacttagactcagggaaaatcaaactcagcatcaagtggcgcatcagacatatactgttcacgatccggtgcaagaacctagtccggtgtgaattatagcgaactacacagtctcaggaaaattgggttggagctccggtggatcacagggccacctaacaggaactcaactgt

SEQ ID NO: 126754 - DNA, 408 bp, Zea Mays
tgaaaggttggtatacttgcacaaggataaatattggcattgtactccatcaagtgatgaatgggacatggcagaatcattttgcaaatgtttgaagcaactcaatgatgctaccgtgttgttttcaagttgtcagtatccaacaaccaacttgttctggtggaagttctgtgagataaagttagcacttagagaatggtgtgaaagtgcaaatatcactatagcttctatggccgaagcaatgcagaaaaaatatgataagtaatggaaaaggtccaacatagctcttgcagtggactgctttcttgatcctagatacaagaaaaagttggtagaatatttcatgttgaagatttataaggacagtgctgtcgcagaactcactcgctttatggatgttgtgaacca

SEQ ID NO: 126755 - DNA, 367 bp, Zea Mays
ggactagtgtgaagggggagtttatctgtcacagttttaccaaaccgtggataagtttgggggtgtaaatcctatctacattgtgactgagctgttaacttttgctctgctgtcatacatgcaatgaagatgtgttggactcttcccctgtgctttcaccttgcgtggtgaccatgcaatggatgtgtgaagtatgtgggctctcgtttagtgttgttaaatgtcccagtgaaacacaacaagttcattttgtgtgtgtcttaccatagtgtgttgaacccaacaaactatactccactatgtcatgtcgatcccatagcctctccctcgtggataacccatcccctacacctaggttaagctctca

SEQ ID NO: 126756 - DNA, 418 bp, Zea Mays
cagagaaaggcttattaaacatagaaatgcttatctctaaatatagttggttatgatcctgggagattgttaccgcgcgctagggactcttggtgtttcaaggacatgcatgctttgttccaggcagactggtagagggtactgtactcgactggccgggtaggacagtaacttatgacatgcatgttggctttcgcagtaaagctagcatacgagtctggttggcgctgtgaaattattgcgtgtctccgccacggcgtacgtgcaataaatttctatatattaaagcagggaggaatggcgagctctgaagatatccacgtcacctctagaattttcagtcgttcgattagatttgaacgacgtctagaacctctctgcgcgtgtcgccacagaaacggtccctgaacagccacgc

SEQ ID NO: 126757 - DNA, 445 bp, Zea Mays
gctagccgagccgtcccttgacatgcgctacagtcgggcggagtagttgtctgcgggattcgcggcatagtcagtggccgaggccgagctcgggcaaggcggagaactcgctcgaaggctgagcttgatgtcgggcgaggcggataaattgcccgaaggctcgtccgctcgacttgtcgtattaggcgtcccatcggagggcgtcaggcggcgtgcgcgcactgtttgtgtaggcataatcatgctgatgcactggacgtgatcgctgtcttgtccaccactgtgctctattgccatagcgtgggccagtacacgcattaaatgtgcatgtcccctgcctgtttttgggttcctttgtcttatgtgcttgagattggctcgggcgagacggactgagctgaagcaacctcgggcggggcggagtgagtggtgtcgacttcgggtg

SEQ ID NO: 126758 - DNA, 475 bp, Zea Mays
ttgtctgttgcttttgagtagatgttgggtgggttccatgttctctgttttcttggtcaggagtttagctcaggggtgtcttgtgctggctggactttagtcagtttcagttgtgttgcttggttttgtgtggattggtgttgctgcctggttaaactggtctccccagtagagtgtgtgagttgtcagtttgtatctgaatccttatatgctttctcaaaagcagagtaataatctcagttcaaaaaaatttgtagcgcattttggatgtgattacaaatccgtgaattacgttggttatttggatgtgaatgttatgttggaatttttgggtgtgattgtaattctcgatgtgaatgctggaatgggccgggccggggcaacttcctacggttatagcttcagcaaccgtcgaagttatagatgatgaaccttattttcagtttcagggacgttgatgatcgacgaaatggga

SEQ ID NO: 126759 - DNA, 317 bp, Zea Mays
ggtcttcggaattctatgcaaatgcactatttgatcaatatagatttatgcatacttctctgtcttgtgggtggtatgcactggcgagaaatgagctgtcttggtcaacctatccacgatgatccaaatagaatcatggtgtcgggaggtattgggcaatcccacgataatatccatgcaaatatcctcccatttccaagatggtatgggaaggggctgtaaggtgcctgctaccttcaaatggctggccttgactctctggcaagtgtcgcattcaaatacatacttagcaatttccctcttcattctggtccacc

SEQ ID NO: 126760 - DNA, 693 bp, Zea Mays
tatagggggttgttgatcagaatagtgtagatgtgtagaggatggcaatagatcaaggagaagagcagatgaatactatgagaactattggtgaacatgaggaggacacgccgctaattctacaaagccatgtaagtgttgtagaaacttagtagtattgtgattactgtatattagactgaggacgttatatatagacgaacagtatgcaacattgatgttattggtatttctgaagtgtttaactgtttatttgattgcacaagtagcgacaattgatcctacattggtacctaaattcggtatgacattccgtggtgtggatgaagcataccaattctatagtcgatatgcatatgaagtggggttttcattgaacaaatatagggaacggaaaaactgtaagttgttgaattgttcgatggaaggaaagagtgcagaaaggggggctgcaaacccaaaggtacataataccagctcaaagcgaacacaatgcagggccgaaatgaaacttaagaaaatttatgatgatgccaaagagagtgttatatcggtgcgtattgatctgctacacttggatcataataatgattctttaagaaggatacagaaaaggatcaattacagtgcaacaagactcatgactccgagtacatggagttcatcattgcgatgcaggaaagcagaattccg

SEQ ID NO: 126761 - DNA, 564 bp, Zea Mays
gtggtgtcctgtgcaagcgctagcactgtcgcacagtaggggaggaggtaggggaagcgatgcatgctttggcgtaagactgtagcccctacaggtgtgaagggggacttactgcggcaaacgttgaagacggtctaagatgcccaccatgtctagcgagcctgttcggctggcagctgcgtctgctgttcgtgatagattagttcagaccggaattcttatgccttgggtgtctatcccaacaaattttgcaggaatccttagttcaggttggaagcttcaccgtagctaatatatatagacacacaccgaccaatcctacgacctggttggactgtattggcgtgcccacccatacctcacatctatgtgcaacaggtcaaacatctccatgtgagtcagccaaacctccggtctaatatcctaacccacatgtgggactcacgccataaattgcggctttgtttttttttgtgtaaatagcataaacagttcatagaaataacgtaaatagataatagagatgacataaaaacctcacccggccactggactcgtttaagc

SEQ ID NO: 126762 - DNA, 801 bp, Zea Mays
cgcccatgcccgcgttggcaaccttgcagaaaggtccttgtcttcttgaatatcctgtcagagtccaaggtactatttaacacagtcgttgacagttacaaagacaccctcgcatttctatctattctcggtttgaagtccacgatggcgatccgcgctgggagctgagctccggcgagctagaccggccgaatgacgctacgactggagctccaaagcgacagggaccatattagatgcctaccgcacctttcccctcaatcaatttcaccaagggggcactgaattgattagttcacggtgaccgagcggatgggcaaggggatgaacgtgttccgatcaaacagtgatgaggatggctaaattgaggctgggtaaaggttcacgggttcaccagggtccatggacacacttcgatttgggcagaacaagacccgaagagcgggtcgacggtgagggggttacggcggcgttctatagagcaggcgcgcgttctggtgaaaggcttcggccgcattccaattggccgcttccaagagcaataagagaccataattgtgctaaaacaaggagcaattggggaaattactaacccgagaatgctgaccacggaagagttccttacggcggagcaagaacagaggagagagggatttgtgggttcgtcggtgaaattgagccgagtgctcgatcgcggaggtgcgggatgtgataaagaagtgcaacccgggcgcaatttataggccaacgaccggaattggatgaggaccgcggaccttagattgtgcaggcgagctcacc

SEQ ID NO: 126763 - DNA, 478 bp, Zea Mays
ggttgatgaggggctgtccattctccagtatgcagatgataccatactatttatggatcatgattatgagaaagcctgtaatcttaagctcattctatgcgctttcgaacaattgtcaggtctcaagatcaatttccataagagtgaggtattctgctttggagccgctaaagaatgtgagagtcagtatgctcagctgttcggatgcaaaatggggacatatccattcaagtacctaggcattcctatgaattataggaaactgagtaacgctgattggaacggtgtactcgaacgcattgagaaaaagctgagtagttggaagggcaagcacctttcgtccggagggcggctagttctaatcaattcagtactgtctagtctcccattatatatgatgtccttctttgaggtccctcgtaaggttttgtggaaaatggattacctgagatctaggttcttttggcaatcggaccag

SEQ ID NO: 126764 - DNA, 436 bp, Zea Mays
aaaaacgggctaaaaagctagacttttggtggtattggctgctagaagctgaaaaaagtccaaacaaacagtgccggactccatctcgaatgcaactgatgaccagactcttccgacgacgtggtatcacgctccaagcgggcataggcaatgacgggcagaagggactgagacgagtctgtacgtttgctggacgaattgaaggtggactaatgtgctccactgcttactgtacataatcgacgtttccacagattcatcgaaccgaaacagcctgccatggacagaagactaagacaaggtaaaggtcaacgtcaagttactaaagtcctaggctctgagcagttcaaccagagaggtgtttagattcaaccagagaggtgtttagattcggggtgtaaaaactttgcgtgtttcactatcagaatctgaggct

SEQ ID NO: 126765 - DNA, 425 bp, Zea Mays
gcattcttcccattcataccaacgatcaagcaaaacacctaagcccctcctcatctcaggatttagggcgggtgcactccaccacccggccggagatctactctccgacatttggcgcgccaggtaggggcctaggcattaggtttttgcttgatcccttgcccaagcatgatggtgcagatcattgagcaccgcgccgagactttggtagactttgcggtggagggagaagctgcttcctccacaccgcaggctcctactcgcccgacaccagtcactcctgttgtgcacgccgcacgacagcacacggtagcgcaaacatcccggactccatcaagggcgtctccgggggcgttgtcagcagccagggagttgttgcgacaccctccaagctccacggcttcaccaggagccatgaagcaatg

SEQ ID NO: 126766 - DNA, 579 bp, Zea Mays
tgcaaaccctacgtttccttcctacacctctatcgggaaggaaagtgaaccacctttgttttatgtgagccatgtttgtctactttgtctgtgtcccatgtattctatagaataggttgatcatcctcatcctaaacctccatgcattgcatgcatatagattcgatagtttacgcgatcgtgatcaagggagttcaaggtgatgtcatggagctaccttccgaaggataacaatagtaccaagaggagctcatgacaagtcaagaaactagttgttctgtatctattgccacaactccctgagtaatacgggcaagccccggtgcatcccacccagtttaccctatatgagttcacactagcttgtgcatatatgtttaggaattgaatgaaacccatctgcatagataaccccttcataatcctatccttgtaacctaagtagattaggccgagcccaccgcttagaattattaatcacgttagccaatgagtgactggtaagcactcaataggataaaaaatatgatttctctattcctaaacaagtgagcgaatggtaagccctcactagggaaa

SEQ ID NO: 126767 - DNA, 448 bp, Zea Mays
ccgcgcgcccttcgcaaaattctcggccaccgcttgcgacgcctataaattgaagccaccacaagctccgtaaggcagtcaagtaccccgatacccactattgtccccagccgatcaccagcaagctccaatttcatatttcccccaaatcagtcgaagaacaccgtgaaaccaagtccactgtggccagccgattctggtaaagctctgtccgattcaaaccttgtttaagtcttctcatagctcagtgatgctcgccaagccatcaatttgaatgtagatgcccccaatcgtcgggaacgcgctcctccacccgcaacatccctggtcgtcgtggccagtgcaaaccatagggtcattagtgaaattaggttggggaaatggatcagggtgggtccaattcggtgacaggcgctcgggagcgccggtcttggccctctccggccgg

SEQ ID NO: 126768 - DNA, 511 bp, Zea Mays
ggggggcaagaaaaatcatggttcagttgcgcccggtacaaaaccagcaccgagatggtgtccacctgggttaagtcgtacgcaaaagcgtcgtgtccagcggttgaggactatggaaatgacagaaaagatggaagaggaggaacgtgacagatggtttaacgaggataggccaatggttatccctaagaaaacatggagggagaaacgattggccagggaggaaaaagatgatgacaacagcagtggttccgataaagaagaaagcactgaagcacaaggggacatggatataaacatggtgtttgttttacctactgagttcagagcaggagagggagatgtggctgagctaacattgggggctgagcgtgctgtgtttgaaaaaacaagtgagcagggatctcatctaaaaccattatatgttcgtggtcacattgatgggaggccaatggggggcatgctagtcgatgggggagcaggtgtaaatgtaatgccgctatccgtgttt

SEQ ID NO: 126769 - DNA, 563 bp, Zea Mays
agtgaccttagagtcactccaatcttcacttccaagcactcttattttgttgaccaacaccattagccggtcaaagagtgattgaagtgactcacccttagtccaatcatatcgtgcaagctcatcacttgaactatcttcatcacttgatctttcgaccactttctttgtcttgtgatctttgttcttcttggaggaatcttgttcatttgagatcaaggcatgagtgtctcttgtcttgattggggcttcttcggactcatgttgttaaatcttagcaaatagttggtgaggtgtcatttactcatagtcatcacggtcccttatcattttgctagacttttatccttttcttttgtatgctctcataaatagtctagtgaccttagagtcactccaatcttcacttccaagcactcttattttgttgaccaacaccattagccggtcaaagagtgattgaagtgactcacccttagtccaatcatatcgtgcaagctcactcttcaaagcttcaattctatgtctcttagctttggggtctccttcatgtgacattttga

SEQ ID NO: 126770 - DNA, 517 bp, Zea Mays
atcgaagcagcgacctctctacatcgcatccagttccagaccgcgctgtcgtcagaccggcgaacatgtcgtcctccctgttcttggcccacagcaccacgtacagtccagcgaacattacaatcttcatagtcatgttgcccagaagctctcaaattttcttggtatttctgttggagccattaacatttttaaagcaagttgtattattgagcatgccaaaaactgtgatctagagtaattccttgttagaaactgtgatctagagtaattccttgttccattttgatttttatttccagcaataaaggcactgactactagtattttgtgcactgtagtattccttgagctattgatctgtcaacaataggaaattccttgagctgaatactagacgcaaagcacctgacctaacgaaagttaaatactcctaaatactagacacaaagcacctagactaagtccagaacactcttgttgcattcatacaatacagcatgcagaccagtgtggg

SEQ ID NO: 126771 - DNA, 317 bp, Zea Mays
agcggtttgtgcttgggcacgagagagagagaagcggatttcagcaggttcgggccgctttgaggaacgtaataccctacttcctaggatggctttgtacgtgagtggtgttacaggtggtgtctactgagctatgaaatgctaatgagatgaaaatggagggggtcccccttggccttatatacacgactatagggtgcttcccgtatacatgttgatcatacttttctgcttatctcctaattaatagcaaacaaccttcactatcccgaggaaaacccggcacctccgctccgagctatctccggcgtttgagg

SEQ ID NO: 126772 - DNA, 386 bp, Zea Mays
tgaaaattgtgatcatgtggatgaacaacttggtttacatgaggatgtctttatggatgatggtgaacaagatgaccctaatgatacattacctaacatggtacaagagttgttcgcatccgaaggaccaagtggtgggaaatctttgtttgcagttgtattaaaagaaatgaagcaacaactttacctaggtgcatcgtatacaagattttcttttatggtgaagttacttcatatcaaatcattttatagaatcagcaatgttgcattcaatgcaattttgaagttgttgtcattggctttcccgcaatgcagtcttccatcctcttataacgaagcaaagaaacttattcgtgcattaggacttggatatgtgccaatccatg

SEQ ID NO: 126773 - DNA, 297 bp, Zea Mays
gacaaaacctaaccctaaccagggttggagttgtattgatagattagagtacttgggcctggcccattacaaagggatagtctaacatggaggatgagttgcatgctatggctcttgcgacggcagagacgacctggctacggtggttgtttgctgattttgatgtttttgtgtctatgcccactcctcttttgtctgacagtaccagtgttattagtattgcttgtgatccggtaaagcatgaactttatcagaagggactgtctctggcgcagtaacagtgaaactgcacgccga

SEQ ID NO: 126774 - DNA, 476 bp, Zea Mays
caactcgcatggttctcagtttcgctctggaaatcagagtggaaacaataattaccaagtacaacgctttggacaacaagttcagaggagcaaccaatatcagaaccaacagaggaacaacactcagactggtttaaggtctagcggttatcagcaaaatcgtcaaggaagcaccgtgaacacaccggccaaaaatagcagcacaactactccaatccaacccaatggttgtttcaagtgtggcgaacttggccactatgctaacaacttcccaaggcgcaatcaacagacaccccagaggaacagcaaccaaagagctgatcagaatacacctgctcgtggatctgcacagaacaagactccgcagaaccagagtaagggaagagttaatcacgtgacagcagaatcagttcatgaggatgtcgacgtggtgtatggtatgtttcttattaactccatacctgcatcagttttat

SEQ ID NO: 126775 - DNA, 702 bp, Zea Mays
gacccggattaaaaggtcgagccaaatgagccagtgtcctattgatcaattcgtagccgcccatcccgtgatctacgaccacgattttaaattacaagatctagcagtacgcgttcgatctcagatcgacgaccctcgtccatccaggccaaccattgatttaatctagatcgttgatttcttgatccaccaacatgacttcttcttctacctcccgactcggctgggcaacgacgccgcgccccagggcaatgcccccaccggaaccagatgaagggcccccagacgctcacaacacggcgacaggggatggtagcccccaagcaaactcccacaacaagcccccaaaaccaaaacccaccgctgctaaattatgcatgggacatggtgattatgagggggggtccataccagggatgatcagaacgatggggctgaccacggtctagcggaaatcatcgacattcaaacgacacctagagctgtgatccttctctagcctccgaatttgacggtcccagctagcttccgacacggtttggtgatggcgaatccctcccctcgctcagttcttcacggtagtagtcaaagtttgtgatcgacgggaccagagaaaagttaacggagatatatatcctagagcgaatctgtcggaggcagttaagcaacgctacggagaaggcatgggtgatgtcatccctg

SEQ ID NO: 126776 - DNA, 273 bp, Zea Mays
ccgacccgggaaaccccatttatactcgcgccgacgtgtgttttttatttctgagtcgtaacttcacttttccacctagaaccactcctctgcttccctgagatctcgatcctgctcgttccgccagcaagactgcgatggcaccgaagcggaagaggcagagcaccgttgctgcaatcatcccgcctatcgaccccaacagccagctgtcatttgcgggtaaccacatgtccatcatctcggaattcgacctccttcatcttgttgacgttg

SEQ ID NO: 126777 - DNA, 291 bp, Zea Mays
atttgcagatggcacaacctgaagaaagaatgcctcaactagaattgattgagaatgttccgatgcgagacaactcaactcaagaacccgagaaaggtattgcagaggcacctgcagagaaagaggtgaagaaaagaaaagctatggcacccagatcagaggtatggcagagtttcaccaagatcatagacaaagattctagtgttgtgaaggaagcaaggtgcaactattgcaagattattatcaagtgtgaggcaaaagtcaatggtacatctgcattaggaaaacact

SEQ ID NO: 126778 - DNA, 289 bp, Zea Mays
gaaaccttgtggccatttgtgttcctatgtgtgcctcaaacattcttgcaggtttctagctccttcgggagggttttcatacctcaaaaggccatttccctaaaaccctaattcctcgcccttcacgtgttcgatgaaatgcccaaaccagccaaacttgctccaattgaacccaaatttttcaggcaccttcaccacacttccagtaacctacttgccaaatttcacaccaatccgagatcccaggcttaaatttcaccaaaattcccgttttgcgcgatcgttcccg

SEQ ID NO: 126779 - DNA, 603 bp, Zea Mays
gaacatgcgctgcctaagaggcctcataactaggggatggtgatatgtcgggcgcttgcttggatccatgggaaactatgaggaaggaagttgctcctctcctgacaaaaagggtggatagtgaaaaaaacaaggccacacgagaggcctacttataagaagaaactcaagacaacaaaatgacgcaccttcggtccatcactaccaaggatggacatgaggagacagttcgactcccgatgcacaaactatgggagcttgcatcaataaagcccgggacagtccccacacgacttactctcgaggagtgataatcgagagacagtagaattaaatgttgtctgacccatcgaatagcccccaaggagaaacacactcccctcaggggcatgcgactactatcggggatctcagatctccggaaccctgggggccacgagtaagaggggacggatagagcccctcctcgataaatccacccctagatgactcacacgcgtcgagctagggggtccggtgaggcggaactaggtcgaggagtcagacagatcgtcgagggggtcgctcgagtaggtcccatgcaaccgttggactgctacccgc

SEQ ID NO: 126780 - DNA, 383 bp, Zea Mays
catgattgtcgcatcattgtctcttgtgcatcaacatgcttctctcacctttattccaataataataacttgtgaataatgtgatgtactgctatgttaggagctataagaagtatcttgtcctgtgttgttatgatagtcttgattaggttgtgttatgtgttctccttgtcgtgctgtctaggaggtacggtaactatttagtacattttgcctctaaccaataaaaattgttgcctatttggcccataaaaataccctccactttaaccaggctagtggttagcaaatgaaacctcttttaaaaaaatcctgcttgtgttggtattttctagcccttgagtgttttacccttgaagttacacctgcacagcttatagacc

SEQ ID NO: 126781 - DNA, 385 bp, Zea Mays
ccccaaccaatttcagccaaaatcgagtgtagaacccggcccctggcgcgtcgcggcggcaccactgccgtcgacacggtatcgtgaactaacgcacataagccaaatccgtgctaccctagacgtagtagagattcaagcgaagcacgggaaagagaactcaccgaaagtggtggtaaacgctgtgctgaccacgacaccgtgcttctcccgtgacggtgcggacttccggtgaggaattcccccgcgtggactacacccgcccttcaccaattcggtgcacgcactcccgccgagaccgggcgaagctcctccgccagacgtggcgaaccgacgacgagggagcactcacacgacagaacgatggtggttctcgggaggaaac

SEQ ID NO: 126782 - DNA, 565 bp, Zea Mays
attgcatatatgctaaccatctagatcaaaaattgcacgtcaatagctctggtaccactacaggggaacatgtttgctacacacaagcatatctaccacgttcaaccaatatagcatgcaaataaaggatcatggatcgttaccactacatatgcatcacagtggaagaagtgagtgacgttgtagttgaagtagccaaacacccttgtgtactagcagtggtaacacgttcacctattctccccatgctcgttattgaccaacaccacaataatagcaacaatatcttcatagtatccacacatttggggatgcatgatatgatgttgttgtgctagtacacgcgtgcaacatgaaaaaaagaggcggtgtcttaggcatccaaaatcctaggtagagaggcacccagtggcaggatgagtctatctcttctagcacgtcaaccctttgtatatagacccatgcaaatgggcttttaccctaaaggcctattaatgttctcatggattgtgattgcctcttgggcatataaacgatatacacaccaatttgctaatgctcaaaa

SEQ ID NO: 126783 - DNA, 738 bp, Zea Mays
caagcaaccgcgtctagacacgttacaaccatgggagactgaaccatttggaggctgaagcagtttaggaaacaccaggcatgatagtaggtatgtttccagtcgattcccatattgcagaagtattatttgatactggagcaacgcattcattcattactgcatcatgggtagaagcgcataatcttccaataactaccatgtcaacacccattcaaattgattcagtcggtggtaaagttcgagccgatagtgtttgcttgaatgtaagtgtggaaataagggggatagagtttcccgctaacctcatagtaatgggtactcagggaatagatgtcatcctagggatgaattggctagataagtacaaagcaattatcagctgtgataagaggacaattaagttggtgtccccgctaggagaagaagtggtggctgagttggtctcacccgagctaaagaaaggaggttgtcatttgatggctattgatagcaaggagacagattcactcgagactatcaaggttgtgtcagaatttccggatgtgttcccgaaagatttaccaggtatgccacctgagtggaaagttgagtttgccatagagcttctttctaaaagagcttacagggtatctggaccagagttggtggaactcaagaagcaaatagatgagatgtcagagaaaggttacatcagaccaagcgcctcaccttgggccgcccctgtcctattcgtgg

SEQ ID NO: 126784 - DNA, 336 bp, Zea Mays
caggacgacacaattattctccaaggtcttaatagcaagttgagcggcctccagttcctgtgcgacaagcttcttggaggcgcgtagttccctgatggtggaatccttggtggacaactggccaagtcgagatacctcatcctgagatgcctgcagctcgtggagatgatggtctaagtaagacatggtgaagcgatggctcctccccaggacggtcaaggagttactagcgtcacggtacaacatgtccagattgtcacgggaagcaacaagtgtttgtttttcttcctgcaagcaaagaacaacattcagcatcgaagcaaggagagcaaacca

SEQ ID NO: 126785 - DNA, 277 bp, Zea Mays
gaggtagctgaggcaggtgctttgcttgctgaagttggactgctgaaagagaggggtctgaccgctgaagccgtggttgctgattttgtcttcaagaatattcagccgttaaaaggcagggcatacccagcttatctgtatcgaggcctagccgactcaactcgggtcactaacagaagaattccctctatggacctggtgagccgacttgaaatgatccttagaggcaaagtgtcaaatgttggtgcccccgtagcattctcagcttggaactggc

SEQ ID NO: 126786 - DNA, 363 bp, Zea Mays
gtctcttcaccgtgccaagggctctctgtcttgtgtgagtcccgagtgaagatatggtctgggtgggaagatatggtggtgtgaagtcagttctgtctgcactgttcaaactgagacaaaacctatgccaaatcgtgtcaaacgattttggtttgatttcaatcttcaccagagtgtgcctagggtattttggtgccactttgatatttggactttgtggattcgagttttggaaaacagggaacacatctgaactttgggaagggtttaaaattcagatttctgaatttctgagttttccatagaggctttacttcatgggctattttggtaattttgcaaaacccaaatgatcaagcttcc

SEQ ID NO: 126787 - DNA, 354 bp, Zea Mays
ctgagatcttttcgttactgtaccatcaggggcagcttcagttgttttgatagagcgttttgcatcgcaatttgcttcaaatttcatgtagtgacatggccacctctctgtatcaaagttgtagccctacaatccagttacaatcttgctatagcaaccatgctcaaacactcactggattatcttcaaaagagctcccaaagttcaccccatgtcactgttagtaaaagttcagactctgagctgactgacagccagactttgagtccatttaactccaacttttgtacaacacttatgcctgatgtcttaaacaaagttatactcctttagtagctctacaaatttgatgta

SEQ ID NO: 126788 - DNA, 872 bp, Zea Mays
cgtctccttgctctctggcatccgcagcgggtagcacataagctccggaaatacctgcagaagaggaagctcccagagtgaaattaatagaagaaccccactgagccgctgggtgaggcagacgcggagctccaaactgagacggcatagcgcaaccagaaactgaggaaaaccctgcatcggcacgaactgagaagtcccaggcacataaaactgctgcggagggagtggaactgaaaattgctgctcagcgcttgacatcatattgacagtgccctgagaagaggaggaagtcactggctcccatctgagctttccattgggattcctcctacacaccacatccttgtggtcttgactgcagattgaacacctgccattccactagcactctgcacggcgatgcgcatcaccacaacagaaacacaccagccccagcccgggcttaggaacagcccgaaacctctgagtacttcctcccgaagtacccgagtcagaagatttgccacggtaaggatggtgacgctgatgttgagacttgtccctcttgtgggctggacctcccgtgttgcccctccttgcgtcctagccacgaggctgatcaacacccaaagacttctgcgactccatggtatactggtgttgcatctccacacccagtgcctgctccactatagtacggaagtccaccaacggaaaggctcccagtgcatgcctgatagaaggtttcagaccctgacggaactggctcgccttctccatctcattataagccacatgagggacaaaacggaccatcttgttgaagcccacttcatactctgtgacagacttcttctcttgcttgtaggactgcaaatcaatcttcattt

SEQ ID NO: 126789 - DNA, 611 bp, Zea Mays
ggcggaaatgcgctacttatcaggggttgcctcgatcaagtcgtgactgcgtctcccgcccagggatggcctcaggagagtcgtgactatgtctcccggggttggcctcgggcgaggcagaaatacactgcttgtccaaggttggcctccagcgagctgtgactgtatctcccgcccaaaattggcctcgggcgagtcgtgattgcgtctcccacccgaggttggcctcgggcgagtcgtgaatgcctcccccacctgagtttggccgcgggcgagtcgtgattacatctcccgcctggggttggccacgagctagtcgtgattgtgtctctcgcccggggatgaccttatatgagtcggaagggttagcctcgagcgagtcgtgactgtgtctcccgcccaaggttggcctcgagtgagtcgtgactgcttttcccgcctaggtatggcctcgggcgagtcgtgactgcgtctctcgctcgggattggcctcgggcgaggaaaaaatgtgctgcttgtccagtgttgtcttcgggcgagccatgactgcgtcacccgcccgaggttggcctcgggtgtgtcgtgactgcgtctcccgcccagggtgggcc

SEQ ID NO: 126790 - DNA, 419 bp, Zea Mays
ggttctacctctatagcactaggacaaatcgcgcgaggacgtgaaatacgtcggtgactacacgacaccgctcgactccttcatctacatcgagacggtttgtactgccctacatatctagtggtaattccatgacctataacaacattagctcttggtttctagggtcaaaattttgttttgcgctagtgtagcctccccataatcctacagtggttttggagcaggttctgtgttgttttaggtctagatctatgttcatgagatggatctacttgatgtagggtttgattagatcaattggttataaggggttggagcatattacattgtatatgactgaagagatcaatccgtccttctttgttttgggtgcaactcgcccctatcggctggaatccccatcgggctaactttgt

SEQ ID NO: 126791 - DNA, 818 bp, Zea Mays
gaactttaagaacttttagaaactctaagagattcacattgaaactttaagaactttagtaaagatcttaaagcttacattcagtagacagatggttctaaactgttattatctcagcatccctgcacttgggcagaagaatggttgtaccaaaatttagactaaaaaggggtaattctactagccaacaaatcattcttaataaccgaccagaacacttgaaagaactccgcagggaaaccatccggaccaggcgccctgttgtgctccatctagaagagtgccctacggatctctcttcttcagtgaactaactagttaaaaacgaattctctaagtccaacactggatatatccaaaacttgattctcatcaaagttcaacctcagaaggatctgatgaactaacgatatgcatttctttttgtgtatagattccctagctggagccgtgccatcttgggtttctttgccagctttaccacccaagtggttgtccgtcgcgacctctccagcaggatcaggctgatcaatggaaggctggagggaatcattgccaacaaggacaggtacaggttgggagagtctactacgctgggagcaatttggaggccatctagctccacgtcaccgctctcggaaatgatgtaagtgcttctctccaagcctatccacacgttagcatctgttgtgcatccaattgtatatgtgtgtttgtgtgtggtgggggcgtccggttgattgattgtgtgagctaggtagagtttcatgcatgttaatttcctttctttaaagggagtatcggtaccaaatcttgta

SEQ ID NO: 126792 - DNA, 613 bp, Zea Mays
tgagtcccctgttgcgctggagcacgcttattgctcgtcggcgtgattagaaccaccgttgtccgccctcctcggtagacagtgggttttaatgatcttacacacgaattgactcactagaacgattcgccgcgttgcgggcttggcgtagggcttaggaattaaattttggtgcactggcgaggcagaacggtcatctccggcgatgcgccgccgcgcagttgcgtcaccaccgcgctcggccgctcgaattggggaagaaaggtgactgtcgcgcgaccgttggatgcccaacggatggccaagattaaatgatgcgcataccctttggtgagatcgtatctgggccgtcggttgtatggcgggcgatgtaggttagatctggggattttaaatcgtggccgttgggtggatcggatggccagaattgattgcggggttcaggggacgtcagatctaatccgggccctcggttctggttctagcggctcacatccaaccgtaccccttcgcgggtacattttgctaaagaaaccctagggtattttataatgaacccgccgtcctacttccactattacctgtgtctctggattcttaccccgagccccct

SEQ ID NO: 126793 - DNA, 3689 bp, Zea Mays
cagaaaggaaaaaacacaaaaatcaagataacatatagaggaccttgtggaaaaaattcatgccactcatatctgttcacattgatcttcataatttctttcgttggtcccacaagtggcttaatctgtatatattttgtttaagaaacaatgcatcaggaagcagagtaaaaaactaacaacaacaaacagattttttctagttgtaactaggattgtgttcagcgcatttttgagggaatattacctcaaagtagtagctgaataaaaatttgcatgacaatagaatagtccaaaaagttgtgtacctgtgaggtataaatagaatggttagctcatgttaaatggttgacataaaagtaatacaattgtaaaaaaatacggaacttcagtatagatacgagtccttcttgcattcctcgtccaacgtataattgtggctgcacatgtaatcatcattagggcttaataacaagatatgaaaaccatcaggtgaagtacaaagaggtataacctacgtgaaagcaatataatcttttgtaattttaaatgtgctgaagttatctgatataaaggacatgtttggcttggctccactccaccctggaacaactctgctccaaaaatccaggaaggagcaactctattctagagtttgaggcattcggcaagaagattgtaatcactaatcagctccagaaatgtgttttttgtgtgacaagacatgtttacccttggtttggatgtttatatgtttactgcggataacaagttatatataaagaatgtcattttatttcccataatccagatgatttatctataacatttcgaatgtatgagtgaacacaattgaactattctttaggacaattaggttccatgtaggacctagatatccatgacggttggggaatgctacatctacaacgttgtactagtgtcaggccatatgtactagaactaaaaactatacaaattcatgtactagtgtccttcgccctacccctgacgcatcgcccgatggagggaggaggcatggcgaacggagggaggaggcatgacgagtggcagaggaaggaggcacgacgagaggaggaggcgtgctggaggaaccaagcggccaccgaccgagaaggtgcggggaggagaagagaaaggttgcgggacagataaagaccaacggttttttatgtaacgagtggcagcagtgggtaaatatttgtaaactccggtactccagttttttgtactacagctccaaaaacttcatagagttttttttctccagagttcaggtgtttaggtagaaatttttactccagcttggaattctgctccagagctatgccaaacaggcccaaaataccccaatgacacatttgaatagttttatgcaaatatatatatattgttatactaaatgacaagcttaaacaaatgggaagaggaagaacacacctgacaccaccatgacaacacattgcaaattctccatgtagatgtctctatgtagttggtgacagctgggacaaaaaataatgccataccaaccacattgcttgcaaggtacaatgcaacaaccaccatatattttgacaagcagaacattcccaaaaaggttttagagcgtttagttgagcaagccttatagttttgagaattagcataaaatacaggaagaataatcgcccatgccaccaccagagagagttttatagtaaatctcagtatctggtcaactctcattgttcccttggttctccatgagaaagcaatgtcaaggatgactgcaagaaaaagcaggtacatcaatcattgatgaagaaagtgaaaaaggaattaggtatttcattttattaagcactagttttcataacataataactgataatatatattcacacaatacaatactcatgacaaccttgaataactcgaagtactgcattcgtgatgaaaatacttagaatatcctcaaaaattattggatcaagtaactgagtagggctttctaatccatgccatgccattattatcagaacctgaaaataaaataaataaataaatgtgtcaaaatgtctggcagaattatgaaagtaatcctaaatgcatcgagccattcattaaagatagaaagtaaacctgaagcccaagcacaaggagtgtccacatcctatcaaagcttctgaagagatgccaaaaagaacggacctcaacaaaattcgtttttcccaaccatctctgttgagaactggaactcatagcttgctatgcagtaccacaaaaaaatgcagagcaacaagtaaacaacaaaatcaaacaaatgtacccaaacatgagcatcctctgagtacatgtacatgaaaaaacatgcatcatagagattacagcatggtgaattatatcaaagcacatagaaaaaggtgttccaactctttataccttgagagttctaataagtgatgtatacagtgtgataatatttcaagcaatacattggacttgtgaagcaatcacagcatcagactagccttttgggtcaattcaagtcaatagagcaaatttgtgcaaaaataagtgcgtgagtgcaaaaataaggtgtgctcattttttttaaaaaaaaaagagttacctgttgtctttgttcagctgcttctgaattaagatagttttctgttgatgatgattcaggaggcagttgggaatttagttgctcattctgctgagatgtgtgtagtgacactagtggaacacagctagcacagttttcaaggccatgtggcacctttgataatcttgatccgcaaagaacctaaacagtatgaaacgttaacgatagtaaggataagaaaaaggactccatcacaaagggaaacgttgattgcgatatctcaaaaatctatgcatgattaagtttgttggaacataaagtaaatctgcagttctgcttctctatctccaatctcttctcctgtcgtcgttctctgtcctcctggctcctggtttttttatcaccgacgtggcgtcggcgcaccgcgcacggctcctggtaagttgatcaccggcgcggcttcagtgacaatcgacgtcgtcagttcgacactcgggcactcagccccagttcatcttcctcggcgcacacggcccagttcaccggcgcacggcatgagttcgtcatctggaggtcgtattcagttctatacttcactacttctgtcttctgtgttctgttctgtcaagggccttagtgtctagggtaggcggccctcggctacggagatcgtagccacggtccgttgtcttctccggcgaggttatcccctctgctgtcggcttagttgagagagagagattaggataatgatctttcttaattccaactcaggtctggttacagaaatatataggcccctaggcctaaccacatggagctaactgctccctaattctaggcatgcaaacaacccttaattctaggcatgaaaacaacctttaattctaggcatgcaaacaaacttatctagtttctatccttaattctaggcatgcaaacaaacttatctagtttctatcctatccactagagccagcggttgttgcctcctgggcgcgctcacgcgcacgccgcccggacgcgtcgttgcctgacgtagggccggccatacatgacatctctcccctcctcg

SEQ ID NO: 126794 - DNA, 462 bp, Zea Mays
acaagaccagtttcccctcccctgattgcgcaaacacctctcacaaaccctgatagaactggtctgaaccggtttcctcatgaaagcaatcactctgctcctcaccttattatccctacagacagcttgaaccatataccctctgatattgctgttgaaccagccttaccacaacctcatgtacatgaaacaaatgggtacagtcctttgcatattatgggagcagcctcagaaccaacctcaaccccccaagatcagctgccaaaaacagttccattttctggaccttccacctccacacaaatgccaattaaaacagttgcctacgctgtaactcgccacagtacaagactagcaaacaaatcaaaaaaaacgagacggtaaaggggcgattcagattgcccaagaactgcttgctcataagttaaaagatttggcccctaacgttgctgactcacataa

SEQ ID NO: 126795 - DNA, 353 bp, Zea Mays
ttatcactcaactgcagttgaagcaggagacttgtggatgtaaagactagacctaaagtcagtgaacaggtgtacaggcaagcctttggtcatgatgttcgtggtgtgaaaggatcttgatgttgcctaaaggggagttgaataggtgtttctaaaatttcatacagaacaaactttgcagcggattagatagtgtcagaatttccgactatgggttggaacttccgatggatatcgaaggttcaagtcggaattttcgaccttgatagaacaaagcgaagtgaagttacgcctaagtagttttagctcagaccaaacttgtagatatgtgtttggagatgtccgatagctag

SEQ ID NO: 126796 - DNA, 408 bp, Zea Mays
attaattaattggtagtacaagcaacatcaacagatgatagatttaagtgtctatattaattggtataacttctatgcattaaaccagggtctgttcctcccaaactaaggtagacacatcgtctaaattatcagagccgtcagatcgtttatccgtaatgagatcctaccgtccagctgttgcttattgttacgtcttatctgcctgctccaactcttcgactacttttttagtcgtatactcgagtcctctggaaagctctgtcgtgagagaaaaagtgaggagaggtcacgtgaaggcgacacctcccaggctgcagacgcgacactcaacctcagcgtcgtcgtcgcttctttcttcctcaagcgtttcctattcagacttcctccttctggaggtaacactca

SEQ ID NO: 126797 - DNA, 430 bp, Zea Mays
gcgacgtcttctcccacttcgtgacgactcaccgatgctctatttcgacacacccattcttcgcctccgtgagtctttagctctcgcatcagtcgaggtcgacagcaccttgcgagggatagatcgcggcagagactccgacgtagctaaatccaacgcagcaaaataatctaggtcatcctcagaagattcctcaacccacgagaaaggactcccaaattcctcttcatccaaagaccacgacccaagctcagacccctcagacacatttccactaagaaacgttgcatctgcagccatcaaaacatcattaatatcaatgtcatcagggtttgcttacgcaggcccggacgtcggaacctgctcaacaaccgactttcagtatcataaaaagtaaaaccaccaaccctaaacccctagcgcatctctt

SEQ ID NO: 126798 - DNA, 453 bp, Zea Mays
tcactctgtcaggcgctcggatggggattctgatggtacagtgcctgaagaagatctcaggtgcagtgcacctcgccgcaggtgacccccgtgcttggattcatgctggtcaccgtgattcgtgctcaatgcaaagtggataactgaggggagtaaaagatcttggcgcccggattggctcagacccggtcactagatggttcactgtactcacttgcctagcggcctgtccagatgacttcgccggattctaccgcttgccgcccggatgccacgtactgagaagcgttaccacatcacagtaaaccaccttagatagcttgttcatcgcctgagacactgccccggtgaaagccacgacagcttgcaccagtgaacttcccctctctctggccgccagcgcgcctacttcaaattggacgccaccgccgatagattctataaattgctgcc

SEQ ID NO: 126799 - DNA, 847 bp, Zea Mays
tctggtcagtcgtcgatcgttttaagatttaccgccaatgatgttttctgtctgcaacgcttgagtagcaacttggagtcatcgggtcacgcttcagactgcttaatttgcgacgtcagtgctttggtggtagcggccgagttattattggcgatgttggcgctttttgaggtaatggctgagtgatagcgggccacgtcggtgttttagaagtaacgaccgagcggttactggtgatgtcggcgttttagaggtaacagtcgaatcctttggagccacgtcaccgctttaggaataacaatcgagtgactgatggcgacgtcggcgttttagaggtgacagtcgagtgatcgatggcgacgtcggtgttttagaggtaacagccgagtgatcgatggcgacgttggcgttttagaggtaacagccgagtgataacgggccacgccggccgctttggaaacaatggcctggtgaagtctggtaacgtcagcgtttttagaaataaccgctgagttaaaatgggtcacgtcggccgttttggaaataacggccgagtgatgatgtggcacgcccgcgttttagaaataacggccgagtgaagacatggcatgcccgcgttttagaaataacggccgggtgatgacctggcatgccaacgttttggaagtggcgcctggcccaggaaaaccccatatgtactgcactgtcgcatgcctccgcgttccatgccctagtttttgcttttctgcatccaggccttctctgctctcctgcaatattgcttccgctccgctcgctagcaaggttgagatggcgcccaagcggaaagcttcgagttcgtccgtcg

SEQ ID NO: 126800 - DNA, 666 bp, Zea Mays
gcgagacggctgctcaatgtccatcttcagcgcgacggggctgagcagatggctgagagcgctagggaataatgggacgccctttgttggcggctaggaaggagcagagagcttcggcagcggcagttcgcgggtggcgagcgcggcaacaaagtggagagcgaagagcgaggagagagcagcaagggcgagcaaggagaagagtgaggcgaacctgcggcactgcagatataggcaacgagaggagtggagaggacgccgacggaggagctcgaccatgactattaatggcacgacatgagtgcgggaaacggctagcagtaaaggtggtgccgagtggaaggagagagagggcgcggacgtttcggctgggctgtgcggcaacgtgaatgccatgggcaggagaaccggcggcagcgcgtacgtccgatctagcagacgagcagattgagccgtgtctgtgtgggagaaaataattaaggagagagaagaaagtgatgaggcccacatgtaagggagaaagaacgaggcatgggatttagtgtgcgggcttggaagctgagcgttggtgtcaaatatgtatatattgttttcaatttccctttttttatgccgcacggtgtgtgtgttttgcttttatgtttttttattttaaatattcgaata

SEQ ID NO: 126801 - DNA, 506 bp, Zea Mays
agaaaatccattgcactcggggccctggctgatctgctctctcgtgccttacaaacaagtccctaggtcactattcaggcgagtcgctgactttgtgaaaaccccctaagtttgtgaaccatctgaccagcgatcccatccccatcggaacagtagcagcggaagacaaaagggtggcagggcttatcgatggtggtctagctccggcgaaggggtctcagagatcggggaggtcctggcgaacccgtcgatggtcgaatggcggttggtggtggtcggagttgccctggtcacgtgcgggggcagaagagctcgtcagcggtgaggagtccggcctacacttggcggtctagttcaattggatagctcggggaggttcactagatgttgtggaagatgtgcgcacaaggaatttgacaatggcgcaacggcatacccggtcgacgcactccggtgggcggatggattccagcgaggacgatccggcgcttccgatgaggtcgtgc

SEQ ID NO: 126802 - DNA, 279 bp, Zea Mays
gtttaatttattcaacgtgttgctattcttgtcagatcacgaagattaacctgttcaaggtgatccaatccccttagctctatcctttgtcttattagtccatacttctatacacaatttcagttcggtgtctccatcctgaacttctatgtctatagtgaagtaaccccatcgaatgacattcttagtcgcggtaaattgttgaattaggaagaaaatatgttgcgacacattctctcaacttgttgattttttcctgttgttgtcctcacattttac

SEQ ID NO: 126803 - DNA, 587 bp, Zea Mays
gcgtggtgaggatgcttgcgaccctaatctactagactactactgtgagtaattggggcgaacccagggcataactaaaagcgaggaggggcgcaaagggtttcttacgctccttgtggcacgcataggggtgacgctgaccggaggtgattggcgttggagcgacgaagattcagtgagataggtgctggtacatttgacgatgaggctcgttgtaggtgtcacaagcactgatgaagttgatgacgctagagatggaaacgggaacactctggtggctgtagaacactcctctgaagctcaataatgtcgatgatgacactagtagcatgctcaactcaaaaggaaaggcgacgatgaaggcgatgcaagtaggaattgttgggcattattggtgccattaagaaatggattgagcagggaaatggctagggaagttgcgtgttatcctggatatccattgacagtggcagtgagatcagtcaagcgctgcaaatgaggaattggtgacgggatgttcgctggtgaatagaaaggaaggtacatgaggttagggatgacatcccagtcccacacgctagagatag

SEQ ID NO: 126804 - DNA, 392 bp, Zea Mays
gcgccagaaggcaaaggccagcgacaaaaaatgcctcaaaaacaaccaactcgcatttaggctcgggaatctcctctgcacccagaacccgcctgacgccgtcaccaaagtacccaagtcactgcatctccagcacgcggaccgaggaaatcctcgaggtaccaaactctacggtatggctaggctgcaactccatcaccgccaaatcgctcaaagtatccttggacgacagcgtggccgacgacgcactcgcagcagacgaagaagaagacattgcaacgtaccgtcggcggcggcgcgcggtcttcttgatgcgggccagagttccaaagcgggagagcaaggagggcaagcgagcagttcacaaaagctagggtttctacagcacaaac

SEQ ID NO: 126805 - DNA, 436 bp, Zea Mays
cccggcatctgtggatgacccaaacgcctccacgtcacccgtggaaagattccgtaacgtccaagagctggctgtctgatcatgtggctgcaaaagttatctcaaagtcagcaaatccatgcctgcattccatggcctgcgtggccaaccaacgagctggatgataaagcatcagttcgtatagtagcataggggagaacaacaaaaaagtcaaatccctttttccaaggaaattggagatggtgagatccttatatccccccttagttccattggtgtttacacgcttttacctgtcatcacagaatcggtatctcgccaatttgaaacgctttcaccatcaacgcctgcctcacaacacaacataagttgcatacacatttggaaaatcaaattagattgggacaacatgacgtgttttggactaattgcatca

SEQ ID NO: 126806 - DNA, 586 bp, Zea Mays
tatatattacatgtttatatatactatgtgttgtgctggttttgcacggcatgtcagtgcatgcccggcataccccgtggatccgccactgatttgtgatatacatcttgtattcaatgacaccaactagttttacgaagaaactctcatgccagaggagagagggaaatgagatttttataaaatttatgctactgttggatatatgagacggatgttctaaattaaaatgtgcatgtgagcatcgtataagtatatgatatgttgcattgcaacagatcatgtttatctattgttcatagagtatagtttaaaagagtttgctagcaccgctttgggtgatatttttcattctcatgctttgaaggttaattacgattttatttcctttaacttgattccattcttgctaaggtcaacacacattgttttttcaagaaaagagagctttattaattacttctctatatttcagctgtctaaattttagaatgattttagttgacactcttaccaccaatcaatgtatgtaaattataacctttatgttttattatttgtctttatattgtgatatatcaatttt

SEQ ID NO: 126807 - DNA, 571 bp, Zea Mays
aaaacgatgccacttggttacagtagacatcatctcaatttgcaatgcattcaggcttaaatcaacatcatctccacatcatgttcttggaccagtgcacccccatcacatcttgattttatatcacaatcggttccatgtaggcatatgcgtcgtgtcagcattccagccaatgtttccatagtttaagtgctcgtctaatcagcacttttagattattatgccacatgaatgatcctgactggcttctgtttccattgcaattatgggtcaactctgaactgcaacgttttctttttctgataaaaaggctggagatttgtatcccgatccgatttctgatctcagatccaggctttccggccatatccccttccttttttttccttgcaagagcatttttttcttggccgtcaccattcacaagcatcttaggacctaatcatgaacaactatgaactgattacagattgtaattgtacaaatggtacttgtctcattatctgtatgataaggctgccatgcaagtcctgacggtgacaggtggcgaattctattttactgttacaag

SEQ ID NO: 126808 - DNA, 277 bp, Zea Mays
ctttggcctcagttatttcgatctgtttttgtatcgtaacttggcagttccttgttgtatggtccttatcctctccacaaaacaagtagaactgtcttcttggttgagagttgaatctccctccgaaacttcgtcctcctctgtctcttggggctagtggtctgaaggagttctgttgtgtccctgttgactgggagctatgatgctgctcttgattatgattgtttttgtcttagctttgactagggttgtcgattgttctgacatgccttggatg

SEQ ID NO: 126809 - DNA, 443 bp, Zea Mays
ggagaagtcgcaccgccgctcgcgccagtaccgcacctcctcggggccgccgcagaagacagagaagttaaattttcaaaacaaatgcagcgacacgaggcaccccgcgcatggcccgacaaagccattaagtgcggaggtaacaggtcagtcagccgcggggacaggcgtgacagtcggcatgaccatgggcggaccggcagtaattgcatcaacgggcgcgcagaaacagtgagccaatcgccaatcaaactttggccccacctgcaggctcgtattctcccctgaggcaggcccggggccactgtcggtaccctgaatcaggggtaccccttactacagtatgaagacacggtgcccgtacggcgatctctagccgcacggtgaacagcacccgaccccaccacgtgaacggctcaaggggctccacgtggtgagaaaag

SEQ ID NO: 126810 - DNA, 326 bp, Zea Mays
cgccaatagtgataggcccagagagagcctatggttcgtcgccgtcgaccaccttgaggcgaccaatcgcctcttcgatcgtcatcgtggagaggtctagcagagactcaatcgagcgagtaatctgcccgtacttctcggggatgcaacggaagagcttctcaacagctctctcctcatcgtaggtgtcgtcgccgaactgcaccatcttctgcaacagagtattgaggcggagagcaaagtcatcaacatcctcacctggcttgaaggccaggttccccactccttgcgaagtgcctgcagtgtggtcttgcgggcacgatcac

SEQ ID NO: 126811 - DNA, 398 bp, Zea Mays
atttgagagcaccagatctaaaaatctatgcagttttgatccatgaatcctatagagaatttgaagactgttgtatggtgaacacttcttattaatggagattacccggttcttaacaagaatcaagagaaagagggggtaaaaggaggtcggttcaacagaacaacgaagatcagtaaacaggaaatatctgaagaaagaaaagatctgtggttactgtggattacgatgggttcaagtgaattggagttaggaacgaccgcggcaagataactataagctgattcacggtcccacgaacttggccggagtctggctagagatatttcgccagtgctcaccgtggcacggtatttttgtcgccgtgtcgctcgcgccaccaccctacctcactgtgc

SEQ ID NO: 126812 - DNA, 742 bp, Zea Mays
gttgtgctcctatatatctccttgccaaaagtattttattctagtatggtctatacttctcacaatctattagatctgatcttagtcttgtgcttgcgacatctttgtagatgcccctgaccataaccttattgccttttgggattcttgtctcttccattattaaattgctaccatttgaccatctctgttcccttggtattgacttgcccatacccctagattcctcaatacccttgtctcaaatacttgcctctaaatttctactgcctacttaaacatttcagtttatatgttcatgacctttctgtcttttgagaccttttccttttctgttgttaagtcgctatcttttggcaatttcttgactcttggtattggtatgctcatctccttgaaatctttcatactctcatcctttttatgcttacctttacatcccaaggtctgtttaagatatttcattttacatgcccttgaccacccttctttctcgatgatccatgagcggtcattttattttgcacatccttggtgatctcgttgtttccttataacttccttgggtaatgaatttttacttcaacccttctgttggaatcatacctatcttaccattgattactttctccacttcgccacttcacgagtcttgccttaactctatccttgtttatgcttttcatgattatcatctttacccttatcgcctctacatcttactttgatgcttatattatac

SEQ ID NO: 126813 - DNA, 517 bp, Zea Mays
aaacacccttcaatgtgccctgtcaggtgctctgaagaagatcctgatggtataatgtctaaaaatatcagtgatgcagtgcacctcgccgccggtgaacccgcgccgcgatccacaccggcgctgtgattcgtgcccaatggcgcatggataatgactcggggtaaaagatcttggcgttaggatgagctcgaaccctgtcaccggactattcaccgtacccacttgttgtacgattaaccgaggtgtcctcgccagagttcgccgtcttcgtagccatgccatgtacttaggagtgttaccacgtcgcagtagatcactgttggtagcctgctcattgcctaggacattgcctcggtgaaagctacgatagagttcgtcggtgactcacctcctctctccggccgccagctctcttctccaaaattcagagccaccgctctcgaaggctataaattgagtgcattgttagctctgctaggttgttacgaagccagtacaccagccctcgtcttcg

SEQ ID NO: 126814 - DNA, 1114 bp, Zea Mays
gccaaaatgtttcagttgacaaggtaagctgatgtttttttttgctcctttacattcaaaaagtaatcaaatgtttgtttcattatggcaagtaatcggtgatggttgaacaagaccattctaatttgaaagcatgcagctgattctattgattgcagttttatattgtgatgttgtgcgaggcatatgagtaccattttttcttcttaatatagcactagtgttctgataggcgcaggaaatcaacagctcgtgcagatgggtttcttcgagcaccctctcttgtcgacaaccttgttatatttcagaggttatttgtttgacatccatccatccatcttctctccaaatttaggtcggatgtacgagctctatcgacgttatagttgtgcctccgcgagtccgagctgacccagcagcgagtcaggtaccagcagtagagttgtttgttttgtcgtcccatactgaaaatttatcatctatgcacatctcttgcctgatcccccttttgccttctgtatcgtggttcagaatccagcagttgttgccaggaggatggttctgaagtcaccacgcctaaggatcaaaaggcctgtcgtagtggcacagctgatgaagggcagccaccgcaagcggcccgcagccaggaaaacaagaactggggacaaggcttcgagtagcacccgccagggaacgccgaatgacagcaatatcacgggtgaggtagatattggagatcttatcgacttccttcgggaggagtacggatgtcgaggaacgtcgacaaggagctatcaggcgcggcaaatgacggtgatgagcggattctcatgtatgaacttattctgctagcgtcgtgtcgtgtataggcagagtcattgaaaaaaatgcaaacgtgaaggcggctcaagacggcttcgccaaaatgcccactgagccatgtaactcgtcaaaatacccatgtcaacatgaaaacattgatgtaatgctcatacctctttatatattatgttttgtagacttgtatagaccaaaatagccttcttagatatgcatacacaaataaaggtacaaaataaaacgtaccatatttcatcaccagcatacagtggcc

SEQ ID NO: 126815 - DNA, 511 bp, Zea Mays
cccatgagtcagccaactctcccttgcacacgcgctcacccagtgcaccagaaccgtgggtccgagtcgtcagccgcgaccgcacccacctcgccgctaatggcggacgcgcgtcgggaaattggggataggtagttgaagaccgggtcgccctgctccttggactataagagctctaccatcgtaaccctctcctccgcatgtgccaacagcctctaccctaacgccgtagtccatcgccgagaacacagagagaggagtggaggtctagggcgccgccgacgtcgtctgcggtcgtcacctccgttcagtactcgcgtacaaattccggggaagcttcgtgtcgtgagggacctgggtagacctctcgcatgggaattggccggactcgcggggaatttctctctgtcgctcaaggttcgccgccgaccgcatcacaacgtggctgggaacctccgcaccataaacaccggtaagggtcttctagattgtctcacatactttggtagac

SEQ ID NO: 126816 - DNA, 341 bp, Zea Mays
ggtttgtcgtgctagggtttaggtcgctccttctccaccacctggccgcccaccctccacctctcgtgcttcccggacgccgcggccgccgagacgagggccaggagcaggagccaccgagcagtcgtcgccaccgccataaaccaaactaactaaggcagctagaatctctgctttgagttcttccccgtcaccgcacgggctgcgatctctgctttttttggttccccaatcccattccgtgtcctcatgctgccattttggggttcaaggttcgtcgtcaggttcctgtgctttaatgtcaatattggtatgggtgatactgaagttaatgccagcag

SEQ ID NO: 126817 - DNA, 472 bp, Zea Mays
cgggatctgggcacgggcgaaggcgctgggacgcgagatccaggggtcgcgggcgccgcctagggttttggagtggaacagagttgagggaggaagagacgttggactcaaaacaccatttgagagaagaggaacaagcgtccctaatgacgaagatggaaggagctgatggcgaagatggaacccatccagtcacgattccttctaggggcgagcacgttgattcaaggatggaaggcgcgggcaacgatcatggtgattggtttccggattcggcgcgggagctgtggattccatcagtttccttgtgtgggtttccttttcggattcggcgcggcagtgtggtttacttgcagcgggaggcgcacatgacgggatgcggaggagaggggcgggggcatggtgcacggtgacgggggcgtgcggacgcggctgacgagggcggagcaggatgtagacgctgatggtagac

SEQ ID NO: 126818 - DNA, 1329 bp, Zea Mays
aagaaaatcaatgccttctcctatccaccaccaaaccttggtagagtgagaacaatatactccgccagggcgtcctacaagagaagaggagccggcagagaataagaagaccagaagttgacaaacttttcctgttcttcgagaagcccattttctctcttcttctccactagatagagaaaggggagagagagggagccgaggaggagaagatccctctcaccgtcatctgctggccaatctaatctccgtcgtctgcatctgggtctgctcccgtccatggcctagtgacggaggattgtatctctgtccatgtggatggcgataaattagtacttgtttataggtgttgctgtttggttggttggccttgtctccttgtttgaggaagtggggagaggcggaatcttttgttggatcatggcagttccaatgcggccggtgggcttcgcccccccgtgacatggtgagcagttgaggggacggattatctcctgttcttggctgcttccctctgttctattctggcctggccgccattgtttcagcggatgagttcggggtcggaagtcttgttcttggaggttctcccctctgcttattggccatatgatgttctactcctgcctaaattttgcctgtgcgaaaaatttgtgtcctttttgatgttgtggttttggttggataatagtgtgggaaagctgacaactttcttgattttggtttgataatattatccttgcagtgtgcttgtgatgttgcgatttttcagaaagctctgatttttagcgcttcattatttggaatccttctggctctgtagtttgctgtggtttgtgatctcgtcttcaatattttttgtcgcttgcatttatggcccttcacgccttctttttcttcccattccctgacgtcctacaaatgacaaattacaggtctcttgttgctgacactacctggacttttcttctgcttatgacaaagacgaactgataagctggcattcgtagatcggtttcttgggagatacacatacagaagctttagggtcggctcgtagaatctctcagacaccgtcgttttgcatccgagaacttggtaagtagtatgagatgtccttcttgcggttttctgaaccaatgctcgtttaccttctgtttgtcatcagagaagatccttatcctacttgttgatcgaaattgaagtgtttgtaaagaatgctaagtaatgcgtttctttatgtgcatttttgtgatgaggttcgggggtttcgcctctgtgctgtttcattcactttggactaaattttcaacattttcttcaatcgat

SEQ ID NO: 126819 - DNA, 1048 bp, Zea Mays
caacgcattctccacgataatcacccaacaatttgcgttttaaattagacatcacatgagcactactactttttacccgcgaccataaccatacacatttagaccacaacaagcaattcactgtgattacaagcttaaccaagtcatctaacaattcggctaactagagcaacaatataggccgctatacatcatacacgtcggctagtctattattatcaaaatccgagacacaacatgtatataacaatcacttaatacaatcgactcctgcttaacacgagttggctaacgacgtgactatttccccatttaccaacatacaccacctttcaccatttttggataacctgcgcgacacacaactattgtaatacatctcaagtccattcaaccccatcagtagagcactagcacattttagaaaatttcctgagactacgacgacaaggcattgatcttatcatgcacataaaagcatcacaagcgtgtttacggaacctatcggttaacttgatcgacacactacccatgttctttgcctttcagaatttatcacacaataggaatcatccccatttgccaatgacaccaacaatacctactgacctattattcaccacacgaacacagttacacgccacactctagtttctaacatgattctcacataactcgtaattcaactactcactaacaataaatcacgcacgacaactaccacatcaaccgatttatttatttagaacaccacctgcctagcgtaccactagtaccccacattttgactcaagctcaataatacagcctttattcgattatacaacagcgacctaagcgttgcgttacccaatgcatacatccttcctcgtcgcgagaataaccatattacgacatatacccgcacatctcaatcaaatatcttacgccaccaccactataatacaccatggcacacacgcacatacgtgcccccacgttacgcacaaggcatcaacaacatagtgactctaacaggattaatcatactcctcatttgcctcgacta

SEQ ID NO: 126820 - DNA, 497 bp, Zea Mays
ctgaggaaaaacaatagtaataaatgttcctatagaaagtaactacaacgatatttgacatggaaataaggagcagagcttttgtagcagtggacaaaagcggggagacaatttatagaatagtttggaaactctctaacgtctgttgttttttattggtatttcttaatttatgtgggttaaggggtattttcattctgatccttggtgaagaaaacaataatgtttgtcacctttacatgtcgttgcaaaacttgttactagtgtttattgattgttttgcattgcatggggatttgattatctttgcctaaataagcagcaactaatgatgcacaaaagatcatagtaagatgttctatattctttatgcagttcttagtgcttgttcctaattgatacatgatacatggtacacgacgcaacacttactttcgcattcaaaagaaacaaaaacaattgtgcttagcatttagtccttcgcttctttatttgcc

SEQ ID NO: 126821 - DNA, 303 bp, Zea Mays
cggactacaggccatagacacgactaagttatcggccttcatagtgatcgaagctgggataacgtgggggtgtggtgtagactttgcgaaagggagaaaaatcattagatgctgctaacagaatccctcccctagtgttaatcgcgggcaggattgcagcattgttgagaaattttggtcccaaaggtgcgtaagatggttgcactgtcaaatgcaactagcttaatctcttgtatgcaaacgatggtgcttctagtgtctcggattagttttgaacggagtcacgtctggccctaaactgca

SEQ ID NO: 126822 - DNA, 339 bp, Zea Mays
cagggccctcgctgccaaggtgattcgtcaaggattttactggcccgcaataatttgtactgccaatcgagtcacgaggtcatgtgaagcatgccaaaaagttctcccctcgctcaggcagcccttcgcaattcaccaagctcatcgcccatacatggccacttcaacgctgggggctggacatcgttggaccactgcctacggctcaagggaacctcaaattcaccttcgtcgccatcgaatatttcacaaagtggattgaggccagagcagtatccacaataacatcgaagaccgctcaaaaattcttctggcaaaacattgtctgccgcttcggag

SEQ ID NO: 126823 - DNA, 1544 bp, Zea Mays
aaatgtcgtggtttcaaaaaccgaggacatagtagaatttttgtttggtgagagaggcaagcatggactcatttcgaatggtgaatcaggagactcaaacaggaggtttatattggttcaggctcgtgccagtgtagtgttgattgtggtattgttcaaaggagcgtgttacaaggaactcttttatagtttaaggagaggctcttacataggggacttgttgtctaaagcagggtgcgacctgttgtctaaggttgtcctactgacatagttctcttggcgtcgtcttctagtacgtgtgtagtcgtatgtctggcatggctggtcactctgtctatccggtatacgagtcactgtagaaaccatggtgctaaggccccgtgtagcggtgcctagcgggacccacgaggcagagttgggggatactgaggccgtacacggcaacgtctcatcccattgtcaaagatactccatcacccctatggcgcatcgtggcgccatgcaagacggtctatggtggtgacatgccttactgtgtgccttgccttcacgtcaggtgggtataggcatgctcctgtcgcacgagtgatagggggacatggcaccagggcccataagtgtatgggctcgtcatggacctttgcttctccgccgtgcagagttgctcagcaggacagccaacctacctcgcagagttgctaagttggacttggtcggcccgtccgtctcgcagagttgctcgacaagacttgttcggtcagtacgtctcgctgagttgctcgaaaagacttggatggccagtccacctcatagagttgttctgcatggcttggtcgacctaggtgggctgccatgagttatgggcatactttgggtaccctgttccttggtatgcatcagcaggcctcgtgccttcgtgcaacttcttggagttgtgcggaggctttcttgttgggaactgaaatcttaggtgcacgcaagcgcatcttctagatgtagcccccaagcccccccctcgagtaatctgtgaggattgcatgggggtttaactgtcgttatttgcagttttggcatggacccttttttgtgatagtcagcatggttcccacttagcggcttcaatctcaaagtcattggctggcttttgtattaagatatgggtctgcttatcgtcctcagatagaccctagtgagcagcaactatggcctcaatctcatcagcagatagtcgtgccctatggccagaaccactacattctccatgaatgagagggttggacacgatctcgagaaaaggactttgcaacaagaaagcagtactgtcagcataaataatagagtaactcgatgattagcaatggaaaatcaagtgatcaaaacttacaaaaggaggaagattccatgcagaataggatcgaggagcaccatcattaacaatagcgcccctcagcatcaactcaacttagctcaagacatcctcctccgagattcgcctatctgttacccaagaacgatctctaacccagtatacagctatgtagggt

SEQ ID NO: 126824 - DNA, 320 bp, Zea Mays
cagcatcttcgtctcgttctgggtgccctaaggaagaatcagttctatggcaagttgaagaagtgtgccttttggctgtccgaagtggctttcctggggcacgtgattaatcaacagggcattgcggttgatcccaagaatgttgcggctgtggtggagtggaagagaccctctagtgtctctgaaatccgaagtttcttggggctcgctggatattatcggtgcttcgtaccaaatttttccagcattgctaagcctctgactagactcttggagaagggtgttctcttcatctggtccggcgattgcgaggttagtta

SEQ ID NO: 126825 - DNA, 720 bp, Zea Mays
aaacaacatccaggtctgctggaggcgccatacagtcccggatcccggtggtttacccctgcggcctccgccgctccgcggctctgcctcttcctccgcttctccttgccccgcgtgcgcgaccgacgccgccgccgcctccgccctaagagtcttcgtaggacactccgtcaggaattcttcgggacccttcgccggcgacgagtacatccaccccttcccttcatgctatgctgaaaccaatcactcaaaccctaacttcagctatttgtattcggttcgaatctaattaccagcatgtacatgtattatgcctaccaacatcgattttgttttgcaaattttattgggtgtacatgtcttttactgggtccgcgccttgactcgatttgagtctgtatatggtcttggtggctaattagccaaccacataccgcagccagaccatggcagcaacccctgtgtggattggtcagtaagcacacctatattaactcgtgttgtgccaatcgaaggtgtcaccctgcctagtgtggttccttatctgacaccaactcacaactcggcatgaaacaactgatttttatagtttcctgtagatcaatatgaaagtgttttcctcgcaaaaggggaaaaaagaagagatactgaaatttagtgcctatagtgttcttctggacccagaccctagaccaccccactcaggttggagcctccggc

SEQ ID NO: 126826 - DNA, 859 bp, Zea Mays
gctattttgagcatgatctaatgagaattgaagtatggtgactatagcgaaattaaagccaggttgtaggagaacaaccttgctaaaggtggattagcaagttgtcacatggaaaattgagatctgggctctacaaacagctctgtcaggcaccctaataagtactctgatggtacagtggactgaacgagatcgcaggtgtagtgcaccttgccgccgtcgacctctgcgcctggattcacgccggcgaggtgattcatgctcaccggtgtcctgataacgtctcgtggtgaaaagatctccactgcggatgagctcaaagccactgttccaccctatgtcgtgcccacctgcgccgacgacgtggcgcagcggccgtcatcgaggcatatgccgcctgcgttgatcgtgacatgccctgaccctttaaccgcgtcgcaatgagtcactataacccactcgttcatcgccggtgagcctgcctcggtgaacgccacgaatcgctagtgccagtaacctcttccctctccggccgccgcgcgccttcttcaaattcactgcccaccgctcaagcacgctataaattgaatgcaccctcggctccgctaggtagtcaaacacctaatccagcaactcgttcctcaaatcatccaccagagctcgccaattggagatttcccccaaatcggttcccgccaccgtgaaagagccctcgccgtggtcaacgtgtttcaggtccgttcatgttctcgggttcctcgtttcagtatccttaggtgctcttgatactctctgacccatccaattgagctagaatccattggatcatcgggaacatctcggtcggtccattcctcgc

SEQ ID NO: 126827 - DNA, 525 bp, Zea Mays
tggtgcacaatctctttccattgagtaacttcattctaaagtacactgtcaaaaaaaattctaggctctagtgggcacccgatataactggtttacgtgtagtacttgtgatttgacactgtaactttggtgtacccctaaatcacgagcaaaagcttgatgtaccactcctcattagtaactgtcgtggttctgtaattggctatatcttaagcaatattgcatgtagttgggtcttatagagatgttaacactaaacacttgctgtctaacaaaacatgatatttgcttctgtggtgaggtttatagaactgaagccctttgactattggaattgcgttatgttgaatttaccgttcttgggatgttgtattgcacaactgtcagatgcttcagcaccatatattgcagatcttatcatcatgatatcatgatgcacggatggtcattttgtgtaaatcggggaagggaaattacaaattggagaaatgccctttgacaacatatagggtcatatgagtgtcc

SEQ ID NO: 126828 - DNA, 298 bp, Zea Mays
gcaagacaagacgtcacgtaacaacaaccacaatgtcgctattgtactatgatggaaggaagaaagatcatccataggagtccttcgctaagaagccgggaatctagaaccatacggggttccacattttgtggaatgtggttctagatcgaggaatgagaaccatacaaaacgacgacgatcctatggctggaacgtgatttgtgctcgagtggaatgtgataaagaacgatgatgattccatggccagaacgtgatctgtgctcgagtggaacgtgatttatgcataaacgcacta

SEQ ID NO: 126829 - DNA, 398 bp, Zea Mays
gcgcgagggacgggattgatggtggtggcgcgagtgaaggagagcggcagcggagacccgagaggtagggagagaggggaggctggggttgtaattctgggacgggattgacgatggtggcgcgagtgaaggagagcggcagcggagacccgagaggtagaaagagaggggaggctggagttgtaattctgggacgggattgacaataatggtggcgcgagtgaaggagagcggcagcggagacccgagaggtagaaagagaggggaggctggagttgtaattctgggacgggattgacaatggtggcgcgagtgaaggagagcggcagcggagacccgagaggtagggagagaggggaggctggggttgtaattctgttgtaattttgtacacgtga

SEQ ID NO: 126830 - DNA, 606 bp, Zea Mays
ctcggcttttcatgccctcgccccgcgcgcgcttcaaacaccggcacctcggatcccacgcgacgcgagccagccagccagcctccgcagctccaccctgaccgcaaccgtctcccacgccgtgcccgtgccacctagctcgctcgctcgtccttgcccctgggccacgcacgtctgccgtgcggcatgaagcggcacaacgcgggcgagttgccgctgtcgtcgccgccgggtgacggcaggcggctgctgccgaaggaggaggcggaggacaagatggacaagtacgacaaggggcgggtgcgctgctccaggctctgcttcctcttcgcgctcgccgccacggtatccatcctcgcgcgccactgctacgacgccggcctggccggcggcgatggtgccggcgtggtgcgcatcgagaccgtgcctccgtcggtgcgtcgagagcggaagatcgttccgatcgctcgcggcagcgggccgtcggagtccgggcactcccactcggctcctgtggacgccagcggtgccggtgacgcggcggattcttccagtggagccaaaacatcgtccaagcagggctcgccctcgggagctcatgctcat

SEQ ID NO: 126831 - DNA, 575 bp, Zea Mays
cgcctcaggctgttgaaaaccagttgtaagtcttcgatgaagttttccgaattttccgttttgattaccacatcgtccacgtatgcctccacacgcttgccccagtgatcggctaggcatgtttgaatagctctctgataagtcgctccagcgtttttgaggccgaacggcatggaggtataacagaaagcaccaaacggagtgatgaacgatgttttttcctcattttcttttgccaaactaatctgatgatacccggaatagcaatctaagaaagacagcacagaacatccagcggtggagtccaccacctgatctatcctcgggagcccgaaagggtccttcagacattgtttgttgagatcagtataatcaacacacatgcgccagtccactttattctttttgagtacaagaaccgggttggctaaccactcgggatgtaacacttctctaatgaatccggccgcgaccaagcgagctaactcggcgcgaatggcttctctcttgtcgggcgtgaaacgacgtaatttttgccgaatcggccttgcctggggataaaccttcagtttgtg

SEQ ID NO: 126832 - DNA, 351 bp, Zea Mays
cgcaggagagctgcatatcattaatattaagaaaggaagaaaggtccaaaaatagaccaagtataactacaaatacaaatacacaggaaaggcaccctatggtggccgcaacttagagtacataaaagcatccatgagaaaacacctaataagaccacaaactacacagacccgatacaccggctctgcaccagacaacaggttcatctttgatgttctggagcaccaccgagacacttggggcgatgctatcaaagacacaagcatttctatgcttccaaatccaccaagcaaccaggacgacaagggaattgaaccccttcttgtgatgattcaacaccttctgctccg

SEQ ID NO: 126833 - DNA, 667 bp, Zea Mays
agccattcaagtggaggttcaatggggaaatctgaaattcagatttctgaattttcagcctttgaaccaaaaccgagcgcgttcaccttgatccttagctctaatcctaatgctcccattgaaaaaaatgtgtctaactaacccctctacctcataccagaagatggcattaggacgcgtgctctagacacgtcaaacctgagatcttctctctgtgctcggcagtgagacaaacccaacttcacccctccatatctctttatccagtcagcgaaacctacaagcctccacacacaaacgacaaaggaatgttaggggaagagatctctcaacgggatcatggccataatctcaaagatttggagccaatccgcgcttgaacacgacctctctctgcgctgcctcgtgctcgacgttgtgccagacgccagagcgcgcactggcgctcgctcgcgcatgccccgagcgcttgtcagagcctccccttggtcgcgctcgcccgcgcctttaaagccacccacgggtgcgcctcacctcaccccgtgctcaccctcgctggccagacgtcctccttagctccggcgatctttcctccgcccgccatcaccacccgagcctcggccaccgcggccagctcactccagcctcgtccaagttgtgcctgccc

SEQ ID NO: 126834 - DNA, 715 bp, Zea Mays
tcatcctttagcctcgaagggatgtcgaattggttgatccaccaatgtcgtcgtcgtctcatccccaaccatctccgtctcctcaaactttagtacttgtacatccatcatcacctccacaatcttcccatgctactcctcatcctctttctaatccatcgtctctgccataagcatcaacatttaggacaccaccaccttctccacagccatcaagggattcacggcaatcaaagaaatctaaattccctgtaccaaaattggcacattcgagaaaaagaagagtaaagctactactgttggcacaactcgatttttgaaaggaattgcacgggacctcacgtcacatacttttgatttggccgagcacgaggagtctgcagaaaaggctaatgcaatggccgcaaagataaagatcccaactaaggcagattataaaaatgtgcctaaataatatgtgtcgggcagacctctactaactcttgagaaaccgaggaaggtccctgctgttattaaaaggttgcatgactggcacatgcgtgcatcatcagttggcattgacgtcattagtgtgcatataccagaccatgttttttattggttcggaccaaaaggcctttcttgcattcgaggatatgtggttaatgatgaaccttcagaaaatcgacgtgcaacttgtgactctgtttgcactgtaagtgtcgctcatatttcc

SEQ ID NO: 126835 - DNA, 443 bp, Zea Mays
atcgaggatttgcaacaggtcttcaacagcttgagacgctaccgatggaagttaaacccagagaaatgcgtattcggaatgccggctggaaagctacttgggtttatcgtcagccatcggggaatagaagcaaatctagagaagattgaagccattatgaggatggagccaccacgatcatagaagaaggtacaaaggctcactggatgcatggcagcgctaagcagattcatatcaaggctaggcgagaaaggaatgctgttctataagttgctcaagaaggtggacagatttcagtggaccacagaagcgcaggaagccttggaagcactaaagaagttcctgaccacaccaccagtgctcaagccaccacgccgagctacatccgatcagccgacggaggatctgctgctatatatttcctgcacgactcacgtggtaag

SEQ ID NO: 126836 - DNA, 506 bp, Zea Mays
cttgaacagttggcttagccgggttaggcgtgagcatgaaggattgtcctgtctcgtataaggcccgctttgtcatttttcactgcctatactctcatcaagtacacccactcgagactatgtgggcagtcactcgatccgatcttgcatgggctacatcctagagttatcgatggttggggagcaccgaaaggaaaagaaaggggaacattgtcgtcctggtttgggtgagatggtggccttgttcctttcagtataaccattaaggtaaagccatgcatgggagaaaaaaagttttggtactcggatcccacgatagtgagatcacaaaaaccatactagtgggtaaagtgtacacctctacgtagagtagggatggcaaaggggaattctccgttaaggaatagctccccatccccgtccccacgacgaaaagatttccccataacgatccccacgaacgcttgtgggggcgtttcttccccatccccgttccctgcaggtac

SEQ ID NO: 126837 - DNA, 375 bp, Zea Mays
tctcttctttatctttcaacgcactcgtcatcatcccaaatccttgtgcggtcacacaccaatggtagcaaaacatatgtataagtgaatgtttgaaccatggttgttagctctatattcacacacgtctaaccaacaaaaaacacatgtttttgtgttttatactctacactcaaacatattatagatatttttatgaaaataggaggaaaataacatcgggtcagactgggcatagcctgtttgccgcacctaaggctcgagcacggtgattgggttgggtcgagctattccatgtcgagccatgggctgcccaacagaccgcccatttagacatgtatacctacctgtacactagtgatgcgccccgcaggc

SEQ ID NO: 126838 - DNA, 291 bp, Zea Mays
agaaaccactcgaccgttacttctaaaacgtcaacgtgatccagcatcactcggttgttacctctaaaacaccgacgtcactagaaaccacttgactgttacttctaaaatgacgacgtggcccagcaccacccggttgttacttctaaaacaccgacgtgattaagcacgactcggatattgcctttgaaggcaccaacatcaactcagccgttttttctccacataaaacgcaggcagaattaaatacggcccgacagtaacaagtcgttactcaagaattacttctaa

SEQ ID NO: 126839 - DNA, 478 bp, Zea Mays
atggagacactatgattatcaactctgctcgcacttgtgtatctcaaatgatttttccaagccaccaaaattcccccactggccccatccgaaggcaagaaaacatactcagtaaattcagaacccaaaacagagactaaggtgcttctagcaatatattgcatcttagtttcctgcagacataccatcttagccttaacggacagaactagatctctaactgaatcttggcgagcacgagaattgagacctcacaagttccaaatcagaattttggatggatccattaaaaacatagattacagcaccgaccagacatacaattgcgtccagtgaatagcaacacccttactgaagggggactaactcaggggctctccacccaaacagggcagatagatcctccacctcactacaagttaggggcgcttaaaaagccgagcatattcttcccaggcttcctgactaatcccctcat

SEQ ID NO: 126840 - DNA, 468 bp, Zea Mays
gagaaatctaatcagcccctatttgtctgaactggtttcgtgtaaaggctgaaggcgacctggaagttgatgcctgaactcaagacaacaacaatatgcagccatagctcagcccctatttgtctgaactgatttcgtgtaaaggctgaaggcgacctggaagttgatgcctgaactcaagacaacaacaatatgcagccatagctattcggctgctatgcatgcacccgctgctgcaaacataggacaacaacaacaatagctagaaagcaatatgcaacaccgttgcttcaaataagagcaaccaatcaggcatggctgtttgtttttgcagagtccgtctggttgtttttacaaccaaacaagcaacgagttaagtgctgcaacatataaaagtaagttaagaaactacacatattactggactgctgaaacagtaaaacgacatgtactgattgtttgtctttg

SEQ ID NO: 126841 - DNA, 286 bp, Zea Mays
cctgtcatcaaaggggcccaaaataagttagatgccatccctgcagttaacatggaattggtggctttagtctttcttctctgtcactcccattatatcctaaggcatagaatatgtagatcggcctgtatggtcatgcatgcaccgtcgaggtcattagagtgttcatccctttggtgtatgctaccatcgtcatcacctccaatgcagccatcgccttcagggtagccatagtcatcatcaacagttgcaaagtcgtcgtcacagttggtgttgggcctttcac

SEQ ID NO: 126842 - DNA, 463 bp, Zea Mays
gcactctccaccactctgtgatgggtgtcttagtatctggagctgtgatttggggggtccggacacacgacttggcttcccaggctaaatcctgcaggtcctgttgcatgaatcaatggatggctgatgccagatgatgggttctaatgggtgtaccactaacacttcctagccaaagttgtgtacaggcccaggtcccagtcgaggctacctactggaggctgggtcaccaactctttcttagatatgctggtatccagtctcgacacgtcgagcctacaatcccaggggggccaagtaccaggagaggagttggtaacgccacacacaacaagaacaaataccgtacagataagagctgtttagttgatagttctcaaaagtatcttacaaaaacaaaggttattacatccgccttcaagcggagccctagcctcatttctacaggtatgggctacttgta

SEQ ID NO: 126843 - DNA, 770 bp, Zea Mays
gggtcagcagcaggtggggcacccccattggggtcagcgtcaataaattcaggaacaggcacttcttcagcagcaggaaccgaaggaccaacatcccgatccaaactagatacacgccggaggcgtctctttttctttttctgctcatcagcaggaagatcaagttgattggcccgagaagggcgtcttgggcaaacactgacaggcttctgaatatccaaggttgtatcagtttctgagggaggcgccaccaccaacgtcccagcaggagcagcatcagaagagtcctcagccagcaaatcaagcatagcacttatttctgcgtcactaggatccaaaggtacctcaaagtggacttgccattcatcatcaggaatttccccaagcgaggcaaccaaggcgttaacttcttcagcagagggtcgcactctaaggcccaaaccgccatcagcgacaggtagattcgacacaaaataagtgaaggctttggtaggaggcaggttccaggccgagtatgccactggggcaccaacatttgatacctttcctctaagaatcatttcaagtcggttcaccaaatctgcagcgggaatccttctgttggtaatctgggtcgagtcagctagacctcggtacagataagccgggtatgccctatccttcaacggctgaatgttcttgaaaacaaaatcagcaaccacagcctctgcagtcagacccctctccttcagcagtccaacttcagctagcaaagccccagcctcagccac

SEQ ID NO: 126844 - DNA, 295 bp, Zea Mays
gagaatggaagcgccgcggtcgcagaaaaaggtgcaaaggcttactgggtgcatggcagcgctgagcaggttcatatcaaggctaggcgagaaaggaataccattctataaattgctcaagaaggtggacaagttccagtggaccacagaagcacaggaggctctagaggcattgaagaagttcttgaccactccgccagtactcaagccaccacgctgagctacgcccggtcagccggcagaagatttgctcatgtatatctcttgcatgactcatgtggtaagcaccacgtta

SEQ ID NO: 126845 - DNA, 670 bp, Zea Mays
cagtgacttggatctaagtttgagagccatttcgactaagatccagagagaatctacctagggttgctataacaaagttgtagagttattaaagaggaacaattttgttatgggtgtttgggtttggtaccacatggaattgggagaaattggagctccaaagtactctgtcagctgctctgaatagatgttcgccatggtacagtaaaaataccggatcagaccgccagcgcggctgtcttcaccgtcgacgaccgatctttgccgtgattcgcgccaccgccgtgtgattcgtgtcgccgatgacccgataagaccgccaggtaaaagccaccccctggggataactccggtgactcaccgtgactgcctttctgctttgcggttgtagccgataagctcaccgtcgaccgccgcctctcggccgtgtgccgcgtggctcaactcttccaccatgtcgccgtgacccgctactgctgtcaaatcggcgccggtgagcttgccacggcgttagccacgaattcaccgcgccgccttcttcctcatctccgaccgccagcacggctcggctaaattgatcaccaccgctcgcaggctctataaattgaccgtgcccccagctccgccatgtatccaagcacctactgcacccacctgcatctcaaatccc

SEQ ID NO: 126846 - DNA, 411 bp, Zea Mays
ggggaatagccaaggaagacacaaagggttgagcgaggggataatttatgtggagtggtggcagaaaggttggggtagcatttgcagccaaaaacgcgaaggtgctcataggatgggttgtggccgaagagagcaaagtgtggtgtagagagtgcgagtgttttggtgggtagtatgttgaggagatatgttgcggtcccaagagccgcagcccaaaaactggggggaacactggattgaaagaggagggtgtggatgatattgttgatggaacggatgacacgttcagccttaccattttgagctgaagtgtaggggcaagacatgcgcagatggactccatgggaggagaaaaaagtgcgggcttgaaggttgtcaaattcgcgaccattgtcgcactggatgctctgg

SEQ ID NO: 126847 - DNA, 292 bp, Zea Mays
acggatcgtcaggactagaccgctagacctaagacgaaaggccttaggcatagaggggaatataggtggctaattaattaggccccgtgggccaatacttatattttcaggatgccctaaaaaggcaccctatctttctcttgagaggtaacgtttcttccagcatgcatgcattataaaacaccaagaagaattaaaattttgagctaaccccctttctttaaaaccatccgggttccctttttctttttccttccaccatgatctttatctttgattcccttccgcagat

SEQ ID NO: 126848 - DNA, 582 bp, Zea Mays
gggatatgtgttcggaacgtgggggatgagcatgcggtgcgctactcacggcggtttcagtggttgagcctcaggtgcaggttttgctgagtttgggcctcaaaactcgacaatgcggttccagtgggaatcgaaggcgacacgtggcgtcatcatgaagggtgtgttgaggcgaagcaacttcgtgtggagtgcataactgtcatatcaaaatcccagaagttggtccatttcgtccccgactaagtggataggctatatgtatctatgggtactttagactagtgaaataaccctctataaatagatggatggggtattgtggacaaccttctctttggcttgatcatttgtattttatttagaaaaaactagtttctatttccctagtttagcctgatttccacataagctttgaattcgatgtatgtgcttttgtattcttcatcgcatcattcaaaggaagggtgcccagatctatccatagggtttatcgaatcgcgtgctcagttttgtatgtgctgaagtttttttatttgattttgtctcttcacttgtttcctctcttctcctttgaatttt

SEQ ID NO: 126849 - DNA, 655 bp, Zea Mays
cttttgtatgaaccttatgtggaatgcatgaaacttgttacattttagtagaagtgtgttatctgttgttccaattcattgattcgtgtatttcattcctagaatggctgagaacaactgaaacacacctattcgacctcctcttgccggccccagttcaggtaaccagattttcccccacccatgtgggatcctcagttctggcagggccaaggattagaccaaacccatcctgctacaattactggtagtataagccacatgagcaatcctacctggtcccagggacctaatgacacatcttcatttccctttcgcaatccatggaacccatattttggtatgatgaatccaggtggtcctccaccacaaacatcattgggtcaagcccagattgtaccacctactccatttccctaggtttatacccatgtgacaaaccagactgaccctatcaatttggaatcagaagcagagcataatgtctaggaaataaacagccctaccaaaccttcggacacacctgggacaggtaggaggacaaaggaacagaacttcaaacctgatgaagaccttttgctttgcaaaacttggctagagattagtagtgacctagtcattagcacagggcagaggaaggagggtctatgggcta

SEQ ID NO: 126850 - DNA, 458 bp, Zea Mays
ggacaatcaagttggtgtccccactaggagagaatgtggtgactgagttagtcccgcctgagccgaagaaaggaagttgttatcagatggctgtcgatagcagtgaagcagacccaattgagagtatcaaggttgtgtctgagttcccagatgtgtttccaaaggacctaccaggtatgccaccagagcggaaagttgagtttgccatagagcttcttcctggaaccgcccccatctttaagaaagcttacagaatatccggaccagagttggttgaactcaagaagcaaatcgatgagttgtcagagaaaggatacatccggccaagcacctcgccttgggccgcccctgtcttattcgtggaaaagaaagatggtaccaaaaggatgtgtatcgattaccgagctctgaatgatgtcaccatcaagaacaagtaccccttgcccataatagaagat

SEQ ID NO: 126851 - DNA, 652 bp, Zea Mays
gtttcaacctgccctgcctgctttggatttttagatatagaaaacctacccttgctaaatgccaaaagacttaataatgtaaaaaacctgcggggataagacaacatctaagtattgcattaataagacctcatacaagtcgagaaaatcgacgaactcctgctctacccatacataacggcaccgtaggcaacgtgagaatgaccatgacggaaccatggacctttggtgtgagatagacaagagattttttttaaccccaacctaaactcagaacctcatgagtgctaaaagacttgatactgtagtcagacccttcatactgtagtcagatcaggcccagcccgttacaaaccagtggatttgaacattctttactgagaggctcgttttcaattgcaaatcaatgcaagaaaaacatcaagtttgtagtgctcatttatgaccccagtgaaaagttgaggttctttattttcccaatagactgcatttgtggcgtgaacacagatgttagttggggaagaaaaaaaggggatgaaagttttgttgaagacactcaattaggtgctgggccctgcaattcataaggatgaaactgaaccatctggaggtagaacctgttagaatctatactgtctaggatcgattccta

SEQ ID NO: 126852 - DNA, 427 bp, Zea Mays
acccttgtccccattttcttgaattttgctcataatgctcacttagggtttttattagggttgcaacattattaccttttttaaagacccatttgttttgatcatgatacttttaagggtaggcttggtggattcttcattcttaagtcaatttgatgctcatgcttaatgtggttcacataaaatgatggttcttggtttggcactttgagagaaaaaccctaggtgacactggggtgtcacacctttgtcattaggacatcctactgctcggaggtggaaggattccctcgccttctgcggagttgcgcgctttgcatgggaatccgcaagaaatcggaatacatctggaaagaataccgcgagaacgggattgagaaatgctccatggcagtctacctgggagaaagccgaaactacccaaatc

SEQ ID NO: 126853 - DNA, 850 bp, Zea Mays
ccagtatttgatcagttgatggatgagctcgcccagtcgcagtggtttagtaaactggatttaaaggctgggtatcatcagattctgctcaagcaaggagaggaatacaaaacgacttttcaaacacatatgggacattatgaatttagggtcatggccttcggtttgataggggctcccaatactttccttgcagctatgaatgctacattgcagccggttcttcgcaagtgtgctcttgtattctttgatgatatcctagtgtacagcaaatcatttcaggatcatttgtctcatttatccactatccttcaattactgttacgggacaattggaaggttaagttgtctaagtgtgactttgccaagcagtctatttcttacttgggccatgtcgtgagtgcccaaggggtggccacggacctagcaaaaattcaggatattgagcagtggcgaacgccttccaataccaaagaattgaggagtttcttgggcttagcgggtttctatcataaatttgtgcggcactttggtattatcagtaggcccctttttaatcttctcaagaaacatacattatttgtgtggacccaaaaacatcagaaggcctttgaccttctcaaaacagcattggtgacggcacctgtgttggcactcccagatttctctaagcagttttacatatatatagatgcacgtcagtacgggataggagcagtgctgatgcaacaaggtcatccgttggcttttctcagttgtgctctcggtcctaaaaatcaaggattatcaacgtatgagaaagaatacttggctattattttggtcgtcgtccattggcgggcatatttac

SEQ ID NO: 126854 - DNA, 661 bp, Zea Mays
gtgggtactttcctttggtcggcacgataccgaagaagggtgtatctgactcggtgaggtctttgagtgcaacccccaaggctaggagtgtccgggggaaggtaacattaatgctacttccctcgtccactagtactctctttaccctgctctctcggatcaccaaatcaatgaggagcgagtacttgccagggtggtcgaagttgagccattgatccgctcgactgaaggttattgcgtgctccgaccaccgataaggagttggggcacttgtggttgacgctaggacctgtcgatcattgagcttctctgccttctgttctcctgtgacccgtgtcctccgaagatgacgttgacctccctgtcaacgcgtgggaatgctccaccctctcccccttctagttgctgaggctgcctaggctcgccgggccctcctcgtggtgggggaggtggtagaggctagaacagccggccgtgtccgatggagtgcttgaagtacctgcagttccatagggtgtggcgcatgtccttgtggtacgggcactgggcattgaggatgtcatttagtgtccgctcgcctccatggggcgcacctcgagcttgagtgacaggtggtccggcggcgtgtacctcctcacgaggccttttctcccagcgcctg

SEQ ID NO: 126855 - DNA, 889 bp, Zea Mays
gtgttctacttcctatcactaaatgcagcagatagatagattagaatgtgccaattcacaagcaaactttgtttattacttttcggttgtgatttccgagctaaatgattaacactgctacaaatgggtaaaatcagatttgtgcttatttatattcttcgtagttatattgtgtcatgtgaataactaattaaactctccaatagtaaaatccctctctttcttgaatcttattctctgacctgtaaatagtgttcttcttcctatcactaaatgcagcagatagatagattagaatgtgccaattcacaagcaaactttgttgattactttccggttgttatttccgagctaaatgattaacactgctacaaatgggtaaaatcagatttgtgcttatttatattcttcgtagttctattgtgtcatgtgaataactaattaaactctccaatagtaaaatccctctctttcttgaatcttattctctagcctgtaaatagtgttctgcttcctatcactaaatgcagcagatgaaactttcttgttttttgaataatggtattacgtccaggctaaatgaaatgtagagagtacctgtcgtttcttcttatattctatgtatgcagtcaagttctactgactcccaacatgaaatggagttaatataaggagtgctctgcttacaaatatcatgtaaatagtgttctgcttcctattgttgaaccatgatgagtgcattttcatttaaactttctttaattggtaaaggtacatcatcgatgtcgacttctcctgctcactgctcctcttgtgcatgtctctcatctccgacaaggtattgcttttaaatttgtagcgcagcctcctgtacaacttctgtttctgc

SEQ ID NO: 126856 - DNA, 304 bp, Zea Mays
gtgggtgattaggaaagcatgggtatgtatatccactttattgtgtagggtaaaagatgtctttgaagcgtagataggtttgggtaagaaagagttgggtaaggaaagactccatcaagattgtggatcttgattcctttgaagatccaacttgatctttgaatacttgagttgatgctcatccaagaaagagtagggtaaggaaagactccatcaagattgtggatcttgattcctttgaagatccaacttgatctttgaatacttgagttgatgctcatccttctttgacgtggttggtctt

SEQ ID NO: 126857 - DNA, 1498 bp, Zea Mays
taagaataaaaaaacagcaagttccaacattaacgaaagtcagctagtcacctgattttgcacaataagacaaatggagaaatatgaaacacccacgtacagctttgcaggccacaaccttaatcttttaaggtttggcatgaacatacacttggtgcacaacgcaatacattatgcttaatcagtcagctggcataaaagtgcctccagaaattgacaataaccttcaggtgtgagctttgttccccacaacgactcggctagcatttgaattggtcattatacaaagttttcaaacctaaactactatgtcatacttgatcttcggatacgcacattaccaaacagaggtccgtcagaccatcatcacacaatctaaaccactgaacctaaacttgaccaatgcagcactttcttaaaaacataaatctggatgacattgatgtgatcttcatagatttaattgaatagggaatgaataaccaatagtaacaccgtttctgattggttcaagagtggtgggttcatgacatcaaccttctatctcattatgaaaccagtaggacgcagagtttggcatagatgtgcttccctactcccagtttgaagtcatgaaatggcaatgcactttagtacatggcatatactcatatagcaagtcaactagagatacacattgtatctaatctatccatcaaattccaaaccaagaggcaaataattggcacaaagaatctccaacaatagtatcaccgtgatatctttctgatgcagtgacaatgcacttccgtacatgactctagagatagaatagcacacgttgctgatataattttctagtatctcactgagttcctatgtgacgtccaattgattagcagtataggtgttcatctagatctattagcataggggccaaggtgcagggcggcactgttcaccgccgtcgagtcgggagttgtagcgccagcgtccagacgttctcctcctccctacaggttagggatctatggaggtgcgtcggtgtaatgggctccaccgacgacatggtagagcggttccgatcactagggcgctaggaggcgatcggggccttggatatgtggcggccagggttttgcagaggggaagcgttggcttctatgttggtgtcttgcctcattaatacagcgttcgtgactgagggccacatccagaggatagggttgtgcccccgatcagaccacgggttgttaggagggatagaatcgggctagtcttccttgatcgagccagagaacacacacctaatagttgtatctaagaggagcctatccatacgaaaccaggaggcaaacgattagcattaagcatgtacaacttgtgtcatgtgtgtgtctgtgtaatcacttgacagttaagtgcatgcatggatatattttgctgcaatctatacatcactacataaatgaatagctttaatagcgaggaactttaattgtgatccttaattttttta

SEQ ID NO: 126858 - DNA, 509 bp, Zea Mays
ggagaaagttcagctgcataaaattgtaagtttttgtcagacacgaagctaaagcacttacgaagctaaaatattacaaacatacttatacgcctttcacgctctgaggcttcttcagcttttcttgcttcctctgaagcaagatgagattcttctccactctgcttgatagcttcgtctgctatctctctcccatcgttcatccacacttcataaaaaaatttctcgccaagggcggtagcttcggctgaaggttctctaatgtcattcactaaaactgagaatttcggctgaattacagccttcacatgatcacagccagctttttcgagtaacgacacaacctctcaagcacccacgcaggcgcaaaagttccctctgccagttaagacttcgtcaaaagcttcaatctcaccctcaatccatttgattacaccttcgagatctccacggataaaatttcgctcagttgagaatgcgccaaccttagcaaaagcatttttcaattt

SEQ ID NO: 126859 - DNA, 289 bp, Zea Mays
gagaacatgacttcaagcacaagttgccagacttgttttcgcatgagagatcttggcttgctcttctatgtcggcatcgaggtgaagcaggggagggactccatcaccctatgccagcgcgcatacgtagggaaactgctaaagcgaagcagcatggtggattgcaagtcgtgcgcaacgctgatgaggagaggctaaagttggtgaaagccagcatcgcggctaagatggatgacatgctcaaccggagcatcgtctgtgggttgtgctatctaacacatgtgaccga

SEQ ID NO: 126860 - DNA, 384 bp, Zea Mays
ctccaagaggcagaggaagaagaagcttcggaggaaggttcaattccaacccagaaggttgttctgtttattctgcgaggaagataagggacatacaacaaggacatgccaagtcacgatccagaagcaagaagaaatatctgaagttgaagccaggcagaatcagccgaagcaggtcctgcatactgcttcatgctattctccatacattctcgagtatgtgggcaaccagtagtccacaacatcagttgcttcagcaagtcactctcaagctgcatgggccccgctaccaccaccacctatggcaccaaccttgcctcataatcagcatcaagaagggcaccgtcaagcgcaacaacagcgtgatacacgtgaagagtccga

SEQ ID NO: 126861 - DNA, 486 bp, Zea Mays
gacacttgtagcatttaaataacacaattctccagttgacataaagtcattttatgtacccttatgattctcgtgaaatcccaaaacgagaatcaagggcttccgataacctagcctcattagtgcgcactgagctaggttgtgaatgtcttccattcacaggataattcatatcctctaggtgtccaccaacgctaagttggttaccaacgaatagttggtttgcatttactatctcagaaggtttagccttcagctgcttgcaagcatcttaatcccaatttgtgaccatacttctccccctcttatttacaacatcattgtaatagggagttgagtggtgttccatgtaaccactctttctggcacttccatgtaggattagtttgagtgacacctcatagtaaatgcacatggcagttaatttgcaacttcttgcaaatcattcgaacccaaaaggttcagttttagtacgtgatcctgagc

SEQ ID NO: 126862 - DNA, 454 bp, Zea Mays
tgtgatgtgctgagtagcaaccacatgcatgtatgcatgcatgatgcatccaaggagtgaatgcagtgaaacaggaatccaacatagggctgtgaccttgcaagtatgagctcacaatactgcgccatttaatgcctcttggtctatggtgtttccgtgatatctggaatttgagcccctgctcctaagaaacggtgctggagggagtaattacctttgccttcacattttatccaaacggtacctgaatggacaaatacgagcaaccaaatcaaacgaccttgtatgagcacagcttagcttaaatgagcctggctgagctcatacgagccagactaggtgatacaggtgaccaaacaggttattgatatcccaagtgccttatcggtagtatctaaagtatcaggatatttgaaaacaagccatttcttgaggtattgtggttgtttgggat

SEQ ID NO: 126863 - DNA, 668 bp, Zea Mays
acaacaagcaccctcgcatggacgacccccactccagaaggcaacattcacacatgcaattccgaagacctttcccgcgatgacataccatctgggttcacaccaacgggaccccacctagtccaagaggacacagacaacttacaagatggcgaagacctaggaatctcgttagaggactagttgaaactgcacaaccttcacatcaagaacaaccatctctagaagcagaagcaagtcctcacagccaaaaggcagcaaaccaacatgcaagccagaatcaggcagctaatcttagaagaagaaaaagccagtgcacttgaacaggagattgcagaaatgcagtacgaagtcccccctcgtcagcaaccaattgaagcagccttcaatccaaataacctttgtttccagaggccaacatcgatgcaaatcgcgttccaagggctcaattaccttaatgagcgcaaccccctctccactcaactctaggccacaccatggtcacttaattacagagcaggcacttatcccaagtacaacggcaggacaggccccactcagtacatcatgagttatcatgtagttgtcgcatctttgggagatgactacaccatggccaaatccttcattatcgccatcgaaggcccaaccctcacgtggtactcaag

SEQ ID NO: 126864 - DNA, 619 bp, Zea Mays
ttggaaggggaggcttgatcctaaaaagaggcccttccctgaacagaggcccctgccgacataggggaggtgtgcactaccctatcctgtccagctgacaggggggtaattctcttccacacttgtttacgtttctccatcacttgtggctgaggcatgaccttgatgcgctgccaggaaggctctttatgcgtagcccgccacttgagacgttgccacaccggaacacgaaccggcagagcaacttgcatgggtgagtccaccggactaggtacaactggacagatagcaacccggtgaccagggagcctgcatatgatacagcgcgtggcctggcggcattgggatgcacgatgggttgtggcggcgaggcagttgaagcatctacctcggaggtccaaagggacttgacgacctgccacccatcatcactcgagcggacgttgctcgaggccttccactggcgacgccaggagggaatggaggccttgaccgcaatcccgggcgacttcggaagctcccgcaccgaacccgccggggagcgtccactgccgtcgtcctcaggagcgcgtccttgaaagttccaggcatggcggcaggcaactcatctccatacgac

SEQ ID NO: 126865 - DNA, 484 bp, Zea Mays
atttagagcagcttatatcaatcattactgtccaattcccatatgtaatattttcttctcatggttgtttcttcaatattgtggaggtgccttcaaaatttatgggttaacgaaacactttaccatgctttattttttctttctttcacatcatcagtgctacatatgagaagtcaacaccttcatgtaccagtgaaagattttccttttcttttcagcaatcagaaaaaatattctcttttggttgggtcttcagttatgtactgttttgtttccaaaatgacaggatggataacttgaaatttggacagtgcccacttttgttgcacttcatgacattgtgtattgtttaaaacttcaattttagtcacactttagctgacctagcaaaattcagcggttgtgcaccaagagacgccttcaattctagcggctgatgctgtgtttctggtaactgactttgtttactgctggtattcctggc

SEQ ID NO: 126866 - DNA, 288 bp, Zea Mays
gggcgtctctcatgtcctccttcactgcagcttcgcgtgcacactctggagctcccttggcgtcgctcgacctcctacgccccctgactcacttccacgcacggagttctcgacgttcgtgctgctctgcaagagaagaaacgccgtggtctttgatggagttcacccctccctcacggtgacccttcgccaggcaaggacgaggctgcgctgcaggcttcgtcgcgccgactttggtgtcgcggacctctggtgtcaggcatttgccgcggcgatgccctgactttt

SEQ ID NO: 126867 - DNA, 398 bp, Zea Mays
aaattatacaagaggcagaagaacaagtacgtttgataagggagaacttgagaactgcgcagtcaagacagaaaagctatgcagatacctggagaagattgttcgagtttaaggagggtgatcatgtgtatctgaaggtgtcaccgatctggggtatgcggagattaaagttaaagggaagttgtcccctcgttttattggacccttattgatcctaaagcgagcgggggaagtttcctatcaactggaattacccgtccatcttgcggatgtacacgatgtcttccatgtatcccagttgaagaagtgccttagggtacccgaggagcagctacctatggaggatattagcgttcaagatgacctgacttatacaaagtattctatcaagatccttg

SEQ ID NO: 126868 - DNA, 437 bp, Zea Mays
gggccgcatggccagtccccctggttgcgtgcgcgtgggactgcatggtgaggcacctggtcaggccggcatccgtcttcctcgccgcaacgaacgcgcatgcatggcgggcgcttccttcttcctcggatccttacaacggacaccgattgcctcgcgccatacccgccgcacaagaaccatggactttggtgaccacgactccgcgctcggacttctctggccccataaagcgtgggcgataaaagatgtgtaccggatctccccctccatcgcctctattcccctcgcctagagttggccactgcacttcacccgtcgaatcctagggcactgcggttgccgttcctccactccatcggcatggcgctttcatggggagctgcgcgggcggcggaacatcggcggttaacgccggacaccatcgctggtgagcc

SEQ ID NO: 126869 - DNA, 377 bp, Zea Mays
cttgggacagctaccaggcgtagtggattatggtatatgtaccatgaggagacaaatgatacaagatgcactatgttggcaacgaagttggaagagaaggaagttgtagtgatgcttttgcattgtagattcgggcatctctcttttgataagatatgcaaagtttttcccgatgtaatgtgtggggtggataaaagcaagctattgtgtgatgcctgtgagtttgcaaaacacacgaggacatcttatataagtcgaggtatcaggagtatatctcctttcgtgctagttcattctgatgtttggatgtgtcctgtgacttctattaatggaatgaagtactttgttacttttattgacagtttttctcggatgac

SEQ ID NO: 126870 - DNA, 648 bp, Zea Mays
ctatcacctaggcgcttgaatatcatcctttgaaactcactgaaatcagcctggcctactgagacttcgtcttgagaaagtcagattggttgggtcaaattgttgatatcatcatcagactccgcagggaactggatatcatcaaatgatgagctgggttctgcctggccatcaatgctcttctccaaactaacaatctcagctttggcctcctgacgaagcatgttcaacctatcctcgtactgttggcgctgctgagcatattcttttgacatttgtaactggaacatcttctttcacttggcagcgggcaccggctttttcaaagctttgatgttgtccttcagctgtttctggattgcagcctgtatccttttctcctccgcttcaaccttcttctcggcatcagccttcttcttcacagcttcttcagctgcagcctttctcttaatctcagcttcttcggcctcagcctttctcttattctcagcttcttctgccttcttcttctcggcatcagccttattcttctcagcttcttcagctgcagcctttctcttaatctcagctttttcggcctcagcctttctcttatcgtcagcttcttcttccttcttcttctcagcatcagccttcttcttctcagct

SEQ ID NO: 126871 - DNA, 304 bp, Zea Mays
ccttaggcgccatcacaaggggttgctgcagtagatgaggaacccacttcgccttgagattttgcatgcgctccttactgctcttgtgttgtatcatcaaaggtttggctactagcggtgagggtctccacagctgtaactttccctcccttttctcacgcatcagggacgtcatccttcttaggtgccgccggatgaggttgctgcatcaggtgaggaaccctcttcgcctcgcttgagatttggtgtgtgctgcttctctcgctttctaagactatccgcagcggttccctctaaattttcc

SEQ ID NO: 126872 - DNA, 405 bp, Zea Mays
tcaaaccctgagtgagaaactagggcaccaaggagccaaagctgaatatgagtggcagcctccctgtaacccatccgtggcagaagcgtccgtctcatgagctgatatagaaacctggccgctgtggtgaagtctgccggagaacgtcgcgacccatctgagaagggcggtcggaacaaagccgcgatgtgagctgtaccaggagcaactccgccgtgagggcgacgaggagggtcagaggtgtcatagcacatgctgtgaagacgagtcgatgactcgttgaatccaaacacctgacgaatctgactggcatgaatggtaacatcctctcgctcaaatcggaatctcatccagtggtgatcagggtcgatccatacagtagcatagaaaactcggacccattcc

SEQ ID NO: 126873 - DNA, 308 bp, Zea Mays
ctctagcgcaagcccactcgtggctcactcgcttcttcggtcatctactgaccagtaagtcggtgacctaacccgcccgctgctgcgcactttgccttctcatcactcatcagctcgtcgactcttcgggatcctacacacaacgttgatattttgcctcctagtctgcaccagcacatgggcaagctgttggtgggaccgtggcatcacttgtccctcgctaactcactagattcccaccacgccattgcaacacgacaatgggtgtcgcttgtcgtcaccatcatctatcgccacctcgcctcctg

SEQ ID NO: 126874 - DNA, 297 bp, Zea Mays
gtcgggagccgaaggctgcagtcatcaactaatcttcttttttgtatagttccctaaaatcttgttacacataacttcgatcgtgtccagccattcttggcagggttccttgaagtgttttttgaacttaaactgataaggcagttgaacgagttcaccctctttcttctcttcttcaagcttcggcataccccacttcctcagcgttgggaacactctgttggctaggtattcctggactaagtccctagacccaatgtgttcagacacaattctaaactcaaaaatagcatcttg

SEQ ID NO: 126875 - DNA, 431 bp, Zea Mays
taagtttgggcctgcttttacagagtttactactgagcaaagctctaaagatgcaacaagacgacaaagaaaggaaacatgaagtcattgtcaagggcttagaagataagatcaaagagctcgaagactccttgaaggagaaagagaaaatgcatgttcagccaaagggtcccttgccgaagcgcgaactcagaacaagaaattaagcaaagacctgtcaagcactaaagcacttttgaaggagaactttaatcagttcaaacaggaaaacaaagctctgaaagcaaaacttgaggttgaatctgagaaaaattcgaagcttagtgaggcggtgaaggctttgaaagagagatgctttgagtttgcaagctgatgcaccgctcgattgaggagtatatttaattcagttggagctgcatccgaagaaacca

SEQ ID NO: 126876 - DNA, 509 bp, Zea Mays
cttacttggaatgttcctcgaaccaccttcaatggtcgcaccattaatgatggcagttcaacaataattctctcatcagcttcgctaggcacataactaggtgcaagaactgtagacctaaccaaatttcgatcagcacaaatgtcagaagttcttgaacctatcgatccttttaccgattgttgatcagctgctgaagaatgttgaagctgatcgtcatcaacactgctgcgagtagtgtcagtttctaactgctcattttccacatttctgtcattcatcgacatggcatcagccataattacagaagcagatgatggaagagtgcttgttaatgaagaattagcatcctcagagttatgttcatttgactgtgcagaagtattaagaagcttccggtcctcataatcagcagctgcacctaaatgatcacatcccttgtaatttcttttcacaaatcttctcatccttgaagagctttcagtaaaatctaatttccagaaaacctg

SEQ ID NO: 126877 - DNA, 609 bp, Zea Mays
accggtaaccaagtgaaatgtcctatacgtacctacggatacagttaaaggaggtctagcctgccctgcagctgcggatgactcgtctacacaataaaccaaacaccggccgcactctggtcaaaaaggaggtatttctagccttccctgcagctgcaatcctagactcgtgtacgcaataaaccgaacaccggccgcattctggtcaacgcacgttgagagcacggttgtacacgggtagacaaccaatcacgtagttagagattgttctgcagcctggaagaaaagaaatagaaagctttgagcagttgagccatttactacttgctagttgctacgccaggacaattatttacaatacaaaatatgatttatacaacacaagactctaatgagaggttttccagcaccatttacaagaagcccaaaacattgccctcgctggacagaaagtgaggagcctctgacagtaaatttctctgcatttccatcttttggagggtaaactttcttaatgttgtcaattatgaccgaataactagaatctggtggttgcaacttgcaagaatccctctccctccctccttgtgaaaagaaaagagggggcac

SEQ ID NO: 126878 - DNA, 480 bp, Zea Mays
atcaaactatgatggatgtcgcgataaaatttgcctccagatcttcaacgaaagagaggtgaaggacgcagtagtggagctatatcgatcgagatcgtgaagccacccacaaccgacagatacaagactacttcaatgacatgtgtgtttaccctcagctctacttttgtcgaaggtaccatacgcagaggagtctctttcttcaaatcttggagaggttgagtaagcatcccctatttcattcttaaaaccgatgcactcaactataacagtttcttcctcacaaaaaatgcactattatcctccgtatgctcgtctacggtagcgttgttgactccactaatgagtatatcaaaatacgaaaaatgttgaccttagagtgcctcaaacgtttctatagaggtgccatttcatattttggtgaggggtatagtcatcatcccattattgatgatcttagatggattttagctaagagag

SEQ ID NO: 126879 - DNA, 782 bp, Zea Mays
gccgaattctaacaggggaaggacgacataaattgtcgccactatgggaaggaccattcatggtagcagaagtcactcggccaggatcatatcgacttactcaaatggatggcacggaaatagggaattcatggaatatagagcatctcaggaagttttacccctagctagatttcaaaagctatcggggcagcattgtattctgtaatgggaaaagtacatcatcaataaaaagacttcattctcaaaggaactcgacctacttattgtcaatctgcacgcttacttaactcagggtgaccactataccctactaacggagcaatcaacttaagtcggcaatgacttaaggcggtgcgacatgctcacgcttacttaactcagggtgaccactataccctactaacggagcaatcggcttaagtcggcaatgacttaaggtggtgcgacatgctcacgcttacttaactcagggtggccactataccctactaacggagcaatcggcttaagtcggcaatgacttaaggcagtacgacatgctcacgcttacttaactcagggtgaccactataccctactaacggagcaatcggcttaagtcggcgatgacttaaggcggtgcgacatgctcatgcttacttaactcagggtgaccactataccctactaacagagcaatcggcttaagtcggtgatgacttaaggcggtgcgacatgctcacgcttacttaactcagggtgaccactataccctactaacggagcaatcggcttaagtc

SEQ ID NO: 126880 - DNA, 408 bp, Zea Mays
ctgatctctcgtgccagtaactttctttccctccgaccgccagcacatcttcgtgaaattgagcactgccgcccctagaggctataaattgctgcctccgtccgctccactaggtaattgcgcacccagtgaagcaacccgtgcctcagatcgtccaccagagcgccccaatttaagatttcccccaaattggtcaagaacaccgcgtgtgtgagctcgccgcggtcagcccgtcacatgtccgatcacgtcctccttgttcttgttttagcatccctgtgtgcttgtggtgcttctcgacccggtcaattaaactaagactccatatatcgccgggaacgcgttcggttgtccgtgacacccgctgttaccgtggccagaacaaattgggtagccgttcgtgaaatt

SEQ ID NO: 126881 - DNA, 295 bp, Zea Mays
gagggagctcgcagggaggttgttgcttgcttgaggaagaagaaggggaggagggaagggtgccatggctggggtgcgtggaacagggcagctcgctggtggctgttgctaccgtgaagaagaagaggcagggaagaaagaaggtggcggctaggaaaaatggaggggtgggagtgcaaaatgcctccacttgctaggagagggctcctatttatagaaggggcactagggttagggttttctcatgggccaaatgggccgggctggaatgggcttggcccaaaacacgtactcg

SEQ ID NO: 126882 - DNA, 553 bp, Zea Mays
cgttggcacttgtctagtagttactactgttgaaagtgttgttgactaatcattctctttcatggagctttgacaaggaaaaagtacatcaatggctgttcagtcagcttgaagaaggttcagaggtgcatgttgctgctgcgcttgtatagttgcaggttgtgtgaataacttggctctgccaatcttcccaacacttataaaatcttaccgatgaactaagttgatggcatatgccgtatgtaaggaccacagaccgatctagtattaagtgttgagggatcggtacgttgccacagtttttcactttaggtttttgacctgatgatagggttaaagctgttgcctgtttccattgaaaccatcttgggacttgagacccttatctggagacaaaattactgccttttttcagtgtagttgctgccactgcttcagcactatccatatgcgccaactcccaagcacgtacttgatgctttgtcttgtgtacgcagaatcagattgggcatctccacagcagcatccaggccagcaacaaacatgtaccacc

SEQ ID NO: 126883 - DNA, 427 bp, Zea Mays
ttggtagcatataagtgagtcatggaataaaatgcatttctgggttgccaaaagactttagccacacaaataagtagagcacagtttgcagccgtgcgatgtagcaaaaggtttaacaacgggcagttgatatatacaaaagagtaggtttttcttctgccattacacagtacaagttgctaaggatgaacatccggggaggaaaggtaacaagcacgattttaagtgagatgcattcacgttggccgccagcatatcaaaagcgtgataggcgtagcatcctgatcaaagttaacctgaaatacagttggacaatattaccaaaagaatacacagagtaaaaaactatacaaaatactgataaaactatattaataaagatgagacatgcaaactatgaaatttgaattgattagttaccaaggca

SEQ ID NO: 126884 - DNA, 508 bp, Zea Mays
ttcaagtggttctacatgaaaaaccctagggggaacgcaccatagttcaccggtcagatctctgtgtccaagcccgagtggaacttgtcgcggagaagaagttcaagccagaaatcgaatacatactggatgccatcgccaagcagtagaggcgggtctcttcggtgtgaggctgatacacaccttcatgtagcggcgtctccagccgatcgcggctcgtagaggccgatgtggcggttcatcgacgacaacgactccgatcgccactccatcgtgaatcttgagaaggcggaggtcatggcccatgtcctatctattacaacgggagtgacgtcggatttcttgggagagggggtcccttgtctttaaaccacacaaagttgagtgatttggtcagtttcccctttcttcctactttcctcgagagatttgcttttgcaagggactcatcgatggttgcactgcaacctgcttgggaccgtcaaagcctcccttcctcctatccccg

SEQ ID NO: 126885 - DNA, 644 bp, Zea Mays
gcattatctttatggcgaggcttgtgacatttacaccgatcataaaagtctcaagtatattttcactcagaaggagctgaatttgaggcagcatcggtggctcgaattgattaaaaattatgatttgtctattcattatcacccggggaaggcaaatgtggtggctgatgcccttagcaggtccggggttccaaaagtggccttgcagttgattgctgatctggaccgtttggggatcactttgtgctatgtcggcacctctagtgaggagactcgtatgcttattcaatcttccctcatggagagagtgcgtgcggctcagcagcaggatcgtttattgcaggaagctcgaaagagggttggcaatggtaaaccctgggagttctccatcgatgagaatgatttggttcgtttcaggggtcgcctttgtgtgcctcagaaatcagaggtgaagatggatatattgagagaagctcataaaacgccttacaccgttcaccctggcaaaaccaagatgtaccgagatctgaagcaaaacttctggtggaagaggatgaaggttgacgtttctaagtacgtggccacctgtgaagtatgtcagcgtgtgaaggccgagcataagaggcctgcatgtttgctgaagc

SEQ ID NO: 126886 - DNA, 387 bp, Zea Mays
actagtagagatcttatcatcgatgacgttcgtattgcgtcacgaaatatgcaggtatcgtcacagataaagattggtgacgaatttgtgatgattccaatttggtcataggggtcgcgtcacatttgttgtgttgtgacggactgcccattttcgtcatcgatgtgtatccattctatgacgaaatacgcgttgtcatggaagtgaattcattctatgacaatcaggtttggtcatggatgaaggcacttttccgtcataatctgtcgtctgcccgggcaagctgacggcatcgttaacgtcgtttgctttctgtgatggtacagtatcgtcatagatagagctatgttttggtcattaacagccgtttggaagggtcccgatggc

SEQ ID NO: 126887 - DNA, 660 bp, Zea Mays
gcacaaccgtggcccaggttcaagtcgtttggtgaggtatggatgcagctatggcaacctagaaagacacttctactttgaaggaacactttccatatgcgccagcttggggtcaagtggcatccaaagagagggggaatgttaaccatgctatgagagatgaggtggagcgcaggccaaccaagaggacactggcacaacgaagaagcatcaggagaaggtagctgatcaggcgcgtccatgtcggaagaggtgaggcaacacatcagtaattggacccaaatgggttgtgtaattggcttgttgggctagggctgtgcaatagcttatatgcattcgctagtactgtaaaaggtatcgatgaattaatccaaaacaacaacacgaccgcaggttgtcgtaatctccttcctctatcttcctctccacgcgcgagacctccctaactccccacccatgtgctaagattgtcggcaacgcttgctgctggcctccccgtcccctagcactattcacattttagctccaacaatcacacactacacgctgcaacggctgcccctatgtgtgctgcagtggcaggggatggagtagccgtctactagaagcaggggagcgccatccggcccccttgcctcggtacctgtgtgcgctattaat

SEQ ID NO: 126888 - DNA, 693 bp, Zea Mays
gtcggtttaccgattagaaatttttggtggctttggtggttcacaggcaatttcattcaataggtctaatctggtgaaggctataagttttagttcagattgggatggtttcagtttctgattcggaattggtgtgccatactgaagcttttccttggttttgttgatatgatatgaagttgcatttagggtaacttgttctagtcttagggtagatactttggccttatcctgccgcgttgcatatgatatactttagtgactgtatattgtcaaatttgttgatttgaattgtttgcattcgtaggtggtatagtcattccactttttcctgcacttttaatctgtaataatatctcaaacacgcgagaactgcgtatcattatattaacaggagaaataacggtccaaaatagactaagaacaaaaacaatcctctcaaggaggccaccaaagaaagtataaaagtgggccataactaaagaaaaagactaccacaaactacaaagacaagtatctaagctgagagcagggaaagccccttggctccggccatgctccaagccacaatctcctctccagccagaaccaaggcctggaagttttccattaaagacgcaatcgtttctgtgcttccaaatggcccacgcgaccaggaggatgagggagttcaggccattcttaacagaaccg

SEQ ID NO: 126889 - DNA, 562 bp, Zea Mays
atagaaaacgagcgtcaccatacgttgtggccgggtcgctgatccgtcggactccagtgccagtgccagctatcaccgcacgtattgcattttgatgagattgccgcatgggaccattctaccagaagctcttcgttcctctcgcatcgtaacaaactggagcggaaaagctgggttctgaccttggataactgcctccgatgtcggctctataggatatatgagccgagtttccgagcacatccctcccatatcctctacctgactagcggtagcggtggaaaaaaccgagagtgtcgttgccatagaatacatgagagggagaacctgtgctcgccattgctgcagagaggaggagagacgtagcgccactgccgtcgagcctagcacaaaatctctacgaagcgggtgacgaaggaactttgtcgagcgcacgcacaccattgccaggccacgggaggtcgaggagcgcaaagattccacactagtgtgccgtcgtcgcggaacaactccacttcatgagcgggccacaatattgtattaggaaccggtaggatttccc

SEQ ID NO: 126890 - DNA, 487 bp, Zea Mays
cttttgtaaagctgtcgatcaaaggggtatctagggttttcggccatctgatagaaatccggtggtccggattagacccagcccaccacgaatcagtacgcagtgctgaccttcagatcaaagtccgatggtcagattttaatgaaccgagatataacctagtccgttcgatcccaatctacgtctgagatccaataacccgaaccggccaccaccacttttaatctacgccacacttaactagatcaatggtcctactactttcttctacctctgaccgactggccgccatggcacacgccagcccactacggcgcacgacatgcacatcggccggggcacctagcccccacgccgactggtgcaatggaatctatgaagaaaagcgaagcaactaatgtgaatcttaccagaggtaaaggtgccagagtgcagcccatggaggaaagtggctccatgctgagtacgacagtccgcagggaattcc

SEQ ID NO: 126891 - DNA, 280 bp, Zea Mays
tctatgttgaccagatagttcgtttgcatggaataccaaggactattatgttagacagaggagcacagttcgtagcacgtttctgggagcagctacaagagtcactgggaactcaggtgataaggagctcagcataccatcctcagacagatggtcagacagaaagggtaaatcagatttttgcggacatgttaagggcatgtgtgttgcactatgggaagaattgggataagtgcctttccttggcagaattctcttataacaacagctaccagtccag

SEQ ID NO: 126892 - DNA, 810 bp, Zea Mays
ctagtggtttagacaggcaacatagagcaataatcatagcaaacttttgtttaagaaactgtggccttcagtttgcttatgtaactctacttggaaaaatcaatcctgtagaaactacaggctaggagtgccaggcacaaaacaagccaaaacctggaggccaaatattcaaacgttccaagactaattgtgatccaacaccacatctaattctgtaagagggctgaaccagatctaggagctagcccttaaccatccatattcatagaaagaatttcaatcgaccaagttacagcaaatccaaaccccatgctgcttcaatactcgatcccaaagcttggacaaaaggtttctctaaacttgctaggacgataccaggtgtttggtgtggctttcaaaacttttggggatagagaaatttgtgtcaaaggttaatttgggcacaaaccaaacacacatgtgacaagctaggctggagaaatctaatgagtaaaagttcttgcaaagaaactagagccagattaattctgtggagacgtcaagataattcacatcacctaatacatcgattcccagatctatttctcctatggcgcgattaattagttgtaagttcaaactaccagctaaacactgaaaaggtaattctactgaaggaaacctggtaccaaaagctataaatctagacctaattgtagtgaaggaagcttgaataaacacgtaagttttggatcaaaagttacacatccaagtgaacaacctcacaggaaactagaacagaaatatgtatcattggtatcaatgacgaca

SEQ ID NO: 126893 - DNA, 1756 bp, Zea Mays
ctatggtcctagccgcctccatttccattccggtaatacatttttcttatcacgtgtcttacttcttgattgattggagtctcttttgcaatcacggtcattgtgcggatccagaaaccggtgcgtttgtttctcttacactgcacttggaggtagactaattttcaggacaatgtaaaggtgtggtatgaagtggagggaggcaggaggtttacttaataacaaacagatcaaatgcgtgatagtgtttctgcttaggttctgctacgggaccagtgaccagcattccaatgccttgccaaatttttttgctgcatatgttaggccgtttggtcatgcataatgtagcatgaattccctcgcaaggtgcttagtggagaggcgactagtatatgacgccaaacatgtggtaccatggccaattttccatttggccctctttattctttgagttaagttttggctgtgaacacgcatgcagacacaatgaatctatgtagtgcatactgagtgaactttagagatctagtgtaagtatttccgaggtcacatataattttcctccttttaataaatgatatctagagataaatggagcacattcttgattctataagtttcgcctaacccaccccatccagatctttgtatcttgacgtcacagaactttctttggttcattaagctattagtatctgcaaatgcttaccaaactattttaggtattagggaacaagataacaacttttgcttgatgagtcaaagtttgagagattgattacaagattaaccaaccacatgtttggtatgctccatttgatttttgtttcagatagtgtgtgctgacagtgggttgtcgaagtatctggtgtatctactgcactactctgtagcatcagtttgacatgttcagcccgttaccgtggcaggactcaagttcctttgcacaatttacatggtgatgtcccttctggttgttgtagccttgatattcagggacgcttcctgtgttttatttcttattcgggactcttgctcgtgttcattgccatggacaacgtagctgattttggattatttattgataatagtttgccttgtctcagtttcctcattggtttttgagtttgctaatacacctgtataaggatacatggcaagttaatagttcttttcaaaatgtaacatgctgcataataagttcttagtttctaaatgggcatacataatacacttttttcgcatcagtcttgtgaccttctggtactttggtttcctccctgatctaaaagaatcataattgcatcacaaagtgtaatttttcttgtttataatggctgttgttagataagtaaaacaccatggccataatccgctactctgctttgcttcggcttacttgatgtgatgtcttttgctgagttgtccatttgtgaattcaatatatatgtagacgtaggtagcccctacatgtgtccttttcctttttgcatcttgcactatttaacttaacagaagagaaaggaaagaaactttgaattcttatccgtatcaaagcttttctccaagttgtatgccgtggagtaaaagagagcagcaatagttgggtctttgtggtctatgcactaccttattgctcaattagaacaaaatcttaccttacttatttgcaggagcagtttcaacaagtagctggctaaaaaggtctcaagtgcagagcacttatcaacactttttttatttaccttatcacaca

SEQ ID NO: 126894 - DNA, 445 bp, Zea Mays
actgaatactcggactcagatacagatcgtatctcaacacttttagatagatcgaattcaaatacgaatagacaatatatgtaccattaacattcagtggcggacagtattcctccgtcaggctttagaggactaggtgggagccggctagttgactagggagactgttggcttgtgaatttttctttctacaaactagattaacgtagtcgtcggcgaatagagtgtggatgcctagtcaggtcagaggctcaaaggattcatagcaaatctctctcgacattgggcctggctttagtcttctgttattgtaattagtagaggaaaagaggggaatacccaaaggaagagccacaggaacaagataaaatgtggcaacttgtgaactgatccaagatagataattatgtatttttggacaataggttagcatagtggaatggag

SEQ ID NO: 126895 - DNA, 369 bp, Zea Mays
actaaatagagaaaaccccaaagcttaagtaaaatggtcataaaatgttcctaagaatggacctacattacatttacacccctgagatatcaaaaatcctatttggaacccgggaaaaccctaagcctaaaccctagggggttaagtgcaaaattagtccacttttggactaaagtgcaaaaaccatgttaataaagcatcttaagtactatggttcacaaatatgtggatttgtaagctaaaccctggattttggacccatttgcaaaaaggaccccatttgggttctatgctaagtctgaaatcagtgttataagctcaactttggagctttataactttcaaatcagtgagaattcaccttagggc

SEQ ID NO: 126896 - DNA, 295 bp, Zea Mays
acggcaaaacctgacaagggaggtcgggcgtgtcggaagggaaccactcgagtggatcccgcgcccggtcgcagactgactcgccataagtagccgaccacacttaaccacgtctagagccgggtcacagcgccgtgttggtccacttctcactcatgacctacgagcacctcgggccacatagcactcatccctacgataccgaatggacaacagtgcattaatggccagcgcacccctcggactacgacacacgtatggcctatcggactaggcttgagtacgcagtcctctc

SEQ ID NO: 126897 - DNA, 1062 bp, Zea Mays
ctccttgatagccttttggacatcttcgttccaccaccaagtgtctttaacttcccttctgtttccttgactcaacccaaactcgtctgaagctatctttcggatgcatgtcgccatcttcctccacattatgtttgagtctccctcttctgcccaagggccctcctcgataactctccttgaaagtttgggccacattccctttaagcttccaccactttgttctagtgaccttgttatgcttattccattgtaaacgaatcttaaaacggaagtcagctacgacaagcttatgttgggttaccacactctctaggtataaccttgcaatctaagcaggcatgcatgtcctcttttctcaagaggacgaaatcaatctggctagtgtgttggccactactgaaggtcaccaggtgggacttcctcttcctaaagaaagtgtttgctataaacatgtcataagctagggcaaagttcaggatttcctctccttcttgattcctagtcccaaagccgaagcctccatgcacaccctcgaaactggtgctagatgtacccacatggccattgagatctcctcttatgaagagcttctcgccaactagcacactactaaccatgtcctccaggccttcccagaactccctctttgagttctcattaaggcctacttgaggagcatacacgctgataacattgagaaccaagtccccaatgactagtttgactaggatggttctatctcctagcctcttaacatctactaccccatgtttaaggctcttatcgatcaagacgcatactccattcttgtttgctgcagtccccgtgtagcacaacttgaagcatgtaccttccacttcttcgccttttgtcctttccacttggtgtcttgaacgcataaaatatttacccgtctcctcaccacaatgtcgactatttctcgtaacttacctattaaggaacctacattccaactgcctacatggaccctagttggctcgactagcttccttacccttcgcacccgccgaggaagatgcaaagacccttgctcatttt

SEQ ID NO: 126898 - DNA, 481 bp, Zea Mays
ctaactatacattgaacagtaataactacagattgctcagtaacaaacagatatttggccgaccattgttttggtgtatgttattttttctaggaaaagtacaacaacatcctgctcagggcacggatcctctacttcatattgtttcatttcatgaacaaagcaaaaatgcatttctctattttcctagagaagtatgatcctctgtcgctcttcccatttcaacacgtgaccagctcagctccagttcgttaaaaacaatattatttgtgccatatgtagtacaacaacctaatgtgatgggatgtaaaaaacacatgcaatgctctcccctgcatgggttttgtgcacttttttgtaaacagatactatcgaacagaaggggaattattcggtttattactgacaaaattttcggttattactgaaaggacagtcaattttttatgaagaaatgtgtgtttgttaccgacagattttt

SEQ ID NO: 126899 - DNA, 275 bp, Zea Mays
gctagatgcaaggagcctgctgtctgctggtggggctgagatacccccggatagtgctcttcagatcattcctgctgatcttccctcgtcgagccatgactcagctcctcctgccctaggtctaccactgttcctctccaatcttcaggtgagtcagcctcttgttttatatatgttgttcatattagcgaattatctttcttctgcttatctgtctatgatcgcaggcttttgttgatggaatatctgcccagctgagatcctgcggtgtcgct

SEQ ID NO: 126900 - DNA, 340 bp, Zea Mays
ctccttaatcatgtcatgaacctcaaggtaagaagaactctcaaaccctaattaatcttaagtggaccatttaagcacataaagggcatttgggaaaagacttgggagaaaaatacaaattttggtaaaaaccaaataacaaagttttagtacactaaataaccaacaaaatatagtaagaaagttttgccatttgaatttttcaaaatccctaaatcagcccctaaactaatgcacttgggaaaaattcagaaattcagaaatctgaatttcagcccctttccaaagatcaaccgcgttctatgcttttcaaaacttaaatcaaacaagtccaaatagc

SEQ ID NO: 126901 - DNA, 290 bp, Zea Mays
gtttacctgcggggtagttgcatgcttcgtgtgtggcggttcgccctcctcgcgtttcgggtcagtttgtatgacatgcgagacctagcccccgtgtcgtatggtggaaactctggagcacgtcgggggagacttcgcccgtgacgctttggggcgcaagtggggagatccgcctttaaaaagggaccgatcccccgggtagtagccatgccttcgcactcctcgctttcatcgcgtcttcccaccttccgagcccccagatggggtgcacctgtgttgccttcttcttg

SEQ ID NO: 126902 - DNA, 344 bp, Zea Mays
gctgatacagacttcattctctttgggcacatggctcaaagaattgtcaaaaggccttgcgatatgctcatagcgaacactccatcaggctttattccagacgcaatcacaaagctgcttgaaaggacgttcatttggaacgttagcttctctgggcacacaattaactctggaaacgtctgcttccaggtcaatgctactgtaaaggaactaggcaatcaaaatgttgacatttcaacatcaaccatagggacacaccagtcttcgcttatgttctcacaaggtgcaagcagcagcatggaagacactcctcacaagacagacaccttgccttcacctctgac

SEQ ID NO: 126903 - DNA, 450 bp, Zea Mays
cgaactagtaaaatttaacaaattaacactgaaatgaaactgctattactctctgaaacttgagttctcttcagcctaataatagcatataagaatgctaaaatagtttcttaaaagcatcaatttacatatatactttttgttgagtatctctgctctgttcccgaactggaatttctgtagagttgtatctgcttggatggaacagaatgaaaagtcttcttggacaagtacgacgtccataccacgttaatcattgggtataacttatcttggaccttaatcctgattcgttggttgcatagatttgatatgtttgattgctggaagtgaccgccgtacctttctctataaaaataaaaaaagaggatgttttcatcttggacgcatccaggaccccttatcattgtgagttgatattttctcaagttatcttacagccgagctact

SEQ ID NO: 126904 - DNA, 716 bp, Zea Mays
tgcaagaaaaaagtatagacagttgcaaagtatgtgtactggtgattgcaactgctgatgatggaaagttaaaaattatatgtatgaaaaagtgggttcgaaaaacatagtgggttggggaaaaggtatgctaaccaattttgctcttgacaaatcatagttttcgcactcagacatcagatgattccatacatgtatgaagtcttgtgtctcagatttatcagcgttgagtacggcttcacacgttgagacattgaactgtatgtgttttccagtttggagaataaagaaaaaagagaaatgattaatgattaaattagtttaaacacataaaagcaagacaatatacaaaaaatacatggttttggagaagaaacttacataaaaaccagtggtcagaaacactttgtatccacaagaatcgaccttgtgcacaatatcatcatgtcgcatgcagtgcacaaaaaagtctatgattcctgactcaccaagggtgtcattagaaaaagaggttaaaatttcctcgccagtgagtccaacaagaaggccaaactccaacaaaattctcctgcagcaacaaaaaaaaagaaaatggatggattagtgagaagaacaagaggatgtgtaactgctggtgtgctgtgattgcaactgctggtctagtgtgattgcaaagtactgaataactctgggaaattctgttaaacaaatatgat

SEQ ID NO: 126905 - DNA, 537 bp, Zea Mays
ttggaatggaggaagtataaggttttttattgttagatagagtttactttttaaggtggaagcccatttcattgccgtggtggtgttcacaaactgaaaagagaagttgatgttcttgttagttctaagttcatcggatggctcccaacactgattagtttgtttatgaaatactctcctttcttccagttgacttgtgagttgtaactcttgcttcaaagtacacatatagagggcattcatcccaaagaagtcaccattaacattttttgtttgattgctgttgagtttgcatttaaaagtttggaagtagcatatattagaatatacaatgctcatattaacatggttctctgaacttagctagagctttgctgttcgctagcgaagagccgaagagttgcagttttgggaggctggccagggcattatctacttctttgcccatgagctacttgagaggcatggtcatgttgtttttcttgtaataggtgtgcatgttttgattgaacctctagatcaaggtgccgtggtgtg

SEQ ID NO: 126906 - DNA, 354 bp, Zea Mays
ttaaaagatgacatgaagaaaatatacgaggaggtccaacgacaaaaagatcaggtgctcaaggtggcggataaatggttcctctcgcacttcagggtggattgccaccagaagaccgtccaagaaagggaaatagacgccgattacatgtcatccgtgctacaacagctccccacaataggtgatgccaggtcagtcgatgatattccatctattaaaatttcttttgataatcggattaaaagtatcacagaggatgtagaaaggatggcgcatgcattaggaaaaactcacatgcctagttttttatcacataaattaggcaccaaaacaaatgcgccaaacacattggca

SEQ ID NO: 126907 - DNA, 559 bp, Zea Mays
ttttttcaaccatactcctgatagctctttgcatatggaaccagtggcacgggctcctcaggccagcctcctctctcatccaaccgcaggtaaatttggcttagttgttctgattggagagaagtggatttatgttcgagcgagaggacaggggcaaggggcacgctaggagacccagctggtccagcagcttcggtggccaccgtggaggcggagtcggtggcgcaggcaagggtggcgcgggctcctcaagccagcctcctctctcatccaaccgcaggtaaattactgcctctgattacagcgacaaaaaaccacaactgcagacaaataagctacactgatgcaacgtcagtcaccgtagcatgtttaattttaatacaggaccttgttttttctcatctcttttttcctgtgtgcttcagtagttcagtgtatgcagcccctgattacagcaatctatcagaggttggattctgattgccctctgcctctgcctcgcacgattggttgatctcgccagggttgatagggttttgatgagaactttggatcttga

SEQ ID NO: 126908 - DNA, 1662 bp, Zea Mays
ccttcttgacatcaaaattcgatgtgttcagtccgattggggtggggaataccagaaacttcataatcaattttttacttctcttggcatcgctcatcgtgtttcttgtccccacacccaccaacaaaatgggtctgctgaacgaaaacaccgtcacattgttgagacgggtcttgctttattagctcatgccggcatgccactcaaattttgggacgaagcctttttgacagccacatatctcattaatcgtctccctactcgtgtccttgataacttgtctcccatggaacgattatttcaaagtccgccaaattattctatgctaaaaatttttgggtgtgcttgttggccccatcttcgaccttaccaccgtcataaacttgaatttcgttctaaaccttgtgtctttataggctatagctcccttcacaaaggatacaagtgccttgatatggaaaccggacgtgtctatatttctcgggatgtaatttttgatgaggctgtttttccattctctaatccttcatccaactctgctgagcaaccgggtgatagcagttttaatttgaacactaatcacttgcacaatttgcttcctgttaactctatgcctgtagctccgtccaatgcagcagcttcggccaccggtacgacagcaccatctatggagtgcacgccctgcgtgccatcactgacggcgacccagccgctcccgtgtgctgtgcccagcggtcagcaggcaccgtcaggtccacacggagcgccatcactgacggcgaaccagccgctcccgtgtgttgtgcccagcagccagcaagcaccgtcgggtccacatggaggtgccccgactcctgatttactgggctcttcccccacggccgatcagcatgccgcgggaccagccccagctgatttctctccatctgatcccggcactgattctccagaagatactgctgggactattggatctcctgttgatgtggataatcaacaagttcctcatgtccatccgtatggtactcgccttcggaataatattcgacaaccgaagattcgtactgatggcactgtcacatattcagtatcccgggtttgttcttcagaaccatcctcccatgtcactgctatgaagcatcccctatggcgacaggctatgcatgatgaatttgatgcacttctcaagaacaagacttggcaccttgttccaccacgagctggcctcaatgttattgattctaaatgggtttttaaactcaagcataatcccgatggatctattgctcgctacaaagctcgtttagtggccaagggattcaagcagcaatatggtgttgattatgatgctacattcagtcctgttgtcaagccaaccactattcgcctactcctatctttggcggtttctcgtaattggtttattcgacaaattgacatccaaaatgcatttttgcatggtgttcttgatgaagatgtgtacatgaagcagccgccgggtttcgaggattcagcacatccaaagtttttatgcaaacttgataagtctctatacggccttaaacaagcgccccgggcatggttctctcgcttgagcggcaccctgatacaactgggatttcaagcatcgaaggctggtgtctctttatttatctttaacca

SEQ ID NO: 126909 - DNA, 438 bp, Zea Mays
ctaacatttagctcataagctggcagcctagcaaagttatattgtcatgcactttaatcccatcggttccaatttatatcgacatttagccccactggtctaccaaatgctctagttattactttcatgcctcaatttaatattgtttacttctcaaatctctactcctttaaagcaccggttccatgaagcgtgtaggttgctcctctatgccgcgtctcgcctaacaaactcagagagataatgatgctgacacctggataagccttatcttgcctaacaagcccactaattttgctataaatctctaatcccgccctcctctctcaaccgctccccttctctctcgtgactatgaggcgctgccgagcttcagagctgcgctgacgttggagaagcccgacctgttcctcgggaagttggccatgtgctgcgagc

SEQ ID NO: 126910 - DNA, 577 bp, Zea Mays
cctcctaagtgtaggttcttgctttggctggtggcccataataggtgctggactgcagacagacttgaaaaaagaggactaaatcatcctcctagatgccctctttgtgaccaagtgcctgaaaccatcaaccatcttttggtttcttgtagcttttccagagtatattggtacatcactcttcggaaattcgggctccacattcttgcccctacccaagatgacacaaactttctgcagtggtggaaacgtattgctaatattgtgtcaggcatgaccaagaagggggtaaattcacttttgattctgggagcctggatgatctggaagttcagaaacagagtggtgtttgacgggtcccccccccaatatcactacactattagaggccaccgctgaggaaagggagaaatggatggttgcaggagctaaggggctttcctttttaactgctcccagtaccaatgcctgagataagttgtatcttttagctgtgtatggattgtttcctttatgcttgtttctggcctccataaggaggtcctgtattcgggtccttttccgaccctatttcttc

SEQ ID NO: 126911 - DNA, 315 bp, Zea Mays
gtgggattgaactggccagaatggcttttgtggagtccctctttgtgtaccctcctagtgggggaagcggttaaagctctaatcatccaagtggcagtcctattgcatgagaactatcatacgtcgttgttacatttggactttgtgctttttttgtttatgcatgatggatgatatgagttcaactaaatttcatgtgttttggtgaacacatgacttaacttgtgatgtgtttgtggtcttcaattgatatgtgagctatgttgaggtttgatgattttgtaatgtgatttgtgtgatgtttgtgagttgcaa

SEQ ID NO: 126912 - DNA, 791 bp, Zea Mays
tgcaattgtatgagtatggatgcaaggatcaccaccctatgtgatgagttgtacaagctgaacctagaagtcgtttcctctggtgccttaagttatatttcagtggagcccaccttacatgagcagatagtcatggcacagattggtgacaagggtgttcaagtcattaaggagatgatcaaacagaaggcgaaaaaatacaaatgcttccgtcaggacagcaaagggattctatggttcggggaccgattggttgttcccaagaacctagagctcagaaagaaactattggatgaagctcacctttccaaattctccatgcaccccggcagtaataagatgtatcatgacctcagatctttatattggtggaccagaatgaagagggaaattgctaagtatatatcggaatgtgacacctgccagagagtcaaggccagtcatttgaaggtggcaggcactttacagccccttcccataccatcttggaaatgggaagatatttgcatggattttattgtggggttgcccaatacctcccggcaccatgattctatttgggtcattgtggataggttgaccaaaacagcgcatttcttgccagtgcataccacccataagacagagaagtatgcagaaatctatattgatcaaatagtgtgtttgcatgggatgccaaggaccatcgtatctgatagaggagcaccattcgtggcacgattttgggagcaattacaggaatcacttgggactcatgtaataagaagctcaacataccaccctcaaacaga

SEQ ID NO: 126913 - DNA, 276 bp, Zea Mays
ctaagtgggtgcagagcataacatagaagtgatttgtgctgtcagtagcctgccctctcctgtcatggacatggcatagtccttggggggtctccgccggtgtcatattcttccccttgcccggtggcttctggttctgcccgtcgttctcgtcgaagatatcgctgtcggcctgctatagtgtgggttttcggtttaggttcccctcgcctccctccgccttgcacctcttggcacccagatacatctggtcccctaccttggcatacagatctc

SEQ ID NO: 126914 - DNA, 361 bp, Zea Mays
attggtgcctctataggtctccggtgaacgtgtccaaactctctcaactagcgtttgacaagctttgacaaccttttcttcagttggtgctactcctaatctatcacgtattgcccgctttgtgaccaagaagaggaaatggtgcaacaccttcttgtggcctgtgccttttctaggcaagtctggttcctggtgttatccctaataggcctgcagctgcttgctcttgagcctggtgtttcaatctttcaagagtggtggagaacaacggtgttgaaagtgcctaaggagaagaggaaggggtttcaactttcaactcagtggtaactattgtgtcttgtggcttggttgttatggaagc

SEQ ID NO: 126915 - DNA, 338 bp, Zea Mays
tttcagggtgggggatcaggtgggtgctcctacagtcaacaaactataggtatttgtactagatcatcaagacatcaacactttggtgtgcaaagattccagcaatcgttggcaagtaccacgaaaatacggcaagcagtaaaacaccttggcaggtagtctgatgcgtgactgccacacgtacatactcatcaactgggttgagcgggcaactgtactatcggacctcttgctatctctattcaaaagaatacaactcggtgctaacagtgttgctatattaatcatttttttaaacttaactagattgctaacaatattagcaatatttatatttt

SEQ ID NO: 126916 - DNA, 547 bp, Zea Mays
agtttcccattgctatctcctccccacctctcgacctcaattccctccttgatgctgatcctgtcgacgtccctcctcttccccaacctccgaacctggtgacctcttttgcgccatgcgcggtctcgttgtctacgactgcgccacacgtggccctgttgcctttgcccgtgccatacgcatgcccacctttctgaccaccttcgacttgctttgttgatcccgcccacgtctaccagcgacgtgtgcgacccagtccctgccccctccttcgatgagttgcatttgcctaggcccgctcccatgacaagccgtcggtgcaccttgcagtcgccatccacaacaaccctcgctacgtccacccaatggtcacccgctgattggtcggtgttctctaaccagttgaccgcctggtgctcatgaccgtcgctgctctggctcccttgcatgttccctcctcccttagcaccgcactcgttgatccccactagcgacatgctatggaggcggagtacgtgaccctgctggccaaccatagctgggactt

SEQ ID NO: 126917 - DNA, 667 bp, Zea Mays
ctgagacttaaacgaaaaatttcctgagattatcgatgttctaggaatgttctaagtttttgccggatgatgtttccaacctgtaagcactgggggatgccttcgacttgactatgaatggaccttcccatttcggctctagcttgccccgtgattctgtctgggtggtccggacgagtaagaggtcctcttcgttgaattctcttgggacgactgcgttgtcgcaccaggccttggtttgaacttgatatttgtcgagggcctgcagggcgaggacacggtctccgtcgatgagatctttggaagttggttcgtcgatgtcggggactgctaatttgtttgttcgggggacccgtgctttaattcttgtggtgtcatggcttcagatccatacaataggcggaaaggtgtgaacccggttgcccggcactctgtcgtgttcagagcccataccacttcgggtaattggtcggcccatttgccctttttgtcgtcaagaagccttttcttgatggcactaaaaatcttgccattggtgcgctcaacaacaccgttggattgtgggtggtacaccgaggcgaagacatgcttggtgccgatggaaaagcagaaatccctgaagtcttggctgtcgaactgtttgccgttgtcgactgtgagttcggac

SEQ ID NO: 126918 - DNA, 706 bp, Zea Mays
gggagagagggagagtcgtatagaacgtagagagagatggagagtcgtatagaacgtatagagagggagagagggagagtcgtatagaacgtagggagagagggagagtcgtatagaacgtatagagagggagagaggagtcgtataggacgtagagagggagagatggagagtcgtatagaacgtataggaggagtcatataggatgtagagagagagagagagatggagagtcgtaggcagccgcttgatgtgcagcccacatgctgtgtgaagggaaggggtgccaactaggctcgcccgctactctctgtgtcctccttctcacccgttcgcatatctttacttagtcttttttccgcgtctcactaaaaaaccatatcagatatcatgtgctaattctaatcacaactgtcattcatgtctctcttgcgattatgaccacggtaacacggtaactatggcagaggaaatggcgttgtatgcatgcttctcatttgtgcgagtggcaactaagtaaacaaattgaggaaatgtcgttcggtgtacagtaatacattccctctctccctcttctctcttctctctctctctctccctccctccactctctttcctctctcttccctttccctctctcttccctctccctcctctctcttccctctccctcctctctcttccctctccctctctcctctctcgc

SEQ ID NO: 126919 - DNA, 560 bp, Zea Mays
cattttttcaaattggcggccctagtcaacctgtccaggcgactctggttgtttgcatctgatctagtcatctgcgaaactttggccagtggttatgagctatctaactcgagttccccgtgttccctaacgtgcaatcgaaaagaatatgtatgactttagttctgtaggtacagtagtagtctagtaggtgatacgtatacgtaggctatgaagtcaacgaagaagtctagttagctaggggtgtagccgtgtaggacgagttggttcggcatatgtcggctcacgattcggaaacgcggcatcaggaattcaggatcttcgatggggacgattctttcgcacgctcagacagtcagactgctttgcactaaaacaggagtttggaatatgtcggtcattctccatttggcccagccgcttattcatggacatcctgactagtctctttttcggctcctcgccatattagtttagcgttctttatattaactatacaacaataactataagagatatttaaatgcactaaaattaatagttagttgactaaaaatttg

SEQ ID NO: 126920 - DNA, 468 bp, Zea Mays
tccacggtgacagcgggcatcagggacagtcaaccgcgttcccgatgatctaagggatcctagctcaattgagttggtcggggagtatcaggggcacacaagaatgtagaaacgagatagcagggagcatgaacagacctagaggtcgcggaccacggtgaggtcaatccgagtggggttcttgagtgagttgggggaaatgagaaattagagctctctggtgaacgattggaggcaaggcttggtggcttggtgcgtgattaccctacggagcttgcagtatgttcaatttataatgggcaagagcggtggccggggattcggatgaagacgcgcggaaattcaaacttagccaatagagttccaataggactttttgcaaataagtccaaatctcaaggtttaacttgtaaatccacatacttgtgaaccatatgacttaaggtgccttactttcatggtttttgc

SEQ ID NO: 126921 - DNA, 409 bp, Zea Mays
caggaaagtggatcagagagttgccgtatgtggtttggagcctaagaactcaacctagccgagctttgtatggaaacactcctttcttcatggtctatggttcggaggcagtgctacctgctgatctcaagtttggagcaccaaggctgatttttgaaaacatagccgaagcagaagctactagactggaggatgttgatatattggaaaaagaacgattgaatacagtaattcagtaagctagataccagcaaaccccgaggcgctatcatgataaggccatacgacctcggtccttcacagtgggagacttggtccttcgtcgaattctaacgggggaaggacgacacacattgtcgccactatgggaagggtcattcatagtagcagaagtcactcagccaggatc

SEQ ID NO: 126922 - DNA, 493 bp, Zea Mays
cggagctagaactttcttcatcggaattccattcttcaccaatgtgggcttgaccatatttcttcttcttgaaatatcccttgttcttgcccccctttttgaacttatcctttttgtattccttcttggcttcttgttcctttttgtttggacaatccgctatgaaatgaccggtttggccacattcataacatgccctcttctttccttttctttgatacttatcatttttcctcacaaacttcttgaaggttttgatgaacatagctgtgtcttcatcacttgaactatcttcatcacttgatatttcgaccactttctttgtcttctggtctttgttcttcttaggggaatcttgttcatttgagatcaaggcatgagtgtctcttgtcgtgattggggcttcttcagactcatgttgttgaatctttgcaaatagttggtgaggtgtcatttcctcatagtcatcacggtcccttataattcttgcaag

SEQ ID NO: 126923 - DNA, 522 bp, Zea Mays
caaaatgtcacggtagtacagctgggcacagcagcatagatgtttgtgcacgcagtcctcgagcgagtcaggtcgtcacggcctcacgggaatggaacgcgctaacgaaatcattagcttccgctgttccggattccggtggtggtgcgcgagaccgacatggacaacatatactagttattatgtcttccttttacggacgaagtgagtcagtatctacctgatcgtgccggtcggtgtcctttttctgtttttgattggacgccatgtgacatgttgtgaggcgtcttcccacccaaaacttttacggaccaagtggggtctgtgagactgtgtgaaggtaggtttgagagtttagacagtgtttgctttacaacatactcccgtcgtccagaaggaatgcaaacggtataaacaagaatctggctatgttcttcagcactagtagggatggtaatgggcacgtactcatcgaatagtaccattctatactcgtacttataaaaaaactctatccatcgg

SEQ ID NO: 126924 - DNA, 783 bp, Zea Mays
ggaacaactgccgacgcccaccccgttggcagagtcactagccttcgtagctaggtcatcgacatcggcactgcctacactagcagtccaagctcctgcacccggaggcgatgacccagaagactcaggggatgacgatgacgaggatgacgatgacaacgaaggagaatacaaacaagtcaacaaagaagccaactatgcccagcaggactacttcatggggtttggtcctatcaccgaacattacacatcaatgttcgagatggggcacttccccaacctgctgcaagaagtgctgcacgcgctaggaacctacgtccgccccctgtatgaaacaaggcgagtgagcgagcctccccgggctttctactacatcactcgcatccacgtcagggtgatggatgcaggggataggggattcaggactctatctgctcacgagtccctgacaccactatccacctacgctgcctcggtcagcgatgctgccagacggactttggggtctctcagccacacataccggcagcagctgcaggacacgaggttcaggcatcttcctctgcgtctgagtggaggaagccagaccagcatcgttccaggtggagctggtgaggagcgcctcaacaccctagctggtgtggtggccggcctcaacaccgacctagacagtgccaccctggatctctctagggtgcacttggagctggaggatgcccatgccaggattgtcctggaagcccagcttcaaggacgggatctgcctgaagcccaggtccccgc

SEQ ID NO: 126925 - DNA, 341 bp, Zea Mays
atcatgctccaccatctgctgaacctgctaaaaattcatctcctatcagtgcctcgtcaccagttgtggagtctcaccctcaatctattgttgaaggtcgagctagaaggaagatagttcggcccaaaagactgattcaagagtgcaatgttgcttttgctttggctgttgctgaagaggttgataatgttcaggaaccattgaattactcagaagctatattgtctactgatagtgagaagtggattggtgctatgcatgaagagatggagtctcttgagaagaatggcacttgggaacttgttcggctgcctcctggcaaaaaggcagttaagtgcaaa

SEQ ID NO: 126926 - DNA, 555 bp, Zea Mays
agcggatccgcggtggcgcttgaaccacggcgggcactacccgctgcggcaatgcccaactaccccgcccagatgatgcgccaacaggagaagaacaaggcaagccagcaggaggtagctattaccgtagttattggggagattcgccaatctccgatggagcgtatgccgcggtagaggaacgtgtcgacgaacaattccagtcgtcggccgagcccttgcatgacgatgccctccaaagcacccacgcgtactaacggagctcccacgtcgctttccctggctcgggtggtggtgcagagggagaattctcgtggcagcgcggagaggcagcgcacgaggtgcgactgggtggctgttagcgaaaagggcagagatatacatgggggttccgtggactcgcatcttatagtatgccggcacgaacttccgtgagaccagggcgtggggtgagctcgccgggattcgcggagggcgccgcgcgcgttctgttggcgtgggcgatgcggcggagaaggaggtgccgacaatcgggtcccaccttccagcgatccg

SEQ ID NO: 126927 - DNA, 410 bp, Zea Mays
cggaggtcttcgctaagcactattgtttgcattggcagaaaagggcgatgagcgggcgggtcgatcagtttgggagttgcacctttaccctgaagacggggaaaacaaaggagaaagttgctgagttagccccctgtgccaaaaataaatgggttgggtggatggagaagtggttctatgtgcgttgcacgggaggcggaggctggcctcgacctagtacgatgtctccgtttgagttcgaggccttccctcgctttactgttgatgacaggggtcggagggatcatgccttcagaattgatacacgtacctgcagtggtagagacttggtggaagagtttctagtgtgcggcgtgcgactacttagccgtgggtggacaattggggtcgtggcccgcatagacttagat

SEQ ID NO: 126928 - DNA, 671 bp, Zea Mays
cttattcacaattaaacgtatacaccagggaatagcaagaaataaatagggatatctttttaatggtttctgaactggaaaatgtctgaactaaatttacacaaatccagggactagaacgcaaagtggtcatcttctaccttgggctagtctttgcgtgcaggggaggggctcggcgagtaggagcggggcggacgcgaccgtgagggcttgggcgcggtcggggtactgtgcgggcgcggtcgacggtggacggtccgggcagggcacgggcacggccgggcgaactgtccggtagggcatgcctcgcccgaacaggatcacggcggcgaacggtgagagagaggatgagggaaagagggcaagcttgggtgaagggaggagcaggggctcgactgtccaatttatagaaggataggggaaagggaagaggcacccatggagagggaaggtcggtcgcggctcaatgaaagccaataatggcggtaggtttcattaggggagaatgaatgggggagggagaggaagagccggcagcggcggtttcaggcgcggttaggcgaggggttggacgcgcggacggtctggcctgacgcaggcacaggcggcttggccgggcgtggatgcgatgcgggcacgcgctagcgtggggtcgggcatgggaacgacca

SEQ ID NO: 126929 - DNA, 294 bp, Zea Mays
tgctgctgtaggtatatcagtgtgtcgcgaaaagtgcagaccttgtgttctactacgaagactgctcagctgctgtttttcgcgactaaaatggcggagaaggctgctgctgctcatctgctgttttaagactaaaatggcttttggcctcccagacagcatttaaaggactggctgactgctcgcgtctacccaggctgtatctgaagggattgggcgtcctttggcctcccccagacagcatttaagcctaaaatgccttttggactaccaggcttatcggctgatcgccca

SEQ ID NO: 126930 - DNA, 449 bp, Zea Mays
gccttactgtatcctatttcttaacggccacgcattgtatcctatgaccaatagcactgcaattaccaacggtcacgcattctaccccagccctttgcacttccgcaaatcacctgatggtaaagttgagtgctgatggcaatgttgttttcagcatcttcatcacatacccagacttgagtgctgacggcatggccttcttcatcgcacctaccaagaatttctctgatgcacgggcaggcaattactttggcttgctcaatgaaaacaataatgggaacacaagaaaccacattttcatcagcacccaatgggaaggtacataaaagaaaatgatttaaaaaaccaagcagaaacaaactataattttaacattgcatcaggatatcaggatatggtataaagaaaatgatttgtgagaggctaaaagtaagtgcaggaggacctct

SEQ ID NO: 126931 - DNA, 385 bp, Zea Mays
agctggataaaaggactgaaaagcttcaattgcgcacatatgagcatgactttatggcaagtttacaggtgctatatggagaatctacctaagttggaagaacgtacagtctaatgcatcatatttaccaaatattaactaggagtagctcataacattaacggacatcatacattgatgtggaaaagaatatcacgcacttgacaaatagacgcctaagtggtatgtggcatctcaaacccttggtgtttgcacacatttcaataagacacttttaccatgttggtacacacaggaatagtttgcaatttcctgacaaactatgctgtgctatatgatatgcacttatgcagtaaggtttttggctatgactcaaatagaaaat

SEQ ID NO: 126932 - DNA, 452 bp, Zea Mays
tggcaaggacaagatttcattcgaaatgtttaagtcttgattcatctcgagattcgctttgactgttatatccttccttgtcgaggtcgtgttctcttccttcttggatcttggtgtcggtgtccaagttagggttatgtagttaaggtagattataggtagcaacagatagtcaataggtaggtagcataggttgagtgtgttatgtcaaattctggtttggtggctttgtgttaggtcgggctagaaaaattatgtagatcgttagaaacatgtaggtcaggctggtagattagaatcgttttttaatagatagattaggcaatctatcaagaatgtgtaggttgtttgtatatgtccgagttggtccaagacaccaattcaagttttagagtaaagcatgtaatcatgtatagtgtctaatctactagattcagctactctaagttact

SEQ ID NO: 126933 - DNA, 1111 bp, Zea Mays
gtttgattttttagtcagactggatggacctttttgcgagggcagccttcgagcctttgcacagagcaataggtcgatcgagggatgtctcgacttttggttcatacgccccttcgtcgcctctctgcgaggaggaagggggaatgcgtcacgctgccgtcgatgggcgacgagtgtgtcgtttccattgagctgctaacgggaaatccgagcgggggtccgagctcctttcgattggagtcagcttgaggtccggagacacgccccaaaggctcctgcaggtaatttgcctggtcccagacccgttcgatggggtccgagggctcgatacctccctatgatgggacaccgtcatgaatcgctaccgtgggttctcggatatgccttaagatacctcgggtcgcaacccgagccgaggccatgtacgggcgtacctatagtcatccctgactctgcgctctagggcggttttgaagcccttttgaggggccaaccttcgaacccctgatcggtattgggctcggggccctgaagtcctgtggtggttcgtcttagtcctgtcgagggccgagccttcgaacctctgaacaatatatcttttgccttttttcctcccgaagcgacacaccgaggtagaatacgactctctccgatttgctgctccttttccgaaggggtcgctcgaggcagatgacacttctttctagttcggttgccgagggaagtaggaggcgatatagtcgaggggagagggcgtaccttttgaggcggagtgcagaacgacgttcggcgtgttttttcctcgaaggggacacagtcatttaatgtgacaagatgttttgcctgccaaccgaccgtccgcggcacgcgtgctcgctggattcgaaatggccatcgtctagccgctttttgaatcgcaccttggtggctctgtccatcctataaagctgaccgagagggagggctttggaccgttaccttttcagtctcaatcttttgccttcaaacgtcgttttcaccttctgcccagagagctcttcgtcttcttctcacccttccgtttgtttcaatggcggaaaagatcatcgtccttcctccccgtgacccgtgg

SEQ ID NO: 126934 - DNA, 527 bp, Zea Mays
gacgacttcggccgtcagaaattttgtattttaccgtagtgactacacagtaaaactgcacaaattcttgaagtgaagaaaccaagtgaaattaccacactacaagctgatcacaacttcagtatgcaaataacaaatgagaggagagattttacaccttttaggttcatcaaatcttcacaggagtcaggagccatttaattatttatacacggccaccaaatgaagggggccaatgggcgttgacatattcacctgtataccggtatgaaccgaaggggtctaggagcatacacagccagcagctgacatgggtatgggcattcacgtgtattcacatgtatacgcggccagcaactggcattgtaagcatgtatacggccagcagctagaacagtatacgcggccaccagctatgacaatatacgcagccagcaagtaaaatgacattcacatgtattcgagtaagatgacattttgacagtaaagtgtatgcgtccagcatgttcgcactaacaacaaatttt

SEQ ID NO: 126935 - DNA, 1573 bp, Zea Mays
gggacatagaggtcgcccctgtgtgcgcgccgagtgtgctgcgccagttagtattaactcaaaccgactgtggccgccccgagttaggcaagtgcaagtatgtggtgccgtcttatgtcgttgccgacttaagctgatcgctccgttagcagggcatagtggtcgccctgagttaagtaagcgcgagcatgtcgcaccgtcttaagtcgttgctgacttaagccgattgctccgttggcagggcatagtggtcaccccgagttaagtaagcgtgagcatgttgcaccgtcttaagttgttgccgacttaagccgattgctccgtttagcagggcatagtggtcaccccgagttaagtaagcgcgagcatgttgcaccgtcttaagtcgttgccgacttaaaccgattactccgttggcagggcatagtggtcaccccgagttaagtaagcatgagcatgttgcaccgtcttaagtcgttgccgacttaagccgattgctccgtttagcagggcatagtggtcaccccgagttaagtaagcgcgagcatgttgcaccgtcttaagtcgctgccgacttaagccgattgctccattggcagggcatagtggtcaccccgagttaagtaagtgtgagcatgttgcaccgtcttaagtcgttgccgacttaagccgattgctccgtttagcagggcatagtggtcaccccgagttaagtaagcgtgagcatgttccaccgtcttaattcgttgccgacttaagccgattgctccgtttagcagggcatagtggtcaccccgagttaagtaagcgcgagcatgttgcaccgtcttaagtcgctgccgacttaagccgattgctccgttggcagggcatagtggtcaccttgagttaagtaagcgtgagcatgttgcaccgtcttaagtcgttgccgacttaagccgattgctccgtttagcagggcatagtggtcaccccgagttaagtaagcgtgagcatgttgcaccgtcttaagttgctgccgacttaagccgattgctccgttagtagggcatagtggtatccccgagttaaataagaatgtaggtcgatcatgaacaacctgagtattcttgaagccttttttattgatgatatatttcccattttatagagtacattgtcgtcccgatagcttttgaaatatagctagggataaaacttcctgaggtgttctatattccatgagttcccgatttccctgccgtccatctgagtgagacgatatgatcctggccgagtgacttctgctactatgaatggtccttcccataggggtgacaacttgtgtcgtccctcccccgttagaattcggcggaggacgagatctcccactgcgaaggatcgacgtcgcatggccttgtcgtgatagcgtctcagagtttgctggtaccgtgctgattgaattaccgtgttcagtcgttcttcttcgagtacatcaacatcctccagcctagtagcctcagtttctgctatgctttcaaagaccaaccttggcgccccaaacttgagatcagcgggtagtactgcttctgac

SEQ ID NO: 126936 - DNA, 574 bp, Zea Mays
ccagagaagtcaggggtctctgcgcaaaaatcctgagacccagtgaacagaaactacggacggcgggttctatttccgtaaagcctagggctcatatgaaaaactgtctacacgaaggggtattgactaatcttggtcgtttgattacacacggatggcacagatttaattccgcaggtgatgaactagtatggcaccaggaccgcaggatcacagatcaacgaagcggatttaaaagggtcgaagagttatttgaagatctaatctaatctgttgatgcagagatcaatggctacgatttcccccgcccgaagcggtatacctactatctaatcgcgaccgtttgctagtatccaacgcacgaggtccatctcctcccctccgaccgtgcccacgacggcgaaccggtccccagcgacggcagagcacgcccgcgatccctccagcgattttgagcaccaaaccacgaataccaaggtgcaacgcgaaattgagagtgcggcggacataggggagtgcttattaccgacaatggcgaggtggaggagccgcgccacagcacgaggcggaagcg

SEQ ID NO: 126937 - DNA, 403 bp, Zea Mays
gtttctattatcagtggcttgcacatgaatcagtaattgtttcacataactgtcatagcgtggaacaaagtaattgtttctcaacaaactcttcattcactgtcgtagatttgaacagctcattgcacatcggtcacagccattgccagttcggcacttatgacttatgtgcatctgagatctgacagtggcacccatgcaacagggagggaggcgtacgtaatgatgtaatagcatgactagttatcagcaaaatcataagcctttctgatttccgtgcctttctgacaatgatggcattcatttttgccattcaaaatatgtagtgatcttgttcctcctacccccacccacccaaaaaaaaacgatagccctgctctgaattatagtgcaaaaaaggagt

SEQ ID NO: 126938 - DNA, 557 bp, Zea Mays
tgaatttactcccgctgctgtactttttgattcaggagcatctcattcattcatagccactagttttgtggaaaagcatggcattcccactgcacacctagaaattcccttggtcacccgaaccctatggtcagaccttctatgccatctcaaatgctcccaagtcaggattcttttaagtggggtagtgttcttggcagacttagacatctttccatcccatggaattgatgtgatcttaggaatggattggttaaccaagcataatggcgtcataagttgcagataagaccgttcttctcactaaccaccaaggaaagtcagtttcatgtcaggctcagccacccgcccaagatccaatggtgtttaatctagcagcagaaagcatatctatagtagaagaattcatggatgtattcccagaagaattgccaggaatgccgccagaaagagaagtggagttatacattgatctaattcccggcaccgcaccaatcgcaaaaaggccataccgcatggctcccaccgaattggcagaactaaaactccagatcgca

SEQ ID NO: 126939 - DNA, 524 bp, Zea Mays
cagaaggttagattctgagctgatggtaacttgacctcagatctatcttcgagaacacactggttcctcctagctggtcgaacaagtcttctattctgggcaaagggtatttgttcttgagcgtgacctcattcaaagctcagtaatctatgcacatcctctttgtaccatccttcttctctacaaacaacactggagcgtcccaaggcgaggtgttgggtctaatgtaacccttctccaacaactcatctatctgcttcttgagttccaacaattatagtccggacactctgtatgctcttttgaaaatggggacggtgtctgggataagctctatggcaaactgaacttttctctcaagtggcatgcccggtagctcctcgaggaacacatctgggaattctgatactaccctgatgaccttaatcagattggcttccttactatcgacaaatatcttgtgatagcttcccttccttggctctgacaagatcagctccagtactacttctcctgacaaggac

SEQ ID NO: 126940 - DNA, 579 bp, Zea Mays
gcgctctaacacgccctgtccacggtgacagcgggcactacgggcaatcaagcgcgttcccggtgatcgaggggtcctagttcagttggcagggtcggggagcatcaggagaacccaaggatgttgaaacaagacagcagggagtacgaacagacctgggattcgctgaccacagtgagggctttttcacggtggcggaaacacggtttgggggaatgagcaattcgtggtctctgttgaacgattggaggcaattgctggtgctttggatgcgtaattatcctacggagctcacggtgtgctcaatttataggacttggggcggtggctggtgaatttgagttagcgcggtggcggtcggagagtgaagagagtactgtcacgagagatcggtggcatctaccgtggtgacctcaccgacgacgaaccagtagcagagagtggcttatggtgactcactgcaacgtggtaattgccgaggcacgtggcgttcgatcggcgggtggccaacaccggtgaattatctgaacaggccgcaaagcagaaagggggtgcggcggccagttggaacagtgccca

SEQ ID NO: 126941 - DNA, 279 bp, Zea Mays
tggttactccacttggcctgttatacaagctaaaccagccttttgtgttaagacatgtatgcagatttggtgccactctctcattttcccctcaattattttactcttcatagcatccatttatacatgaccacctacttgatctcatatatttcaaaagcacacaatagatggtgtccgtgtcatttttctgtcatggatttcacaagtttagaacttatcttttgcacttgatcaaaatacaccatagcctcattcaacagatgacatccatgtcat

SEQ ID NO: 126942 - DNA, 429 bp, Zea Mays
agcccagccacttgatgaggctggacgtgtcggcaacggtgctgtcgttgccgtattcaaggtagacgacggtccgggtgttatcctcgacgaccttgttcatgttccacgctacccagccgttggggctgaccacacgactgagagacttcttgatgaaggcaacgtgggagaagttcctataggggcggccaaggtaggtctccacgccgttgaggtccacgcccggcgacgcttccacgatgcacatgtagaacgagaagtcaggctcgcggctggcgttgttgcaaccctacgccgtcagcacattgtgctggcctttcggtgggcggcgcaccagcagcgtagctctggaacatggcctgggcaatgccaaacacaaattaagtccacggtgccccagatcaaggtctacaggtagaactggat

SEQ ID NO: 126943 - DNA, 280 bp, Zea Mays
gaagaaaaagagatttgggcactcggcgcggaaacgatcgctcgaaacggggaatttggtgaaattgaagcctggaatatcggattggcatgaaatttggcaaatatgttactggaggtggtgtgaaggttcctgaaaaatttgggttcaatcggggcatttttggctggtttgggcatttcatcgaacacgtgacatgcggtgaattaggttttcggggaaatggccatttgaggtatgaaaaccctcccgaaggagctaagaacctgcaggggattca

SEQ ID NO: 126944 - DNA, 462 bp, Zea Mays
tgaaaaactctatatatgatcgaggagggttctctaaattctaatgcatctaacgcaacactcatctattgaaaaaagataaaaaaatgcagttggctagaaattatatgttggaatggaaacgctagacgtttagacctatgctaatgtaatatgactgaagtctagcctatgccccacgcatgcaaacaagtatgtgacatggctgaagctcaattcattaacctataaaatcatatggtacacgatcttttttatatgccccacgcatggaagcactgtaggagaggcatccatccaaatcacagtccacggatggccggaatggttgaagaaaactttatataagttgaaatatctcgtgtgtatcgatgatggatagagtcaatttttatacctgctctaaagataaacgttgttagtcatcaccatcagacccacctagcacggataagatatgga

SEQ ID NO: 126945 - DNA, 531 bp, Zea Mays
gcctcaattcctggaaagtccaggggttccgcggtaaaaatctatagacacagagcgcagtgagggtggacagcgggttgattcacagatattccaggggttcttatatatgcaaaacggatggccgaaggggtatggttgtatcttggccgctggattaaaagttgatggctcagattttataaaccaaaggggtataatgcttctaatctggaccctcaatccagagatcgacggcaccaagcatcctattctctcttctattcctggcctttaatcacaagatcaatggtccaggggtcttcttcctcccaagacaccttctctcctccaccccaaccggtctacaccagggcggcgccaggaagctctgggtggtgacttcgcctggcaacacggtcggtcggcccctacttcccttacccgagcgctaaccggtgtaaacagaggagaagaatatgcataacttaatggaaaaaaatcttacaggaatcagtagtgatggtgatgccgacccccaaccatggcagt

SEQ ID NO: 126946 - DNA, 722 bp, Zea Mays
tcatacaatagatgcgatcaaaagaacaacataggcattagattttcaaatatgctcataaataggagaatctgataaatatgctactttaacattgaaagctacaatccttgataaaggtgacaataatttatcaagttggattgaaatgtagtagcatgccttatgagaaacttgttctcatacatgagataatatgagatttctaagataacgtgctagtctcaaaataatcaagatatagaaataggctccccctagagatatgcatcaagaatgaaagaaatgggtggatgcactcacttttaaaggcaaatagggagaagcactatttatctcgattaaggctaaaaagatttgcaataaacaatttttgcctagtattctcataatgaaaagtttttgaatgcttacaaccacaccattgaatgttttgaagatctcatatccaagtaggtgttgttgctcttgatgtctccctttttcatttgagtgtcctccctttatagttgactctttttccttccaaacttattaaaaatactcaagacagatgttaatagcacaagggagtgaatgatgatttctttagaaagaaagtaaaggcagttcatcatccatagatcatacagacatgaagtaaagtccttgacattagtgcatattacttgaaaagaggaacatgcattttttaaacatttgatcaagcataggaatttact

SEQ ID NO: 126947 - DNA, 445 bp, Zea Mays
ttcttatgaacttgtaaggaaagaaagtcgatattccctcttatgaacttctccttgccaaaagaacctagctcgaaaataatctattctatctagaatcccctagggacttcaaaaaggacaacataaacatagccaagcttgtaaggacagaattgattaataccagacggccacccacagacataagttttcctttccacctactcaacatcttctcaaacttatcttcaatgattttgcaatcactgtttttaagcttcttaaagtgcatagggatcccaagatatatgaatggatattcccctttttgcatccgaataaattaatataatgagaatcaacatctctggcttggccaaaacagaataactcacttttgtgatagttaatccttaggccccaaacttgttcaaaagcaagcaagagaagctttatattttct

SEQ ID NO: 126948 - DNA, 1137 bp, Zea Mays
gttggggcagtccttttacaagatggacatccattggcctttatcagcaaacctttaggggttaagactcaaggtctctccacatattaaaaggaatatttggcaattttggtggcggtggaacaatggagacattacttgctacatggagaatttgtcatattcacagatcagaagagcttaattcacttaaatgagcagaggcttaataccccctggcagcaaaaagtattcactaagcttttagggatgcaatacaagattgtctacaaacaagggtctgaaaaccgagtagcagatgcactgtctcgcagagcgcatactgaggcatcttgtttggccctgtcagcttgctctcctcagtggtgccaagccatcatcgatggttacctgttggataaagaaactaaacaattgttggccaagttggttgttgatagttctgctgtgcccaacttctccttgcaggatggtctgcttaagtttaacaatcgcatttgggtgggtaacaatggagctatgcagcagtctatcttagaggctattcacagttcggctgttgggggccactctggtttcccagttacttatcacaagttgaaacagttgttcgcttggcctggcatgaggaagatgaccaaacactttgtagcatcgtgtgccatatgccagcagtccaaatcagacagaacaaagtatcctgggctcttacaacccctacccattccagcgggtgcttggcaaacaattactatggactttgtggaagggctaccgatgtctggagggaagaactgcgtcatggtggtagtagataagttttcaaagttcagtcacttcgttgcccttagacatccattcactgcattgctggttgctaaagaatttatgcaacatgtttacaaactacatgggatgcctctggtcatagtatcagaccgagatagggtgttcaccagtcaattatggaaatgtctgtttcagttggctggagtgcaactgcatatgagctcttcttaccacccacagtccgacggacaaacagagcgcgtgaatcagtgtatggaaacctttatacgctgttttgtcaatgcttgtccaagtaaatggattgagtggttatatctagctgaattt

SEQ ID NO: 126949 - DNA, 361 bp, Zea Mays
ccaggctcatcattgacaaggatccttgtggaggaggtggatagcagcagactaataagattgcaccaatttcgatcaaatcccaagtgctgcaacatatcaagcaagaatgatcaggaaaccgagttaaaggccttggaaatattcaacttcaataggatgtgaggctctttcttattgtgtaaggatctggcaagctgctgcaccaacaagaagttgtcttggatactccttcctttgataaagacactttgattgatagagaccatgcttggcaggtggggtgctagccgagctgctattactgctagctgatctgtgatataacctggtggttctactttgtgttgtctagttgcac

SEQ ID NO: 126950 - DNA, 398 bp, Zea Mays
aaacggcgtttgaacgagaaatagtgccataggaggtttgaaattcgaattgaggcatgaaatgatggggaattgagccgatacttcacgaataggtttatatgggtaaatatgagtgaagtgtgtgcttggtttgatttgaggtgaagaaaatagaatttgggcacatggctcgaaattgatcgctcaaaacggggaattgtgtgaaattgaagcctggtatatcggattggcgtgaaattgcgtgaatgtgttactggaggtgttgtgaaggtgcctgaaaagtttgagttcaatcggagcaattttgagtggttggtgcatttcatcgaacatgtgatgtgcagggatttaggttttgaatgaaatggctattggaggtggggaaaccctcccaa

SEQ ID NO: 126951 - DNA, 566 bp, Zea Mays
gaaaaaaatgagaaacgttatccctaataacagtatccttttatgtcctgcttccgttggcgtatatcttctgcttcactctgtacggtaaacctgtccggctgtcccacctgccagacaccctggaccgtgcgaaaacatgagcgccacgtgaaaaccacctgctagtacaggacgacagccgcgattcgcgaacgtggttccgtatccagctaccgacgctgccatcgaaccacctgtctcagtgaaggaactgtctggaagctgcgtcgcgaaatccactagtactacgggcgaagcagcggatcgccttcagtggccccagcgtgacgggacaaactcaccaagggagcggcgagtcggtgacccggccgaccaccggccaactccagccgctcaaggatacggaaccagacaaccccaaaccgtcagccgccctaccccgcgtggcgtcgttgacgaacgagaggcaggaaaagaaatgcaagggccggcaccgcacggcagcagggccccgcgtgcgcgggagtgcgggcggcatcggggtatcggcatcggcacacccc

SEQ ID NO: 126952 - DNA, 326 bp, Zea Mays
gacaaaccctaacctaatgatctcttctaattggcaccaaatcatatggaggggtagcctaagaccagagaacaaccatattccaagctggactactctagctaggtagacaggagtgacactactttggaataatctccattcaagccatgccatgcaccccatgtacctgtgctatgaaggcgttgagtagtcccacatgctccccacttaaaccgaaaattgtctcaatgcacgcacacccagtgtccttagctcaccactttggtctagggctaatataataatcctcggcttgcccccaccaatactataaactaatcccc

SEQ ID NO: 126953 - DNA, 406 bp, Zea Mays
gcgctgggggatgccttcgtcttgacaatgaatggaccttcccatttcggctccagcttgccccgtgactctgtccgggtggtccgggcgagtacgaggtctcctttgttgaattcctttgggacgactgtgttgtcgcgccaggccttggtttgggcctgatatctgtcaagagtctgcagggcgaggacgcggtctccgtcgatgagatctttggaagttggttcgtcgacatcggggactgctgatgtgtttgtcctgggcgatccatgcttgatctcctgcggcgtcatggcttcggatccatacaataggcgaaaaggtgtgaacccggttgcccgacattctgtagtgtttagggcccataccacttcaggtagttggtcggcccatttgccctttttat

SEQ ID NO: 126954 - DNA, 340 bp, Zea Mays
gtgatagcgccttagggtctgctggtatctgaccgactgaatgaccacattcagctgttcttcctctagtatgtcgatgtcctccagcctagttgcttctgcttcggctatgctttcgaatgttaatcttgacgctccaaagaccagatctaccaataacactgcctccgacctatacaccatgaagaatgaggtgtttccgtgtaaagctcgactcgactgggttcgtaggctctagaccacatatggtagttccctgatccattttcctgtgagcttctcgctcttgtcaaacacctttttcctgagtgcatcgagtatcatcccattggctctttcc

SEQ ID NO: 126955 - DNA, 455 bp, Zea Mays
gcacgggttgcttcactggttgcacaactacctagcggagcggacgggggcggcaatttatagcctccaacggcggtggcgtccaatttcacgaggatgtgctggcggccggaggggaaaagaggtactggcgctcgggatgagtggctttcaccgtggcagccctccggcgatcaccgaacatgcataccatgattcaccgtgacatgggctagcatttaagcatgtggcgcacaacggtgagcgatcaacggcggcaaaatctatcccggccgcacgacgagcaagtgggtacggtgaacctcatccgcgcccgagcccgagctgatccagtgccaagatttttactccatcatggttatcccctcaccagcgaacacgaatcgcagcgacgacatgaatcacggcgtaaagatcaccggcgacgagggggatgcatccgggatctgattcag

SEQ ID NO: 126956 - DNA, 492 bp, Zea Mays
gttcaaatccagctcgtcgctaggagggaagagaggtacatgactacacaggataaaagagaggatccatggacaaacgaccaaacacagggacggaggtagcaggggctcagccccctgctgttgtcgagcccatagagtttcactaaagactattctaaaattttatgtacacaatatctatactactaattaagaacgcaaggggtaggctgccccattcctggttctgtcattcccattcccaactcctgtgtgtttgcttcattcccgactgtccattcccaactcctgtgtgtttgcttcattcccaactgtgtcccgcgtccgcgcatgtgatccgtttcccattctcaagcgtctcacgcatgtgatccgtttcccattcccaaacgtcccgcgaaccgcgaccaaatttttaccaaaaaaagctagcagcgtgggttaaagctcacagccaaccaagactacacattctctgggacacactag

SEQ ID NO: 126957 - DNA, 819 bp, Zea Mays
tggtgggtttatttcgaaatacttgagggtctattatgcaatatgcacgcggccgaaggggtttgaggaattctaagccatccaatctctcgtgcacggctaggattagattcaccttcacaccgaaccggtatgcaccagtggccgcaagatccaaaagctatggtctcgatttaattatggccagattccaccacacccgctcgatcgaggatccatggccaggagtcgatcgaagcaaaggggtacgtggcttctaacctcggccacacaagtcacgtcaaacggcgacgggttcgtcatcgtcaccctgaggcctgagcatgagcgcgacggcgtcgcctgcctccgcggtggagggatggccgaaatccggctactccacgcaacagatccccaaattctaatctgaggtgtgatatatgtaaggaaggacatggcgaaggcagggggttctcacctacgaggctacgattgtgctgttcagtgctctaaccacggagaatcgtggtccgtggcggactccttcgctccggtgaacgattccctggactccgatgacttatgtgcccaagcgaatgatcacacgtgaccttcgcacgctggcgaaccttcgcgacctctccccaagcaccatacgtcggtggatgcgatcaccgagcgtggcggctccctctcctttctctctcttgctttctgtcaatggtggccctctctattcggtggtctaaatgaatgggtgaggaggtgtggctgaggactatatacccgtgaggcagggttcatgagctggcgaccagatttcatgggggaatctca

SEQ ID NO: 126958 - DNA, 409 bp, Zea Mays
atggatcgacactctaaataatatatattggaggcgttcactattttctgaagatggtcgagagacacaagcttagatgtttcatgtgttttcttagtagagactataagaacgagagagaatactatccatcaccaccaattcaattccacttactgcaaaggggtttcatgcctaactatatttatttgacaaagcatgaagaaatatgggttctagaggacaaagaaaaggagtatgacgacacaatttcaaactatgatatctattgttccgttgtagatgtgataatgggtgaggttgaagataacgatgctctagcataaatgttgcatggtgaaaagaaatactatgacattgaaaaagttagaaaaaaaactagagtgcatgttagagaacaataatactt

SEQ ID NO: 126959 - DNA, 530 bp, Zea Mays
acatgtacttccataacccgaaatgtgggataaccccaaggaaggcctcacaaagatgaacaaagatgccaatttgatggacggagttgggatttagatgtgttaggttgagagagtagaaatcaagaaggccacgtaagaagggagaaactggcaaacctaggccacagatcaagaaaggaacaaaaactactgactcgtgggtatcctccatggggacggtgatccctttcaagactcactaggagcacaactcctttaacgacaaaactccaatttcaaccaggtgaagcaagtcggattcagaaacaatagaggcatacttacagtagaagggaagctggttgttggggtcaattaggggaatgaagggtattgtattcccccgcttcttcttcctgggcgccatgggacctcgctgatgaaaggaatcaaacgcaaacttgagggcaagcaggaatttcaggaaagtgtttacgacagagaaaagcagagttagggtttgttcgctaggaaactacaagcaagga

SEQ ID NO: 126960 - DNA, 737 bp, Zea Mays
aggggctatagcgtataaatctggaccttcctaaaacgatctttgcatagatagggatggcaggtttatttgacaaaagccaaggagtctcttatgcaaagtgtcggccgaaggggtatgggtcactatgatccgtctgatccttcacctacgaccttgattagattaccacttaaaacaaaactgtaagcaataacaatcataggatgacagattagtggtccaaaatttgtccacgacacacgctggtcccagccctcggatcttggatcaatggcgtggatcaagatccaaccggtattcacctgatctaatctcgtccgctcttttgcaatccaacggcctcagaccaccctccaccccatgacacgggggcgtggtggcgcctagagtcagcggcgacgctcgtggctggagaagatgatgttgtgccaagagcctcaaatcccaatctgaatggtgctatgcgtagaagagaccaaaacggactagttaggagtgttcttagcaaggtgggcgacacagggatgtgtggctttgtccatgcgtggcagcatggcggacaccgacgtcggtgagaaattcacacctcccagaccaccaatggtgcccagagaagcgacaagcacccccgtggaaactctgcgaaactcccggacccgattccattgcttttatgacgatggtgtagagctctatttatgtgcgaccgcggcctaaccctccctctgctcgac

SEQ ID NO: 126961 - DNA, 1041 bp, Zea Mays
actatcaatttatgtatggtttatgtcattttgtaaaatgatttaaaaggaaaacttcatgcatgcatgtttgaacccctgtaaccccacgatgctttcttaatagtagtagggatttcaaaacaaagggccgcaataaccaaattgtttagcataagaatataatcttaactgtaatctaagtttgaggaaaccatttaggtattctagcaatcacttgccaggagttctattaatgttcaactagaaccatagcgatagattggttccttgttggtggggtccacttcgatctggaagctggagcccttagcatcttcatgatgaccttcatctcaccgtactggtgtcaactgtgttgagatcaagggttgagacaggagaggggaagaaggagcgagtagggcgagttcttttcagtctcctattttggcccaagtagaagtgtgctttagcgagttgggtcttggagtttggtgaatttatatgtacccactgctgtttatggaaggtgtccaaatcagtcaggttgtgatgttgtagacaacatggaagctgtagctggatctggaatcagaatctttctctagcatgtcaaattattaaaataagtggtgtcaggtgtgaatctaagacaattgcagtaggacatgagatgggtagccaggcaatgtcctcatattatcctagctgataaataaagagaagccatccccttacaatctctactgccgattgtaagaaagtaaggttgatttactccttatatctataaactttattgctaccagtttcttatctagagagctgaaataaccagagaaggggtgtcgatagcatccttttattcatgaataacctgaaacatcctgattgatgtaagtgcacacaagaacgattgtttctcttgcagagtgtcacttctattgaaatcttcaatatttagggtttaggacataagctgtttttatgtcctaatgtttttatgctattacagggctatctagatgctcctttatcgccaccagcagatgttcgtcc

SEQ ID NO: 126962 - DNA, 317 bp, Zea Mays
gtgcaatcctttaggccttagtgcattagctccttggttgtgatcaagttaggctagtgagaaacctatcgtgacctgcgcgtcacttggagaatctgtgcttgcgcgtatgaagacttgtatgtgaggcttgtagtcttgcgagactgtccgacgtgtggagtggccaccaccatacttgtgagagggagtgaggccctcggtgtttcaaccaaagctcaccatagtgtatcggtgggggagcgttcgaaagaggtccgcgggagtccccacatgcgagtggggagagccgggaatatcaagggagttaccccacc

SEQ ID NO: 126963 - DNA, 1350 bp, Zea Mays
acgaccaaaagccatcaaatttcagccatattttccacgcacagatcctgcgctcgaatccgccaccagaattttcttgtccgagcctttatggccggcctgtacaacggaacgcgtatgagttccgctatcacggcgggcggcgggcgccggggatacgaataaagcccatcaaggataatgctggtacacgcagccactaaaccaaggatatttttttccgtttctttctttcttagtcaaatctctctctctctctctctctctctctctgagtctgtgcagtgcgttgtgtgtgcttggctcccaccactttctctctctgcactttgaaaacttcgaaagcctctggcaagctaagcacggacagccctccgttttcgttgtcggcatgtcaaccctctcctcctcctctttctcccgtgcactccatcagcagtgcttcctcgctctaaaaatgggagccgggcactgaggcggaagagcaaggcgcccttcatccattagccagccaaggtaaggagggaaccacccatcctcctcttccacttcaagcatcatcagtgtcgatccgacgttcccagtcaagaatcaatttcgacgatcactattttggtccactgcaaaattgtaaattctcccatgtcatcagttcttgcttcgttcccttcacgttctgactttattgttcaaatgctcatccatgcaatgggtttacaaccagcattcgcaaacttgaactttcctttttttacataaaaaaataataaaaaagaggttctcttttatgttccggtcacatttcatttactggcacgatgaatttctctgacaacattcttcgcccaccgtgcaggtgatttctgagccagccaggagcttgacagtcacagggatggagcagtacgaggtgctggagcagattgggaagggttcgttcggctcggcgctcctggtgaggcacaaggctgagaggaaaaggtatggatggatgcttgcttgctttgtttccatggtgtcactcagcctgcctcgttttgctacaggtatgtcttgaagaagatccgcctcgcacgccagaccgaccggtgccgccgatcagcacaccaggaggtatgctcatactttgtgtccaattacgaccttcggcgtcataaatctgaaactggttcagaacacaagtggttataaattttgcaaaacagagagaatttgagctctccaaggggacaaacagacacctttgtttccttgtagggcatgcacggctgctatccgatgttaggaaacatgatttgtttcgttgccatgatcttgtgctaatacatgtataataaacctacacaaaac

SEQ ID NO: 126964 - DNA, 510 bp, Zea Mays
ctttgctccacacaattatcttgtccaccccaaccatcgctcgataattccccaagacactcctactcgcgtctacatggtctaaccccgtcgtgtacctctcagtggctacgtttgtctgcccccaccttttcttgtcttgtcccgccatgcccacaggttgtgtgcataaccgccattcccactcacccattcttctcattgttgtcctggcccatgtgtcagctccgtctaactttatctaatcccatttgtttctgtctaacctcgtcttaccccatcacgcgcaactcaccgcacaaccgtcttcccataacatcccctctatgtaaacacatgcctcagcccctcccctttgtgtatgccagttctcttcactttatcctcgtgcaaggaggttctaagatgaggagtccctcgggcgttacaacaaccggaggagaggatgagcgtcgttcaccttacgcaggtgtgaattctctcgttcctttctttcctgggctcatcttc

SEQ ID NO: 126965 - DNA, 452 bp, Zea Mays
aagattgtgcctatatcgattgttctagttttgaggcaaataacatcccacggtctatccgttacctatccatttccatgcaagatcattgtgctcagaatttcgaggaacaaatgggaaaactgaaagaaaagatatacattaacaatttgcggagtttgatgatatttggaaaatacattatgttacatctgctcaatattttaagggacacatttaaggaaataagacgtcttcgtgttctatctatattcatatactcccatagttccttgccaaacaacttttcagagcttcttcatctccgctacttaaaacttttgtcaccttattactcagaaatgtcattgccaaacacggtctcaaggttttatcacctgaaatttctagatcttgaacaatggggaagtgatcgttctttgcctaaggacattagccgccttgaaaatcta

SEQ ID NO: 126966 - DNA, 603 bp, Zea Mays
gcatgatacaatcttaagacactagatcataaatatagttaagagacaatatgtctggtcttgtgcagagacgaactctcagcgaatagtggtctcttatattttttttcaattagtcctaaaaaaactctcaagataccccatgttaaatggtttgtccatgcccttatgaggctacaagatccttataaccagctgccagctgtattattaaatttgcgctaagccgtatcagatttcagtcaacgtattaagctgtatcagtgttaagtggaaaataatcctgttgtttggcacaatgattaaaggtaaaagtgataatgcagctgttggtgtgcgattgaggagcgagtctgtgagtgtacactaggaaaataacactagaacaatgcagtcgacacctgccacctggtaggatcggcgtgacgaaaccattttggtttcgccaaaaccagttcctggattagagcaaaacaaagccgagaaggagcaaatgagcgaggagagaccgccgaaacagcggcatacccatcctcctacttggcagatgctctccacctctagatatggtttacaacttacaacaaaatcggcaaatcgcag

SEQ ID NO: 126967 - DNA, 331 bp, Zea Mays
ctggggcagaggagggagcggctggaagggtcagccgtttccggtcaagttcttgaagtctctatagttatgcagagtgtgacacatctccttgtggtaaggacacggtctatcgtgattttcgtccagccacgaattgtggttgtgggggcgtcacgcgcacgagtggctggcggccctgtcacatgaacttcatctctcggccacttgtcccaacgcttgtcctgtagcgggttcccctccttcctttgtggcggtgaccgtggttgctcaatgaggtcatgagcccactcgtcagtgctgatgtagatgtcagcttcttggaagagct

SEQ ID NO: 126968 - DNA, 283 bp, Zea Mays
ccaagactgaaaatcaccaaccggaatagcatcaactgctgatagtcctaggctgcgaggtggtcgtccatacaagacctcaaaaggagaagtacccatcgaggattggaaggaagaattgtaccagaattccacaagcggcaaccactttttccattatcggggagtagaactgacaaagcaccagagaaaggtttccaagcactgatttactcgttcggtctgcccatccgcttgcggatgataagaagtactcatccgtaatgtcatgcctgacaatctt

SEQ ID NO: 126969 - DNA, 608 bp, Zea Mays
cggtcgccccctccccaccacgagctcagagccctccacgccacgaatcaccttcttccccgcatcccctcactcattcagtgcatgcagcagtcgtgcaatggcgactcggcacggacgagacgtgaatcttggcagaggagactccaaccatcaccccatggcggccacagacttcgaccccacctccatctccacccgcctgcactggtaacgctctccctctctcgtcctgcccttcccggtctcccagtttggccttgacaccgttgtgtcgtgttgtgcctcttttggccacggtggtagcgcgaatgttgggtgtgatggtgagatcgacgtggagctaaagcacgcaagggaggctatggcgaagaaaggccaggcactacacgaggagcgggacatggtcaagaaggtcgccctcgccacgctcgacatcctcagcgtcggtgctagccgtagtggactctcctcctcccgtgcgaccacggcagccagccacggcctctcccaagcaactgtagcaagcagcagtccccactcggctatcctggcacctagccccagtaactgcaggcagcggcagcgcggtcgccccagagccctcc

SEQ ID NO: 126970 - DNA, 628 bp, Zea Mays
caggatgttacaacaggatacgtagacatctcctcacagtacgcgaccaactcccgtcgtccgggctgctacccctgggtctataaataggatagcctacgactccaggagagggacgaacacttcataagttttctcctccatacaatattggcacttgcctcaatcaacctcaataacttgggatccttccctctcccactctgcttgtactccctactgcaagcacttaggtacgagtaatataagtctcatcgccctctactagaagtaggacctctccttgctcgaaccaggataaaagacttgtgtcaacttgcatcaccatctaggtctggggcacgcaacattatttcactagttggttagaacctcatatccaaacaccgacaaaacccgacccgaccaatacaacgggtggatatgggccatagtttttggcccgcaacaatcgaaggactggacatggactatgatttttaatccaaaatccgatctaactcgaaaaaactcgttcccaatgccaaaaaccccgatcaaccccaaacaaaaccaaagccaacacgcctaacagggaagtacgtgtcgactcgacacgacacatagctatgccaaaacgacccatgat

SEQ ID NO: 126971 - DNA, 772 bp, Zea Mays
ttttggtcattgcactcgaaggtgccaaatcattattacattgattgtaatgacttcttgagagctttgggcttacttactcagcctgttggggttttcaatatatatgtttcgtctctgtgaccatactgttgacatacgggtttcagatccctcctttctatccctttgctgcaagtcttgccttgggaacttgggttgaccagcaagcacttggtcataaggaggtggacctgggacaaaggaatcaaatggtgagcacacactcattgctgggttacttgaggcatttgaggtcgaaggcaaacttagcattggctcctgcgactgaggctggatatactatgggatgtaagatcaacaatatgagtatgtattcaacatgtcttttgactgtgagggttgcatgactgatgaagcaagctccttcttgttaatggtatgatgacatgttcttgtggtgtggcctttatccttgccgcaaaacaagtagaattgtttcctcaggggtgcattgaatctaccaccaaagcttcagcctccccttccttctcttggaggaggtggacgaaacatgttgtgcgaatgttgttgttgagaacttgcctattgctggcccgactaacattgagactgggccatcttatcctcactctgcacccagttgtggatacttcggacatgccttggatgaaacattcctctgaaacccctggcaacttcggtgtgtctgtggaattcctcccttctttggcagaaatcattgccaacc

SEQ ID NO: 126972 - DNA, 800 bp, Zea Mays
tggagcagcccctgttcgagcactcctcgccaccgccgcacgagccgagtacgtaatcaatcaccccagccatcatctttttgtccacgccattattgagctcgtacaagctgcccaaattgtctgacgtgccattaattgcaaccaccgcagaagccctggccatcttcggtgagctccttgagtccgcctacacacccaacacactgctggacgacgtccttgtcatcgccaaggatcagagcagcgacagctcaacgtcgccgagaccgcgggtgaggcggaagaaaaagaagcacgcacatcggaaggaggacgtgacgtttgagaaagactttgccaggttgacgaccagcctcgtagcctccaagatggccggggaaacagtttgtatagaggacctgcggccaacgctggaggacgtgggcgccgccatcgcggccgccgtgctggaggcactgacggaggagaccgcggcggagctgatatgatggggatggaccgcggctatgcggttggcatggcacgatggtggacgatgcggacctccgttgttgggttttctggtggttgatgtgcgaatctgatcgacatgttcgtgcgtatacatttggtttcttcgtacttcggtgtgtgtaggttgtgttgatagcgtgacagtgcctgactagctactgactactagtacctttgtttgttggtttgacacgggagcatgctgaaacggagcttgtacaggttcaataacataacatggtgtcgtttaaaaataagagcggtttattaatatataaaccatg

SEQ ID NO: 126973 - DNA, 350 bp, Zea Mays
acacgccatggaggtacaccgtacaccgcccaacccttgccatgtttccaccgttgatgcttcgaaaactctcccactcgccacctactcaacgtattaccaacctgattcctgacgtgaccccactcgtcccgttctcaatttggcatgtgaacagatagatcggtcacacatcgttttctgctttacagctatcactttctaagattatcagattggattgctacactgggagcaatatatggtatgacttcattatttctctgactacctgattatgttttagtgggaaagaatgtctttaattatccagtaagcagcacttggtttgccgccaaattctattggtt

SEQ ID NO: 126974 - DNA, 769 bp, Zea Mays
cgtttgccagccattccgtctcctcgcctgcgtagtggagcaccattgcggcgacgtttctcctcctgtgatttttccccttctccctcctcgcggcatccccgtcagcagttaccttcccccgcagcggccattgatgttgattctggctgttaattactcacggattaatagcagtgcatcaattgctctttatagggtcttaatcgacactgattccctcctttcctccactatatagggcgcagcaccccctcctctcctcctttcaccatccgacaccgttaatggattttattggcagtcgttttacctctgtaattcaaggccggcttcaatggtcgcggttccaaattcctcctccctttgggctataaaaggttgcgcccagtccttctctccttgcccctgatcgctctctcgctcacaaatcacaacatcacatgtgcttaccggctcgcagctgccgcggctgtgctcgccggagttcacgcctcgctgaccccctgctccattactgagcctccctgctgctgcctaccgttgttgttggaacatgttgttgttgcgagtactatggaattccttgtcgtcagatcagtacaaacgaaagtgaaactacaaaacagaagaaccagattttgttttctggcataaaaagacaaatgtgtccctaagaacaactaatagcagattctctcatacctaatacactgttagttgatgaattgcaaagtattctaaaaaagaaacatcacaaggatgccta

SEQ ID NO: 126975 - DNA, 588 bp, Zea Mays
gttggactgcgggttgaaaccgagaaaacctagggtttcttatacaaatgtaacagctgaaggggtatcggccgattacagccgtccgatctgaaacgaggcgcccagattagatcggccgaggtcccgctcccggttcccctaccaccgttggatcgaggatccacgtccaggatatgaccagtgctattataaactaatacttgcttacagccgctcgatccgcgatcaacggtacagctcaaacgcggcgaaggggtattgcaatttctaatctaagccgtctagaactgacccggcggtcaatccgctccgccccagacactgctcaaactctggcggcgcacagaccagggacgacggcgtcgttgccggagcatgcatcacctgcaattgctgcccctaaactctactccgatcgcagtagtacgaagcggtaaccgtagggcattgcgtacgacgctactcaccacgattcgaagaggcgaacccagctccccacggcgcacgacggaaaccgaagtccggcgagcacttacacgcgttccggtgtggttcaactcgaattgagggcacaaacgactttcc

SEQ ID NO: 126976 - DNA, 353 bp, Zea Mays
gagagctctcaaggctttctgattattagttggacatgtaaggcatcaacgcccctccaaagtgggagagagcgagcataaatactcatgtctcgcaaaagagacattggctggtttccttgaactagccattactattcgaatactacaggtagaaccgacttgactggttttttagtttatgcccactcttaactaattctagggttaattagtaggtttggagagtgttatctagttttgatggttgaacgacaaaaacaattaaaggactaacaagtttgatgagctttgaattggtttcatcgctataagaaaattatatcgtatgggtttagtatttgatgaacaac

SEQ ID NO: 126977 - DNA, 283 bp, Zea Mays
gcggatccagactaacaaacgcctgcacaaattgtccccaacatgggaggggtcgttcatagttggagaggaacttcggctaggcacctacaagctaaaggacgagaagggaacgacgctcaccaacacatagaatatcaagcaactgcgatgattctacccatagtgagaccccgatgccccaagccaacctgctcccaacctctggatggatgccagaaggctcaggggcaagggggagagggaaagcactagagaactagccttcctggttaacaatttt

SEQ ID NO: 126978 - DNA, 608 bp, Zea Mays
actggaatgaagtgggctaccttggtaagacggtcgattataacccagatagaatcattccctttttgggtccgaggcagtccgattacgaaatccatgcctatttcttcccacttccatttgggcactgggaggggttgtagtagacctgcaggcttctgatgctctgccttagttcgctggcaagtgtcacaccgggccacatactgagctatctcctttttcatccctctccaccagtatctggtcttgaggtctaggtacatcttggtggtccctgggtggatagggtaggctgagttgtgagcttcatcgagcaggattcctcgtgcctctccctttggtatacacaaacggtccctgaaccaaagggttccttcttcatctgtcttgaggtccgggatttgttctttgcgagctctctctgcaagacttgtcgtcttggtgtccaggcgttgagccttgcgtatgaggtcttctagcattggcttaatttctaggctgccactatctcccaaacaagcattcagttgagctgattctctcttccagtcttccaagaagttggttgctttctccccgaaaggttttcggctgagggcgtctgc

SEQ ID NO: 126979 - DNA, 281 bp, Zea Mays
gccggcgcgatgagcacggctgagctccaccggagcacaggcgatataaggcctcggcgccccaaatcaggcctgggtaaatgctacgagatgcggacgtcctggtgaacagcaccagcacaaatccaacggtgacggggtttcttcccttcccccaggccgcacgcggcagcagagtgagcccgcacggcggaggccacaacgacgaccgacgttcccaaccttcccggccctaaaccttgcttctattggtgctaaacgatgcgcaaatgagggtaaat

SEQ ID NO: 126980 - DNA, 434 bp, Zea Mays
tttcaattcaggcatcggcctcgccatggtttccggtgtatggccggcgtcgcctcacaagtcttaagccaagggccaaggcgttgccaaggtgtcggacggatgccgcacagcctgaaaagggaacatgtgcaagaggaataggggcgcgcaagagaagaaagcgctacgacacgcaggaggaaaagaaatgagatggattcacatgcctacacctctggggtgataaggcggcctcatccgtgaccccccggacccttctcctccacctccttatgctcataggttcgtatttttctctctccactgtttgctcttccttccccatcaacagcctcatccttatgctcagaggtagcaacagcctctatcaggtaccaattgctcctcttttttgatgttctgtgctgatatttatctattgctcctttttt

SEQ ID NO: 126981 - DNA, 764 bp, Zea Mays
cgaagacaacgagctgtggacacggcacaccgtgaccctcgtgtcccaggtcgcggttgccctctacgccttctacaagtcctggcccaaccccagcgactggaagctgctggcgtccgcgatcctgctcttcatcatcggggtcgtcagcttcagcgagaagccatgggcgctcaagaaagccagcatcaacaggctggcgtctgtgtcggccacgatacaggggaccaagaagcgcacgaggctggcggtgtacttggacgatcttctcttctccgattggtacagctgctccagagccaccgagaagagtagcagcagcggtagtagcctccccgcagccgcagccgcggcaggtgtgggttggcacgactgcttctccttcaccgagccgagcaataaggggcacggcgatcatgtgggcttgtcggaggcagataaagtctacatggtgctctcggacatgtcgctgtccgcggccgccgacgaccttgtgctgcgaggcagggctcgaaatgtggaggatgttcttcggcccctgagcaccaaggcggagcaggcactcaagcgctggctgcgtggcgcgtttgggctcatatacaccagagccaacctggtcttcactcgcacgtacctggtgtaccatgtgctggtggtgccgatcctgcacgtcgccgccctcacgctgttcgcgacgagcgacaagcacgggtacgaccgcaccgacgtgaagatcacgtacgtcctcctgtgcctcaccgccg

SEQ ID NO: 126982 - DNA, 616 bp, Zea Mays
gccgagggcgatgaagtggcagtacttgctgaagcggtcgacgatggagaggatcaccgacttcccgttgacacggggtagtgcttcaatgaagttgaggccgatgtctgcccaaacgacggtgggaatcggtagtggcatgaggagacctaccgggtgaagatgctccaacttgtaccgctgacaagtgggacatgcccgtacgaagtcctgcacaacacgacgcatgttgggaaaatggaagtcacagcggaggcggtgtagtgtgcgctggacgccctcatgtccatcattatggacaaacgccataatatcctgcagaagtggcgaggccgatgggatgtacaggtgcctgtcatagagaaccatgccgtcggccaccgcccatggagcagtgcgtgtgcctgccctgacttcgtcgtggatggcagccagagcgggctcagtagcctgggcgtgtcggaggcggctgatgaagtcgaagcagggagctaagattgcctggagagtccccgtgccgtcctcgtcagtgtcacggcgcgagagcgcgttggccaccgtgttcgttgctcctgacttgtactcaacggagaagtcaaacccaaggagcttgccc

SEQ ID NO: 126983 - DNA, 724 bp, Zea Mays
agtacctaccactatgggaaacagtagcaaatgtgatgcaaaaacaccttacaataaatgtcaagttcacaaaaacttacaataactggttcagcaagtcttgttggaactccattctttctggtatgtgttttgatatagagttcatctcttcgagaagggcggcctagttccttagactgtaaattgttttaatgttaacaattgaaaatgaaaaatcataatgtaaattcaacagtcaaattgcttcaataccatttcatggccagagcgagcaaagctcttgctaccagatgtatgaagtaccccaacctttgaatgactaaatttggcttttttgtctttccttcacattcaggagacactcaatattcagaaagaaacttccaatcctcatcactaacccttccactatgtttgttcttcatgtcctcttctgttaaattctcattaaaatattgtgcctttagggttgacttaaaatccttccatttccttccagcagtggttaaaaaccagttaaaggcagcatcatctacatcgaagattttctgattttccaaccaaaaaaagataatcacaacttggtctaatggtcagaaacaaattcaacctaagaaacgataataatgtacttgggaaaatacctttaggtcggtccaaacttcatacttcttctcaccatccactagtctccagtcaacactgctaactgacaacttct

SEQ ID NO: 126984 - DNA, 575 bp, Zea Mays
gtggagatggccacgccacgttggcagctgggtcgctgagctggtgcctggtgatcaactgcagcctgcaacgcaccacactgcagtgtccagtgtagctaggctcctgttcctcggtatccagctcagttttgattgagttttgactccggcctggaccggcgtgaggaggtggtggcgtagacggatacagtacgcgcggttttgtagcacctggtactcctaccggtgtagtgcctccgtatgcggacgtgcacacgtcaggccgccacgccatcgttttcgagatatgatgaatcgcgttcgggctggacacggttgtcaccctacgccccattaattgggcggcgctgaacgagggagcaagactactccagcgatgatatagagacaatcctccgtatgcaatcgaaaattatactatcgaaaattatactaatctcttgtgtgccacagaacccacatattatatcataaaaatatcacttatatttgcagggtcctctctcaccccttcatatggcttttgtctcccgcctctcgaatcaggccaagagtgagcttgacagcctaac

SEQ ID NO: 126985 - DNA, 558 bp, Zea Mays
ttgggctaaggtttgcaaaccagtgaaccaaggaggtctgggtctgcacaacttggatgttcttgggtgggctctaaacctgaggtggctctggcttaaaaaaacacaaccggacagaccctgggcagaatttgacatccaaattcatccaaatgcagcagcccttttttctgcttgtgtgtgttactatgttggtgacggtgcttcaactctattctggacagatcgctggcttcaggggcaatcgattaagaagattgctccatctctgattcgtcgtatccccaaaagaatccagtttatcagaacagtccaagaagctttgatcaatagcagatgggtgaatgatatcaggggtagtctgccggaacaagttctacttgagtacttcaatatttgggatttgatttagggggttcagcttcatccagaggttcctgacaggcacagatggctacctacatcctcaagggaatactctgccaaatctgcaaataaccggtttctagttcgatcaactttgtttgagccagctgaaaggatatggaaaagttgggc

SEQ ID NO: 126986 - DNA, 2574 bp, Zea Mays
gcctttgatggtggatcagttgcgaaggggtggaggtaattgtagcctttctaggtgtgctgtcagttgttggtagtttggctggtactgtgggtagtggttgtatgcttcttgttgatgttgaaactgtggttggaaagtgtggactacagccttcactggttgttctgggtagtcctttttccctttttctacatccatcctctctttgacctctttgtacgcgtgttagtctttggttgagcgactgcagctttcgtgaaatatgcagtaaggcttgtattcatgaggtggacctcgtccacgcccccttcccctgggggccctgccacctcttgccagctggaaactttggtcatagatgcgatgggtgtcttcgggttgttgttgctattgttgctcttgaatattgtggattcgggtctgcggtaaaggctgttgcgttcgcacccaagttttggagcttcccgggtgcaaagggtcctttggcttgcgttgtgcttcgactttgcaatagtggaggtcttcgggccgtgcgtactttacaaacagctaatataactcctagagggttgtcggtgggttcctagtgcagtgactgtataaatggctggtgcgcaggccgttggtggcataatgaatggcgattccatcctctactgacggcaattgagacttgagcgacatgaacttattgtagtaataacggaggctttcctctctagctgtcggcatagtgatagtttagcgagggcgtcggtctgtggtctatacccttgaatgttgaggaggaatttctcccaaagggcagcccatgagtcaatcatcagcgtaggcaacctagtttaccaagttagagcggggccctccagggcgatgataaaggactttgccattgtgttgtcgtctccgccagatgaagccactgcgacttggtaattcatgataatctgcgaagggtcggccttcccattgtattttggccagtttccgaccctgtagttgcttggccaaggcgtcgcctgcagcctggcggagagcgggcacctattgtcgatgaaattgaaagcctaaaagacatcattttgcagaggttgcctgacttcgtcaaagctgctcagccttacatggccttgtgaagggtgagtggggtcatgtgcctgtagttgcgaaatttcttgctcgagggccaggagatgctctttttcttgctggatgaggaggcggactctggcttcggcctcgctacgctgctgcttggcggcgatagcatctctttgcttctggagattggcattgtgcatgcgaaggcttttgagtaagagttgctcctcgatgttgatgccgaggtctcggctgtcctggaggtctgtgttgtcgtcttctagaggcattccgaatgggtgatgcgagtggcatgccgtggcgtcaaagcctgggggagccgggtagattcctcgtcaagtctggccagattttggctaggtagggcagactttttgggttcagcggacggtcttgtgagtcctctgagctggtggtgtggacttcgcactcttgctcagtggagactgtcttttgtttttgctttgcggtgtggccttcgcctagtgggtcggcagtggcctccgggttaggtggtggggaatggtcagaggcgagggcgaccttgccttttttggcggcaagaacaaccctggcgtcttcgtcgtttggtggtgggctagggcgggtgtttttcttgggaggcatcgtgggtgttgtcttcgtcgcacgaacgttgggcaccaaatgttgggcacagatacgcgtggatgcgctgtcaggtggacccaaacactcagaaagcaggtgagattttaggtgcgcgacaagacaaatggtagggaattgtaacttctcgttatgtgtgtcccatccctctacaggataggggtattcataggcctatccgggggtaggtggtccaaagtacgaccctgctacggatactaaccacagccgggggatatccagtgtaacggagtaattacagcgttgtctgtacaataaacggcgcacaccaaatagtgcacccgcatactacgctgacttgtgggccccaggtgacgtcttctggtggaccggtggcgtacaaggctgacttgtagtctttgtcccgagactcttcgcatcatcgctccctttgttgcgccttgccggatgatgatcctccgtcggcatagcggcgaaggcctcagcttctgctgaccccttgtggtccgctggatcggaggccccctctctagtggactcttcgccgaagaaagttgtcttagtcaaaggccccttcgccagtaggcctcatcaatcgtcagtcactgagtcgagggccccttcgcctgtatgcctgtgtagggttagcatgacaaaaagtatggtcttcgctctgcaatcgaggctctgttcggtctcctcccaacaggtggttcaccaggaagaaccgaaatggaagaagcctgagtccatcatcacagctgccagtaaaaagttcccgagagctcaagttacccccttagaccacctggatttaat

SEQ ID NO: 126987 - DNA, 583 bp, Zea Mays
ggggaagtcactggcgcaagctaccgtggcggtcattgaggcaatgcttcaagcgatggacaggcttcctatgccggttcactgtgtcgttgtaaagcttcgaggtacgtggcatcagagcggcaggtggcaaactccggcgaggtcactggatcggcagtagggcaagtgggtatggggccagctcacggtctcatccacagtgaagatcttttcactgccgatcataatccacacaccagagagcacgaatcatggtgactggcgcaaatccaggcgcaaaggtcactagcggtgaggtgcgttgcatccctaatattttcagacactgtaccatcggaatcttcttcagagcgcttgacagagcaaaatgaaaggcttcattctccaatttttatgtgacaactcactaatccgtctgtaacaaggttgttgtccaatgtaccagctacaactttggtacaaagaccttgctcaaacatccactaaatcccttgcaatttgatctcaaagttctttcgatttcactgttggtcaagattcatgcttcaatgataactgacagcccaacataagacccaat

SEQ ID NO: 126988 - DNA, 619 bp, Zea Mays
atcgacaccaatgtgtttagtaagttcatgcttcactggatatgagaaatctgtatagcactcaggttgtcacataatagaggtgtatgagtgtcacaagaaacaccaagatcagccaatagccaacgcagtcaaataatttcagcagtggtagtagcaagagcccgaagttcagcttcagcactagaacgagatatggccgtttgcttcttggatttccaggcaataggagaggatccaagaagaatacagtaacatgtagtagaacaacggtcaatagggtcacttgcccaagtggcatcagaatacgcatgtagctgaagtggactatcagaagcatagagtaaacatatggatcgtgtcccgcgtaagtatcgaagcacacgaagcaaatgaccataatgaactgaggttggtgtggatacaaattggctcaacatatgaatagcatgagcaatatcaggtctggtgatggtgagataaacaagactacccacaatatgacgatagtggggtctgctagaggtgtcccatcctgcggacgaagttttaaatgaatatccattggtgttgcaactgtccgtgtatcagtaattccagagcgatcaagaagatcttg

SEQ ID NO: 126989 - DNA, 490 bp, Zea Mays
ggcaaacgggctgcaagcggtgcctccgccctaggtagctccgggggggtcggagggggagaggcgacgtaggctgcgtcacgctgacagatcgctcatttcggagccccccagaagtgccagaggactgcaagtggggccgaggaggccagctcccaagcccacggcgcgcagaggcacgccagtcctccggtcccgccgccaccaccaccatctgggggtgatcacccccagggacaccagcagcaggaacagctacaacaatagcagtagttgcggtgatcgcctcgcttccagggtcactggaaggtccagggccccaagtaagtgtagtccctttttctttgagcctaaacatcatgccgacaagttttaacccatcgtacgttttccaaggctcccaagcccacggcgcgcagaggcacgtcagtcctccggtcccattgccaccaataccatctgagggtgatcacccccagggacaccagca

SEQ ID NO: 126990 - DNA, 512 bp, Zea Mays
caccccttacttatttggtgacacatgtatggatgacgtgaactactaacaattaacgatgccatcgtcaaagtgctgcatcttgcttgatggctgcggtgtgatcctccaccgtggactgcacctgcatcctcggatgttgcctataggtgtatctccacgcacacagcaggtagagaagcacggcgacgagttcaaagatcgcaagaagccagtagaacaaatcgaggcggccggcgctgagattggcgccttccagccaccctgtgcccctgctggtgccgtggtgcgcggtggcgcggttgaccacccggatgaggaagctcccgagccacgacgcgatgccgaggatgcagaagcagacggcgcccccgatggacttcatgccggcggaggcctcgctgtagaagaactcgagcaggccgacgaaggaggtgacgtccatcacgcccagcaggaagaactgcggcgtgagccagaacacggacatctcggcggcggcggcgccgccc

SEQ ID NO: 126991 - DNA, 571 bp, Zea Mays
ccattccgtccttcgacagcaagaccaccatccgcacagctcggtggagtccttaggcccgactctaaggaagaactggcagcctggttgaggtccatcggtgatggcctccggcaacataccgcacatcgacgatgggcctcctaccctactcacgtcgctagttttcccccggatagcctacggtgttgcagatagatagcgagtatgggcagggggtttagcataccgcaaattggagccgagctgatcataactcgtcgaaccgcgtcatggatagccctgtggcgatgtgatggttctactcgactccggttgcggcggcgtcgtgacttccctccctatctggccacgggcgtttcaccggcaagcgcatgaagcttccggactcgtcgcagacctccaaacctcagttgtggatagggacgacgctgatggcgctcccagctctcaactctctctctcggcggggcaccctgctcccaaggtatccgcggtggcttttagttggcgcggacggaggtggggtatcgggacccgatcgatagggatgaaaccaggttggtgcgag

SEQ ID NO: 126992 - DNA, 315 bp, Zea Mays
caaccggcttttacccattttctcccaacggctgtcagcttttggggatcctttatataccccctcacactctctctctcattaattcctgtctctcacacgaatctttggctgaccaaccttcaaacaagagcattcacttcacctttcacacccgcaatcgcatctccttcaatcatttgaaggacccttggtgtgaggtgaactcgatcgaactcgctgtcaatttcttctcgattcttccattctcttgttcttgagctcgttgcaaacttaatcgtgtgcggatttgttactcttggaacctcgtgttcc

SEQ ID NO: 126993 - DNA, 681 bp, Zea Mays
ttagggtctggtcctttgtggccctcctggtagacctcaatgtcactaggtttttggccacgcgtagcttcctgtataaacaaaatacattcataagcaatcacactatttggtgatcgaaatagctagatcaaacttaccattcttttagcttttcggagcatgtcatcaccgccaaacttgtggttaggattcattcctcgacattgcctgtgatgcactgacgctttctggaagccttcggaagcccaatatcgacaccaagcatagtacgcatcaggcacgggtgccatccatggaaccatcacctgcacacacaatgttacatattatatcaatcacaacaatcaataaaaagggtaaaacaaattgaatactaacctcacgatattgatcctcagtcaaatatatctttgaggacccttcctttttattcaaggggcctgcttcttctggatgattttgaaaatacaggtttgtagcctgaattctctcatagtatatggcatccttcaccagcttctttacattgttttggaacacacgttcagcgtgccccatgtaatcctctccgtcaggcaaccaatatcgaagctacaacataaagaatacaaatacaatggtataagtcatagaattacaatattaagaaacataacaaaaacaataaagaattcatac

SEQ ID NO: 126994 - DNA, 849 bp, Zea Mays
gagaagatagcagccgataggataacaaaagaatggataactacttggaaatctcacgagagagggagagaatccaggcaggacaggagacggctcacgggcaggcgagatcactgaaatgacagaagaggtgagcacatattagttacatagtcataagtatatgaaatgtgaataaatacatacacagagaattatgacacagaaaacgagtgatttggcgatatagaggtcaaacgacgcgaaaacggcgtttgaacgatgaatagtgccacaggaggtttgaaattagaattcaggcatgaaatgacatggaattgagtcgatacttcacaaatgggtttatatgagtaaatatgagtgaagtgtgcgcttggtttgattttaggcgaagaaagtggaatttgggcacccggctcggaatcgatcgctagatatggggatttgtggaaatttggagcctgggatatcagattggcgtgaaatttggcgaatatgttactggaggtatcatgaaggtgcctgaaaaatttaggatcgattggagcaattttggctggtttgggtattttgtcgagcacctggcgtgtggggttctagggttttggtgaaatagccattttaggtggtgaaaccctccctaagggagcttggaacctgcaggggtgttcaagtaggaactatggtactacaacatgcatagggattcacaattcatagtgatttgaattgagcagtagaggtggaaaaagggagtggacatacttcaccactgaagaacagagagagagggaagatgcagtgaggctcaccagggaagaaggaaggcagagcctgagctgaaggaga

SEQ ID NO: 126995 - DNA, 368 bp, Zea Mays
cgtgaattcgtcgagcatggcatagagaagtgtgtcgtgactgtatacattggatctagttcgcaccatgtggaatggagtgtcactgctacggggcacagattcaaagacacctgccaagtcgtcgctcgcaaggcattgaggaccctgtgtcagatctatgaagaagaagtggccgacacaccgctcagattctttccgccctttcagagagaccgtccagtttggatggccaggatgcgtgcattggaagggaagcagctacttgaggatgaccccacagtcgcttacctcactgcatacctgctcaccctggatgcacagtatgatttcttggctcgacatcaccgtcagatgcttgcccgagc

SEQ ID NO: 126996 - DNA, 390 bp, Zea Mays
ccttggggtcagtcgggcgatgtcgggtgcgctcgcgcggttgcccagcttaccgcggactcgtgctgacgatcgggccccgctgcagtgaggactccccatggcgccactaacagatggacccggggtcctgtagatcttctcccacgcgccgagcttttcgccaaccatatcctcgcgggcgcttcagccgaactcccgtggcaacggccttcccgtacccgccgcacgaaattacggacccagctcctcctgaacctccccataagaatcacagtcgcagcatcttcctctgctcttacccccttcttcctgccgctgtgagtatttcctctcgccgccgccatttggtcatagccgcaacacgccacgaccctccgctctcgcgct

SEQ ID NO: 126997 - DNA, 438 bp, Zea Mays
cccttgtggcaggaacttacttttgtttgcttttctgctgcctgtcaaatcctgatatttgtgtgtttgcaaacttacttggttgtttaattcattgctattgattgtcaggtattgtgcttgtataattacattttcatctggtttctattgcatttgtagcagattagttgtagtcattgtcctgcaagcatatagtccttgggaagtatatgtccagtcgagttttgtgttggctatgcgtgatgtgatttaggtttcctttccttgggactgatcagagcacatatgttgtggccataaagctgtttcgatagcgtagttgtcaaacttttgtatgtacttatggaccaggggacctgctttgcagcatagatttgttctgtgttttttctgccagtagtcacccgacagctaaatcttttgaggttgagttac

SEQ ID NO: 126998 - DNA, 1047 bp, Zea Mays
tgggagtaagaggtttgtggttattgaatccattagttatttgctagtttagttcagtgatggccatggcttattgtgggctctcattttcaggagaagtatgagactgcggcacaggtgaatggggagctgaaagagctgctgctgctactgaaggtacgtcgctacattcaaccaatcttcataatttgcacctcagcaaagtgacgtatctttctggtaacatgtggtacctttgtatgatgaagtgttggatctgagactctggatctgtttttcaggataagtatgatactgtgcttgagaagaatgagaaactggagggccagatggttgctctgtccacttctttccagtccatgaaggtaaactcactatttaatggcaattctgctgcacagatatttagcgagccgctgctctgtaatttcttagttttgcctcactttgagagacgtccatgattgtgtatttagcagtagcaaccatcggtgtactgatagaacactgcttgtgcattggactgtatgtgcaggaagagttgctcctgcagagaatggaagaacaccctctgctgatgctagcgcaagagccttgggaaggtgacaagcgagaagccggtggtgcgaacaaggctttggtggtgtgtgcaggcgaccagctggccggcgctgatgccttcgatggcagcttcagcagcaaccacagtgcctatggtgacgagaagatggtgctgaggaaacgtatctgcgtgcgggagggagcatgccagtggcctaggtctgctacttccagtggcgctacggctggcagccctggggacctgccggagccgctgacaccgggtgcggatctgatcgtcactgacttcgacaccatgatcgatagcctcgcgctaccgtccatggaggagtacctacaggtcgatggtctccccacgccgacgtctgcctcgtccaccaccgcatctcccaagctccagctcctcccctcaccagcctcgccgagccaggtccagcctctgccgtcaacaaccatggtcgtggg

SEQ ID NO: 126999 - DNA, 320 bp, Zea Mays
gttcatgatcaccaatagtacgcatagtattaaggtgctgtcctccttgatttactgtcatcctcgatgcctcaaatatggtctgatcatcaacccctggggccctcaaagctgctggtggagtaattgcatttacaacagtagctgattctgtatgcgtaattccatctgacgctaactggttccctccttgttgttcttcctgcaccattgttacgatatccaagcattgatttggttgatgaacagacatcggcgtcgtatactcacttatggacttgttaccccatggcgccgccatcttccagagcaaatacgcc

SEQ ID NO: 127000 - DNA, 399 bp, Zea Mays
ctcagctaatggtgctgccaaatgggaaagccccttggcaccagcaatctcccattttgccctttcctcatccacggctctaagactcatagtaacactagggctgcagccatcaaagacacatttgtttctatgttttcacaagatccaagctcccagaatgataagggaatcaagtccttttttggtgagtccattaacaatattccccaccaattcccaccagcccagatatgagccaacatccagttgaggagccaaagaatgcagaccaaatttcctaagcaacaaataccagaattccctggataatgaacaggtaacaaggagatgatcaatagtttcatcctcttgatcacatacggggcacttctcaggatgagtcagccctcttttagc

SEQ ID NO: 127001 - DNA, 394 bp, Zea Mays
acggggctggtaacaaatatgcgcaaaagttttgctataccaattaggtgtgaagggctggagggtcaggctggctgtaatatcttgcaatgcagttcgagatcctttctgtgtagctatttggggctgcctatctttgataagaagctgaggaaaagggattttatggtgtgggttaataagattgctgaccggcttcccaactggaaggctcgtttgctcagtttggctggtaggacagcgttagtgaggcatgtgctttcggcaattcctgtttatatccttatggccatgagtgttcccaaatgggtgatcaagtccatcgataaactcaggagggggtttctatggaaaggaaggaagaacgttaacggtggaagctgtcttgttcctt

SEQ ID NO: 127002 - DNA, 303 bp, Zea Mays
caagttctaaaatttatttatgcattaaaactaatttctgatattaattcctgattttcaatgctctctggattgggcctcaaatactaggaagcgcaggggctctggcgcaagaaaccagagactcagtgaatagcgcccccaggacggcgggttgattcctagattttctagggtctcttctgcaaaccggtaaagtgaaggggtacgggcgaaactgagccgcccgatcagaaacggagggctcagattagatctgggttccgcgtgaaccggtacgcaatgcaggccctcggatccaag

SEQ ID NO: 127003 - DNA, 410 bp, Zea Mays
caaggcgatgctggggcaccccatccggaggctcaaaaggcggaagggcgcaaggcatgaggggaggacgaaggcatggccactgcccaggggatcgatcccccttttataggcagacctcctcgcttgcaccccttagcatcacagacgaagtccccactaacaacctccagggttctccccccacgacatgggggctgggacccacacgccatacaatctaacccgaagcacgaagaaggcgaaccgccgcacgcaaggcatgtaaccgtcccgcggttacaagcactcgcccatcttcgcagaaaccagtggtcgaaagggtggactgctacgcgacaagcatccaactgcaccacaactgtgcgccccttcggctccgtccacatccggtggaccagcgcaaagga

SEQ ID NO: 127004 - DNA, 461 bp, Zea Mays
tgttagggcaatactactacagtcaaggtggcaacagcaagtggctttcgacattcgtgcagactgctggcttccctatactgttcttcggcctgttctttttcccttcaaagtcgccttccagcgaaactccggtcggaaagattgccactgtatacattgtcttggggcttatcataacagcggacaacacgatgtactcccatgggctgatgtttcttccagtctcaacctttacactcatctgcgctagtcagttggccttcaacgtcttcttctcatacgtcctcaactctcagaagctcaccggtttgatcatgaactccgtggtgctgcttaccttggctgctctactccttggagtcaaccatgaatctcatggacctaccggtgtctcaggagggaagtatgtgctgggtttcctgttgacactgggggcatcaggcacctactcactcatc

SEQ ID NO: 127005 - DNA, 844 bp, Zea Mays
aacatgagtcctcatgaagtgcattccttcggttactgggaagcaactgctagatgagattcatgccggacagtgcgggatacacgtagcatccagaactctggttgggaaggtcttcaggtctggtttctactggccgacagcaaagagtgatgcagccgagttagtccagagatgtgaagcttgccaattcttatcaaagcagcagcatttgccagcacaacaactgcagaccatacccgtaacatggccatttgcctgctggggattggacatgattgggcccttcaagaaagctcagggaggctacactcatgtgttggtcaccattgacaaattcactaaatggatacaatacaaacccatcacttctctaacttcagccaaggcagtggaattcatacaagatataatattcaggtttgggataccgaatagcatcataaccgacctgagatccaattttactagctctgaattctttgatttctgcgaacaacggagcatccagatcaaatatgtgtcagtagcacatctaagagccaacggtcaggtggaaagggctaatggaatgatactagaagcacttaggaagaaagtcttcgacaagaatgaaaaattcacagggaaatggatcagagaattaccttatgtggtttggagcttaagaactcaacccagtcgagctctacatggaaacacccccttcttcatggtctatggttcggaggcagtgctacctgccgaccttaggtttggggcaccaaggatggtcttcgaaaacatagctgaagcggaagctaccaggctagaagatattgacgtactggaggaagagcggttg

SEQ ID NO: 127006 - DNA, 380 bp, Zea Mays
aacaaattaagaatgcaacaagttatgatatctaaaagaatgctaagtagcaaaattgacctgcaaagagagcagaactttaaaagcaaaaattcgttataatgattttacaatgctcgccatactatttggatttgggagttattttagatattctttcttgaatgcattcataaccagacaaacattactactccctgtcccatatacctccccatgctaatccctgtgattattagagttagaaacattcctctacatgatccaaaaaattctaattaacaatacaaagttgcctgaatagctccttgagagaaattacatttgtaaagttgtattcactgccaaccttttgaagaaaaccataaaaggcataaaca

SEQ ID NO: 127007 - DNA, 496 bp, Zea Mays
tatttgtgctattctgtgcaaacaggccatctcccaggaaggacaagagaacttcatcactgattacgtcctcaaagtgagttaaaaaaaggacacagtgcacgtagaaggtacaggagatatgccccttagcatctaacagtaacagcatggatttcttttgcagattttgggtctggatatctgtgcagatataatggtcggagactctatgatcagaggtatctcaggaggacaaaagaagcgtgtcacaataggtatgcaatctgcagctaagaagaaatatccatacataaaaccctgaagcataacagaaatatctgactcctcagcctgttggatttgcataggtgagatgcttgttgggccagctaatacactattcatggatgaaatctccaatggtctggacagcgccactgcctatcagatcgtcaactctctaaggcagtcggtccacatccttggtgccactgcactcatctcattgcttcag

SEQ ID NO: 127008 - DNA, 515 bp, Zea Mays
ggacgcgctggttctaggttgcggaggaagtcaaggcggctacgcagggtctggttttataccggtcctatcctcactaccatgccgcccgcacgccgagctttgcgaatcttggcatagcccgcgccgaattccgtgggaggaagatgaccagcacctgacctgtgggtcccgacgccagacggaaaggaggcaccggaatccggggcccagtcgtcagtgccaccatgcggaagcgaggccagctgcgcgcgctagttgggccgagcagccaagaaggaaaggtgggctgtgcgcgatggggaatgagggaagatgggccgaaacacactgattctagcccaacatactcctttcccattttctttttcttttacattttccctatcccttttagtttctaaattcataatttaaatccccatttaaattcattttttcgtggtaagtttatcttcacattaattgcccaacttaaatatggcatggtgaatttttttgatatttattttgtg

SEQ ID NO: 127009 - DNA, 684 bp, Zea Mays
cacctgatcgccaccactacctccacctggaacctggaagagagagagacaatggcgtgtaggccgccatgtccatgtggctgcttctgcttctacatggtgttcttcctcggcttgctgctcgtcgaggccgtccatggcacagggcggagcgaggtggccgcggccgctccgactccgagcctcgttccagctgaaggtgctttgctgtcgcacagctgctgcactgtattgattcatggagcatgttctttgcctgccagcctttcttgtccaccttagcttagcttcacccttgagctacctagttgctgtaacacctgccaaagagaatctccaagaaacagtttctttgaaacaaaaggttccatttggttgaatgttcagagtctcagctgcaaaccagccatggagatgccgcaaaatgctccgcatgctgctgcctgcaaggctgcaactgcaaccaaccacccagaaattcgttttaatacttcctcctctttctcttcgactaacgcaactgctggaaccgcctcctcttgcagcgagcgtccttcgccggatcgcggccaggcttggtgtgtccagctgggacttcaccgccggcgccggtccctgcgaccacggagactccggggtgcactgtgactgctccttctccaacggcaccgtctgccatgtcac

SEQ ID NO: 127010 - DNA, 537 bp, Zea Mays
gttccatgtgctctcgcatcatctccttgttcttttgttggtatatatcgtaacaatatatctttccttcgtccatcgatcacccaccacacacgcatcatctgtcatctcctcgctcctcgtgggaggtcggtagcatccaagaagcatgcatgcaggggccgaggggcggatacaggatcgcagcccccctgacccggcctttaattcatgcgcgtatcgagatcagatcaccgtttttgtacgtatgcacgtgatggatcgccctacgacggtcgattcctgataatctctactacctattatgtagcgtagcatacattacaacactaccataacttcacccttctcctagacccccttcccccctcgcacgcaacagccaccccgtgacacccgtcttgacctccgccgcgtgtcattatccaaccaagttgcacccccaacacactcagccccgcacccctcgcccttacctccccggaccctaacatcaccactgagtacgagaggatgagggtgaacgggaccgtcgtg

SEQ ID NO: 127011 - DNA, 658 bp, Zea Mays
cggacacttctgccgcggatgggatacagggaggctaccacacatatccagtggctccttggtgccctggtctctcactacgagtttgacgttgtggatttccttatttgtgagatcgaggacaccgttttggaaggtctgtgtgcccgtcgatagctgccatatgctcactacctatgtcacatttttgctcagctgattcggcctccacagttccagggcacacttgaggcctcacgccttgtctttgggtcctaccgtcctacgcctgaggctcctgtgccagcttttgctccagtttttgacactcaggtcgaggatactgcacttcatcagtttgaggctcaggacacaacagttgatgatgatgatgatgagtttgggattccgcctccgcctcctatgcctccacgctcacatgatcatgaggctgggagttctcgtgctacccctgctgcctcttctgtcgttgaccctgcttttgcttcgattctccagacacttactcagcagcaggctcacttggcagccaagcagacccgccaggtagcagcccatcagcggttgtccgagaggatgctctcgatgtttcagaccatacaggacaggcaggattctcttcagcaacagcttcttcaggatcgggctgagagcaggg

SEQ ID NO: 127012 - DNA, 460 bp, Zea Mays
gtcgaagtggtcgtagtagtcatggatgttttctctatcttttttgctttaatttctggaggtcatggcgattggctaggtgagcccatgtaccttaaaagttctccacaaaccttttgtgtaagcataggccagtgccagttgttgataaagtatgatctgagttgtccaagctaggtcattggagtagccttgagtaatgttgggaagtaggttaccttgatatcatcatcccctctagcaaagttaatggcagtgagtaacaacacatccattgatttgggtctttatttttatcatacttgttaatgttgtcaagcttgaatttccttgggtacttgatctagtttagcctttttggaaaagcatggaaagccatctgcttgtttcatgtcaatgtcatgcctagccacattgaaagactctacatgattgttgtcttaacgcatggaatttaacc

SEQ ID NO: 127013 - DNA, 321 bp, Zea Mays
attatagtcggtcttggcacggacggtttgatgctgtcgtttctgcttttattgtactagttcggctgcgcccttaggcggcttctgcggggataatcttcgcggtaagcttcggttttttcgcacttgttgtgctagtccggctgcgcccttgggcgacttctgcgcagatagtcctcgcgatagacttcggtttttgcgcacttgttgtgctgtccggctgcacccttgggcgacttctgcgtggatagtcttcgcgatagacttcggtttttgcgcacttgttgtgctagtccggctgcacccttaggcgacttctgc

SEQ ID NO: 127014 - DNA, 379 bp, Zea Mays
attttgggatacgggtgcagtaaaaaacgaacagggcctacatgtatttttacctaaacgtttcgtgcaagaaataacggtcaggtgctatatttgtgtccagcaacgttataaaatttaaagaccaatgagaacagaatgtgtaaattctgttgctcaggacacagagtatgttcatttcattaaagtcagacaaaaatattataaaaccagtagaaatcggtacgaattaaattcaagtaaactgacagtattttagttgctctttgtaatagccacagagggtttggggttcagatagccctcgactacggaaccacatatgcattacaagcccaaagaacagagaatctgatgctaatctcttatctcgttcacg

SEQ ID NO: 127015 - DNA, 411 bp, Zea Mays
ggaaaggtcatcatattggttatcgagagtgtggaggtattcggccatgtagacgatggtggggtcatcctcggtaggatctcttcctgacagagcctgaagtcttttcctccaggcaggggtatttttgttgctgggtggaaagtagtgaaggggggtttcaaagacctttctgctgtagttttggcatagctgtcggagggcttttcgggcaacattttggcaagtgtctgggaagcggtgtccggtgaaagtgacttggaaaggagggtggtttgggtagcttcggctttctcccaggtagactgccatagagcacttctctattccattctcgagatattccttccagacatattctggcttcttgcggatccccatgcgaagcgcacaacttcgcaacagatgtag

SEQ ID NO: 127016 - DNA, 639 bp, Zea Mays
ttcagagtatgaccgcttgtagagagctgggaaatgccgaaggagaccatcaccaagtctagcgaaggtgaactggtccagctgaagtatacattcagatatggggataaattcgatgaaccaaacgatgactggctaaaatgcatcgaagttacaagtgatgaactgcttggatcatattccaaggcagaagataatgcattatccacagccttcggaagtcgagaaaagaagagattgaacatagtttttgacgctattggctttgtctaccccgactaccgctacctgctgcgggggcaagggaagaagaggaaagctgctgctctggccgcctcggctgaacctgtgccgaaggatgcgggcaaaaagatgaaggtacttacccaccggccatgttatattgaaccggccatggtgcctgagtttggcggggaggcgtcttcagctgctgaatcaagagaaaccgctcctccgatgcagagggccgaagaaccggctataatgttaaaggcaccttcggttgagctagttgaaacgaaggttgacaaagataaggctgaaaggtcaacaactgaagaggtaacaaagatgctagggactttaagtccttcaacagaagcaacagcgctgagggca

SEQ ID NO: 127017 - DNA, 283 bp, Zea Mays
actagtgtcagttctttacgccattgatcctatgttacttacagtacgcccgagatcccaaagcttcccagcgccggtcctcgccgctcactcggctgagatggcggctttaggtcgcctttcacgtttgcttagttctaccgtccaccgctctggaggccttgtgcgcgtcttctccatgttggtcgaggtcgtcgatgtcttcgatctgtacctgccacgtgacgcccattgctactacatcttgtatgtgtaccatttctgtattcatattccttctgag

SEQ ID NO: 127018 - DNA, 377 bp, Zea Mays
gggagccttctgaaggatggctcagatgaaaaccaaattattggatccccgatagaaatcctcgatcacagctgcctccacgacctcaggaatgttgttcctcattgtttgaaatctcatcgctttggtgtttgatggatttgacatcccatggctgcgccggtttgtcggagagggattggaacttcgcgacaaactggtggctaaaatcttcccaatcgtcgatactgtgtcgcggcatatgtcaaagccattgcaacgcgtcctaccctaggacaatgggcaggtacatggtcatgttttcctctattgccccagtagcccaggcggtggtcgtgtagactgccaactagcacctcgggtcttgcttgggatcg

SEQ ID NO: 127019 - DNA, 661 bp, Zea Mays
gttccatcctcataatggcctcaatcttctcttgatttgcttctattccccgatgactgacgataaacccgagtagctttctggctggcacaccgaatacatatttctctgggtttagcttccatcggtagcatctcaagctgttgaagacttgctgcagatcctcgatgaagttttctgagttttctatcttgataaccacatcatcaacataagcctccactcgcttgccctagtgatcggctaagcatgtctggatggccctttggtaagtcgctccagcgttcttgaggccaaacggcatggaggtatagcaaaaggctccaaatggtgtgacgaatgaagtcttctcctcgtcctcctttgccagactgatctgatgatacccggagtagcagtctagaaaggagagcatagagcagccagcggtcgaatcaactacctaatctatcctagggagtttgaagggatccttcgggcagtgcttattgagatcagtatagtcgacgcacatgcgccaatcaactttattctttttagtacaagaacagggtttgtcagccactctaggtgcagtacttctctaatgaatcctgccgacactaggcaagctaactctacacgaatggcttctcacttatcgggcatgaaacgatgcagc

SEQ ID NO: 127020 - DNA, 719 bp, Zea Mays
gaataacccggcatacgacaattcaaggctaagtaaccaaaacttacagtagggggaagattccatgcagaataagcccaaggggcaccatcattgacaatgacacctctcagcatcaactcaactcggctcaagacatccctctccatgattcttttgtctgttacatgagaagggtccctgacactggtatactgataggcgggatgcactcaatctttaagaggttgaatgtttctaaacacgaagtcgatcacaacagctctgatggtcaagcccctatctttcaaattagcgacctcagctagcaaaactttcgcttcagaaatctcagagtcagttggcccctctatccaactgggcactcgcacatcaggctcccttccataatggggagggagagagccattgtgattctccatagtgaaccactcataccgccatcccttgatactgtctttcaaagggatgtctagatactcagccttcctaccatgacgaagctctaaactagctccccagaccacctgatgttgtccatttgccatacccagcttgcaatgaaacaaatatttccaccgaccaaagtgcggggcaatcccgagaaaggcttcgttaagatgaacgaagatggtgatttgatggatagaattagggttcaaatgcgtcaggttgatagagtaatagtcaaggaggccacagaagaagggagaaattgg

SEQ ID NO: 127021 - DNA, 921 bp, Zea Mays
ctcatctaggagatattctctctacacaggagagtgttcattcatcaggaatgtattattcagtacgaggtttatatgttgcatatttataattcaaatatatgagtcctcctaggatctcttgacggatcttcagaatcctattaactgcatattttaattcatgccatttgccagatatattacatagtggaacagtgtttattcaacacatatgtgggatgggtctctcacaagacctcttgaaccatcgcattcaccacacattatatttcaatagtgcccataaatgtccgaacttcaagctcgtgactttcattttgcgattattggttcagcctcgattgcatttatcaatgacccgataagagagcttcaaacactcatgcctaggactttgttttggatccctttgcaatctatagaggcaagataagtgtcaacatatttgtctcccacatttaataatgatctccgtcatttcccaaaacgaaagattcattgttccgaattcctagcaaaatgatattgcgcgcattgctaggaatttcatcatcaagatgaacctcttcgtgaggcaaatcaccatcagggtgaattaatcggaggagagttatcacagaccacgtgaatctgcaatcagaacatatgttttgactaaggccgatggatcatattcacaggcgtccccgagaatagatcaaatgtcaatacgtcaaatgtggatatgatattaataatgggtatatccacatctacatcaggtagaagcattcaaaccaatatggttactcctcaatgatttctggcatactccatatacataggagtacacaccgaacgacaggtttagtttggcttttgtgcgttttatagaatattgaggcattacactatatgggcattcctcccctaatgccg

SEQ ID NO: 127022 - DNA, 1045 bp, Zea Mays
gctggttctgtctgaacatcagactaacagattcatgccctggacttcaagcccaatttcaaaccagatgcagtggctttttggggcaacatcatatggcaatattgtagatggcatattgctctacaactttgctgcagagcttggtatgagttatcatcagaaatcaagagaaaacttggcttcaaatttggctgtcaggttcatttaactgaactcctgatggtacagtgcccaccggatcagaccgccagcgcggctgtcttcaccgccgacgaccgatcttcgccgtgattcacgccaccgctgtaggattcgcgtcgccgatgacccgataagaccgccaggtaaaagccaccccctggggataactccggtgactcaccgtgactgcctttctgctttgcggctgtagccgataagctcaccgccgaccgccgcctctcggtcgtgtgccacgtggctcaactcttccaccgtgtcgccgtgacccgctactgctgtcaaatcggcgccggtgagcttgccacggcgttagccacgaattcaccgcgccgccttcttcctcagctccggccgccaacacggctcggccgaattgatcaccaccgcccgtcctccctataaattgagctcgtgactaactccgtgaggtcgtcagctaactagccaccactaatcagccacaatcatctaccagcgagcttgaatttccaatttcccccaacttcgttctccgccaccgtgaaacgagcctcaccgcggccaacccaatttaggtcagttcatgtttctctgttgcttgttctaacattctcatgtgcccttgatgctctccaaaccatccaattgaactagaccgccatgaatcgacgggaacacattcatctgcccgcaaggtccacggtcactgcggccagagcaaacctaataaccatccttgcaattgatttgggggaaatgctcggggtagtactgatttcatgtccgccgctcggagaacccagccatagccccaatcggccggtccagaacctcgccggag

SEQ ID NO: 127023 - DNA, 541 bp, Zea Mays
tcacaatattcttttgaagctcgtgcatgcctcgcaagattctgagttcttttatctcttcctcgttcatttctcttttgcaacatgtacagtgtgagcagtagtctagattcagtgtatatagtagtagcaggagtagtaagtaatgcatccgcagatcgacgagagacaacagctagctagcagggcccggccggggtgtccttaaaacacgctctgatctggaccaagctactgcatgcatgcagcgtagtactacgtacagtacagttggtatagctgctactgggtgtagtgtagtgtagctgcttttatttccattccatccgccatcgcttgttgcactactactgctcatatatttccggttcaacacagtgacgacgtacagtacagcccatgtttcgacgaggagacgtgcatgcgtgaccacgaacgaacgagtagcggatcgatcgaccccaatcatccatgcatcatgcgtcaccacgaacgtacgcagccgcctgctactcatccctgattcagtcgccaccttctg

SEQ ID NO: 127024 - DNA, 350 bp, Zea Mays
acgcagtagatatccttcgggaggtaaaaagatctcgcgagggcgcgaatttggtcacgacagaagcttatcaccgtgcctgtagccgtgcgacgtggccggaccgccggtgtcgccgtggaaatttcggtgacctcagttatgccacgccgtggctcgttactgcgcggtagtaaccgtggcacactcagaattacaatctttgagccgttgcaccggtgaatgccacgactaagccaccagtgttctcccctctctccggcctccagcgcgccatctcaaattcatggaccaccgccctcgggtcctataaattgagtgtgccatcggctccgctaggtagtcacgca

SEQ ID NO: 127025 - DNA, 870 bp, Zea Mays
ctcaaatttttaatcttactcaaacagccactcggttgtcttgtacccttgttgatgatcccaatccttggtcaacgcctgctagctgcttgcagcttgcccgccattgcataaagggccaacttgtcgcacgccattttcctgcctctcaacgattccacacctcttctcttcttcctcctcctcctgtgtgaggcgccatgagggcgtcgacgatggctggggcgatcctcgtcgccgccacgctgctgctcgtcgtcgccgtccgggacggccactgcgcgcaactgtgcatggactcaagtagagcacgctacacttcttggaatctattgcatttgcagtcggtctgacagtctctcctaattgatgtgttcatctgtcgttgtgtgtgtgtggtcatggtgatggagcagcgttcccgcgggcgaccaacgcgtccctctccttctgcggctacaacggcacctcctgctgcaacgccacggacgacgccgccgtccagaagcagttcgcggccatgaacatctccggcacgccgtgcggcgacgtcgtcaagaacgtcctctgcgcggtacgtacggccggtttgttgttttcggacggcttctttgagggagtgctctgccggccgctaaggttccctgcgcgcacgtacagagatgcagcccgtacgccggcgagctgttcaccgtgacgacggccccgcggacggtgccgctgctgtgcagcaccaccggcgcgtcgagccgcctgagcagcgccgccaagcccgcggcggcggcggcaacggcaacgacggactactgcacgcaggtgtgggacacctgcaaggacgtgcgcgtgccggggtcgccgttccaggcgccc

SEQ ID NO: 127026 - DNA, 320 bp, Zea Mays
caaccagggatgccagaggagaacgagtgaggagctgagcccgaagctgctccaactctaaatggagacgccagagaagctcatggaggcgaagagcactggtgtgcccttgttggaggacacaacaaaggcaagtctgacaatgctccaacgagtcgagctagcgccacacattagtcagctcgcggtagaagacatcaacagaggagtcctgctgacgaatagagctagcgagcttcagagtggagatgtagagagcagtgttgctcggctggtagagagcctgcgcccgctcccacatcgcctgagtggtgggcaga

SEQ ID NO: 127027 - DNA, 346 bp, Zea Mays
gcagtccgaggtcaccgcgctgaaacgcgacaaggagaagtcgttgtcgacggtcgggggcgatgttcctgacggccagcaccaccacgatcggccacccaaattttagaagatcgattttccccgcttcgatggcaagaccgatcccttgatcttcgtcaattgttgtgaatcctacttccatcagcagcgcgtcatggaggaggagaaggtctggatggcttcataccatcttgaagacatggcacagctctggtatatccagctgcaggaggacgagggcactcctcgatggagtcgattcaaagatctcctccacctgcgtttcgggccgcctatccgctcc

SEQ ID NO: 127028 - DNA, 657 bp, Zea Mays
gttatagtgtataccatattcgtcaaaggactatcccgagttaattcagcaactaggggtatttataattttgagagatgtatgcaacacaagcataaaggtcctagataggacgagcaaagtggttctacaggaacacacaatggttttcacaccaacatagtgcaaattttctcagaataatctttcgatatacgcgcaacttcgtgttgctagagcttatatgtccttttatctcatagtttgcttcatgtcattcagcgacaaagagagcaatgtgctaacatctggttgagcaatgtatgactgagatttctggtcttaaaacatttggtaaggactttttgcttactaatataatcccaatttatgatgtcttttatgccaaaaaggctttcatgcattatattatatgtcttcgggttacttcaggtaaaactatatgcatgaggagagagagcagaaaattaacttatttgtgtttcattgtatttcaatttaatttcccagatttctaagcactatagagcttgatataattgttatggccacttggcgatatatgaatatataatgccacacaaagtcaagtaaaatatagagccaaacaaaattgtttatgaaggttgcacataatgtgactttaggaccttgaac

SEQ ID NO: 127029 - DNA, 336 bp, Zea Mays
cctgttctcgggctgaaagcagtagccggcccagaagtctttttcttaccatcgtgcgacccaggaaggaatttgcaccccgccggcccactccatcccctctccttgcttttctctaaagtcaatgacgtgtggtccccacctgtctgcccctcacctctttggtcgcgcacgcattcatggggcgctgagtggtgggaccatcccgtcggacccgtcacctctatcgtaaccacctcacgcgccgcgtaacaacctcctctgcatctcgtgtctgcgcgccggagtataaatcctagcaccctggttgcctcgtcctcatcccagtcgccgaag

SEQ ID NO: 127030 - DNA, 286 bp, Zea Mays
ttaggcctagtaaccttgccccacgccaccaaacagtgacccccattggcttgtcttcttcctttccaaaggaagcctcttcttatcttgtcaatagctttaacagtccagctagggaggtccaaagccatggcatcatagatcattttcgttgtaagaacagactgaacatacacaacacgacctgcttttgtcataaggtcggccttccaacccggaagcacattagccgctttgtccaccaatgcctgcaactgaacctttgaaagctttcccaaagacagag

SEQ ID NO: 127031 - DNA, 280 bp, Zea Mays
ggcgatggcaaaggcccggcgaggatggctgggtgaggacatggggcaaggagagggtgaatgaggggcaggggcatgctgtggggggtccaaggtcttcacctaggcgatcgggtgacgtgcgcggggcgagacgtgggggcatgggcgcggtttgtgcatgcggagcgcacgccctgggcttaggcgcgacaattctaaattttctaatccatttttcttttattttctctttaggaatcaaattcaaacatgacacaaattcaaacttaaatatttc

SEQ ID NO: 127032 - DNA, 444 bp, Zea Mays
tcatcggatcagagttcggggcattgatgcggctaattgatcgagccacccatggccgccgccatggattggggcgcctcgtcgctcggcgaccgccggatgtgtgggagatgagcggcgaatcgtgcgccgtccgattcatttcgaatgggcgagattagaagatgcggatacctgttcgtgatggggtctcggtcgttagtcccttgatggacggtttggattaaaaaagtgtgtggatgtagaatctaggccgtagattgttaatccaaaggctagggcaatcttatgcaagggagagatttcggaccgtggatctcggatcctatggtggcagttatgttttgtgtgcgatctaatctgagcgcttggctgttgatctaagggctcagagtcacgcgtaccccttcggctggcggtctttcgtatgagcccctgtcattc

SEQ ID NO: 127033 - DNA, 354 bp, Zea Mays
gttcttgaaaatgaaatcggcgaccacagcttctgcagtcagacccctctctttcaacaatccaacctcagcaagcagagcccctgcctcagccacttccaggtccgtgggggattcggtccagctcggagtgcaaacatctggctgtctccctgaccgtgggggagggaattcccgtgattctccacgataaaccattccaggcgccatcctttgatgctgtccttgagtgggatttcaaggtagtcggtcttcctcccacggcgcatctccaaactcgcgccccccacaagctggtgctaccctccggccatcccaggccgacaatggtacaagtacttccataggccgaag

SEQ ID NO: 127034 - DNA, 447 bp, Zea Mays
caaacctctgtcgaaaaaacctaagcgcagttttattggtttggttaaaattgttgagggcttgatctcggctgaggatcttgagaaggatttcggtttccatttcccctggggccgtacttggaaagccaccaagtgtcactctggtttcctgatgcaatttccttctcaagagaggctggatgaaatgatcaacttccctgaattgaaaatgaaattatctggtgcaaaaatctctgtttcgtcttggagttcacaggctaagccaaaatccaaactccactctgtttggattgttgctgaaaatgtgcctgaagaacttcagaattactaggctatctgtgagttgggctctacaattggggctgttgaagaggtggacattttgtctttagattctaaagatattgtgagattcaaagttcatgtcaaaagtgttgccatgat

SEQ ID NO: 127035 - DNA, 449 bp, Zea Mays
tgttggattaagtcaatctttcacttgatattcaaattggtatctttgtgtgatgaaagtgatagagtatgccttgaccaaggtatattgtgatcccctctagttctgaaaagctagaatgtgcaaagtacaagttattcaaatacttgatgcacaagtttaaggggagcacacataacttgtgtcttttgagactaattgtttcttgagtgatcttgtatagtctctaggtggataagagaagatgagcaagaaatggagcaatcaggacctgggtacctcgataagtcaagaaattgcatattgttagattgctcatgctctataaaatttggtgatactacatccttaaatataatgaggctatgataataaatgatcgtgaaattggtatctttcaattggtagccttggtagtttgctttaattgacatctcttgataatcatt

SEQ ID NO: 127036 - DNA, 586 bp, Zea Mays
cccgagggcgccggtaggatttcttgggtcggagcgttgactgggaccaaggaaattctcgccggaattcatcactgtcgcgactccgccttgcatcgtgggggcgtgtccctgcgactcaaccgctggtaaagtttcccttgccttgcacgccatcattctctgtgtgtgtagcacccgttagctcgtgaattagggaatccatgcgtcgggtcgtgtatctcggtgaggacaccgctgtggggaatgatttccaccgcactcggttgtcaggggtagatgatgaaatctgggccatgggatctacggtcgatggcggggatggaatctggggagtgatggtcccctagggcgtgagatggtgatcggaaggatccagggagatctcggcttcattaaatccttacccttgatcttagatccaagggtctctgctgcgtaccatttcgatgctaggataacctaacctgggcggtctgtctttgatcggacggcgctagatccccgataccccttcggctacgtagttttgcataagagacctcagagttttatcaaatcaacccgcaatccatagggatgtaac

SEQ ID NO: 127037 - DNA, 426 bp, Zea Mays
agatggttcgcgtatcagaccgaacaacctggcatggagtatacagaacgtaatatttattatcattcctcatctttacactcgtcccagccaaacctcttgtcacatccacggcaccacaataccataatacaacacccagacacgtggggcgagtactttttggccccctagaaggccaaaatgagatgaccagtcatatgagccactaggggcaagcattaatgccccatagaacccaaacccgtgggcacgaagacgacataataccaaaacacccacacatatgttgaaccaaaggattgatggactaccacccgccgctattgacattgtaagggaagatatagctggggtattccgagataagctcagagttagcatgatctccgggggggcaaacatatcgaaaaccctatgacaacc

SEQ ID NO: 127038 - DNA, 413 bp, Zea Mays
atttgtgaacaactcttcctccagcactaaatgcagattcagatgccactgttgatgcaggaataaccaatacatctcttgcaattcgagtaaggataggataatttgcaccatgggtcttccaccagctcaaaatgtcaaagtagttaccttctttccaactcaacaatggttcattattgtattgatctatttcagattgctgctcttgaccaatatcaacattgtcccttaaaaatgaacttaatctttttctctttggctcctcattcaagtccatatagcactgagatgttctaacagatctagcggttataactttagtttgttgcatagggcgacttgtagaagaacgatacatggaggcataagaatcatatagcttttgcagaacttttttgaattcatacata

SEQ ID NO: 127039 - DNA, 529 bp, Zea Mays
cagatcacttgggaagaatttagactagccttccgtgaacactatgttctagagggagtgcttcacatgaaacaagaggagttcattcgactaaagcaagggggagatattgtaatgcagtatctcaacaagttcaatcatctgtcccagtatgctatcgatcaagtaaatactgatctgaagaaaaagaattgcttcatgaggggacttaatgacaggcttcagaggaaaatggcaatctgtctagatcttacttacagcagagctgtaagcatggcattggccatagaagccaagaacacaggccatggaaaatcaaagggatttggaggtgacaggtctaatcagggacctaagaagcgaaccaggttggtaatccgacattttaatcagaatcgttcttcacctcgtccaccctcctatccgttcaaacagcctgttttcattcgtcctgccactgcccccgcttctacaaatcagtcgagtgcccctggtactcgtttccctgctctcccttgttcttctacta

SEQ ID NO: 127040 - DNA, 647 bp, Zea Mays
cattcccttaggaacgacttcggatctttttcaccatgacttacccgaagattggattgcaacattttcgatattgcgctcgaaggtgctagatcattattatattaaattgcttgatataggaaaagactgtgaaagtaaatgtagatagacattaatgacttcttgatagctttgggctcacttacctaaccccttggggtttttaatatatatgcttcgtctccgggaccatactgttgacaatacgtgttttagatacctcccttttgtccctttgctgcaagtcatgccttgggaacttgggttgaccaataggcacttggtcataaggaggtggtcctgggacgaaggaagcagatggtgtccatgcactcattgctgggttacatgaggcatttgaggccaaatacaaacttaaccttggctcctgtgactaaggctggacatactgtgggatgtaaggtgaataggatgaggatgtattgaacacctcttttgactgggagggttgattggctgacgaagcaagctccttctacttgttgatggtgtggtggcatgttcttgtggtgtggtcgttgtcctcaccacaaaacaagtagaatggtttctttggaggtgcgttgaatctaccaccaagactt

SEQ ID NO: 127041 - DNA, 331 bp, Zea Mays
gaaggatttgtggttaaaggacaagagagcaaagtgtgtcgctttattaattccttatacggtcttaagcaaagctcccagacaatggcatgagaagtttaataatactctgaccactgtcgggttttgtgtaaacgaagctgacaagtgtgtgtattatcacttctctgggggcaaagatgtcttcatgtgcttatacgttgatgacatattgatatttgggaccgatttggaggctatcatggagacaaaagtattcctctccaagaactttgatatgaaggacttgggtgaagctgatgtaatattgaacatcaagctaataaagggt

SEQ ID NO: 127042 - DNA, 533 bp, Zea Mays
ctaaggatcaggacgcttcaggtggtatcagagccataggactggccgtatatcgcagcctcgaccttaaaagttttccttaaaaagaaaagacctcttaacctctaaaagaatcttctctctttcccccgatattaacaaacccttcttctcttgctaccagatggaaggttcctttgtcattaggacatcctactgctcggaggtggaaggattccctcaccttctacggagttgcacgcttcgcattgggatccgcaagaagccgaagtacgtctggaaagaataccgcgagaacagaattgagaaatgctctatggcagtctaccttggagaaagccaaaactacccaaatcatcctcccttccaagtcaccgccactggacatcgcttcctagacacttgccagaatgctgcccaaagagccctccactagctatgccaaaactacagcagggaggtctctgagacaccccttcgctactttccacccagcaacaagaatactcctacctggaggaaaagacttcagg

SEQ ID NO: 127043 - DNA, 559 bp, Zea Mays
gtcatggtctgcttgtgtatggtaggggagagttggtgtgcgttttggtgtgagtgtgtgcatacatgaacagatactacagctatacttgtaagtgagaggcaataaaaaatccattgcactgctcgggagacttgccgccagctacacactactggggctgggttgtttatgcacttaaactcaactgccatttctacgtgtatgtcgttgttgctaattgttgtcgggttgtcgagctaccaagtgtatcgaactggagctagttgtgttgggtttgggcctccgatgaaaggccgccatgcttgggcctcgagaccggaatggccaatagaggccgcgacgggccgcatatctaccggtggggtctgggaagggtgaagtcatgatagcgccgtggtctatactattgacttaatagatagtagagattggatatggcctaacgacctctcaaaatacctctcaaaagacgcttcaattaatgtacatgccctgatccaagttttggtttccaaatcttacagaacaattaaaaaaatgaaacaaaaaaaactcc

SEQ ID NO: 127044 - DNA, 432 bp, Zea Mays
aagaggggagctctcttgggtagaactctcttctcttttcgtttttttcatctcctcttcacaaatgatcttgttggtggtatatatagccctcccaaggccgatgagtatatatagtagcttgaggtcggcaatagaggttaaggcggttgagagagaggacaagtggcaggctaggcgaccccctctcccgtccatccttgcatcaaacaatgtggaatgcttcttaaggtcagtttgtagttatgggtcgccaccgttgatctagaatgtgtttatttctacgcctttggattttaagccttggatcgctgaggtgtcatcttctgatgtgccaacttacatgccgtgttgtattcattatgctacaattgcaagtctgaagggggcatcagtgtgtggccaggtgaccacttaacaggttggtcggcc

SEQ ID NO: 127045 - DNA, 540 bp, Zea Mays
atctcgtttaagggaaaccgtaatcctgccctgaaaaagctttcgtaaaacactacttcgtcatccttcggctttggagtggtttcttctccggcaaaacgaataagcttcttttcagcttcttcgaagtaacctagcttcatcatcatgggcatgtcggcttcagacacagtagatttttcaaaatccaagtggctgggttttgatgggatcagaatactatagtcttcctcttcttcatcagcattttcttcctcggtattagcttgttcagcttcggcagcaggtgcaccttcgtcaatggctccctccgtcacaactaatcccgattgtctcatgacttcggagatcggagctgtctcggtggcttcagtctcctctccttcatgggtcacgctcgcaatcgagcgtactctggctatctgatgatgaatcttttgcggttttgacgaagctgatgttttttacagtttttgacgaagctctcttttttgacgaagctctctttttttgacgaagctaattcaaaatgatggttcg

SEQ ID NO: 127046 - DNA, 401 bp, Zea Mays
atatatggagaagcgtgtccactacatcgtacctcgtccgcaatatcgacacttgtcaccatttgttctctttctctcggtcatcaagttcttcaacgcctctgcttcactaaggcaacctccgttttgacttggtcgatcagcacagtctacttatccatatgtacacttgcttgtcgatgtcctcagctatcagtcatttatgttagttttctagccctcgtttgatcagtcccagcctctcgtttgtccttcactgttttcagtctattagcatgacacaaccttgcttgccattgtccatagtcgtcaagtgtatccatgctccatagcagcaacccaagatacatgtatccatgctccatagcagcaacccaaaatcaaccaaaacttaatcatct

SEQ ID NO: 127047 - DNA, 404 bp, Zea Mays
ctctggccccacttttgcaggctcctgctgagccgctgcagcttcatgaacatacgctcaatgacacagttagattgcaccggagcctcccaactttgcttaactgcatcaaacaaaccatgaaccttcaactagaagctctcaaaatggaatctgcgcttacccttgttggccacattcaaaccaagcaggagcgtacaatgatcagagaccccagccgccatactttgcaagactgcatcaggaaaaatgccattccagccatcacaacagaaggcacggtccaacctcaccagagtaggagatcgcctttcattggaccaagtatatttccgacccaacaacggaatttccaatagatcattatcatccaaaaaacgtcggaatctccccatcatagccct

SEQ ID NO: 127048 - DNA, 516 bp, Zea Mays
gttgatggtctaatgcggtctgcagcaagagcatataggactgaggtgttcaacaagcatatgtctacaattattagtagttgttctggtatatatgactatctaaaagagaatcacaacctgcattggatgagatgtgccttcactccagcaataaagtgtgactttatcaccaataatctatcagaatcattcaattattggatcaaggacatcaaggatttgcctatggtagacctggttgacaagctgagggagatgataatgacattatggcataggagaagaaggatttcagagaggttgcaaggaaggatactaccagcaatcaaattgcaattgcatgcaagaactagaggattaggtaacctaaaggttgtcaaatcaaatgactcgagtgcagaggtcaaagactataataacaatgagagacatgttgttaagattgcaacacatgagtgcacttgttttgaatggcaacacacaggtaagccatgtgaccattgtttatgtctt

SEQ ID NO: 127049 - DNA, 338 bp, Zea Mays
gatgccttcaaccgctgtgatgcacttgatcataggttgacttatctctactatattaaagcaccagttttaacggtcatcctgtgttaatatttttcaaaaaaacctctacatttctttagaatcatacccacacccataaaatctcttctctactactataataggatagttttcgtgcgtcgtccccctccagtgatcgtcgtacgtcgtcatgcttccacgcatctctcaaacgaactcccgcacgccacacaccttcctctgcccaccgtcgcaacctcagagcacgttgtgaggataagtacctgcaaactctgtgccgagcgatgcgagga

SEQ ID NO: 127050 - DNA, 478 bp, Zea Mays
acatcctcgtgcaccactcctttgctcgtgaattctggcacgccatgggtatccaagtcggtgaggacctcagctgattcaacccgcaccaacttcttcgaccccctgtcttctctaggcttcccccaccttcgttgcgctttgttgctggcacttgtggaagaggcgcaacaattatgtcttcggacaagaaccacccccttgttgtaacccttcgtgcatgtattgcagatgcccgcttgtgagcttgtagattgaaatattttgaatccacccatgcttttgcttggcatggacgcctctcccatgccctttgatgcttgtaatctccttgcccttttagggttgtttttctaggctgccaagagcccaatatatcaggtgtagttcccccacccccgtcgagaaaataaaaagcaacatgtttattcttcttcattaaatattttaagactagagataaaattgtgtttttaat

SEQ ID NO: 127051 - DNA, 602 bp, Zea Mays
taaagcttgaagaattgcttcctcatttctggatctttatctctaagtccgagcatatacaatatctcagtcttatgaaaaaattcttactgaaaagccaacggatacctgcacgaaaagaaaccattaaagaatagtgacgaagcaggcagctccatctaatcagtttttggcagaaaacactgatgaggccattccgacctcatgccctcctggcctcatttcaattgctaatgcccccagactcaccagcctattagtccttacatccctccttctattcccttcactaaggacagggacacggaggatcgtcaccatgtcatctagtgacgaagcagcctgtatcatctactggggaaaatagtcttgtaattttaatgtttgtactaaacatctgcgcactttgtaagcaagtatatttagacattgcttatctctctcgttttcccccaaaaacataacaatggtggtaataaagtattgactcaagtttaagtgaaactggagaaagaataactgaaagcggactcaagttttttctctgaccaaaatctcttgcatgctttgactacaattccgcagctgcccgtctatctata

SEQ ID NO: 127052 - DNA, 843 bp, Zea Mays
actcaagattcttagatctagacgaagaaatcgtgacaggggaagaggacaagagatggtactcaagattatcagatctagaagacgagctcaacaacggagggagagggcaagagatggtactcaaacctcgttaccttttgacgaaacctggaaggagaagcctcaacagcggagggagagctcgagggagagctcgagggcgagtggagatcggagagggagagcggcgagtgacgacgatgagcgagggcgttgacagcaaaccctagcaggggggttcgcccgctcgagcgaaacctccacctggaaggagaagcctcaacagcggagggggagctcgaggagagagggagagctcgagggcgagtggagatcggagaggcagagcggcgagtgacggcgatgagcgagggcgttgacagcaaaccctagcggggggttcgcccgctcgagcggatgcgcgagtgaatgagcacagccaggctcccgacgaacgcggatttcgtccgtttctagcgagccaggctgagaccggtgatttgcatgcacagagcctggtccaaaactgtatccaggtatccaaacaaaacgggccgtcgagatgctgcacctcatgggccttgcacgctcaaatacaggaaaccaaacagccggatagtgaaatcgatattgatgctatgtcgcctagcgagtcccgtagagtagacttacgatggggtttagggtcgtggttggagcggctctgtcttctgtcatgcccttatatcactttccaacatgcgtaggctccggtggtgaggtccctacgactggggttgactggccccacgaatcagcgag

SEQ ID NO: 127053 - DNA, 366 bp, Zea Mays
caaacacataatattgctcagtttcatgaagatgaagcttatgtggaggatgaaatctctgatgagggtgaaaacttgcttggcagcaatcatgttagtgttacccctgcagtacatccatctaaaggcaaccctatcaatggtaccccaacaatgcagccctctagcaagacgaccaatacaaccccagtagtgcagctatctcaaggcaaccctactaatgtgtccctagcagtgcaaccctgtcaaggcaacactagagctatcccagcaagtctgcctcttcacactgaacttgtaattttttcatccatccttcaaagtttctaattctcatttgctagtggttctgtacatttattatat

SEQ ID NO: 127054 - DNA, 499 bp, Zea Mays
acaataatgttacaaaattatagaaatttgaaatggataaatttgaactccatatgaattttctatgatttatacaagtttcattttcgcattaaaaatgatttttaaaatgaatttctctgattttattcgctgaccggactgcgcactaatttcagagaagcctaggggctaaggcgcaaatatttcaagccttagtaaacagaatccgaggacggcgggtttattaaatcaaaatacagggtctcttttgtataagtgtctggacaaaaaggtatcggccatcctgagccatccgatcagcgaccgagcgcccatattagattggcccaggcagaacatcccgcttccctcactgccgttggatctgaaatctatgtccagaatatgaccgatcgtagccatcggattagtaacatacggtcaggattaaaatgcgcaagagatatttccctctccccatcctaaccacaaactctgaatcctacggctgaccgag

SEQ ID NO: 127055 - DNA, 368 bp, Zea Mays
caggaatgagacataaggtagttcagtgggccgctctagattattcccccttttcgttaggtgagctcgacatcgtgatacaagagtcggagatcaagaatgtggtcgtgagtttacattcagaaaaagctcctggcccggatggtttcattggcctgttctataaatgttactggaccttggttaaagaggacctcactgctgcaattaacgatttctacaattttagatgtaaaaacctccacctggttaatgaagcaaacgttgttctactcccgaaaaaagaggtcttggatagcatcgataagtttagacctatcagtctaataaacagctttatgaagattgtcaccaaaattttggcaaac

SEQ ID NO: 127056 - DNA, 312 bp, Zea Mays
agtttacttctcgattttggaagaagttgcatgagagcttggatacaaagttgaattttagctcagcctaccatccccagactgatggacagacagagaggactaaccaagtgctggaagatatgttaagagcttgtgctctcaagcatggtggcagttgggagaagagcttaccctatgctgagttttcttataataatagctatcaggccagtttgaagatgtcaccatttgaagctctgtatggtagaaaatgcacgactccactgtattgggatcaaactagagaaagacagttctttgggcctaaac

SEQ ID NO: 127057 - DNA, 468 bp, Zea Mays
gctctacataaggcacgtacgacgggttcaattctatgaaagcagggggctcttctgcaaaacgtatttagtgaaggggtatgagttggtctcagtcatccgattgagcatgaacggcctagattagatcggccttggataaaatctcgccttcactcaccatcgtcggatccgagatccacggcacagtcccgtccacgcataactttcacccgagctgatggattgaatcacgacggttacgatttaatgcaccaaaatgttaaactacttctaatctcgacccttcatttagcatccgacggctagcacataatcccttctcctgagtcacccccaatcccgacggcgcgctcaccgcggtggagcgtcatgactggaggacccactccaacccacggtgcctgatccgcacggcaacctgacgccacacgacgagtagtaccaagtgatggacgcgaaggtgtt

SEQ ID NO: 127058 - DNA, 564 bp, Zea Mays
cacaaggcgcctgctgatgatgccgctcccgcgcctgccgcgtcgagcaacaggaagaggtcgtcggaggagctggacctctccctcaggctttgattggttcctcttcctcgtccacctttaattggcccatttgtttacataattcgatccgtataaatgagtgcaagcatctgtttcgagtgtgtgtggtatctctagatccatcacttcttcctcatgtagtacgttgtgcagttatgttcttccatatgatgatgccacttatcggcaagaactgttgtcgttccatgcatcctgctacccaaagggcgcgtgtggtatttggtattctattcggttgtgccttgagtcctctttgtacgtaattagtttttagcactcaattaaaataataatggaaagggcagcaagagttttgctgcaatgtttggggcttttcaagtgattctaaattgcacttacgccatgtcaaactttgttcagtttgtgatgtattattatactagtagtaatatatacttcaactcctttactagtctaattgatatctctcgcttctcg

SEQ ID NO: 127059 - DNA, 475 bp, Zea Mays
gtccagtagccgtggtgatctctaccccttccactccgatcgtccttcacatacccctgtggcgcttcatatctccaccgacaccaacctatggcatcaacgtctcggacatcccagacatcaaaagcttgatcgtgttctgtctattttttctgttcctagaatcaataaaagttgtcatgtatgtgatgcatgttagaaaggccaccatgttcgcctaccatttcctaattccagttcaaaaactcattttccttttcaattagtgcattgtgatctttggacgtcaagcttcctagcttcacaggatataaatactatcttgttatattggatgatttttctcgttatttatggacatttcctctgcgccacaaatccgacaccttctccactatacaaaatttctactcctacgtccagactcaatttcacattcagatacaatccttgcaatgcgataacggtactgaat

SEQ ID NO: 127060 - DNA, 307 bp, Zea Mays
taaggatgaacacgggtgttcccgacaatctagcgcggtttagcttaattgaatgggtcgaggagcatcaggagaatctaaggacactgaaacggaagagcagagagcatgaacggacctggaacgagctagccatggcgaggtcactatgggcggtgttttggaccgatttgggggaaatcccaaattggggctctctagtgagtaattggaggcacgagcaagtggattggatgcttgaatacctaacagagctgagggtgtgctcaatttatagggccctttagcggtggcccatgaatttgag

SEQ ID NO: 127061 - DNA, 492 bp, Zea Mays
tgtagtgttagcataaattgctcattatattttcttgatctatcaaggctaggaaatttatatttcttgtcgttttgattaaatttctctagtgtattttattttagtcaaaactatctattcaccccctctagtcggtgtcctagatcctacaagtggtatcagagcaggactccattgtttgtggatttaatcatcccggagttggacaaaatggtagaagaaatgcttttaatgatagaaaatgttttgagtgtgggaaacccggtcacattgccatgaattgtccaagcaagaagaacaagggaaatgatggagatgataaaaagcagaagaagttctatcacaagaagaaggatgacaaagcctatctagttgaatgggattcagatacaagctcggatgatggtgatgatgattcttcatccaaactaaatgtcggaattgctatcaaggacctcacttttctcatatcctcattgtctcatggaa

SEQ ID NO: 127062 - DNA, 336 bp, Zea Mays
cttttgcttctaccttaacaactaagatctcaaaccatcttaatttgtccaaccgaactctgaatgaaaaaaaggaatcacatttcaggaatgattgacgagttagcacaatgcaggtttagagcctttggttatttccaaaataaagacttgcatatatgaaaataacaatttatactattaaaaatggatacttattgagacctgataaccacatttagctagcttagcaggagggagcatgctaactcataatgccttgtaattactgaatactgatgaaccagcagagccatacctcattgacatcctcaagtagctctgacaaacaaatta

SEQ ID NO: 127063 - DNA, 726 bp, Zea Mays
ctcatggcaaagtcagcggccaagtctgtctatcttcgtcgcgagtgtgatgtctaggatgtgctacagcaccagaagggcttattggatcgttcgaacgagcaactggcctagaaaagcgctgaggtagtggatctatcgatgttgtgcttggatcttagggacgaggccgcggccgtgcgtcgagaggtggcaccattggctgaggaggtccgcttgataaaagagaaccttcaaaaggtgtttggcgagaaggaggagtttcggtgtcaggccatcggggcttattcacgagctggatccctcgccgaggatcttaaggctgagcagtctgaggcctagggcctgaggacccaagtgggaggtatgtgcgcttacctatgctttatctgctcatatcactttggttgtgccttagtgtttttgtttaattattttcagagctcaagcgggatcttgacatttctattgatacttctcggacgctctcccgggccatgtatgagaagatttccgagctcaaggcactgtccagtgtggtggtagactttggccaaaccttcggtgcctaggacatcccctcgggtgggtccccatggagccgcatgctggccctgagtggccatgtgcggagtgaactccgcgaggctgtccataccggggtgaagcgggcattagccgtcgttgcatcccactacaagattgacctcgagtgggtgtgcgaag

SEQ ID NO: 127064 - DNA, 316 bp, Zea Mays
acttggggtccacttgagccggaggttgctgagcctagaggcgatcaggttgctgttgagggggaggtgacctcttcgagagacgcatcacgacacattcaacattgtcgcccacctaaatagatgatcagtgagcttcacgagcgagtcactcgattcaggtcacaacatatttctcacatagttcattctgcagtcgttgcctcttttgagccccgagatgttggacatgctttatctgatactagttgggttaatgacatgcattaggagctcgaaatatttgaaagaaatcgagttcggcttttggtatcac

SEQ ID NO: 127065 - DNA, 630 bp, Zea Mays
cacatatataggagacctaagctagctaatctgtcgatggaggtatctagacgcatgtcttacaacaggaagcaactgataagtgggattaacgacggtgaatcaataaattcacagttagatagatggttctaacgacggaaaagaaaactgatagatcagtaaaaaaactggcagtttaccaatatattagtgaaaggtgtgacttaaatctgtatttctttaaagcatcagttatgtatgtcatgtgtcatatacaaaatgtgtagatatgtttctccctcacttctcgtttaacaatggacctaatagactgttacaatatatatgaccattagaaaccacacaagtccaacacgacaaggagccacacatagcgtaacactcctacattttatttacatagcgcaagcaaagagccaactgttcctgttggtatgcatcactagattcgtcagctagaactgcaaaacattcatcaccaagttcttccatgattaacttagttgtttcatgagcacaacaactaatgagttgtttctgaatcttgtgatttatcaactgacaattctgtggagcatttccaagaactactttattaacttcttcaaagttccatgcaagccattg

SEQ ID NO: 127066 - DNA, 279 bp, Zea Mays
ggagcaacatagtaattcacctcgtccttttgacccttcaattctggagagttactttttgaacaaattgccttccttcaagaagctggatgagtacaaatcagtaaatttctgttccctgacccatcacactgtcactgcatcttgctgcatttaaatttcaatcacattcatgcatatcaaccatagtgtattcaacatttggctttttcatttttacatgtagataatggtacccatgctacacgcaggacattggaccttgtatgttgttaattt

SEQ ID NO: 127067 - DNA, 559 bp, Zea Mays
gtgaaattgagcgaatcaggcgttgggtcgtcgaatctgggagccatggcgtgcataactgggactgcgcaccgaagaaagaacaccgccgtgggccgcgcgacaccgtggccggggcggtctgcgcccacatcactggtgagaagtcctcctttgagttcgcttcggcctcctcatcgcgtcgcactggtcgggcaaagcttgggacatcgactcgtggaatggcgtgtcgccggtgcgccctccgcagcagagcagggcggcgccgccgcgtgctgtctgcggtaggagagatgggcgggagaatggattgcgaacgttgatattgggattaacggtcgtgattagagggcgcatactgcttcggcgtgattgatcccagccgttgatcgatagatggagggttgggaggagatcgcggttgtttaaatctgaggcattgacacaggatccaacgacatcgggtggttaccggttcacataagatggcgatctaatccaagccctcaaatgtcgatccaacggttgaaacctctttgtaccccttcgccgagtgact

SEQ ID NO: 127068 - DNA, 347 bp, Zea Mays
catttaattcaagcattttaccttgtttaattgtttagcaagtagttgaagtaatgtcttagtattgttgtctttctagtagtattctcttattgctagtagttgggtgaagttgggctcttgcttagggtttaattattgttgatttttagaaaagcccaattcaccccccctcttgggcatcgtgatcctttcaacggtgagtcatcccactcccacttcgccttgtatggtacaaccccctcctaggcccaccttcgagtctttggttgtgcctactatcccaacacctccaccactactcttcaaaaattctcccctcactccattaactgccttatcctcag

SEQ ID NO: 127069 - DNA, 475 bp, Zea Mays
tgattaaatatatcacaagacaaatcccaaaatagacggtagcgaactaaacactaaatagcgagacatcgtgaacaaccacacacactagcattagttatctacgagtcatcgagcataacaagtcaacattactggaaagacgacgtacatttcctatatttaaccaacacaacacgacatcacacgtacaagcatttaccacattcacttttattctttcttagttactctattattaaactacttagacacgcgtacattcaccgtgacttctaagcgtcatacagacaaactttgtttaatagggaataattacttaatcgggttctaccaacattctcaatattctaatgcaagcacacacccaagagcacacacggaaagcgatagcctaatcacactgcttcttatactagtctaatgaggttggttatttagcaatattatatttgctacgcaagtattaaaaatg

SEQ ID NO: 127070 - DNA, 590 bp, Zea Mays
aggtgttgttaatagttatgagttccatttagataacatgacaaacattttcttgcaactcattgtaaaataattctagtgtagtatctgttttgttgaatatgaaaatacattttcgtagcatagaagttgctggaataatatactagctttggtaattcaagccgaaagctagaataggaagctaaatcaatccacatctcttgtatttttcttttgtacaggatgccattgaaattaagctaagagaggaagctatgataagtagggttctaaaggagaagcttgtgtccaaggaactaggcattgaacaattgcagtcagatctagcagcttcagtcaggtttcaagtggtactgcaaaatgagatccagagatttcaaaatgaactacgttgcctcacaaaagtacaagcacttggaagttcaggtgagaggtgatccagaaactctgatccttgaaaagctattttcatattttttcccttgtcaagttgattttagttttgtcttacttcctaaatctcttgtttctatcttgatgcattatccttgtaagggctatattttctactccctctgttcataaat

SEQ ID NO: 127071 - DNA, 343 bp, Zea Mays
accgaagggcagaccagggcgtcccatgatatcacgcatgctgttgtccaacacttcaattgattgtctcttagccattgatgcctcgtcccaaataatgagcgacgctttctgtagcaactttgatgtcccactttgtttcatgaaggtacatatagcaccatcatcaatagtgagttgtatcttgaagcgtgaatgggcagttctcccaccaggcattatggaagctgcaaccccagatgtagctgttgcaactgcaatcttgtcctaactacgtagcaccgcaagcaatgccttatacaaataagtctttccagtcccaccaggcccatccacaaagaac

SEQ ID NO: 127072 - DNA, 740 bp, Zea Mays
tcttgctctgtaaggggtggatcagatccagagtttgttgtccctttcagtgtatcatcctgaaatgcaacatggttgtaagtggttgaacattaaaaaaatcagtttaatatcataaaatgcattatgtaatatgtatgttatcatactgacacgaggagttggggtctggtcaaaaattggcccactgtcattgtgttccatttcctctgttgccatttcacctctctacacaaagatatataattagtataactgtgtagtatgtatagtaaaatggaattataacatgagacatgaactgctaacaaacatttttttccggtgtcacgtcaaatttcggcaagcgggtgcaagctgatgtggtttgaggtgtgatatttgtgttcctcaaaatgatgtttcgaacatcaaaacagaaatcctgttgacaaaaaagtgtggttcgtatactgctaaaaagtagtatgcatacatgtacgtatgatgagtaaaaaatagtattggagttggacaaattacctgttgatctgaaaccacatccgattcgtcgggacacgtctcaagcactctacggatatgctgttgtctttcatgaatttcttcaaactgagtaccacccagctgggtctcgggctgcgaagcttgggatggcatatcgggtgtgggctgggtggcatcaacagtgtgtccttgtacacaattatattgaaaataatatatgtcaaaacttgcattat

SEQ ID NO: 127073 - DNA, 297 bp, Zea Mays
gtcgaggatgggtatgggaggatttttgtactcgaagtcgggttcgggtattgagatgtggggatgtgtttatgttcatggggatgggtctgggaagtcaatatatagcagatggggatttccacgacatctcatgcagctgcacttctccacgttatcggaccaattagtagaatatagtatcgaggctatcagcatgcggtccacacacgcttcaaatcacggtccacacacacttcaagtaacgggacgttggtacttcctgatgcctctcatgctaagtggtgataatccggt

SEQ ID NO: 127074 - DNA, 578 bp, Zea Mays
acagagagaaaatgaagaagagagagaactagagagttggccgccaacatggatctcgtgcgtagacaactacccggcccgacgagtgttctaggcgtgtcgtgggatgccgccgcgcgtgcatgtgacctcggcaagcgaggaccgccgccatggggtcgatgattcctcgccggtgaatgggctgcggcgacctgcgtgttggtcacctattgccaccgtggggaagaagaggttgcctgcgccgttgattccctcttgcacggctatgatcaggtgagtgcttcccctttcgtcttattgaatccgtatcgtcgatccagtgatgaacggtcctgtgcgctcgactcttgatctgatctggatcactggttcatgatccaatggccattgatgtaccggttcgattattaaacatgatctaatcgtggccgttgaagtctaatcttgcggccaagataaacgtgtacctcttcggccctggctttctttctaaagagcccctctgttttcctagattcaacccgcagtccactcgggtgttcccctgagtctggggaatccttacccgagacccc

SEQ ID NO: 127075 - DNA, 543 bp, Zea Mays
atgttcggtcgttgcaggtagaaattgtctttgcttgaatagagaggtggtgacatgccgaagtagtcatcacttcctctatgtttataagtcgagtcaaaatacggggtactagtggtacgctaggcaggcggtgtccaaataaattaaccggtcgatgtggtagatgtcgtgcgtgatttattgttagcgagtagtttgaattacgagttatatgaggattatgttagaaactagtatgcggcgtgtaactgtgctcgtgatgtgaataatatatcagtaggtatggttggtgtcattagcaagtgggatgaattcggttgtgcgatagattttgaagggcgaagaacatgtgtagtgtgtcgatcaagttaaccgataggttttgtaaatatgcttgtgatacttttatgtgcatcataagatcgacgccttgcttggtcaagtattgcattccattcccattggataaataaatgtcttgttgatcgattagaggtcttatatgagcgttatcgcagcccaataatgattggaagcaag

SEQ ID NO: 127076 - DNA, 357 bp, Zea Mays
actcttccaatttcatatgaaatactcttacaggaatatcaggtgcatctgaagatttttggccagagtgttgaagaccatctacaatttcaggccactttgcattgcatgtaaatgttacaaaaaagtctggtggaccatggactctgcagatggctatgctatcatggtaattttgtatcatatatcgtcgtccaccaatgtgtgacgccagaagaacgattgtttttcccatttcgtcaccgtttatgcagcctttactaacagcatctgatatgccttggaggttttctattcgtaatttgtcttgattattcagaatatacataagtctattttcatcaatacaggcacgag

SEQ ID NO: 127077 - DNA, 409 bp, Zea Mays
tcgcgttcccaggtggtcgacggaccattgccgcgctggacggacggtttcccttcctgtatcgcaccactgtcacacgcccgttcatctcccttccccactctcgcgccttaaatgcgcactgagccacaccgatagtgcgccattgatgctgtcgtaaagcttttctcctcactccggcaccctcttctctccaccactgtcgcgaccactcctcttctccgcgacgacagtttctccttgccattaatggcattttgtgcggacgtttctctgcggcaatcaaattcgaggccgtgatttccttctaccagcctataaatggtgccgaccttcatcccttttctccgtgcttgacccttgctcagctgctaccgcactcgcctcgcttctctccctccatgctccg

SEQ ID NO: 127078 - DNA, 361 bp, Zea Mays
ctagaattgtgtgtttttttccggtctgttagacacaacccaaatgtacatctataaccaggcgagggcgggaccaacaaccaatcaaaccaatttatttttttattctaaactgtgtcggtttccaagcaaaataggtacatctgcatcgtcggatcagatcagaacgaggcaacaagatgcgtgggaggtgtgggaggttctggagtgttccagtgcaagcggatagccattccagtcttcatatctacggatctaagccagagagtgagaaaaaacgaaaagaagatcttctggttctaatctccaccctcctcctactgtcagcgccttcagggaaggaacgctgaatggacgcgag

SEQ ID NO: 127079 - DNA, 518 bp, Zea Mays
gttaactgcccattttatatttatcgcatatcgattttggaacttcaatgttctcaaccatgcaagtatctcttctcattctttgggctttagagattagggagctcgtgtcctttttttcctttccacttgcattgcatattaactcgaggtgtgggcgatcacagggaagggataagtcttttcttgcttggatgttatctttggattgaccggtgacgtcgaagcacatgctcatgatgctttcaacaacattacgctccttatgcatcaaatctatgttatggggtaagatcaatgccttcgcgtacgttagctcctagagaaaggagatgtgcgtccagttgtgttctttaccatacccttcgaacccacctacttctgccagttttaggtcatgatgttgtttcatgatatcttcacctgtttgtcgcttcggaggcccatctctaaccctctctcctttccaaattgactttgtatcttttccaaaaggatgattggcgggaaggaaacgt

SEQ ID NO: 127080 - DNA, 310 bp, Zea Mays
gcccgcaagggttcaccaaggcccgcaataaagagctcaacctgctggttaggcgtgatgacctgcgcacgacacaggagctgtgagaattgtcgctgatcgtcctccacggtgccggtgcaatataaggctttcagctcggccaagctgttgtgtcgaagtggaggcccgaaccgcatgttgatgtactgggcgaagcggcgccatgagaccataccgtagtcgagctcgaagccgtagtaccagtccaatgacgcgccttccaagtgcagggacacgacccacactctgtcgtcgtcgagtgtgcgca

SEQ ID NO: 127081 - DNA, 778 bp, Zea Mays
tcagcatgctaaaagtgaaagagttcatccactaggactgttacaacctctgcctatccctataggtgcttgggaggatgtttctatggattttgtggaggggctgcctaagtctgaaggttttgacactattttggtagtggtggacatattctccaaatatgctcattttatttccctcaagcatccatacactgctcaaggggtagctcaggtgtttctggacattgtggttaagcttcatggggctcctaaaactattgtgtcagacagagataaagtgtttacaagttctttctggacacatttgtttcagcttatgggagtgaagttgctattttctactgcatatcatcctcagacagatgggcagactgagagggtgaatcagtgtttggaacaatatcttaggtgtgcagtccatgatcatcctcacaaatggaggcagtggttggctttagcagagttttggtataacaccatctaccatactgctctggaccgttctccctttaaaattctgtatgtttatacatctcctgtgatggctgttccttggttgagagaggaaggggacatggatgttactacctggttgcaggaaagacaagtggcctctgaactgctcagagagaggttggcacaagctcagaatagaatgaaacaaatggcagacagagggcgaactcctagggaattccaggttggagaatttgtgcttctcaagttacaaccttatgctcaaaagacagtggttaacaggccatatccaaagtta

SEQ ID NO: 127082 - DNA, 600 bp, Zea Mays
tactttagaattagcaaggctggcatggactacccattatcgttcgtgaaacagggaaaacaaccattcagattacaactgacaagatgaacacaaaaacatatgtgttgggaggtatctctgaaatttatcaaacaacagaaattttaatacaactcaaacttctcagcagatcagactaaattaatgtttgtacatcgaaactaacagtgcaatggactgcaagggtcaacattgcatgtaggccctactcatctgttgaatgtttcgtgttggattttcctaatcagtctagccagatcatctcacggaatcaaatcagcatataatccataacataatagaattgttaaggatgtaatgaactacctcttatcattcgtgaaacagggggggctctagattttaggttatagctgacaacaccgttcatgatgagcacatgaacatatgtgttggaaaacacttctaaaatgtttcactaatcggtctagtcagttcatctcacacaataaacttagcacagaattcagaacggagatgcttttgtccatctttcagaatgaacatgtgtatcatggactacccaatatttttatg

SEQ ID NO: 127083 - DNA, 383 bp, Zea Mays
cggcgtgagactgggcagtctccagctcacccgcgattctacgccaaatatgcatgatttgttactaaaacaaactacctacatgcacctaaatgagatacgtgttcatttgacacgattacaaagagatcaatgcaacatttcacccccttaatctgtcaaatgttaaccacccctagctgcctccgcatctctgcaaaacgaatccttgcaagtggttttgtcagtatgtcggcgagctgatcttcagtgcttacatgctgcacctccaccaccccatcagccacacattccctgatgtagtggtacctggtatctatatgcttcgatctcttatgaaacactgggttcttactcagctcctcggcagacctgttgtcgat

SEQ ID NO: 127084 - DNA, 440 bp, Zea Mays
taaccattctttttcttttgggggtcaccgctggacctttctgagtttgtggcactccaacttctgccgaagggcttaaaatctttgatatttttgtcccttcagctttcggctcttcaattctttcagccttcggtgttgcagtcggctcttcagttttctgcgcaggtataggttttttggcttcagtagccgaagaagcctcgccgacaaactcgggcactatggccggctcaatgtagcatgggccggtgggtaagaaccttcaccttttttctcttcggcgttggttcactaggagcagccgaagcaacttccttcacagaaattgtaccttttcttttctgaccccgtaacgggtaacggtagtcaggatagacgaatccaatagcatcgaaaactctgttcagcctcttctttttccggcctccgaaggccgc

SEQ ID NO: 127085 - DNA, 335 bp, Zea Mays
caagattagtttgggttcctagtgaaacggtaagcgatccccgccgtcggattaacggcatgtggccacgattagaccaaaccagtgttaacaactgagccatgcattcagagatcagcggccaggatcaacatcgacgcgaatcatccaatcgatgaggcacactctagattctaaaacccaaacatcaaccctcgcccacctgatctcacatccacggttcagatctgatcacagtagagatgccttaggttttaatcacagccctccatggctcgatcaatggcatacaccacaccacccttcgccccagtcagacacggcggtgctcgtgc

SEQ ID NO: 127086 - DNA, 750 bp, Zea Mays
gctttgtcccgcgaggggtgcgggcatttcgaggtcttcgaccagtcggacgaaggcttcgaacgcgaaatcttccaggtcgaggacccagatcttaagtggtcggcgggggtgctcttcgacaggatgtggggtcctcacggccgagagacggtccgagagaggtccgaccgggcaatggatcaggtaaaggctcattttgtgtggttatatgtgtgggtatgtgtggttttgctgaatgaatatgctattgcagcagatgacgcatgacgaggaggtggaggaccttggcgatctagacagcacgctgccggaggcctcgagggtggagctggcgccgccgtccgatgcgggcaagggcccctcggcgacccctgcactgactggagctggcgaagaccccgcgccagcccctgcgccgatgggtgaggacacctcaaaggcagtggtcgaaccagctgccgaagaccccgcggcggcggccgggccttcgcaggtggcggaataggggttagggattgtaagtgtaaacttttgtctatgtgatactaaacctcgattgctgcgcaggttccgacatttgggcctgcgcaagcaaccgctactgacaatactgattttgcgacagagacttcaaccgtagtgcctgccgatgatagtttgtttggttctgtgtctgaatgttttgagtctgatggtggatctgggagctcgtttccttggacggaggagtcctcggatgaaggcttg

SEQ ID NO: 127087 - DNA, 431 bp, Zea Mays
gccgacgtgtatgttatttagcgggctatatcgttgctctagttagccgaattgttagatggtttggttaagctcgtagtcacgagaaattgctggttgtagtctaaatgtgtatggttatggtcgcggatgaaaagtattagtgctcatgtgatgtctaaattaaaatgcaaattattggttgaaaagcgtttcgatattgattatcagggagaacgtgttgttaattgagtatggtacttctagtgctcgaaatgacacggataaaaattagtaagtctacttgttagttctcacttggttattttaactctaacaattgtcaaagtgttagaataattcaagtctctagaacatggcaattcttgagttgtataggagctgaaatttattagttgctgttttggactgcacgcgctgtttttgtcgtg

SEQ ID NO: 127088 - DNA, 605 bp, Zea Mays
ggggcccgccaagttgcaatgtactaggcatataaatagaaacccacagcgacaacatctgttgcgccatttcaattgcttgtattgttttctaaagttttaaatttcttgctgtcagttttcacttgttttgtgagcttcggcatttgttcgatttcccaccaaatggctgacgagaagaaggttgctgatcctgccctggctggtttttacgaggccatggaaaaaacaaacacagagaagattacaaatgagatactagctgttttgtctgaagattctgacgatagtgggagctttgatatggaaagtgaagccgaagatgcagaaaatcggccttggcgaccgagtcataccatttttgggaaatcatccattaagcagagtcaaattgacgctatgaaagggagatattcccgggatatttcaattgtgagagctggaggagatagtgctgcacctgctcccgaagagaatgaggtggttgtttacaggagttttatgaaggccgggcttcggttcgcattaagcaaattcctggttgaagtgctgaagaccttcgagatttttctgcatcaaattacccccgaagccattattaggat

SEQ ID NO: 127089 - DNA, 645 bp, Zea Mays
gccgtttgatggcacctcggcacctccggctttaggatttcctttgttcctttctaaccttctggtgagttgatccttaccctactttaccttggtagacagaggactcctttgctatttcttgtatttgcagaatgctctgagctttttgtcggctcagctgaggtcatgcggtgcccctgtcctcgatcaggttctatccttgctgtagtggaatcctctcctacttcaaaaatagatagatgacctgaaagccttgaacatcggttagtgggttgataactttctttggtgtccattgctccctcgttctaccccctgtatcttttcctcttgccctcccagctctaattcgacggtgttccgacgatgaggagaggtgtgcttagagtcaagccgatctgaatcaggtttctgcattcctagatagtgttctaaccatgaactcttccttgaatgctcagcttgattcagagaagagagcccacgagataaattcttttgattgtttacaatacctttgtgttgcgcttttgcttggatgtttagtattcttcttgtctgtaggaggagatgcgaagacttcttgattcccgagacagtctggacaaactgtaccatgatgccagtggctcccttactact

SEQ ID NO: 127090 - DNA, 617 bp, Zea Mays
cacctattgtattttgcctctttataaagagaataaagtgtggtgtcatctactatatgcaaacaatgtgatgctctattctagttgccctaaagtcccgctcaagtctttctctcaaattgtgctcaaagaaatactgttggatcagaaagatgatttggatatcatgctctgaaatctataaggttcaaaagatctgtgttaaggattataacacttgtatactcttgtagtatgataaagctaggcggaatcagaaatcatccttaactaatcttatcttggaaatcaaaaagttgtgttagctctctatcttaatgtcatacaagcctcttattgtctcactaactcttttaccctctgactagatgatgaaccccaatggtaatgaagtaaatgatgccaatgatattattcctaccttaacaactatgaatgagaaaaatgagtcacagaaatattttggaatgaagaacaacaaaatgaatagaaaaatgtttggatacatgattagtccacctcgaccacaagcaaaagccatgaaacacatggatacccaaacagaagaatcaagtcagactcagctatataagatacagatacctagtcaaccctca

SEQ ID NO: 127091 - DNA, 371 bp, Zea Mays
ttccatagcctccacgatctcttccataggtactacgagtggctccatgagttccaccacctcgttcaccactgccacgaggatgagaacaattgtagctcaactgtcccttctcaccacaattatagcaatctctatcatcagttacagtgtaggttgatttcataggatcattagctatcattacctagagcctgcattcctcattaatcattgacgacacagcctcatccatggtaggaagactctcttggtgacaaaaggcagctctcctgctctcaaactctggatccaaattctttagaaagtgagtcactctcctgtcctctacccacttgtggacaacctgtgcatcctgaggacaaaccatt

SEQ ID NO: 127092 - DNA, 389 bp, Zea Mays
tcgatttctcctgatggtgagatgagaaagtttcttggagaaacagcaaatggttcagtgatccatgtaggtccagttcttgactgctcaggactttccatgtatgtcgctaagaccatagcggaaggaaaatccatccagacaactggtgactatacctatgtatcggtgaagaagccatcattcattttgttcaccttgttggctcccgcaactggaactatttactggactggagagtatcctggtttgtcccttcttatgcttatatagttcattttcaaacggcaatgccattcttttccttgaaagctatattgaatatcacgtgagatattgaccgtcttccaggggaactgtcaaatttgctgtccagtagtgatctggac

SEQ ID NO: 127093 - DNA, 572 bp, Zea Mays
atgctgaactcttttggtttgtataatcactttaagtttgaaattttgaaaccagatttaaatttataaaaagaaactagaaaacaaaatagaaaagaaataaaaaaaagaaagtagctcacctgtgccttggacccaaatctccagtcggcccaggtagccatccctgcccgcgaacgccccttggtcagactccaggcatgcggcccatctctacgccttctctttctttcttttttttctgagcagctagcacgtgggacccaatcgccatccggtcttcttcttccccgcgaagatagcgagacacgaacaaacctcaccggttctccaggatccgcgctgacctcgggagcggattgattgggctcgcgacaaagcctgagaccgaatccccgtaatccccgctaggacctcaccggttggactccgccgtagcactataaaactgagcgccgaatccgccattgtcgagaactggtcacttgttggccgtcaccatggatctcatccgtgggcaactccccaaccctggtgggtgttcttggagcgtcgcgggaagcctccgcgca

SEQ ID NO: 127094 - DNA, 400 bp, Zea Mays
cgagtgctgggcgtaggcggcgaagggcggtggcgaagcgtagagtgggtgaggtggatggcggtcggcttcgtgtgggtagggctggcaagcaagaattgttgtcctcgccggctggggcgagtgtaggtgagggggagttgcgaagtctttttgagggtgaggagcttaggataatgctatttaactatagggagatgggaatcattccgaaggttgaaccgatgtaaggtgtgatgccctcgctgtaagtatgttactatagtttgtatgatgaagtcgtgtgccttcgcgcatccggctatgtctaaaggggcgttgcgcgcttggtctagtgcatttattatgttggtctggttgcgcctgtggttggtctgtgcacggatagttttttggtgta

SEQ ID NO: 127095 - DNA, 343 bp, Zea Mays
gcagaatagcccatacgctggtaagtcatgcatggagtactggtaccaaacatgcattttgaagtttgtcttcgtagctcggtcatacgtccataccccttcctgccaagcatgtaccaattcatcaatcaaagactccatgtacacgcccattttattcctcgggtgtccgagaattatcaatgacacgaatatgttctacctttgaaagcacacacgagagggagattgattgggataacaaacatggaccaacatgtgtacgtggcatcgctcattccatagggattgtacccatttgtggccagcgcaacacgtacattacgagcctcttcggctttct

SEQ ID NO: 127096 - DNA, 907 bp, Zea Mays
actactggaggaagaagattgcagagagaaagcagaggaaggagacgggaattagggaatttagggtagtgtattcagagttcagtttttccatcccgtcactagagcagtattctccttatatgtgacccggttaccacgcagggaaacccacacacaccacattacacccattcaggtccgtgtacacgagtattagctcggcgagtacgtcgaccacgcccgagcaggtgctggccagcatcttgtggctgtagatcctcctgtgacacctcgggtaatactgctgtgttgacattccctgcccctttgaagcctgcttgcccccaagcaggagcaccagggaaacattgtttgagagcttcgcgatcttcccaggtagccagctctgacggtagaccagaccactccacaaggacctgttgaaccaatctattgcccttggtgacacctcgagtctgcaggatgtttaatggaacactgagctcaagaacagacgatggcagggtaggtgaaacagtgcctttgaacccggtagctagcttgagttgagaaacatgtatgacgagatgaatacggctggacgtcggaaggtccaggcgatatgcgacagctcccactttggataggacgcggtatggtccaaattacctgaagttcagcttctgatgggcacgaggtagtatcgaggattgagcatacggttgaagcttcatatagacccaatcaccaattgcaaacaccctttctgagcgacgcttatcagcttgacgtttcatacgatcctgagcacggacgagatgttgtcggatcagttcttgcatagttgttctttcttgcagccattcagacaactgcactggcgctgtagcattcatggataaccccagcgaatgaggtttgcacc

SEQ ID NO: 127097 - DNA, 539 bp, Zea Mays
agtgaacttctagttggatggttatttaactttacaacaactagaattcagattgcattccttgtttactattctccaccaagctccacatataagccatcgtaatcggtactctggtcttgtattcgctcatccatcactgtattgttaccaccacacatttttcttgcaacccacagggacttcataagatctttggttggtaagagtggtgaggttgtgagagtctatatagcttcatattccacctatttttgttgccttgttgccactaatttcgtaggaagatggatcccaacgctaagattgaagaatgtgtcaccatgatacaattcaatgagctcaaacaaagcatagaagacaagcaagatcggttagcacaagatcttcagaaacttatggctgaaatcagaggtcatcgtcgactccctgatggtgcaagaaaccatgatgaagatggggaagaaggtgaaggaaattattctagaagagcaagtgaacatgggaggagaaatcaaggtgctgcacgttgatgagga

SEQ ID NO: 127098 - DNA, 464 bp, Zea Mays
cccacctcttcctgtaattgggccaaaacataggtagtatcaaaatcccgtggtcgttgaaccataacaactgaacgaatgtcatcccagagaccatccatgaattgcatgatgtaatacaatggatctgaattgggactatatgcatgcaattgatctatgagctaggaaaaacgatcgacataatcagacactgtggtggttttcctgacatggatcagctgcctaataagaacttcatgctagtccttgacaaatctatccatgacaatgtgaccaaactgttcccaagatattcaacttgaatgtcattctatcgattggagccactgtgctacaaaccccgtaaaatgcatgcgagcaatcctaatccacacactagggtcaacagaatacatggtgaaataatcttgacatcgtgtatctgccacagtttaggattttccccatcgaaccctggaaat

SEQ ID NO: 127099 - DNA, 691 bp, Zea Mays
ccaaactgcagcggtgctgcttaataattttataactttaaaattatgacagcagtggtgacaaccaaaaactccagaggcatttacatcaaattccccacaagttttgtatacaatttataataaaattccaacatctaattagcccaaaacagtcctcacgataaaccctgtaatctgttttttctcttttgtacagcgacatacccggattcaaacagtgatatttttaaaatataattccaaatcaagcgcataagtactcattggaaatataagacaaagccctacatgattaacatactggttatcactaattacccacgaaaaattcccagaaactgctaatactactgctgttcacccacctgaaaaatctgtttttttggacagcaacatatccgtattcaaacaatgatatctcctaaattataactctgaatcgagcgcataagtactatttggaaaggtatgacaaagctctacatgattatctcactgattcccactaattaacccacgaaaattcccagaaatccctagaactactgttgtccacccactcacaaaattcctggacagcacctctaccgattcgcaaagataaacgcataatccaattgattgcagcacaaaaacaacaaaagttaaacatgaattcaccttgggttcttcccttcctcctttcttc

SEQ ID NO: 127100 - DNA, 391 bp, Zea Mays
gagagaatcgtcgcccgcagaaatgaccaagaatttagagctcatcctcgcgacatcgtccttctcctcatcatcatttgagttagtctcggcaccatgatccctatacatctgacgctaagccctgtgacgcctcttctcatctctgattcacttttctctcttttgctgctccacccgtgcatggcccgtctccttcttagccacactttttggcaaaggaatggggtcatcccccaacatcggataggacgactgagaagaataaaaagaaggattaggggatgcaaggtcggagtcagagagggatatgacgaactcacaaattccacaaagcctagctcgggatgcatcggagggcagccaggactcggaaaatgtatggaatgat

SEQ ID NO: 127101 - DNA, 636 bp, Zea Mays
caattcctctactcgggctttctttctcaccaatggtgtgaagcttcgcatgtcttgcccttatacatcacaacagaacagtaaagttgaacgcatgctccgcaccaccaacaaaatgatcgcaccttgctgctccaagcgtccatgcctccacgctattgggtagatgctcttcatacagccacttatcttcttaatcgccttcccaccaaaactgtccgcgcctcttgtccctttgctgccctatacaacacacctcccacatatgagcagcttcgagtctttggatgtgcttgctatccaaacctctctgccactgtgccgcataagcttgctccccgctctactgagtgtgtttttctagggtattctcatgagcataagggttatcgttgtcttgatctatccacaaatcgggtcttgacatctcgtcacgttgtctttgatgaagcttgcttcccttttgcagcctcgccccctcgaactaatgattttgatttgttgtctgagatggatccgatcacttcacccatcgaaacacgtcttttacctgtaggtactcgctctgttgcccccgtggttgcaccgccagcaccacctacgggggttgctcccacgggtgctacctcttctcag

SEQ ID NO: 127102 - DNA, 2077 bp, Zea Mays
tgcaggtattaaaaaaagacttaccccaaaacataaatatcggaattgtcatcaggggggataaagtcatccaggttcagtgcagcaataggtgtttttcctccaacattccaggtggaaacaaatattctgcacattgacagcagagagtgaacaatttgacctagttagcataaaacaggctcaagaatggtagtatataaacatagacattatacctgatgggttcagttgtagtgttattagaagattgggcaaggaaatggctgaggcgcatgctcttaacctctggtctctcgcaaaataaaataaaataaaataaagtaataataatttggggaatcaggaaaaggcactgtagttctgtagtttgcagactagagtacctgaaaacgttctcaagggggatgatgatgatgtcttagaagaacttggcgcaagcttagctggtgttatatacgagcacccagaaagttagtagctggttccatggtcttaggacgaactcgagatgcattttagagaactgttagcacttaacagcagaaggggagggagtgaaaagtaattttgcaacagattaactacaagagctaatgacattagggagtgcagttgttagaaaggatgtcttcaagtcaatgttgcaattaagagatgaataaacattacatgatttcaggccaatcgtagtgatacaatttcattgtgatagaatattgtggaactgggaacaaattcctgtgtccaattgtaaagtatccaaacatacagttgtctctcatcaccacaatttcagcccctattcagtgatctagaatgtgtgtgttaaggtcaattcatgacagattatagttaccagaaagtctattaataaatagacatttaaaaaaaatccaggtggaatttctcgtgctagctagacataactttggaaaataagaatgtgaaccaaccagcatggcggcctggattctttgtgctctttgcaactttcttctccttggctgtaaaaagttttggtcgacagccctgaaaggcaagtaaaatgaatatagtttagttccgtttctgcataatgcgattaaggtaatgcaatcacaacaatattcacctttgttttttcctttgcagtagacgccattacctgctgaaaccaatggtaaggtttccttagtgatatttaagttttaacttgaacaccgatataattaatcgtctgcgatcggtttagacttagtaaaggtacataaggttaaagcacgtaagaaaaaaaacttaatgcaatgacggatgagttttgcttaaactctaaaacggtttttttttgtaataatatgcaaatttggaccaaattgaagcgaatcacgttcacgaaaattgtccacgtgtgatgatttagagagtgagagaatatgcgatccaaaacaaatcacacgttgcgcctgcgacagaggagaatcacacaaacaaaacacgacagccgttcctaccattcaccgactatcatgaaagccgcaccaatatgcaatctatcaatcgccaaaatcctcccctggaaaaacctacacataagaaacgcacaatgccacatcaagcatactcacctaaacatgcaggaatcttctggcctccaaacgcttacttcctaggatcccaaaccccgcagccaaggagccgccgccacaaccaagagcgctccccgatcacttctgctgcggtcctgccggcgcggccgtgaccatgcaccacgactcctaccagccaaggaaaccaactgtacgagcagacgccgggccgcgacacctgtaatccggcaaggggtcgggggaggtcgcgggatgcatgtcatcgtggcccgtgacctatttaaaccacggaagggcacaactgtcgcgcggaggggaatagtttaaggaagaaacgtctctcgctagaatgaccagtggcgttcgatccgcatctgcatgcgtcagtcaccctgctccggctggcaaggttgaccggggcggcgagcgagttagaggggggcatgtgctgtgcatactgcgcaggaggaggtgctggggaatgggag

SEQ ID NO: 127103 - DNA, 298 bp, Zea Mays
gcctgatccggtatgggtaatggcaatagcagaccggggtatctgtttcggtcggccttggcctttttgcaaatctcacatgactgcacgaactccttgatctgtcctttcatgccaacccagtaaaacagcttcttgatgcgatgatatgttaccggaaacccagaatggcctcctatagggctgtcatggagggcagtcatcacctttaattgaacttggttactgcaacccagccaaatccttcctttatgtttgattactcctgataccaaagtgaatggctccattgtatccc

SEQ ID NO: 127104 - DNA, 419 bp, Zea Mays
tcctccctcgcaggccggatccaaggaaacctgctagctggttagttagtacgccatgcactctgctggtttgctccagtgtcatcagcttgccaaaaaagaaaaagaaaaaagatgctagcgctggcctagttggcagcgagctcatcagcagactcacccagttggttggtgccatgcggtttgtcctgatctgctgcgtaattacctaccgggttattgttagtttagtgtgacactggaggaggttacttaaatggggggtgacgctgacgcaggtggattggattttgtggaaggaaaaggaactctccatcagatggtgcagcagttcttcttcttttgtttccgcggtagaggatcgcggaatctgaccaaccagtggttgccaccatgtgccccgagatggcaagatccat

SEQ ID NO: 127105 - DNA, 456 bp, Zea Mays
ctggtaatgtgttgcctcctatagttgctgagatctcgttcgagcttcggaaatccatactccttgataaagtattgacactttttgctcccgcgcggtcagggatgcaccctagaatctcttcgtcgacgccgccaaagagcacggatccaaacttgtaaccgccagcaatggaaaattactttaactcagagatatcttcttcggagagttcttgaccacccaggtgtcataggtccaactccatgtcctccaaagaagtcccttccaactctttcatttttaagggcgaagccctaccagtggtcacttcagccatgcccttctcggaaccacatcagccataattttgtcaatctctgacattgtggttccaagagggcctccgctgttttcagcttccgaagcagccttatcagcttcggcatcggtattagcttagacattagcagagga

SEQ ID NO: 127106 - DNA, 320 bp, Zea Mays
ccgagcagtacccctaggagccaccatcaccgagagaagcgagcatgcgtaggtagcgccgccgggcctccgccgacgttgatccccgcctccaccgtctttcggagtctgttgggtggtcagggtcgttcgattgggtgtgctgatagagtacggggaagtctcaaggcgctcgaggtcaagattaaacactaatcgctcgtcggattcgggtggatacggcgaacctgcgctgtgccgcggataactcctctcggcctctcaatcaccggtaaattctaccttcgtctcttcgccctacttcgtcctgcatcttgcac

SEQ ID NO: 127107 - DNA, 833 bp, Zea Mays
gttgttcgtctctctgttgttggtcggctctgtgagcctgttttctgtcttctgctgcttaggctagactcttctgggtggcttgctaatccttgtcccttggtgttatgtttgtgtggtcatggctagttgtggtaagaaccttgtcgtaatgtcgtggaatgttcgtggtcttggcgactcggataaatgtgttcttgttcgtgatgccattgtctcctcttccccagctattgcctgtctccaggaaacaaaactcagcgacgttactgtgttcaaggctgcctctttcctcccttcgtcttttgcttccaattttctgcacatcccggctgccggtacccgtggcggcatccttacggcctggaacgaaaatagtctacagctaaattcttacattattaggcgccatgctcttacttgttgctttactctcctggctgtcaatgttgtcatacacattaccaatgtctatgctccctccgatcaccgtgacgctccggacttcctacaaatccttcaggagatccactcgcacattgatgggccttggttgatccttggtgatttcaacctcattcgcaatgcgtctgaaaaaaacaaaggtgctgtcagtcggtccctctgtgatctcttcaatagttgcattgacaggctaagcctgcgtgagctcccccttctcgatagtctgttcacgtggtcgaacaagcgccgcttccccacgcttgctagactagatcgagccttcaccaactctaaccacgcctcagctttcccctcgaccaccctcacctctcggctcagacctacctcggatcacaagccgatccttg

SEQ ID NO: 127108 - DNA, 464 bp, Zea Mays
cccttgtctggtctgacgaagcgatgaagtgacgaatcgagaactgctgggtgctgtgctggcccccttggcgtgacacggcaagaggaatcgtagcgtaggaaaccttctcttccagttccagtcatgcatggggacacagaaatgaaggactgctatattattctcaatctctgcagcaaatctgaagataactcgtcgtgaacggccgtccctgcctctttgcctttattttattttaaccggaagtgcgtcctggtgagtaacgcgctgcatcgtatccagcgatcatgattcccaagggaaccgtatggagcttgacggtgccagccatgcatgccgaggataatatactggtacgatggcttgcatggtgctcgctcgctacagataattggaccgaaaacatgaagcatgcaagtagtagcactagcatttactagcagcacgcaccttgacttgag

SEQ ID NO: 127109 - DNA, 403 bp, Zea Mays
gttaaaatacaccttcagatatgagggtaagtttattgagccagatgatgattggctgaaatgcatcgaagctacaagcgacgaactgcttggaccatattcaaagacagaagataacgctctatctgcgaccttcggagggcggaaaaagaagaggttgaatagagttttcgatgctattgggtttatgtaccctgattaccgctactcgctgaaagggcaaaagagaaaaaacacaacttctggaaaaggtgatacttcggttgctctaagtgaggctgcgccaaagaggaaaagagtgaaggtccttactcaccgaccacgcttcatcgaaccggcctcggtgcccgaatttggtggtgagacctctactgctactgaagccaaagagcctacaccttcg

SEQ ID NO: 127110 - DNA, 303 bp, Zea Mays
ttcgtgttctagcgcacgattcaacagcattgggttcctgctccgtcaagtctggctttatactcctgattaaggaacatcccacatttggttcctgttactcattagtgtactagaaacctgttgtgctcagatatgcattgtggatgggaggtactgcgaaattgaagtgtctgggagaaagagacaccgtcggctctttcctacccttttatcactgattcatccttgctgtttgctgatattaggtgtggttgcccgtacggtttaaggtcattactgttctcgtgcttatgattgtca

SEQ ID NO: 127111 - DNA, 616 bp, Zea Mays
cttagatcaatggcttttaagtagcaagccattttagcactatagttgagggaaattagtgttgtcgaagtgaggtggcctcaaggtatctatccgtcccgatcttaatagtgttggctcaacgatggttaagccaaaaggtttagctatgatacaaattgaaaggaacgttgacgcttaagaggtaatggtgaattaggataactatttttacactaatcaaggcctctagttttagctcttaaacaaaacctatacagataaccaaggaagctagggtatctaatgttttgtctaagtgtttctacctctaccacaaaacaacttttgtagcctaggttgaccaatcaactagcctatcaactaggctaatatgataaagcacacaaccaaaagcaacaagtaaatgtggaagcttaaatgagatagatatacaaacttttgtagacgtgtcgttatttttatcgaggtattaagaacttcgcaaggttctttctaatcctcattggagcccctatgcaaagaaagcaaatgtgagggccaagctcccggtccggtaactacgtagatagccatgagccttttccatgcgcaagtgctgcttcgctacgaacct

SEQ ID NO: 127112 - DNA, 1059 bp, Zea Mays
gttcgacttggtgaatcggttggaaatctgaatatgctggttttatttttagtgttcattttgtttttctttgtatataaatgtttcagaaagttgcatcggccagtgtttagatggctgctacattatgccaagcaaaagtccctgttttcttttgtgttctggatagtattcggagcacttttggattttgccacaaaatgtctcttttgtgtgtgtgtggagcaggttatggatggtttcttctggtagatagatgattgattttgaacgaaaatggagcctcatttctatcttttccccatcctatgtactgttacttttgctcgcgcattacgcgagcgtttaatcaattaatcaatacatgtgaatttttgcgagcaccgtgtggttgcacgaatgttaattcaatattcaatacatgtgaatttttgcggggcaccgtgtgtatgtgtaagcagctactaatctggtggactgaactgatccattatagaacatgctcagaaagggaaagtttagacttacaactttttgcacgagggtaggtaggttgctaagtcgagcaagctcatggtcacaggcttgataaagaggacctaaggccaaaaaagtgtgaaattcgtaggactttcggtaggtggatgaatcccacggcacatcattagcttcaaacgaactcggctacttacctcaaactgttgttacattgattgcacgtagagcattagtgccttgttgatcacctgaactggcaacattttggcagaaggattcagtaatccttgtggctagtcaagggattgatcaacttctaccgcttcttttttaaaaaaatcatgtttagccttttggacaacttaatagtatttttggaccctttgctcgacaccatatgccatggcgctgagcaggggcacatacagggggctacccactcggttcgtggctcgagacatgacttctatatctctgcatgacttgattacatttaggtcaaaatatattaaaactctagtagattaaatagactggcctggggcatgatcagatcctgga

SEQ ID NO: 127113 - DNA, 390 bp, Zea Mays
tttggagcctgttaaaacttttatttcttgaaacgaatacaaattcgaaagtcaatctcgtctcgcgacttccgtccagactcatttatttggactctcaaaagttgtgatgttacctaatctatgtccgaatccgctttctcgatagccagtctatgcccaaatacttaatctgaatcctcattctccagcggaatctctatagtgtcaacctctaattatttcttatgcaattcagcttgttatatttatgtcatcatccatctctatctatcaagcgtattctaaagattttttaaagtttgaaccaaatattcgtgtgaaattataaatcctacgcttacctgagactgctcgattaagtaaaagcaaatttagaaattcaaacaa

SEQ ID NO: 127114 - DNA, 301 bp, Zea Mays
ggggattatggtggaggggccaatttggccggagggtgcctagggtggccggtccacggcgaggtggcaggcgctcgcggcggtgaggtcgccggcgaggccaacggtgcaataggcgaggggaaaatggtgtgccgtgctcggggtgatgtggcggagctcaagggctaaactaatttaactagaacccaacgtagaggggaaggggaggctcaccggagatggagatggcggcggcgctggctcaattgagctcgggggaagggggaagagatggccgaggccgtggtgaggaattggg

SEQ ID NO: 127115 - DNA, 442 bp, Zea Mays
caatgaatcacttggcaaatgtgcatcgaagcaattagaacccattgtcgcctgatctatagcgaggtcggcccgccacggttccctcgaacacaccagaacgttgtgaccgccatggcacccctaagtaaagtccctaagttggaaactttgagccaattagagacccatcgagaaatctgaggcctactcaacctcatcgtgcgacaacgagccaaaggttctgtaccacgacactgggaactaggggctaactagagcaccacgtctacaccaacgacaccttgatgaggtgaatactcaggcctgaggaaggactggaacagaccccatcccgctgatgcctggggacagatgggacaacgtggagcatgcctgatccagggagcagcaggaaaatacagatggagccagacgatgaccattgatacagccgacgtcg

SEQ ID NO: 127116 - DNA, 313 bp, Zea Mays
tccaagtatttttttttctcgaacaattgttacaatgagattttaaagttattaggagatgtgctcccaaagcccaataagttgtctaaagacatgtaccattcaaagacaattatcaaaggtctcggtatggattatgaaaagattgatgtgtgcaaaaataattttatgtttttcatgaaggagcatgcgggagagaaaaaatgtctaaaatgtggacaatctagatttgtggaagttgttaatgatgagggtgacaaggtgatgacagatgttgcacataagcagcttcgatacttgccactaactcctc

SEQ ID NO: 127117 - DNA, 677 bp, Zea Mays
gattcttacatgtttcagatgatgtgagcaccatggtgcactagtatgggacagtcactagcttcgtagtccaaaaggtccctcccctgatcatgccttcagataacttttctgaaaattggtctgcagaagtaggatctgaattcgttgcaatgccactttcgttaatgtataacactgtactccagactgcaactactcaaccacagcaccatagacttcatcgtgccctgcccgttaattatctaaaacaagtggcaaaccgacagttggaatacttatggaataaaattccgtatgaccgtatcacagtaatgaagaccactttagaaaaccagcacaattcacatgtgtgttcatatgaggtcatttagtcacggcacaggccatgatacgaaaagtgattctatccttttgaaaaaggaaaacgcggaaatcttctcgaagtgagctgatttggaccatggcccataagtaagaccagcgcactcaagcgttgcagaatagtttataagcacgcaccattagtcacttctctgtcgttattacactcgtaaacatctgttgagaattatcttaaagtcttacgaatggttgcctgacgtgcacttcgcgccatatgtatgtatgcaaattaacttagatgttattggctttacctgatacgccataaaaac

SEQ ID NO: 127118 - DNA, 440 bp, Zea Mays
gcaagcgcaacgtggggaggacgacgccggccgcggagcacggcgtgaggacgcgtgcccaatccgacgccgtcgcgagcacagcttctgcggcggcggcggcggcgcccaagaggccgaggaagcagacgacggcggcagtgactgggaacaccagcggggcagcggcgccagggtcctgctacctgcacctgcggaccaggaggctgcagttcctgcccgggggtgagggcgaggtgcagcgtccggtgccgccgttgcctgcggcggcggcacagcggtcgtcgtctgtagcttccggggagccggtggagggtgccgggagctcgaggtgctccagcacggcgtcgtcttcggtggacgtcgtcgtcctggcggtggcaccggctagcgagaggggcggcggtgaagcggaggaggtagtgggcgcggccgggaac

SEQ ID NO: 127119 - DNA, 289 bp, Zea Mays
ggtttggatggcaggtttagcgtcagtaatagctaggattagggttcaggcgatgctaagattttggggcgccaattgcagaatcactggattgattcatcttttaggggtttcctcgtactcggagtacgagggcaccgttttagttgaatgttgctctggtgtctaagcgccaggtagtcaattttgcagtttcagttggggactgtacgctggcatcagtttttaccttcaactcgtttcatctcttcacaactttgtggtttgcggtgggcacaacaatttgttg

SEQ ID NO: 127120 - DNA, 327 bp, Zea Mays
attttctccaggaaggtgaccgggtagaatctcctttcaaactgcctgatgaagacatcccaagataggactactggtgatgaggagtgcgctgcctgcacacctctccaccaaatttgagcctctcccttcagcagctgtgtgccaaagcgaacccgatctccatacacaatctcgaagacattcatcttatcctccacgtaagtcagccaatctaccgcctccaccggagtaccactgccatcaaaagaatccaacttcatgcccatccactgcatcagagaaagaccactgactggaagaggcacctcggccccgccacctgga

SEQ ID NO: 127121 - DNA, 370 bp, Zea Mays
gtttggatgggccttacgtgccaggtggctttggttacagaagactgatgcgtcaagaccatgggctggtctccctatccgagtgcaccataatgcaaaggccctcgttgatgtggctattacctcagtggtaggcagtggtgaatctgtgaagttctggtctaatcgttgtctccttggtaaaactgtggctgaacactatccaaccctgatccaaatgatttctagaagggctttaaagtgaagaacagtagccgagggctcacaaattgttaatgggtgtcagatattcggggaggattgtctataacagtcctagtggagtatctgtagctctggaacttggttgatggggtagttctgcaacctg

SEQ ID NO: 127122 - DNA, 290 bp, Zea Mays
gttgagtgtttgattgctctgagtttgtagattacaggtagttgtggaggtgaatgaaagagttcctatcgatctaaaggccaccgagagagagtttttggtaggggtacctctgaatccttatataggcgactgaagagatatccacttttacagattgtttgagtctatctaagtctatcatcttgcactatgagtgtgcctactcttccagtgcacagttgctatcttccgagttatcctccgggtaggttgctatctggtcgcgcccaagacacatctcaaagtcc

SEQ ID NO: 127123 - DNA, 374 bp, Zea Mays
catgtctccggtgggagcactgtcgtgaggcggggcggcggcgcctttgtgtgggggcgaatggaggagataggcgctagagcattgatcctggattggatggctccgattgggtgaccggataccggttcatcccatttgatccgggctgtagatctatggatgtacgaatgtgagcacatcacggtattttaaatcgggaccgccagatcagaatctaacagatcctaatgcatactgattcacagtaagatttatctaatctggaccgctcgtgtttgatccaacggctggagtgaacttgtacccctttggccatgacatgttgcaaaagagtctttgaggttttgtgaaaataacctgccatccaccag

SEQ ID NO: 127124 - DNA, 691 bp, Zea Mays
gtcctggtggcttcagctgcggacagttgttcttgaagtgactgggatcaccgcagtgccaacatgcattcgccgggggttggttgcttgccactgagggggtatggaaagagctctgactctgctggctaaaccatgacggggtgggtccagctggtctactgaagtttggccccttgggtggaaatccaaatgatcgagtcttctggtgccggtcctgctgctgtgcctggagaacctggaactttcttttgagatgccctttttcttcctcctttgccctttcaacttgcatggccttgttggaaaggtgagagaaactaatgaagtcttggctagccagaattgtcttgagttctggcctgagccccttcaggaaatgggccatcttcttgccctcggtactgacgtcatctggcgcttagcgggctaactttgtgaacttgtgcacatattcaccgacagatcttccgtcttgagtcagttctcggaactcgtcctccttaagctgtacgagcccttggggcacatggtgctcccgaaaagctgcttcaaattccgcccaggtagcatctctgatggtgacgttgaaggtgtcccactaggctaaggccatcccggaaagttggtgggtagccagttgaacacgctgattttctgggcaaccaatggcttccagctttcttttaat

SEQ ID NO: 127125 - DNA, 1320 bp, Zea Mays
gcctccttcaccttgaggatgtatagtcgatttggactcctgcgtaccttggcaagaaggcgacgagaggggtcccagatcctcatgacttcgtgctcgacctccacgcgcgaaccgttctcatccagctgtcccaagctgatgatagagttcctcaacgcggggatgtagtagactccggtgagcagtctgtgctcaccagacgcggcggtgaagacgactgagccggcaccctcgatctctacgtcggaggcgtccccaaacttgacggagcctcggacgctagagtcaagctcggtgaagaactcccgtcggccgatcatgtgatgagtggcgccggtgtcgaggcaccatccttcgatcatgtctttgttggagccgtcgacgaggaaagcgcgtgctttcgactcatcaaggtggagtgccactgcggccggtgccgctggagatagctcgatgcttgcatgtgctaggagcagagcctcctcctccgcctccgcttgtgcgacgttggcctgaccacgtcgtggatgtcgacagtccctggcccagtggccaagcttgccgcagttgtgacagccgtcgtctcgtgccggcttcttgttgccgacggcgccgccttgggcacctccacgggcaccaccctcagcatgtcctcgcgccccggcctgggcgcctccacgcgccttgcgcggcttgccgcgtttgcggcctcgtgtcgaggaggactcccccatcttcttgtcaccctgacaggcctcccactgctcccgagtgagatgtagcttcctgccgatagtgataggcccagagggagcatgtggttcgtggccgtcgaccaccttgagacgaccaatcgcctcttcgatcgtcatcgtggagaggtctagcagagactcgatcgagcgagcaatttgcttgtacttctcggggatgcaacggaagagcttctcaacagctctctcctcatcgtaggtgtcgtcgccgaactgcaccatcttctgcaacagagtgttgaggcggagagcaaagtcatcaacatcctcacctggattgaagaccaggttctcccactccttgcgaagtccctgcagtgtggtcttgcgggcacggtcgctaccgatgcgggtcgcagcgatggcgtcccaggcctccttggcagtccgcttctgggaaagcgaaaactacatctcggacgggactgcagcaatgagggcatccagcgcccgtcgatcctcgtggtagtcgacgtcgccgtaccgaactgcttcccacatgtggcgaacctggagccgtaccctcatcaccgcggcccactcg

SEQ ID NO: 127126 - DNA, 391 bp, Zea Mays
caaatgttgcctaagtgtatgaaaggcatcctcacatttctggctccattcatacttgactcctttcttcaacaattcagtcattggtttggcaatcctggagaaatccagaataaatcgccgataatatcctgccaatcccagaaaactccgaatttgccgtaccgtggtaggaggtttccaatccatcacttctcgcactttctcaggatcaactgataccccatcctgagaaatggtgtgacccaaaaatttaatctctctcatccagaaatcacatttggacaacttagcatacaactgatgatcacacagtctctgaagtactgtatgcaagtgcatagtatgctcagcttcattccttgaatagaccaatatatcatcgatgaag

SEQ ID NO: 127127 - DNA, 451 bp, Zea Mays
gtggatagcgcttgggatcgagtaagggtcctcgccgtggataactccggccagtaaacaaatccgaccaccgtaccgcactcaccgcagtcacttcggataacctcgccggtgattgccgcctttcggccttgtgccacgtgcctaggcacctccaccgcatcgccgtgacccgttgtgactctccgttgatcgctggaatgactgccacggtaataggacaccaatccgcgcgccagtaactttccactcctctgaccgccgcgcatcgtcgctcgaattcccggccaccgctctcgcttagtataaattgaggccaatgtgagctccgtaggatcatcacgcacccagccaccaagtattgccctcagtcgatcactagcaagctccaatttcagatttcccccaaaaccttcaagaacaccgagtgaattgatctcgccgtggtcag

SEQ ID NO: 127128 - DNA, 469 bp, Zea Mays
gcgtttttgaggccgaacgacatggaggtatagcagaaggctccgaacggggtgataaatgctgtcttttcctcatcttcttttgccaagctaatctgatgatacccggagtagcaatccaagaaagacaacacagaacatccggcggtcgagtccaccacctggtctattctaagaagtccgaagggatcctttggacaatgtttgttgagatccgtatagtcgacgcacatgcgccaatccactttattctttttgagtacaagaacagggttagctaaccactcaggatgtaacacttctctaatgaatccggccgcgaccaagcgagccagctcagcatggatggcttctctcttgtctggcgtgaagcgacataatttttgtcggatcggcctcgcctaggggtagaccttcagtttgtgctcggccagttctctcgggactcccggcatatccgcaggttgcc

SEQ ID NO: 127129 - DNA, 329 bp, Zea Mays
ggaatgggaagcagcaaccatcttgccgtgacgaaaagggtgacagacaagatccttctcaaatttcaacttgggtaatccttggatcagaccaagtgagcttagtctacacaaaagatcaaagcttaagtgacctagcctcctatgccacttccaaatcaaagaggaggatcttgccacaagacatcgagaggggctagaagaatgtgaaaagtcagcactgaaaacttgaccaaagggggaaatctaataaacaagatccccatgggaatccaaaacctgagacatgccatttttaaagcgcacttcatagtcatcctcaaggagct

SEQ ID NO: 127130 - DNA, 731 bp, Zea Mays
tggactagagatgaattttctatgatttatacaagttctagggtttatttttgtattaaaagtaatttctaaaattaaataactgaatttacagagttatggactgagcgtactatttacagagaactcaggggcctcgggggaagatgtacaagactcagcgcatagtgaatatggacgacaggttgatttctctgtttcacggggactcttaagcaatttgcgcaaccgaaggggtatcttctattgtgggccggacgatccagatcctgcggtctggattagatcctagcgcgatgaagcggtatgccatagcagccgtccgatccaagcacaacgctcccgatttaaaaacctaagatctaatctcgagcgttcaaccgtcgatcgacgggcgcgatcgccccgttgcccaaccggtatgcatgacctaatctccaccgttggtgcccgatcagacggtatcccacctttcttcttccccagcgccaccgagcagctgcgaccgattcgcggcggcgtacacaaggcggcaagctcccatcccggaataacggcgcccgattctaaatgacagcgagtctaacgcgtagatccaaccaaggcaaatcgatctaagggtaactcaccgagatgtatgcagcccagtgccctgaccacggtgaggagcgagcacacggcggaacttttcctccggtgtccaattcactccaccccagccgcaaggtttg

SEQ ID NO: 127131 - DNA, 715 bp, Zea Mays
gaacgatcgcatggttgttggccaggttcaaagcgtaaggcatcggctatttccctccacttggtattacaagtaaaagtcacaaaaagatctggaggtccgtataccctacatatagccatcgcgtcctggtaattcatgacatggtaccttctaccaccagtgaagctggcaggaacaactacacgaccgccaatcgaatcagcattgaggaagcccttatcaatggcgtcagctatgccttggacagtttctgaacgcaattcgctttggtggcttgctatgaactgtagcctgttgccctcgatagttgaatatgcatcgacatctatttgatcacttaatctaccgtaacacgtatatgggtttggctcatccaatctgtagtgcaggtgtctccttacaaactcaagcatcgtaacgtattttcgttttgatgaaccaacatcgtcagcaccaaagtacctaataccaagatggaagccatgttcaccgtaaggaaacaacagcggatattgcaaaggcatgtatgctggatgcaagcatgaaacacgttttaggccacactctctatcgtgcacaagaacgtcgtacgtgtgttccccagtcgtgtagtcaccaacaattatggcagcgatctcaccatttgagggtaggttgtattgtacatcatggcgtgtgttgcagcctagcaatctgagtgttatcttttgat

SEQ ID NO: 127132 - DNA, 382 bp, Zea Mays
atcaattttgttggaagctctcttcttccgggcagtacaacagcaaatcagcctatgattcaatgtttattggttccattaggttctcaccctagaagaggttttggaaatcttggcctcctaaatacaagttcttcatttggttggccatcaatggttgctgctggattgcggatcgtttggccaaaagagggcttccacatcaggctgcttgttctctttgtgaccaacatatggaaaatatcagccatgttctaaagataatctagccaaaagacgctggaaaggcagcttgacttgtagcttttgcaaccgaaatgagagtattcatcatctcttttttgactgctatatggccagcaacatatggagattaatttac

SEQ ID NO: 127133 - DNA, 394 bp, Zea Mays
tgcataggcaattccagttatctttgggtaggatgtggacatgtggttatgctgtttgtgtaataaaactctgatatgaactgtactattcagcattcaaatatgttcgcaaccaaaattgcgcatctgagtgctaacagattagttttcattcgttgtcaagataatacttttttatcagtagcatgctacaacgttaacccttgtatgcattttttaacgacagttcttgaatcattttgtttaagtcatctgggggaagaggttaaaactcatacatgcttgctgctccttctcttttgcatgttgcatgctgcaaatatttggtcgcagcacattaaacagtagcaattaaaaggtgcttatagctgcagagtgcagacaaacaattaat

SEQ ID NO: 127134 - DNA, 273 bp, Zea Mays
ttcgtcccttccattcttccatacccatacagatgtcaatccttggaatgtcaactacaagtgaggtcattaagtgcaaagaatacattgtgttggcaactcctccagctaaggatcagatggaacagttcaagaaggtgcatgcttagtttctacaagcaacaactcaagtggtagctggactccaacaagttgatttagcagaatttatagcacatgagcagactaccgacacccatatgacatcaaccacaacatcaccctcgatagttg

SEQ ID NO: 127135 - DNA, 788 bp, Zea Mays
cggtccgcccaagccatagccggtgatgagcaagctcatccgcccgaggccggaatacttcatcaattcgacgccggtgagttgttctgtttggtgtcctactggttcgatgagtcgtgatgcgcagggtagtatttgcttgtgcgggtgtgctactagaacctgcgtggggatgcccggcgctagtctccatcgtaggtcacggcgccgctgtggctagctgcctcgagtggacgttgggtggaagatgatgcctacgtcgttaatcagcaattgtgcggtcaagattagaccaaagggtaataacgtgtgagtcgttgatcaaaactccagcggctgggattgaatctggattttttcctgggtcggtaagttcgagtccatccgatggcaatcgtagggtcaggattagatctcagtactttaaatcaagaccatcgatcctcgatccaagggcgaccagagtgtaccgtttcattgttaggatgaatctaatcgtagccctagattcctgatcgtgcggccagcgcgatccgataccccttcggcgtggcaatttcgcataagagaccctcagcttttcctataccaacccgccgtccacctagtttatatcttgtgtcttggaattattacaccgagacccatgcacttcatagattttagggcgcaatccagggaaaatagaaaatcagggaaattgatttataaaatgaatttcttatataaaaacaattccagaattttgtaaaatccataggaaattcatactaagtccaaatgagtcc

SEQ ID NO: 127136 - DNA, 508 bp, Zea Mays
cgagaaacgtaccgatcatgaccggttctccttctggcgtcgtggccacttgcgtataataaattcgcccggttttcttcatatttttgcccgccgtattattcgccgggtttcccttgccttgggtggaactccctgaactctgctgattatttgatctgttctgctttggatatgggcagtccttgataaaatgcccgaacttcccacaattaaagcagcctgttgaggagcttgggagggcggggaaacgagtaccaggggcactcggctaagttgttgaggtgggggcagtggcagggcggataaagacaggttgtttaaaggggtaggagggtggacgtggtgaagaacagttttgattaaaaggtcggatcgccaacctttgtctcttctcaggcccctggttggacctatcacctccatagccctttgactttcctgggcctacatatttggcttcaactgccagtgctgtgctgacagccctgctgtaggagaggtcgag

SEQ ID NO: 127137 - DNA, 296 bp, Zea Mays
gtgttcctgtgttccacctgagaggagcgtgtagtgaaattattagggataaccgtcaccgtttgtttcctgtttttgtgtttcgatggcaggcgacgaagaagaagcaaggatccctacagacttcgatgaatgtgttagccgccaagaccttgaggcacacaacaaactcctgaaggagcaaatggaggagacggtccacaagtcagtgcatgatgccttcattgacatgaactttggcaagacttacgagaggctggattaacgattgtcctagatcgtcgacagacttgctg

SEQ ID NO: 127138 - DNA, 317 bp, Zea Mays
ggccgaaagggtatcaagcgacagcagccatccgatcaagcgtcagcgaccatgattagatctccgtatttacccaacccgcgcgcatgatggccacaggatcaaaactctacgcaccagattcaattatcctggaatcacctgcccatggtccgatctaaatcggacgactctcagcttccaacgtgaatcggtgtaacacgtcttaatccgagccgttcaactacgaaccagcgtccgagattcgtttgccccagccaaccgaactccggcggcggagctgcccacccgcggccgcgcaacccgccggaatccca

SEQ ID NO: 127139 - DNA, 909 bp, Zea Mays
ttaatatctattagctggaaatacttaaaaagatagtgtgtcttctgttgtacttgagcttctaatttgcatatgctaagcttcttcttagttttctgagttagctccttttggcaggctgagttggaggaaaaggtggcaactgtacatacagacatagttaatcatgtaagtgcacctagcagttcagtgaatgccattggtttgctacttcatgcttgtgtatgttggaagggaaatgtatgcagatagatataaattagaagtttaacaggcaactggttctggttgtttgatcaactgaaaatgagtgctttgtaactcgtactgaggacatagtgcttttcatgtgttagaatatagaagtgtcatggttttgggaaccaggggacaataagatttgtgttcggaggagagaatgctagcgtggactcaatctgaatggtgaatcgtcgggactcgaacggtgggtttgagatagtgggtttatactggtttagcctttacagtggagtctcgcccttgacgagaaaatagagggaaagagagaggcctatctccctaggtcaacgagctaggtcttctttcccgtgcatggccgtacccccgatatggtgttgtccatcatgttggtccctgtagcgagtccgttattgacgccctggtggtagtacgtggcgggtcctgcgagtctgtcctagggcgtgatcatacgcggcgtggtttcgcccgttgtatgccctgcgtcaccttccatcatacgtggtacatacgctcgttatggtgtgttgtcccgtcttttccaatatgtgggccactgttgagacccctgtgctgaggtctcccatgactgaggctgaccgaccttacggggcaatcgggggcatgtttgaactgtttgcaggggcg

SEQ ID NO: 127140 - DNA, 740 bp, Zea Mays
atcaccggcgagggtggactccgagccccagtccccgaaatccaaatccaccaggtgctacactatcacagggccgaagtgaaaacggtgcagggcgttctcaccagagacggttcgcggaagagagcaaccgcggcgcgcggcggattggggtcgaggtggagtcaccggcgaggaattacttgcgccctgttggctctccgatcaccgcgacgccgcgcaagcacaccacacggaaaggcgaagtcccggccccgaattccgatggcggtgcggcaacgaagacggtaatcaccggcggcggcaccctctgctcgtactggctatggtggcggcaacgtgggggcacgactggtctggtatagcccgagggccaactatatggaccccaggaggtcaacccgaggaaccccgcaacggcgccgcgcagctcggaggtcgttccgccgagcgatttcgttgccgcgaagaccgggtcggtgaagacgatgggtctgccaagcgggccccgcgattcagtggctgacttcaatccgcgcccccgtgagaggtgaccgacgggcgggccccaactgtaagcgagtatcggcgcggtgtaatgtgggccgcgcgaggttaattcccccccctggtgggccgaatagccgtcagcgagcccaagtagcttctttctttttttctgttttctttttttttcctccccttttcaatttcttattttcaaattcattttgaatttc

SEQ ID NO: 127141 - DNA, 451 bp, Zea Mays
gaagattgcaagctaaataatcaactgagcatcgtgacctcctagtttttccctttatgcttggttcgagtggggtttctagcatgttcgtcgttcttatccacctttatgcttgcccttggttgtcgattgtgttgatctcctcggtgtgatccgagcctctacgtgggtgtgtgccaaagtactgtgtcctatcccctataaggaatagtctttagattatccttaatgttactctgtgtccctttttatagagcaagggaagagagaggtttacataagttggaccatgggtccaattggctaagattccataatcctgatcttatcatattcgtgaaactgtacatacagcgttggattctttagtgcttgtcatacatgttgcagtggcaggtatgttatgttgcttctacaagtgttgaggcctatgccattaggtacgacgtag

SEQ ID NO: 127142 - DNA, 980 bp, Zea Mays
gggggctccagtgtagtggcggagctctataaaattgacgcccggggtcacttttaaaaagctctttaagatatcgtgacgacaaacataaactaaagtaatatttagattcagcaccttaaaatatgacaaaacttgataaaaggttaaaactacctaattaaagatgatttggtcctttctcgcctctaatagcttcgcaaacatcagcacgtgtgagcctgctttgagttccttcttcaaaacttgcttgttgcgcttcctactgatgaggaccatgatgaggaccactgcacgagtcacctttcaactttttttatatgaactttctaccagctgaagagaatgttgctcctgcaaacttcattaaatggcctacgacacaagatcatccaatcgagaataatatgcaatgggacaataactagatcgtcctgggatgtttcgctgcagctagagacaacaaacttcggtcgagcatgttctatcaagtgctgcgcagtggggggacgaccgtggatgaaggagctggtttgtttcatctagagaagcagggcgccgccatatgggtgcaattctttggttggctggccctccgcgggtgcttacaatgtcgtgcgaatctcatcatcaagaatgtggtgcctgacatctgtgtggaaacttcagcgcacatcctgttccagtgtcagcgtggctgacctgtggaagccggagttggtgacgccgccgactgccgtggaggagccgagccaccggcgaggggcggaaaacacaggcccgcgacgaaccgtggagggaggcaggaagcaaggcgcagggccgcagggaggtgaggaggtcgccgactgcccggttcgctagttgctagatccatggagggcgcgcagcggccgtcgagcttgtcatagggagcactggtgactggccgtcgacctcaagtcgccgccagggcaaggttgaggctaggtcgatcaggg

SEQ ID NO: 127143 - DNA, 502 bp, Zea Mays
acaaacacgacccctgaaacagaccaaatcattctcatcaatggtgaactcacggggtttaccatcgccgaccctttttcgagcttccttcaacaaacggtcctgctactgagccatgcgcactctctccagaagggaggattgaatgagcatccgagtctcctctctagcggtgccgacatagcacaaaacgactcccatatggtccagatatacgatcaaagtcaaggccacttttggaaccccggacctggtaagggcatccgccaccacatttgccttccccgggtgataatgaatggatagatcataatcctttatcaattcgagccaccgacgctgcctcaaatcagctccttctgagtgaaaatatacttgagactcttatgatcgatgtagatgtcgcaagactcgccataaagataatgcctccacgattttagggcaaagaccaccgtggccaattcgagatcatgagtcagataattcacctcatgcttcc

SEQ ID NO: 127144 - DNA, 427 bp, Zea Mays
gcggtagcaggtgagcgcggcaccagtagcacgacgcggaggaaggcaacgcgaacagaggcagtagggtgaagaacgtgcgggggagtgaagaacggcatgctgctccttttatatgggtgaaaagggaaggggaaaggacgtccgattaacgcagatttgatggctaattgatgcgtcgtgaatttacagagaaataaaagttttgaactccattaatagagaagcagaaaacgatcggctcagtggggaggagaagaaacgttcgtggcgcttgtggaacacgggcggacgcagctagctcaggcggcgtggcacgcgtgcaggcaggcgcggcaagcaaccggcggcaacagcgatgcagaatgacggaggccagaagcgattcttatccaggcacaaaaacaaacggttgggaagataagga

SEQ ID NO: 127145 - DNA, 380 bp, Zea Mays
agaaggtccaggacaacagaaaacatccacacagaggccaacgttcacaagacatgaaaaagaaaaattaatcccagaagacatggaacaagaacgcttccagaattcaatgacttcgcccggactgcatcgatcttcaacatcctcttcggagttttcatctttctgattttccacatgatcaactaacttgatgctagcggccctaacaagcaaattagcgccctcctgaattaagtcctggagctccttttttcttaaacctgcccaaaaattcatcaatgcacaagcatgacagatgatgtcttaagagatttaattaacattttttcaaagcacactttgtttctagacttccaaagacccagcagattgctgaa

SEQ ID NO: 127146 - DNA, 393 bp, Zea Mays
atgaacatgcttaaaataccttgctctctcaaacactatttaagcttaagacccgctcaatccatttattcccctgctaacttttccactgaatggcctgggctgaaattcaggcataacttcagttttgttctcccaagttcatgtccatggaagcatggaaaagtttctttagagggagggagggatccgttcacccggttagacgttgataaacaagagaatacagagttgcaatcttacatgggtgagcagcgcaacctcacacagctgacagccatatgaggtgatgatagttagaaactaattactcgcagagggttggacagtcattagggaactggggacccttcccccatcaaaacccaggaggagcactcatccttatccctg

SEQ ID NO: 127147 - DNA, 629 bp, Zea Mays
ggctagtggtggtgtagtcgtatgtgagagcagtgacagcagctcgagaaaagactgtcactgttccctccctgtactttgacaggaccaaagaatgcaacgcaaagtctggatcggcgccaaaatggtggtactgttcacgagagtgcattgttttaacgaaaatgcaacgagctctacgtttctctactgtactttgaagcttttgtacaggcccaggtgcgtgcgccgtgcggtgcgaaggagtacacccgaaggcttttgcactgcacacatctgggaacagtgctagatactttcaccgaccagttaccgccacagctttgttcttgctcgatatcgcttctacatgcggctccaacaactccaatagtattttaccacgctggtgtgggtgataatgggccctaaactatacactataaaatttaagaatcagataggattataatcatttttaactaaaattaattaaagactaaaataaactatgaagaaacattttgcatcgcgatctattagggtttaattagttacacactggcatgtaagaatatcgaaggttagaacaaatacatcggtccatttttagtgatcatgatcattaattttgacaatgagaatgattt

SEQ ID NO: 127148 - DNA, 583 bp, Zea Mays
aggaaccccacttagtcgagggtgaggcagacgcggagctccaaactaagacagaatagaagtagtcggggcaggagtaggtgcggccaaaaactaaggaaaaccctgcatcggcacgaactaagaagtcctgggcacatagaactgctgcggagggagtggcactgaaaattgctgctcagcgcttgacatcatgttgacagtgccctgagaagaggaggaagtcactggctcccatatgagcttcccattgggattccttctacacaccacatccttgtgatcttggctgcagatagagcacctgccactccactgacactcagcacggcgatgcgcatcaccacaacaaaaacacaccagccccagcccgggcttaggaacagcccgatacctctgattatttcctccagaagtacccgattcagaggatttgccacggtaggggtggtggctctggtgctgagacttgcccctcttgtgggctagacccccagtgttgcccctcctcgcgtcctggccacgaggctgatccacacccgaagacttctgtgactccatggtgtattggtgttgcatctcc

SEQ ID NO: 127149 - DNA, 482 bp, Zea Mays
tagcccgctgaagaaaacgtgggctgctatctgttcgtttctttttcttttttctcgacgggtgggataccataacgttaagccaggcttggattacatacagtccagaacgaaatcaaacacctcacaatgacaagcacggcaccagttgcacttgcaccaccagaggcagagtctatcgcgtgctcgcttggttccaatccaattcctttctatgtttatcccctttcctccgtgccgactgccgaggagaggagacatgtgagcccccatccacatgcatgtggtcttcatcagctcgggggaaaaaaaggcctttccccctttcgcgtttctcctttctaggtcgcgctagctgctatcctatcatcaccttcccctcctctcgatccacgctactggttccttgctcctactgcagtgtcatggcatattgcatatcaagctatatagatctctcattggactttggttggtcgtcc

SEQ ID NO: 127150 - DNA, 289 bp, Zea Mays
cttggagtttagccgtgatcctcccaacattagtactactcaacacttgacacacaaaaggcgaatgtatgcccgtctctgcgaccgaatgtggttgtcagccagagaaagagagtggtatggtactgtagcgtatcgccggccggagtagcgtaccggacttccgcgtgcctgtgaataatggcatggcactggcacggaccatgtgtactactggggtggtctggtgagtgccttttcgtcagtgggtcgtacttcgtgcactgtgccatgcccgtgtactgtagct

SEQ ID NO: 127151 - DNA, 812 bp, Zea Mays
atcgtttcccctcaactaatttcccgaacggcgctctaacctgctctgtccacggtgaccgtatgatcaacggccaaaccaacgcgttcctggcgatctaaggtagcttagctcaatcgagttggtcgaggagcatcaggggcacacgagaacactaaaacgagagggcagagggcatgagcggacctgagatgagctaaccatggcgaggtcacactgctcggtgttcttgagtgatttaggggaaatcccaaactagggagttctagtggatgattcgaggcacgggttgcttctctggttgcacaattacatagcggagtaggtggggcggcaatttataggcttccacagcggtggtgtccaatttcatgaagatgtgttggcgaccgaagaggaagaaagttactagtgctcgggattagaggctttcaccgtggcaagctccccagcgatcatcgggcatgcacgatgtgattcactatgacgtggtcaagcgctttagcacgtggcgcatggcggaaatcggccaacggcggcgaggtctatccgaccgattcgacgagcaagtgggtacggtgagcttagctgtgaccgagcctgagtcgatccaggcgccaagatctttactcgcccatggttatccgcaagtcatggtgcacgaatcgcagcgactggcgtgaatcgcgatgcgacggtcaccggcggcgaagggggatgaacttggaatcttgttcagttactgtaccatggattccctattcagtgcacctgacagaccactttgcagtgcttagatcttaggtttttac

SEQ ID NO: 127152 - DNA, 623 bp, Zea Mays
actatagttggatcaatgtttttttctgcaaattaattgacattgttgtttgtacgatggaatatgatcataacaatctaatcaatcaagaatcaaacacaacaattggacttacatgtgaatgcagtatttgaggcgtatccatctccctggagctaatattggacataggaggtcggaccctttgttctccttcttcccctatgctcatctcgtcgattacaggacccagtagagcaggaggtggtgtgaccagtgagttaccatcaactcctccctctgtctctggatcaagacgaacgccacctcctaccatcatcggtgactctccagagccggccatctccacctccaaatagttatgcaggctttgcagtgttttttccgatgaaaggaaatcacagatactattcaagtaaccgcatccacgtttccagggtatttccattatttccgaaacagtcccgatattctagcgatgtacatgtaaaactaatttccctaacacaatacttacgcacaatgactcaacattttacgccaaaaagtatatactatttatgcaacttttgtacattaccggttttatgccatatccttcaacatcttattctacattctat

SEQ ID NO: 127153 - DNA, 531 bp, Zea Mays
cagtgatcacagggctttggcaatgttgcggggcacaagatccaaactccgacgagcagatcagtgatgaactctaggcgcggttaggaactcggtaacggggacagcaccgacaacaagtacagtaccggcggcgagagtcaacaatgtcacggtgcaaacagcaggacgctggggaagcagaaggagcaccgatgaagaaggacgaagctccagcaagggcaacagggactcgtcgtcatgcgcgcacgagaaacagcgacaagacggcgagcggacctaggtagcaggggtgagtacatggcgcaggtatcaacaacgaggggcagagcgagctgagcacgtagtgcactacagcgagcgggagggcgagagcgctggagaaaaggtagagcagagaggcaggagggcggtttcattttatagacgatcagggagaacgatatgacacatagggtgatgacggagaacgatatgacacatagggtgatgaccatcaatggccatgaacggaggaaataaaggtcggca

SEQ ID NO: 127154 - DNA, 701 bp, Zea Mays
caaaacacatgcgtaaacaaatcataagactgcctctagccgcctcagcatttgtgcatcctggcaagccccacctacaccctctgccctgagacaaccttgtcgtgcacgccgagctgctatattaaagtgttgggttgcagatcttgaagtgatacctcagtgcagaaagccactccggcaagacctcatgcacccgcctgagcacacaccagtcacttgtcacagtcacaactaaatgaatgccccaccatgagccaagttaccctgccaacctcgggatgttgcgactgcactgtggcaacgtcgccactcatagtacgtcggtcaagactccctccattataaattgtcgttcctccgcctataaatattgatgcccttgccgcggaacctcacagtccagccaccatatcattgtcaccccacatccgaacaacgcgtgccttactcttcaaaccagagaacaagccatcaccgtcgatttgaatcgtaggtgagcatgccataatcttcgacctctccctccatcgaagtcattcttaaactatagaagttatgcccttaccatcgattaagacaactttccccatggccatcacttgcccattgaaaatatgcaaggaaaatctcgcttaaacaattgtcatataataagcataaccaagtgtctagaagcttctacaatattcatgataaac

SEQ ID NO: 127155 - DNA, 688 bp, Zea Mays
actggcgacgtactgccgactgttctttcgagtcagagggacctcgtcctcttcctccccgtcgtcttcaccagcaacacagacaacacccacattagaatcagcaacagatggagcacccccattgagatcagcaacagatggagcacacccatcggggccagcgtcagtaaattcaggcacaagcacttcttcagcagcaggaaccgaagtaccaacgtcccgatccaaactagatactcgccggaggcgtctctttttctttttctgctcatctgcggaaggatcaagttgattggctcggcaagggcgtctcgggcgagtactgacaggcttctggatatccaaggttgtaccagtttctgggagaggcgccaccaccaatgtcccagcaggagcagcatcagaagagtcttcagccagcaaatcaagcatagcacttatttctgcgtcactaggatccaaaggcacctcaaaatggacatgtcgttcatcatcaggaatttccccgagcgaggcaaccaagacgctaacttcttcagcagagggtcgcactctaaggcccaaactgccatcagtgacaggtggattcgacacaaaaagagtgaaggccttgggaggaggcaaagtccaggctgagtatgccactggggcaccagcatttgacaccttccctctaagaatcatc

SEQ ID NO: 127156 - DNA, 1336 bp, Zea Mays
atcagggaaacgtcctttttagtttaaaaggtgatctattggtttgaattctttatattcctacatattagcatctttttggtggaaaaaggtgccttacaaccttaacctatgtttggaaagttctctcgtgcaatttggctaaatttcccatggtctttattttattttgagaaatgatgtggcataatgatgtgtgatgttttacttgagtggacataaacaccatctcggtataccttgaataaagggattataggaaacctggtatcacaaaaggtcattagctagcccaataacgtcttcatcaactagttgtactcgaataccctctcgtgtgattacaatgccctcaatatcatagaaacgtcatttgaggtttaaaaggcaatctattgttttgaattctttatattccaactttttagcaaatgtatggtggaaaaaaattgccttacaaccttaacctatgtatggacagttcactcacgcaatttggctaaattttccatggtctttattttattttattttgagaaatgatgtggcataatgatgtgcggtgttttacttgagtggacataaacaccatctaggtatgccttgaatagagaggattataggaaacctggtatcacaaaaggtcattatctagcccaacaatgtcttcatccactagttgtactctaataccctctcgtccgaatacaatgcccttgatatcagggaaacatcatttgtggtttaaaagttgatctattgtattgaattatttatattccaactttttatcatctgtatggtggaaaaaggtgcctcacaaccttaacctatgtttggacaattcactcatgcaatttgactaaattttccatggtctttattttattttattttatttgagaaacgatgtggcatattgaatagaggggattataggaaacctagaggggattataggaaacctaaaatcacaaaaggtcattagctagcccaatgacgtcttcatccactagttgtactctaataccctctcgtgctaatataatgcccttgacatcaggaaacgtcatttgtagtttaaaaggttatctattgtattgaattctttatattccaactttttgcatggtttaaaaaatatgccttacaatgttaacctatgtttggacaggtctcccatgcaatttggctaaaattttcatggtctttattttattttgagaaacgatgttgcaaattgaagtgtggtgttttacttgagtggacttaaacaccatttgagtatgccttgaatagaggggattataggaaacatattatcacaaaaggtcat

SEQ ID NO: 127157 - DNA, 591 bp, Zea Mays
ctttctcctgtgcccatatcgcgttttataaaacggcctccagcccgagaccgagccagaggctcttttcacctctgtgctctctgttctatgggaattgctccccctcgccggcaaccacctcctcctctccggtgatctgttctccggccgtgctctggcgatcctccgtcaatccccgtgctcgtgcttccctggtgtgtactcttgtcttctcctctctcttctctctgcacattcacccagtgaagcttcccctttttcctccctttgcgcaaaattcaaatctccgtaaattcctgtgaatccaagttgtgctatgtgtatctctgtgtgtcttgagcattcctacaggttcttagctccttcgggagggttttcacacctcaaacagccatttccctgaaaccctaaaccaccaccctccacgtgttcggtgaaatgcccaaaccagccaaaaaatgctccaattgaacccaaatttttcaggcaccttcacaacacttcctgtaacacttttgccaaatttcacgccaatccgagattccaggcttcaatttcactcaattccccgttttgagcgatcgtttt

SEQ ID NO: 127158 - DNA, 671 bp, Zea Mays
ctcaggcgtaatgctgggtgcgttgatggtccagtgtcctctgtttcacgtacaatgaaattgggccctcgtatgccgtataggcccacagttggccttgtctccctgtttgcacgaacgggcaccaatattggggtgtctagggctcctattgcacgtgagcactctgaaaacaaatcttccgtcgcccctctgtctttcgctgcttcctacgctcaggtggcggctcggtccatggagggggggaatcgccaaggagcggctgggcggggaggtgcacaggaaagccacggtggtcgctcttctggccaagggcagttcgcggggcgctatgggtacaggaggccgctcggttctttcaatggccatcgtggcggcttcgatcaggctgggagaggccgatccaattccaacctggttggtttttctgctggttcgcgtggtcgcttttctggaactggaacttcatcgcatctggggggcagtatccggggtggcaggggcctcaatcagccggtctctttgccatcagtttcagatgcgcagaaattggctggggtagctgctccctccactgaccttttggctcaagcagtggcgctgttgagccaggctattaacccaccgacgcctcagatttcctcggctgctgcttccgtggtgcctggtca

SEQ ID NO: 127159 - DNA, 497 bp, Zea Mays
cttaaggcatctcttctccaccttactcgtagcggtggtgaagcgtgtgggtcctcccatgcttgccttaacaagcgtgtcagaatcaacgaggcggagctcgtcggtggcggtggcgaggaagtcaagggagccaaaggtgatgcggctcccaggcgtgaaggtctcgctaccggagaaagcgaatgactaagccatcagagtgtaaagagtcgcttggcacgctaacagcccccacctggcgtgccaactcacaccaactatcgtggtttccaaaaccaaggagacaataaaatttgtgttcggtgggaggctagcatggactcactctaaatggtgaatcaagagactgaaacatggggtttatactagttcaggcttgcaccctagtctagtgtagtgttgatcatagtattgccctaaggaacatgttacagtgggtgcaagtgtgagaatgagaggaagtggagaactcaagcatgctctcttttccgtct

SEQ ID NO: 127160 - DNA, 407 bp, Zea Mays
ccagcctgatgtgtacggtatgtcggtattgagattagcttttgtaacacatctgtagagccaattttgttagctttagtgcttgtttaatttgaatattccaggcttcattttaagtactcagaaagcaatattttgcatattttactcaaaaaaacatgtactgctgcttacaaatccgtttctctaataaaaactaaatagcattatgaaatcacatatggtaaaaaagtgaaaggctgttgaaatttgaagcgcgtagacatggttcagtttccttcagtgtagacggaaccaaaccaaatatcgattccagctagaggtagcaatggatcaaagatccaaatgttattcgtttgagctctcagttaattttagttcaaaaataaatagaaataaagcttgat

SEQ ID NO: 127161 - DNA, 385 bp, Zea Mays
aaaacttcagccgtcggtttgtcacgaatttccaatccctctctaacaaaccggtgcaaccatgggacctcaagtccatcaagcgccagagcgatgagaccctccatttgtttcttaggagatgccaaaccatgaggaactgcattcctaaagtcacgaatgcaactgtgatcgaggatttctattgaggatccaatgactcggccttcatccgagccatcctccaaaaggcactcgtcaacttggaacaactgttccggcaggcggacatctacatcaccgccgacaagtgagcccaagacctcattggaagcgtgaagcctgcacctccagcacccaggaaggacatgaaccagcaatcgaacaaacgttgggtcaagaggcc

SEQ ID NO: 127162 - DNA, 334 bp, Zea Mays
gcggcctgtaggtttactgaagccattgaaaattctggagtggaaatgggagcttatcaccatggattttgtggtgggtttacctcgttctcctcggggcagagatgctatatgggtggtagtggatcgcttgactaagtctacgcattttattcccatgaagaccacaaatttcgcttcagatttggttcccttgtatatgaaggaagtagtcaggcttcatggggtacctaagtccattgtttctgatggagactccaaatttgtatccaaattccgggagagtcttcacagtgcattgggcaccaagctttcacttagtgtcgcttttcac

SEQ ID NO: 127163 - DNA, 779 bp, Zea Mays
gttgacaagcatgccaagcgtgcctgggtgctaaaacaagggtgatgagggcgagaacggacctggagatggtggtccacggcgcggtggctcacggcggtgcggagaaccgatttgggggagaaaggaattggggcgctacggtggctaatcggaggcgagggctggcgctctagcttcgtaacaacctagcggagctcactggggcatcaatttatagagtgcgatcgcgaatatgatgaattttggcgggaagggcgggcagtgagaaaggggaggagtcaccagagttatctctcgtggcattcattggggcactgtcacaggcgattgatagactacctatggcggtctactgcgatgtggtaacaccactgactatgtgacacacgggcggtaagcggccaacaccggcggggatcatctcggccagccgcagaataagtgggtacggtgaaccatccaatgaccgggtccgagattatcctagcgccaagatcttttactccccgcgattatccactttgcgccgagcacgaatcgtggcggccggcgtgaatacaagtgcggggatcaccggcggcaaggttaagtgaacacaagatcttcttcagactattgtaccattgaaaccttccttcagggcgcctgacagagcgaattagagggcttagttcttcaatttttatgtgacaacttgaccagccctctgtagcaaagttgttaatctataatccagctacaattcgactataggaaccttggccatttgcttactc

SEQ ID NO: 127164 - DNA, 461 bp, Zea Mays
ggagggcccatatgtagacactaagtctaacgattgcattgggtgtcagctgatgaaaatatatctcaaaatttttcaaaacttctccaatcgtctcatgcagtgggaaacgaagtcctgtcctaaagaagcttttaaaaactatgacttcatttgtcttttggatctggaatcacctcttctccaacaaatcgaacaagtttgctctcggcctccccaaagtagcccaatttcttcatcataaccatgtcgtctgtcgtcacagtagatttaccaaattcaatgtggctgggtttcgctgggctcagaatagtgtaatcctcttcatcttcgttctcactccctccttcaactgcgatctgttcagcttcagcaatcgaggtaccttcggcaacagcctcctctagcacaacaagacccgactacatcatcacttctgatattggtgccgtctcagttac

SEQ ID NO: 127165 - DNA, 423 bp, Zea Mays
gcccgtgaccagctccgtagggtcatcagctaaccagccatcgccaattgctagcagtccttcaccggagctcgagaatttccaattctccccaaatcgggtctccgccaccgtaaagttcatctcaccgcggccagccgtccccaggtctgctcattcctttttcatccctgtctagcatacttacgtattggtgatgctctccgacccttccaatcgaaccaaaccgcccctaatcgctgggaacacgtcaagctaaccgccatgctttcggtcaccgtggctagagctccatagttagtcttagatgcaattagtttggggaaaatactccactggtcatgaatttgggttagtcttagtctcgacgccggtcatcgccctaatcggtcggcgtaggtgctcgccggagctcggctgggc

SEQ ID NO: 127166 - DNA, 571 bp, Zea Mays
cgaacctgtgccgaagaggaaacaattgaaggtccttacccatcgaccgtgctacattgaaacggccatagtgcctgagtttggtggggaaacctcttcggttagtgaagcgaaaaaacctgctcctcccacgcagaagattgaagagccggctgcaatgccgaaggcaccctcagccaaattagctgagccgaagaccgataatattgaagagacaagagtcgaatggacgaaaatattagaagttttaagcccttcggcagaagtgacagtgccgaaggcacaaaaagatcttacgacgacccccaagagaaaaaggatggccagtgtgctagatgtgctagagacggtaaaggcttcaagttctattctctcagggaaaattgtcgaggcttcaaaaatacaagtcgaagctgaaacaagaccggccgaagttgaaggtgcagtgagccaagctagtgccgaagccaggccttcagagcctattgataaacaaccttcggaaattgagaaaaaggcagcagaggaagaggctaccgagcagagtttgcctgagaaaactatcactccc

SEQ ID NO: 127167 - DNA, 429 bp, Zea Mays
tgaagaaggaaatagcacagtatgtggcccggtgtgacacctgtcagcgaacgaaggccgaacatcagaagcctgcaggcctgctgcaacccctcccagtacctgagtggaagtgggaagaaataggcatggattttgtgaccgggctgccccggacgcagaaagggaatgattctatctaggtaataattgatcgtctcaccaaggtggcccacttcgttccagtaaaaaccacttttggaggagccgcccttgcccgattataccttaaggagatagtcaggctccatggcattccacggaagatagtgtcagacagaggaacacagttcacctcaaaattttggaaaggcctccaacaagcaatgggcaccaagttagatttcggcaccgcttaccacccccagtcagatggtcaaacggaaagag

SEQ ID NO: 127168 - DNA, 371 bp, Zea Mays
tagtgatactggtagaagagattagaccctgctcctataaataagtttgaaatcttagatcaacctgaccctacccaacaacttaatctacaaaacaggttacataactaatcccatctagcatatagctacctactaaacacctctacccatctgttacctacatacctatcttaaccatatgccccaactctgctgatatacactaacctcgaatcaatgaaaccaagaccagaggagaaaagatcaacctcgtcaaggaaggagagaagtcaaactcaatcttcagatgcattaccactcaacacggaattctttcccatcataaacttgcttaccctaggctatttttgccctaacctatcttttat

SEQ ID NO: 127169 - DNA, 1637 bp, Zea Mays
gattagcgctgtggatagaaattgaagctcgggttcagcagcctcgatcaaacagcgccagagccagagggctgcgagagaggacaggactggacaagaaaactgaaatgaaaacatgaccaagaaccctacccaacacgagaagccccaggccgaaattaccgaagcgcccctcgccatttaaccatctcatctcctcacctcctcgacggcgcgactccctcgacctcgccctcctccccccgccttgacgctgtcgcctggtcctccgcggtcggctgtctcgattcgatcggtaagcgccgatttcgttccgagcgcctccgttcccttgcccagcaggccgcagcccgcgggaggcccgcgcgtgcgctgccctgtcttacccgcggaatttatggggtgatgggtgtactgatgtgattgcggcggcagaggctcgtgatttgtgcctggttttgtttttttttggggggggggggggggggggcttatttctgttggctgggaggctcggactgcagttcttcattgccggggctgttggcctgttggggccacgggatggtctgcacaaaatcacctgttcagtcttgactcgaccaagagctctatttgtcaagcggcgtaattggtgaaattctatctggagtacagagtggacaattgaggtcgataaatagagaggaacatttctggggcaattatctgttggaatggtatggctgttaggtttgtttgtttgcactcctctttgggagcaccggagcagcatagcactgtgaatcattttattgtttccaatgataagagtgagccattgagtttgggtagatcggtagatgtattgatgctgtcataccaaattcacattggttttttagtctgtatgggatttgttggtcgccattttgtggaaaatatgtagatatgtcattctgcttgaccctatgtacctgtgtttctctggcttgcaattgcaattgtagctgggtcaaaccacatctctttactcacattttttcctgcttatattgtttgttctgatcgacatgaatttgtattgaaagagaatgtgacagtgggttagtctgtatgaaacttcagctaatggttgttgctcaatagtttagatgtggtatctcttcagtaatagcagtttacttcgatgagttttactatatccaccatctggtaacaatttagtgatgtttaacttattgaagccattagggtgtgacttgaaccagtctgtgtttcccatactttttctatgtttctaggagctacataatatgattggagagcagagaaatccacccactatttttgttgtgccaaccgcttgtatgtatgatgctggttaaacttagggaagttcagcaaggcgcactgcttcatatcgttttattgctgaggtggtataaggaaatctattaacattgacaattgggtaaatgacttgatttggtgtttcaccttaatcattaagcatagacatgttttttttgtatatcctgctagtatatcaggtggggtttgaaaagctgtgttaaactaccactaattcagtttctgttttaaagggaaaatagtggcatgtggccttgtcatttttctgtttttctgggattatc

SEQ ID NO: 127170 - DNA, 690 bp, Zea Mays
caccgcagagagcaagcgccaccgtccgccaagccacccgagcttcggccaccgtggccagcccatcccagccatccccagtccatgatatcggctcggttagcttcgccagagacccgtgaagctccccaagccctcaaacccagcagaacctcgccagagaccccgaatcaccctcgctagacttcttccgctcaccggcgaacgtagaccgggtatgtatctgcaccattttcctcacgtgtatcgcctctgtgtcacctggtcaagcctcccgagccaaccaattgaactatctcaccgtgatcaggccagagcactcaccgccgacgaactccctgcctgcgcacatggaccagccgactccaaccacctccgacgccgacccgtacctcgatgtgaccatcgtaacctccccgacctccctggacgcctcaccagaaccatctcgccgccggtaagcccctccgccctttcctccgccgcgggtactatttcaataagggatggatcgtgagattgatttagggttacctcagggggtcatgcgtaatgtcagtgactcagtggaataatggaccgaaggctagtttgtatggaacgcaggaaaatttaaccagggaccctagcgcaaagtggaaattccttttccattttaaaattcaattccttaaatttgcaataaattag

SEQ ID NO: 127171 - DNA, 434 bp, Zea Mays
gggcttgtgacttgtagagctgctgcaaccttgtgaattgtgattttatattttgattatggtcttatggttatgaagttataagcagtgtctttgaggtggggtgagttatctggaagtgatcattttttggtactgtacatgagaaattgatgagtcatgagagtaccatggaattgtactatatagttgtggattatgccaatatcttcatttccgggtttagaaatttctgcactgagtaccaggaaatgccagtatagtgtgatgtggataccactgaattgctgggtttgaggatttgacatcaacaccttgtcatctcatcaaaatcaattattggaaggcatccatagttgtgtttgcaaagcctctttggtatcagtgatgtgtgtgatctatccaactgggaaatttgatttggcatgactaaa

SEQ ID NO: 127172 - DNA, 572 bp, Zea Mays
gtcgccggaaaggacgagctagccaagattgtgcgcgagcagaaagagccgaaaggcccgatgaatgattagctccgaatgatggatgattcctgtgggtgtctgcaatccatgaatcggtttctatggatcgtcatctgcccctttcctgtccgaataggggaggaggccccggaccgctggcagggttagacaggagtgagttttattttgggagtggcactcgctttattattagaaaggcgcctgccattcttagcctccttcccctgcatgtgcttgtgcttcccgtgtattgaacggtcggggagtgggggcttggaggaagaagaagccctctcgctactctttgccggagatgcgccgtcaggtctctccttggaggcttgtactaccatcaaccatggatatgataacgatgacataaatggatggcatggcattactattagctattgtaccttggacgcgtaattcaatgaagcactaaccatcgaagcaaccagtggcggattcagaccagcagcagcgcgctctagccctgtccgtgctgcaaactcacgccagcaacc

SEQ ID NO: 127173 - DNA, 449 bp, Zea Mays
tactagggtactcgtcacggagtggtgcactgtgcaggcttacggtatgggactaggctaagcggctacactcatccgaaccaccccatggaatgagtctccattctctagaaccggcccccaggctatcggacctcccagctttcgtaagggggtcctaatctgcaagcctggctgctcaatccgggtgtcatcatgccaggacagacgggaaccgtacaagtgggttaggtaaaaaataatacctggaaactgcaggatgaaactgtggagcaggaacataaagttatcacagaagcaaatctgagggggtaaatctcctttttataattcgacatgcacgggtgtaagccaacatgccgggtttatgagggtggaccttaccgggctggtgtacgtgtatgcgaggcctaactaccaaagaagaaaaacttaacccctcggactcg

SEQ ID NO: 127174 - DNA, 538 bp, Zea Mays
ttaatggctgccgtcgcgattctacttcaccggacgtcccttccccctttctaggctataaataatgtgcccatgacccctgagtccgtgctcgacctccttcttcgctttccccatgccccattcctgctgctagcataatccatgcaccgtcgcttgccaaccatcgttgctgggccaattcgacgccgtcgagcctccctcgctgccagcaacagcttacccagcatctcctcgcctctgttctactcgcctgccgctgctcgctgtcgtcgccgtcattgctgctgcatcgcttgacgtcgccggtgctccccaccgaagagcctcgtcgcattcctacacgttcttctccgcgcctgctgctgccgtcgcgccatcgccatacctaacaccgtcatcatcacgagaaagatccgtccctgcgcctagctcgtccgcaccgctaaaaccgtcgatccgctccatgtatcgtggccacgtgctgaaggtagaagacgagatctattttttgttagctacccttcgatttttatag

SEQ ID NO: 127175 - DNA, 782 bp, Zea Mays
ttgattgcctcactcgaggaaattcctgatgatgaacggcaggtccattttgaggtgcctttggatcccagtgacgcagaaataagtgttatgcttgatttgctggctgaggactcttctgatgctgctcctgctgggacgttggtggtggcacctcccccagaaactgatataaccttggatattcagaagcctgtcagtactcgcccaaggcgcccttcccaagccaatcaacttgatccttctgctgacgagccgaaaaagaaaaagagacgtctccggcgagtatctagtttggatcgggatgttggtccttcggttcctgctgctgaagaagtgtctgttcctgaatttactgacgctgaactcgatgggggtgctctacctgctgctgaccccaatgggtgtgctccttctgctgctgaccctaatgggggtgctccacctgctgctgaccccaatgggtgtgttgtctgtgttgctgatgaggacgacggggaggaagaggatgaggtccctctgactcggaagaacagtcggcagtacatcgccagtggtgaaagtagtggagttccttctcctgctctgtctgccctcattggtctgcaagaattgtccctggcgaattttgatcagactcttgaggatatggttccagaggatctgttatcagagccagcagatgatggtgtgatggaggtttgtgctgatgtgctcgatgttgggttgaggtcatcccgtgcctcatcgaccctagaacgcggtcttgagggtcaggagac

SEQ ID NO: 127176 - DNA, 466 bp, Zea Mays
ctggttcgatggcgggttgatttgaaagaaacccgagggcctctttataaagatggacatggcgaaggggtacggtggattgctagctgtgggatccaatccgatggcagggatcatagacttatctcacctgaaccggtattctatcaaagcgatcggatctaaaatcaatgctcgagattaaaggattccgcgatctgatctcgaccaacagatctgagatcaacgactacgattttcaatcacaatggggtatttgagattcaatcgtgagcgctcatcatcagatcgatggccagggccatttctcccctgtacgatcatgttcacgccggaacggggctgcggcatcctgcccatggtggcagtaccactggtgagcaagctgctgcgaggctatggatgagatgaatcttttattgatggcttgaggtgttataatggcatgtatttatatagactgaga

SEQ ID NO: 127177 - DNA, 397 bp, Zea Mays
acagtcagggctgtgagaaaacataataaaatatatgtagctcatgtaatatcaattttttgaagttgtattccttggtacacaactcttttctactactattttaaaaaccaagtttaacctaccagttgagtagttgtcattgccaatagttgtcttttttataacacctcttttttataacttctgaattttatcccttgtggttacgatttcatagttaactttgcagaattaatactttgaaggtgacaagcagtacacacaatagttccacacgtcctagctaaggtgaggcatcaactttttattttcctgtggaattcagtacctaacctgatcattgactacttgttgtcaccagtatactactaggtattaataaattgtgtacact

SEQ ID NO: 127178 - DNA, 413 bp, Zea Mays
tgacaggctgtctgaatgagttagtcgccatggtacagtgctccatatggattagaccgccagcagggaatcctcaccgccgacgactccctccgccgtgattcgtgtcaccggcgactagattcgtgcctggcgttgatgaatggcatcgcgaggtaaaagccgtgcgctggacgccactccggtgactcaccgtcgtagcccttctgctttacggcgggagcagataagctcgccgatgaaccgccatcttccggccttatgccgcgtgtcccaacctcgccaccgcatcgctgtgactccctctagcttcccgtcgaccaccggaattactgccacgacactgaacacgtattcaccgcactagcgttcttcttcacctccggccgccgcgcgtcagcgcccaaattcac

SEQ ID NO: 127179 - DNA, 304 bp, Zea Mays
tatatgttcggccatggaagacgacgccggtatagcttgggatttgggacttcgccgacgcccggccagagtcaaccatgccgacggtgtcccgccaccgcgggaagacgcgcgcccaaagtcaacgatgctgtcggtgtgtcttaatcctccggtggcgatgctccctcctcatccgtgggtccggcttcggctccggctccggccccggccccctccgcttcctcgagagcaccttcggtgtcaacgtacttcgccaacgtcgcgagcttcttcaacatacagggcgccggccggcgtcgag

SEQ ID NO: 127180 - DNA, 368 bp, Zea Mays
agcgccgacgttgtcatccgtcactcggcggctgtctctaaaaacgctggcaatgtcacaagacactcggctgtcagctctaagagcgtcgacgtggtcatcagtcattccgacgatgacatagtttcatcatcactcggactctatttcaaatgcgtaaaaaatcgacaacaatagctcggccgtcacctccaaagcggcagtatgatgccagagttacctagtctctgttctgaagaaatcaacttcaccaaaaagagatcaacttgctacgaaacaaaacaatggacacaggaggaggcgaaatcattcttcatttaagggaagtaatagtacttacaaatcaactcattatgagttgatactcc

SEQ ID NO: 127181 - DNA, 315 bp, Zea Mays
tttagttttaagttttggatttaatttgtaaacctttctttgtaaacccaatgccatctttgttatatcggatttaatttgtaaacccgttcagttacagacttgtttttgatagggatttgtaaaactgatcaatgtcctcttcatcgaagtgcctttccattctatgcatgtctccttgggtggctacaatctatgtactttcatgtcgatcatgttttctttcaattcacaagcccgctctactcaaaaggagcatcactaaattgaactcgtggaatgaattgtactggtccagctaattcttcacatttg

SEQ ID NO: 127182 - DNA, 392 bp, Zea Mays
ggggtttgggttttgggtagaactctctaatggctacgaccttagaaggggagggtgacagtggtggcaattggagggacgatgaactaggtggctgaggtggactatggcagtgggttggtgttggtcaacaaagaaggggagggagaggcgatgtattcataccagggcttcatgtcagctgaggtcgtcgtcatccacgatggcgtgctggagcatgactggtggtgaggatggtggtggcacctgaccatagcatgagaaggggaagtgcttgtggtctgtgatgcggatgcgaggagataatgtttggagtcagatggtcgactaggggccttgcatcatagttacctcctttaaattttgagacactgatgcatgatactttcggg

SEQ ID NO: 127183 - DNA, 335 bp, Zea Mays
tctttccgcttggctgttcttcgttgatgactcgtgctgctggcacacacatgtgtccatatcgtcccatgcatggactccgattggcaaggctgtgtttcctccgggttgttgcacccaaaactttgccgtaatcagcctcccgtaatcactggagtctgttacgatcggagccaactgtccgtgcttgtactcatctcctcgcggctatttaaacagagtttctcccctcatccgccatgtccgtcgggattcgctcagccgtgtatccgaactgaagccaccgcgtcggctggccttgggcgcatgccgcaacaacctgccgagacccccgc

SEQ ID NO: 127184 - DNA, 455 bp, Zea Mays
gtcgtcatgactctcaaactcccaagtgaaggacacgaatgcagtcaagaataatcacagagatcaaagttgactctttgattgactagccatgaacttctctcagacgatatctttgaccaggatattagtctactagttgcatgacccaaaaaatacaatagtaaatgcatagaataccctttccagcaatcacacaggacagctcagagcaaatctagcagctggcctagcctgccccagccagttgcagccgtcttgcattgcatctttggcagcaggcaacatatgagacctaactacagtctacaggccacagatctgcagatctggaaggaaaaccacatcagtccagggaggaagcatctcaagctcacctccatatgcatgcaggtgcaggcaggcactcattcattgaagctcacatgctacacacaggacacagctgagccaat

SEQ ID NO: 127185 - DNA, 1134 bp, Zea Mays
caaagctttcgattccctaaattgggcttaccttctcgatgtgctaaaagcccggggattcccccaaaggtggcgtaattggatcgccgcaattcttggttcttctacctccagagtcaccatcaatggtcaacaatcagacaagatttaccacaggcgtggtgtgaggcaaggggaccccctttccccttttctattcatattagcaatggatcctcttcagaggatgattgagagggcagctgaggctgggttactggggcgggtcctgccaagaggggcaaagcttcgatgttccctatacgcagacgatgcaggggtgtttattagagcagataaagaagatctcaaagttctaaaatcgattctagagactttcgaagggtgttcagggctgaagataaactttgataaaacagaaatttttccgattcactacccggaggagctgtggccaaatcttgtagaagtcttccccagtaaaatcgctaagttacccgggaaatacctgggtctcctccttcacttcagaaccgctaaaagaattgagctacaacctttagttgataaaatcaataaaaggctcgcaggatggaaaggaaggcttctctcaaaggcaggtagagagacattagttaaatctgtgttatccgcgcaacctatttatcatctgacggtcttcccggctcaaaaatggctattgaaaaaaaatgataagataagaagaagtttcctctggaaaggaagtaatcctgaatcatgcaactggggtcactgtctgatcaactggtctactacttgtttaccaaagtgcaaagggggattgggcattctagacctgaatcgttttgcgagggctttaagactaagatggctgtggtttcgatggaaggccaaagacaaagcatgggtgaatttgcaactgccatgtgatgaatccgatgaagatcttttcaacgcttccacttgtgtgaatgtgggtaatgggaaaactgctgtattctggaaatctagttggatccatggtcaagcaccaaaaaacattgcaccaagtctttttaacaaagcaaaaaggaagaacatttcgactttccaggccctgagaaacaaccgttggatccagttatgctctcc

SEQ ID NO: 127186 - DNA, 648 bp, Zea Mays
cttgaagtgactggggtctccacagtgccaacagacatttgctggcggttggttgcttgcaacagagggggcctgaagggagctctgactctgctgcctatagcgtgacggagtgggtccagatggtctattgaagcttggtcccctgggtggaagcccaaagggtcgagctctctggtgacgatcttgctgctgagctcggagaacttggaattttctcttgaggtgccctttttcttcctcttttgccctttccacttggatggctttgttggagaggtgagagaagttgaggaagtcttggctgtcgaggatggtcttaagctcgggtcttagccctttcagaaaacgggccatcttcctggactcggtgctgacatcgtcaggcgcgtaacgggccaactctgtgaacttgtgcacatactcactgacagttctcccaccttgagatagctctcggaactcatcttccttgagttgaactatcccctggggtacatggtgctcacggaaggctgtttcaaattctgcccaggtagcatctctaacggcctcgctgaaggtatcccaccatgctagggccatcctagaaagttgatgagcagctagttgaacacgctgatttttggggcatccgatggcttccag

SEQ ID NO: 127187 - DNA, 985 bp, Zea Mays
caatgatgtttatagtggtgttgcttctgtggtgttgtctcagaatccaaaggtatagtttgtggttatttttttatgtttattatatttgtttagtttataatttaatatttttttgtatatctgtttttgtgtgtgtttgccttatgttaggcacatgctgctggtgcatttttagtagggaatgataatatatatgagcctacactagcattgaattattcaaagttaaactcaactgaaagacataggaactccggaggaataagtggcaaaaaggaagaagttattgtcattgctgatgatgtaggggctgatcatgaggtgattttttcggtttattctctcatgtagtctgttgtatatttgttatcttttttcaatcttttttaatttatatcgtataaacatacattatgttaaatttttctaggttcaaactgttgctgttaatatggttggcgctaatttacatggtagtagtagatccaaatcagcagctgcagttgatcagatgtacaatgatatgaacatattcaacgtagagtcagaagctgggggattctttttgggaaatcaactagaagttggaaatgtagtcaggaatgatgttggtgaaaattggttacaagtttcaaaatgctcacgcccgttttccatgttctaatgtgctattgcgatattataatattctttgtggcatggggcggagccaatggaaagagtaagtgtaacttttatttttatttcaatttttttctttattatgtttattttctgttcctatacaccaattttcataatagtctattttttttactttttttgttcagtttggtcgcagttcggttttccaaaaccaccactgtaaattgggaatcttttggactgtcaatagaacccaatggtcactgtgacaacttttttattgctggattttgccggaaacattttgaagatattcatcctaggctgtcaaagaaac

SEQ ID NO: 127188 - DNA, 673 bp, Zea Mays
ggaagcttgaattgggggaaattggaaattgggactcactgggggatgatagctaacgattcttcgtgtctgggttcgcgataatctaacgcagataggggagggctcaatttataggcatcgcaagcggtggccgggaattttacgatggacgcgcggcggccggaggtggagaagatactgacgcacgtgaattcgtggcatctaccgtggcagttactccgacgagccacgaagaggcacaagggttcacggctatgcagtggaggggctgagccacacggcgcaaggtcgggaggcggctgtcgccggcgagcatatccaaatccgccgtggtgagtgcggtacggcggccggaattgtttactgcccggagttatccatggcgacgatattttcgtgaccccgcagcgctatccaacacccaggcactaatctcgacgccggcgacacgaatcacggcggtgagagactgtcgcgctggcgttctgatcttcttcagtactgtacaatggcaaaccccattcagacagcctgtcagccaaacttggagcatcattttctcttaatttctaatgtcaacacaagtcaagctctgcagcaaaagtgtagagcaatatgccctctacaactttgtaatattatgatgccacaaaaccccattggatcatgc

SEQ ID NO: 127189 - DNA, 464 bp, Zea Mays
gttgaggatttcacgggcaaccgttccaacatggggctaaggcccaacatatggagccatggccagaccaggatcatctcctaggctggatcatcgtctccatcaagccccataaagggaggaatcgacaacttcatttataggtatggatcttgtaaataggactcagacctccttgtgactcaatagatcctcggacaaaggtacctagagggaacataaagcccctgagaagaaggcactctctggttatagcaccaatcctccaaaatggctctaggcatggaaaataccatccagaccttaggctaggagaggtctgatgtttccacatatccagacaagggcagccagagcctagacccccctcatgtgtggtctgggcccatggtgagagaaggcctaggaataccatgtcgttgcttattctcgagtctgccacttatccaggcaggggtccaatg

SEQ ID NO: 127190 - DNA, 757 bp, Zea Mays
ctcttttctaaacaccaatcagtgttcacaaaatgagcaacaacactgatgtaatcctcttttgcctaccggagcaccagatccaccgactgtgtggttgagagatgagaccggaaggggacgtcggtaccggaagacgaggggagcagagacgcgacgatggagatggagcagagaccggaagactacgggagccgagagggagacgggggtggatgtgggtgaaatacctgagaggctgagacacggcgagcccgtggagcagcgagccagcgacacggcgtcggcgatggaacacagaccggaagacgaggggagccgggaccgggagggagacgaggtgaaatacctgaggcccgtggaggcggaggcgcggagcacagacgcggcgatggagcagagactggaagccgaggggaaccgggagccgagagggagacaaggtggatgtgggtgaaatacctgagacacggcgagcccgtggagcagcgagccagcgacacgacgtcggcgatggaacacagaccggaagacgaggggagccgggaccgggagggagacgaggtgaaatacctgaggcccgtggaggcggagcacagacgcggcgatggagcagagactggaggccgagctgccgaggggatccgggagcgggagggagacacgccggcgccgatggagcagagaccaggcggcggcgatggagcagagaccaggcggcggcgatgtactctaggtctagggttttctagaatcg

SEQ ID NO: 127191 - DNA, 449 bp, Zea Mays
atatattcagtattttttcccgaagtaggagcggcagctttttcaggcaaaatttgtcctatagcttcttcccccgctgcctttactccaatttccgaggatttctctttggagggctctgaaggcctagcttcggcgtcggcccggctcactgttgcttcggcttcggtcagctttgtctcggtttcaacttgtgttttcgaagccttggcaatttttcctggagtagagcttgaagtttttatcgtctccagcacatctagtacagtggccatcctttttctcttgggggttgctgccagatctttttgtgtcttcagcacctccactcctaccgaagggcttagaacttctgatgttttcatctcttcggttctcggttcttcaattttgtcaaccttcggcattgtagccggttcttcaaccctctacgtaagagcaggtccttt

SEQ ID NO: 127192 - DNA, 1305 bp, Zea Mays
tttggtccaagaatgaattccacaactaaatttgaattcaaattcgaaatctaaaatttgaaaggaaaatgaaaaggaaaaagaagataaaataaaaaaagagaaacttcgcccaggcccaaacctctccgtggcccatcacattctctccaagtagcccatcagcgcccgaacgccccgataggtggggccgcttggtcagcgggccactcctccgctctcgctgacaccttggctcgtttaccccttccctccaggcgctcggcccagcaaaccgtgtcgtgggtgaaacactgacacacgagcccgttctgtcatccactgaaccgcgcagccactccaccagtcgttgtatccgggacccactgtcagcctccacattcttcagctccgcccacatgccctggaattcggctgacgcaacagctccgccgcgaaattcgcgggcgtgggctgaccgggccgacctcccggactaggtacaaagggagacctgtgcgctcctttctccttctccctcctttatcctgaatatctcgcctaccacgattttcacaggagtaactcactgccgctgtggttccgcatcaacatcatcggtgtggtcgcggtagttggccagggtgtccctgcacagtctctggtgtgcgtgcgaggccctatttggcgtgatcggagctctgtgcgccgggaattgctcgccggaggggcaaagtcgctgcgcgccatggtcagaacactgattggcgaaatcgtcggtgagtatcccttcaaatacttccctttagttggtatatcatgtagcacccatttaatttaagttcgaactacattaatatcatatcatcgcgggccggtaatggcgtcgcggcggcacacgggtttcggtcgttcgccaccggtgagagagagtgagttggggaagacaagtgcagaccattgatctagatgcagacggttaatattagatcataagaataccccttcgcacgatcggatctgggcgttgtgatgggatcggtgcaattacggcaatagattagatcagcaccatcggtttctgatccggtggttatcgtcgtgtaccggttgaaggtcaacttagatctaatcgtgagacctcatcacagatcggacggtcaagatcggcctgtaccgattcggctagagatttttgcttaagagaccctaacaagttgagaaaacaacctgcggtccagtgcatagtgctcagtccaggaaaatagaaaccctaaacccagctagagtcttgggaattcttgcacatagacccctgcctttctc

SEQ ID NO: 127193 - DNA, 312 bp, Zea Mays
agttgaagaggctccttcgccaaattcaggcaccgcagccggttcaatataacgcggctggtgggtcagaaccttcacctttttgctcttcggctcagatggggtggctgaagcggcaattttctctttttccgctgctacgtagcgggtagtggtaatcagggtatacgaagccaatcgcatcaaataccatgttcaatctttttttgcctcgacccccaaaagctgcggacaaagcattatcttcggccttggagtatgccccgagtagctcatcactggtagcttcaatacatttcagccagtcatcat

SEQ ID NO: 127194 - DNA, 331 bp, Zea Mays
cagaacaccgagaggctcgaggatcttgactctgcaactgcaaacaggaatgccgggcgtcaggtcagagtccccctcgccggaggtaagccgcgtccggatggccctacccactgcttccgccaagatagccagtgccagggcgaaggtcggtgagagagccaagacgccggccaactcgaaggcgaagggacgatcggatgctcaagagaagcggggcaggaatggaaggctcgtcccgtcacttgggtgcatgagctcgcctcctctggtgccaattggcccggactcggagaagaggaggtgttcctggatcactgcaaactcgggt

SEQ ID NO: 127195 - DNA, 420 bp, Zea Mays
cgcgtgagagcgatatgtacgctggggagggtagcgaataatcagaactcatcttcctctccaagacattgtgctctctgcttcctgccttcttcctccttactctgaatctactctgagtattgtatccagtatatgtgtgagtgtaacatcctcttcccaccaaatgtccaaatcaaacaagatgaccatcatgcatcacagcaagcactgcaattctgttgagcaaacccaatcatacaatgtatttgtgcatctctcttatgtgcacattttcaatatgtggaatccataagagccaaaaaggaacaagttgcacaccgatgtatctaattatgaattcaggacacccaccccttgtatgccaaagaagaaagtaatcatagcttacaatacagtgaatagggtctttctaaaatt

SEQ ID NO: 127196 - DNA, 368 bp, Zea Mays
cgggcacccttctacgcgttgggtttatcaagtggtatcaaatttcaggttgctcggtgagagaactcaatcttccttgctttatttacctacagtccaattttgcccaaagatatatttagatcagaaattcacctaaaaacagtttgagcctttgctttactacttagttttcgacttgttgaattaactgttgctgcatttgggtcgagttgctggtctaaagttttcttaccgctagagtttcgagttcgcgccaccttgtttcaatcaccagtttagacctcttgctgcaagtcaaccaaaaagaagagaaagcaaaaggcgagtgcctaaaaaaagccacactaatcagcaaaacaaaaaaa

SEQ ID NO: 127197 - DNA, 474 bp, Zea Mays
tgccctactaacggagcaatcggcttaagtcggcaacgacttaaaacggtgcaacatgctcgcacttacttaactcggggtgaccactatgccctgctaacggagcaatcggcttaagtcggcgacgacttaagacggtgccacatgctcgcgcttacttaactcggggtgaccactatgccctgctaacggagcaatcgacttaagtcggcaacgacttaagacggtgcaacatgctcgcgcttacttaactcggggtgaccactatgccctgctaacggagcaatcggcttaagtcggcaacgacttaagacggtgcaacatgctcgcgcttacttaactcggggtgaccactatgccctatttacaaaagcaatcgatttaagtcagcaacgacttaaggcgatttcgcatgcttacgaatactcatataggggtgacttctatatcccgtaaacaagtttcaaaaccatc

SEQ ID NO: 127198 - DNA, 334 bp, Zea Mays
cacgggtgctagagttgatgccttcatagagagttcatttactggtatgttgttggcgcaaagaacatgttgcagctctaaggagtcgaattccttctctagcttcctcacatgaatgaccacctttgcagttacaacaagatagaaaaacagagtctcacctggctccggagcagctccctagccaccgacaacgacccactaggaatgacccatgaggagatgtaagaacacaagaacacacaagggtttatagtggttcaggccgccggagcgcaacaccctacatccacttgtgagttgtattctgtgtgcttgagagcttgagcttcat

SEQ ID NO: 127199 - DNA, 498 bp, Zea Mays
tttcaattagctcagtcgaaggtgccttcggcattgcagacgactcttcaatcttctgcgtgggaggagcagtttctttcggttcagcagctgaagaagcttccccgccaaactcaggtaccacggccggttcaatataacgtggccggtgggtaagaactttcaattttttgctcttcggcgcaggctcatctggagtggccgaagcagcagttttggccgaagcagcagttttcctcttctttccccgtcctcgcagcgggtagcagtagtcggggtaaacaaaaccaatggcatcaaaaactctgttcaatctctttttttctcggcctccgaaggatgtggataatgcattatcttctgctttggaatatgacccaagcagttcatcacttgtagcttcgatacaagcggccatactctgaacgctatatgttcttgaatcaagtctcttgtaccaatgaagaagcatacagtaccaaaggccttctggtatgc

SEQ ID NO: 127200 - DNA, 511 bp, Zea Mays
tgtctctctgagttggcaggaaagcttgggccattgtggtctcaacttggtgttaatgaagcgtgctagagttgtcctctgtacacgtccaagatctaaacatgaaggttgattccattgggaacttgatgagatacattgagttttcgatcgctctttcaatgaaaggctcctacctagcacgttagttgtcagtgtttgatgacaatcaatctatttagttacctagagtatgaattggtggatttcgacactgaccaaactcgacgttgaacacaaagataatgatttataccggtttatgtagctaaacatcataataccctatgttgtcttgcattaggttgcatgttctttatgatttaataaatggactaccctgctttttaccacctccttaccgaatagtctggcatttccttattattaaagcagcaaggaaacgtggccagagagcctatccacgtcggccgaattttcttgaccgttcgatcgttgatcaacgattcct

SEQ ID NO: 127201 - DNA, 367 bp, Zea Mays
ccaatgcgcaattagttttgactggggctggacagcgagttaattcccgtgaatctgaggagctctttaagaaattgacacgacccaaggggtaagatggattctgaactgcccgatctaaaccaacggcctagattatatccccacaaatccaaacaggtacgcgatggtaccctcggatcaaaatcccatggccgaatcttacgttcctaacattaaatctcgcccgtacacacgacgatcaatggcccacgttcacccagcgaactggtacgcgagtcttttaatcgcgaccgtagatcccacaatcgacgatccacggtacagcgaatccaaggggtgctcttggatcacatcttaaccgtcc

SEQ ID NO: 127202 - DNA, 391 bp, Zea Mays
accgctcgacgtgccgctcgtgcccgaccacctcgtgcaactctacggtatgctcgagttctgaggtgtgacgtgagtgcatgaactatttattgttatcgtgcgaattctgctctgtcgttggtgttgcgctatgtttgctgtatgtatcctgtgttgtgctgatgtatcatccgtgtatgtttgtcatgtgaacaacgtactgtaagtgtggtgttaatgccgtttgtggtcgcataaagaatgtatgatatgttatgtttatgtatgtaactatgtataaataaggcatgcacacctaaagatatgcagaagattcacactagggttgttcggttgtgtctagttgttaggtgttggcactccttgtgccctttcttctccaccttcc

SEQ ID NO: 127203 - DNA, 520 bp, Zea Mays
tcccactcgaggatggcctcaagcgagtcgtggttgactgtccagccagggcttggtctcgggtgagtcgtgactgtgtctcccattgggggttggcttctagcgagtcgtgactgcctgtctcgctagaggatggcctcgggctagtcgtggctgcctgtcctgcctgggcttagcctagggcgagtcgtgactgcctctctgacacgagggttgcctcgggcggactgcctattctgtgttggcttggcctcgggcgagttgtaactttgtatcccactggggttggccttgggcgagtcataactgtgtatcccacccggtgggttggcctcgggcgagtagtgactgtctgtcccgcccgtggatgacatcaagtgagtcgttactgcctgtcccacctgggcttggcctcggacgagtcgtgactgtgtctcccgcccgagattagcctaggaagagtcgtggctgcctgtcccattttggctttgcctcgggcgagtcataactgcccctccca
